United States Patent Application Publication US 2024/0390496 A1 - sequence listing, part 2

SEQ ID NO: 2054 - DNA, 3240 bp, Artificial Sequence
  Synthetic Polynucleotide
atggccttaccagtgaccgccttgctcctgccgctggccttgctgctccacgccgccaggccggacatccagatgacacagagccctagcagcctgtctgccagcgtgggagacagagtgaccatcacatgcaaggccagcgaccacatcaacaactggctggcctggtatcagcagaagcctggacaggcccctaagctgctgatctacggcgctaccacactggaaacaggcgtgcccagcagattttctggcagcggctctggcaccgactacaccctgacaatatccagcctccagcctgaggacttcgccacctactactgtcagcagagctggaacaccccttggacattcggccagggcaccaagctggaaatcaagagactcgagggacagcctaaggccaatcctaccgtgacactgttccctccaagcagcgaagaactccaggccaacaaggccacacttgtgtgcctgatctccgacttctaccctggggctgtgacagtggcttggaaggccgatggatctcctgtgaaagccggcgtggaaaccaccaagccatccaagcagagcaacaacaaatacgccgccagctcctacctgagcctgacacctgagcagtggaagtcccacagatcctacagctgccaagtgacccacgaaggcagcaccgtggaaaagacagtggcccctacagagtgcagcggatcccagagcttcggcctgctggaccccaagctgagctacctgctggatggcatcctgttcatctacggcgtgatcctgaccgccctgttcctgagcactagtagagtgaagttcagcagaagcgccgacgcccctgcctaccagcagggacagaaccaactgtacaacgagctgaacctgggcagacgggaagagtacgacgtgctggacaagcggagaggcagggaccctgagatgggcggaaagccccagcggagaaagaacccccaggaaggactgtataacgaactccagaaagacaagatggccgaagcctacagcgagatcggcatgaagggcgagcggagaagaggcaagggccacgatggcctgtaccagggcctgagcaccgccaccaaggacacctatgacgccctgcacatgcaggccctgcctccaagaagggccaagcgatctggatctggagcaacaaacttctcactactcaaacaagcaggtgacgtggaggagaatcccgggcctatggactggatttggcgcatccttttccttgtcggcgctgctaccggcgcgcattccttcgaacaagttcagcttcaacagcctggcgctgagctggtcaaacctggcgcttctgtgaagatgagctgcaaagccagcggctacgccttcagcagctactggatcaactggatgaagcagaaacccggccagggactcgaatggatcggccaaatctatcccggcgacggcgacaccaactacaacggcaagttcaagggcagagccacactgaccgccgatacctctagcagcacagcctacatgcagctgagcagcctgaccagcgaagatagcgccgtgtacttctgtgcccggtccatcacaacagtcgtgggctgcgctatggactattggggccagggaacaagcgtgaccgtgtctagtacgcgtgcctctacaaagggaccctccgtgtttcctctggctcccagcagcaagtctacaagcggaggaacagccgctctgggctgcctggtcaaggattactttcccgagcctgtgaccgtgtcctggaatagcggagcactgacaagcggcgtgcacacctttccagccgtgctgcaaagcagcggcctgtactctctgagcagcgtggtcacagtgcctagctctagcctgggcacccagacctacatctgcaatgtgaaccacaagcctagcaacaccaaggtggacaagagagtggaacccaagagctgtggtacccagagttttgggttgttggaccctaaattgagctatctgttggacggaatcctgttcatttacggagtgatcctgaccgcattgttcctgagctctagacgggttaagttttccagatccgcagacgcacccgcttaccaacaagggcagaaccaactctacaatgaacttaatttggggcggagggaagagtacgacgttctggacaaaaggaggggacgagatcccgagatgggcggaaagcctcagcgaaggaagaatccgcaagaggggctttataacgaactccagaaagataaaatggcagaagcctatagtgagattgggatgaagggagaaaggaggaggggtaaaggtcacgatgggttgtaccaaggattgagcacagccactaaagatacctatgatgcgctccacatgcaggccctgccgccaagacgcgccaagagaagcggatctggcgtgaagcagaccctgaatttcgacctgctgaagctggctggcgacgtggaatccaacccaggccctggccatatgtccgactccaaggaggtccctagccttccatttttgcgacacttgctcgaagagttggacagccatgaggacagcttgctgctgtttctgtgtcacgacgcggccccgggctgcacgacggtcacgcaagctttgtgctcgcttagccaacagcgcaagctgaccctcgcggctctggtcgagatgctctacgtgctgcagcgtatggatcttctcaagagccgcttcgggctcagcaaggagggggccgagcaattgctgggcacaagctttctcacgcgctaccgcaagctcatggtttgcgtgggtgaggagctcgactcgagcgagctacgcgctctacgcttgttcgcgtgcaacctgaatccgagcctgagcacggcgctttctgagagcagccgctttgtcgagcttgtactcgcgcttgaaaacgtaggactcgtctcgccatcgagtgtttccgtgcttgcggacatgttgcgcactcttcggcgcctcgatttgtgccagcagcttgttgagtacgaacaacaagagcaagccaggtaccgttactgttacgcggcctcgccctcattgccagttcgtacgttacgtcgggggcacggcgcgagtgaacacgagcagctgtgcatgcccgtgcaagaatcctctgacagccccgagctgctgcgcacgcccgtacaagaatcctccagcgacagccccgagcaaacgact

SEQ ID NO: 2055 - DNA, 3117 bp, Artificial Sequence
  Synthetic Polynucleotide
atggccttaccagtgaccgccttgctcctgccgctggccttgctgctccacgccgccaggccggacatccagatgacacagagccctagcagcctgtctgccagcgtgggagacagagtgaccatcacatgcaaggccagcgaccacatcaacaactggctggcctggtatcagcagaagcctggacaggcccctaagctgctgatctacggcgctaccacactggaaacaggcgtgcccagcagattttctggcagcggctctggcaccgactacaccctgacaatatccagcctccagcctgaggacttcgccacctactactgtcagcagagctggaacaccccttggacattcggccagggcaccaagctggaaatcaagagactcgagggacagcctaaggccaatcctaccgtgacactgttccctccaagcagcgaagaactccaggccaacaaggccacacttgtgtgcctgatctccgacttctaccctggggctgtgacagtggcttggaaggccgatggatctcctgtgaaagccggcgtggaaaccaccaagccatccaagcagagcaacaacaaatacgccgccagctcctacctgagcctgacacctgagcagtggaagtcccacagatcctacagctgccaagtgacccacgaaggcagcaccgtggaaaagacagtggcccctacagagtgcagcggatcccagagcttcggcctgctggaccccaagctgagctacctgctggatggcatcctgttcatctacggcgtgatcctgaccgccctgttcctgagcactagtagagtgaagttcagcagaagcgccgacgcccctgcctaccagcagggacagaaccaactgtacaacgagctgaacctgggcagacgggaagagtacgacgtgctggacaagcggagaggcagggaccctgagatgggcggaaagccccagcggagaaagaacccccaggaaggactgtataacgaactccagaaagacaagatggccgaagcctacagcgagatcggcatgaagggcgagcggagaagaggcaagggccacgatggcctgtaccagggcctgagcaccgccaccaaggacacctatgacgccctgcacatgcaggccctgcctccaagaagggccaagcgatctggatctggagcaacaaacttctcactactcaaacaagcaggtgacgtggaggagaatcccgggcctatggactggatttggcgcatccttttccttgtcggcgctgctaccggcgcgcattccttcgaacaagttcagcttcaacagcctggcgctgagctggtcaaacctggcgcttctgtgaagatgagctgcaaagccagcggctacgccttcagcagctactggatcaactggatgaagcagaaacccggccagggactcgaatggatcggccaaatctatcccggcgacggcgacaccaactacaacggcaagttcaagggcagagccacactgaccgccgatacctctagcagcacagcctacatgcagctgagcagcctgaccagcgaagatagcgccgtgtacttctgtgcccggtccatcacaacagtcgtgggctgcgctatggactattggggccagggaacaagcgtgaccgtgtctagtacgcgtgcctctacaaagggaccctccgtgtttcctctggctcccagcagcaagtctacaagcggaggaacagccgctctgggctgcctggtcaaggattactttcccgagcctgtgaccgtgtcctggaatagcggagcactgacaagcggcgtgcacacctttccagccgtgctgcaaagcagcggcctgtactctctgagcagcgtggtcacagtgcctagctctagcctgggcacccagacctacatctgcaatgtgaaccacaagcctagcaacaccaaggtggacaagagagtggaacccaagagctgtggtacccagagttttgggttgttggaccctaaattgagctatctgttggacggaatcctgttcatttacggagtgatcctgaccgcattgttcctgagctctagacgggttaagttttccagatccgcagacgcacccgcttaccaacaagggcagaaccaactctacaatgaacttaatttggggcggagggaagagtacgacgttctggacaaaaggaggggacgagatcccgagatgggcggaaagcctcagcgaaggaagaatccgcaagaggggctttataacgaactccagaaagataaaatggcagaagcctatagtgagattgggatgaagggagaaaggaggaggggtaaaggtcacgatgggttgtaccaaggattgagcacagccactaaagatacctatgatgcgctccacatgcaggccctgccgccaagacgcgccaagagaagcggatctggcgtgaagcagaccctgaatttcgacctgctgaagctggctggcgacgtggaatccaacccaggccctggccatatgaccgagtacaagcccacggtgcgcctcgccacccgcgacgacgtccccagggccgtacgcaccctcgccgccgcgttcgccgactaccccgccacgcgccacaccgtcgatccggaccgccacatcgagcgggtcaccgagctgcaagaactcttcctcacgcgcgtcgggctcgacatcggcaaggtgtgggtcgcggacgacggcgccgcggtggcggtctggaccacgccggagagcgtcgaagcgggggcggtgttcgccgagatcggcccgcgcatggccgagttgagcggttcccggctggccgcgcagcaacagatggaaggcctcctggcgccgcaccggcccaaggagcccgcgtggttcctggccaccgtcggcgtctcgcccgaccaccagggcaagggtctgggcagcgccgtcgtgctccccggagtggaggcggccgagcgcgccggggtgcccgccttcctggagacctccgcgccccgcaacctccccttctacgagcggctcggcttcaccgtcaccgccgacgtcgaggtgcccgaaggaccgcgcacctggtgcatgacccgcaagcccggtgcctga

SEQ ID NO: 2056 - DNA, 3528 bp, Artificial Sequence
  Synthetic Polynucleotide
atggccttaccagtgaccgccttgctcctgccgctggccttgctgctccacgccgccaggccggaagtgcagctggttgaatctggcggaggactggttcaggctggcggatctctgagactgtcttgtgccgccagcggcagaacctttagcatgggctggtttagacaggcccctggcaaagagagagagttcgtcgccgccatcacatactctggcggcagcccttactacgccgactctgtgaagggcagattcaccatcagccgggacaacgccaagaacaccgtgtacctccagatgaacagcctgaagcctgaggacaccgccgtgtactactgcgccgccaatccaacatacggcagcgactggaacgccgagaattggggccagggaacccaagtgacagtgtctagcggtaccggcggaggcggatctggcggcggaggtagcggtggcggaggatctgaattcgacatccagatgacacagagccctagcagcctgtctgccagcgtgggagacagagtgaccatcacatgcaaggccagcgaccacatcaacaactggctggcctggtatcagcagaagcctggacaggcccctaagctgctgatctacggcgctaccacactggaaacaggcgtgcccagcagattttctggcagcggctctggcaccgactacaccctgacaatatccagcctccagcctgaggacttcgccacctactactgtcagcagagctggaacaccccttggacattcggccagggcaccaagctggaaatcaagagactcgagggacagcctaaggccaatcctaccgtgacactgttccctccaagcagcgaagaactccaggccaacaaggccacacttgtgtgcctgatctccgacttctaccctggggctgtgacagtggcttggaaggccgatggatctcctgtgaaagccggcgtggaaaccaccaagccatccaagcagagcaacaacaaatacgccgccagctcctacctgagcctgacacctgagcagtggaagtcccacagatcctacagctgccaagtgacccacgaaggcagcaccgtggaaaagacagtggcccctacagagtgcagcggatcccagagcttcggcctgctggaccccaagctgagctacctgctggatggcatcctgttcatctacggcgtgatcctgaccgccctgttcctgagcactagtagagtgaagttcagcagaagcgccgacgcccctgcctaccagcagggacagaaccaactgtacaacgagctgaacctgggcagacgggaagagtacgacgtgctggacaagcggagaggcagggaccctgagatgggcggaaagccccagcggagaaagaacccccaggaaggactgtataacgaactccagaaagacaagatggccgaagcctacagcgagatcggcatgaagggcgagcggagaagaggcaagggccacgatggcctgtaccagggcctgagcaccgccaccaaggacacctatgacgccctgcacatgcaggccctgcctccaagaagggccaagcgatctggatctggagcaacaaacttctcactactcaaacaagcaggtgacgtggaggagaatcccgggcctatggactggatttggcgcatccttttccttgtcggcgctgctaccggcgcgcattccttcgaacaagttcagcttcaacagcctggcgctgagctggtcaaacctggcgcttctgtgaagatgagctgcaaagccagcggctacgccttcagcagctactggatcaactggatgaagcagaaacccggccagggactcgaatggatcggccaaatctatcccggcgacggcgacaccaactacaacggcaagttcaagggcagagccacactgaccgccgatacctctagcagcacagcctacatgcagctgagcagcctgaccagcgaagatagcgccgtgtacttctgtgcccggtccatcacaacagtcgtgggctgcgctatggactattggggccagggaacaagcgtgaccgtgtctagtacgcgtgcctctacaaagggaccctccgtgtttcctctggctcccagcagcaagtctacaagcggaggaacagccgctctgggctgcctggtcaaggattactttcccgagcctgtgaccgtgtcctggaatagcggagcactgacaagcggcgtgcacacctttccagccgtgctgcaaagcagcggcctgtactctctgagcagcgtggtcacagtgcctagctctagcctgggcacccagacctacatctgcaatgtgaaccacaagcctagcaacaccaaggtggacaagagagtggaacccaagagctgtggtacccagagttttgggttgttggaccctaaattgagctatctgttggacggaatcctgttcatttacggagtgatcctgaccgcattgttcctgagctctagacgggttaagttttccagatccgcagacgcacccgcttaccaacaagggcagaaccaactctacaatgaacttaatttggggcggagggaagagtacgacgttctggacaaaaggaggggacgagatcccgagatgggcggaaagcctcagcgaaggaagaatccgcaagaggggctttataacgaactccagaaagataaaatggcagaagcctatagtgagattgggatgaagggagaaaggaggaggggtaaaggtcacgatgggttgtaccaaggattgagcacagccactaaagatacctatgatgcgctccacatgcaggccctgccgccaagacgcgccaagagaagcggatctggcgtgaagcagaccctgaatttcgacctgctgaagctggctggcgacgtggaatccaacccaggccctggccatatgaccgagtacaagcccacggtgcgcctcgccacccgcgacgacgtccccagggccgtacgcaccctcgccgccgcgttcgccgactaccccgccacgcgccacaccgtcgatccggaccgccacatcgagcgggtcaccgagctgcaagaactcttcctcacgcgcgtcgggctcgacatcggcaaggtgtgggtcgcggacgacggcgccgcggtggcggtctggaccacgccggagagcgtcgaagcgggggcggtgttcgccgagatcggcccgcgcatggccgagttgagcggttcccggctggccgcgcagcaacagatggaaggcctcctggcgccgcaccggcccaaggagcccgcgtggttcctggccaccgtcggcgtctcgcccgaccaccagggcaagggtctgggcagcgccgtcgtgctccccggagtggaggcggccgagcgcgccggggtgcccgccttcctggagacctccgcgccccgcaacctccccttctacgagcggctcggcttcaccgtcaccgccgacgtcgaggtgcccgaaggaccgcgcacctggtgcatgacccgcaagcccggtgcctga

SEQ ID NO: 2057 - DNA, 3939 bp, Artificial Sequence
  Synthetic Polynucleotide
atggccttaccagtgaccgccttgctcctgccgctggccttgctgctccacgccgccaggccggaagtgcagctggttgaatctggcggaggactggttcaggctggcggatctctgagactgtcttgtgccgccagcggcagaacctttagcatgggctggtttagacaggcccctggcaaagagagagagttcgtcgccgccatcacatactctggcggcagcccttactacgccgactctgtgaagggcagattcaccatcagccgggacaacgccaagaacaccgtgtacctccagatgaacagcctgaagcctgaggacaccgccgtgtactactgcgccgccaatccaacatacggcagcgactggaacgccgagaattggggccagggaacccaagtgacagtgtctagcggtaccggcggaggcggatctggcggcggaggtagcggtggcggaggatctgaattcgacatccagatgacacagagccctagcagcctgtctgccagcgtgggagacagagtgaccatcacatgcaaggccagcgaccacatcaacaactggctggcctggtatcagcagaagcctggacaggcccctaagctgctgatctacggcgctaccacactggaaacaggcgtgcccagcagattttctggcagcggctctggcaccgactacaccctgacaatatccagcctccagcctgaggacttcgccacctactactgtcagcagagctggaacaccccttggacattcggccagggcaccaagctggaaatcaagagactcgagggacagcctaaggccaatcctaccgtgacactgttccctccaagcagcgaagaactccaggccaacaaggccacacttgtgtgcctgatctccgacttctaccctggggctgtgacagtggcttggaaggccgatggatctcctgtgaaagccggcgtggaaaccaccaagccatccaagcagagcaacaacaaatacgccgccagctcctacctgagcctgacacctgagcagtggaagtcccacagatcctacagctgccaagtgacccacgaaggcagcaccgtggaaaagacagtggcccctacagagtgcagcggatcccagagcttcggcctgctggaccccaagctgagctacctgctggatggcatcctgttcatctacggcgtgatcctgaccgccctgttcctgagcactagtagagtgaagttcagcagaagcgccgacgcccctgcctaccagcagggacagaaccaactgtacaacgagctgaacctgggcagacgggaagagtacgacgtgctggacaagcggagaggcagggaccctgagatgggcggaaagccccagcggagaaagaacccccaggaaggactgtataacgaactccagaaagacaagatggccgaagcctacagcgagatcggcatgaagggcgagcggagaagaggcaagggccacgatggcctgtaccagggcctgagcaccgccaccaaggacacctatgacgccctgcacatgcaggccctgcctccaagaagggccaagcgatctggatctggagcaacaaacttctcactactcaaacaagcaggtgacgtggaggagaatcccgggcctatggactggatttggcgcatccttttccttgtcggcgctgctaccggcgcgcattccgggcccgaagtgcaactggttgaatccggtggcggcctggtgcaagcaggcggatctctcagacttagctgtgccgcctccggcagaaccttcacaatgggatggtttaggcaggctccagggaaagagagagagttcgtcgccgccatctctctgtctcccacactggcctactacgccgactctgtgaaaggccggttcaccatctccagagataatgccaagaacaccgtggtgctgcaaatgaactctctgaaacccgaggatacagccctgtactattgtgccgctgaccggaagtccgtgatgagcatcagacccgattactggggacagggcacacaagtcacagtgtcctctggatccggcggcggaggatctggcggaggcggatctgggggcggaggctctttcgaacaagttcagcttcaacagcctggcgctgagctggtcaaacctggcgcttctgtgaagatgagctgcaaagccagcggctacgccttcagcagctactggatcaactggatgaagcagaaacccggccagggactcgaatggatcggccaaatctatcccggcgacggcgacaccaactacaacggcaagttcaagggcagagccacactgaccgccgatacctctagcagcacagcctacatgcagctgagcagcctgaccagcgaagatagcgccgtgtacttctgtgcccggtccatcacaacagtcgtgggctgcgctatggactattggggccagggaacaagcgtgaccgtgtctagtacgcgtgcctctacaaagggaccctccgtgtttcctctggctcccagcagcaagtctacaagcggaggaacagccgctctgggctgcctggtcaaggattactttcccgagcctgtgaccgtgtcctggaatagcggagcactgacaagcggcgtgcacacctttccagccgtgctgcaaagcagcggcctgtactctctgagcagcgtggtcacagtgcctagctctagcctgggcacccagacctacatctgcaatgtgaaccacaagcctagcaacaccaaggtggacaagagagtggaacccaagagctgtggtacccagagttttgggttgttggaccctaaattgagctatctgttggacggaatcctgttcatttacggagtgatcctgaccgcattgttcctgagctctagacgggttaagttttccagatccgcagacgcacccgcttaccaacaagggcagaaccaactctacaatgaacttaatttggggcggagggaagagtacgacgttctggacaaaaggaggggacgagatcccgagatgggcggaaagcctcagcgaaggaagaatccgcaagaggggctttataacgaactccagaaagataaaatggcagaagcctatagtgagattgggatgaagggagaaaggaggaggggtaaaggtcacgatgggttgtaccaaggattgagcacagccactaaagatacctatgatgcgctccacatgcaggccctgccgccaagacgcgccaagagaagcggatctggcgtgaagcagaccctgaatttcgacctgctgaagctggctggcgacgtggaatccaacccaggccctggccatatgaccgagtacaagcccacggtgcgcctcgccacccgcgacgacgtccccagggccgtacgcaccctcgccgccgcgttcgccgactaccccgccacgcgccacaccgtcgatccggaccgccacatcgagcgggtcaccgagctgcaagaactcttcctcacgcgcgtcgggctcgacatcggcaaggtgtgggtcgcggacgacggcgccgcggtggcggtctggaccacgccggagagcgtcgaagcgggggcggtgttcgccgagatcggcccgcgcatggccgagttgagcggttcccggctggccgcgcagcaacagatggaaggcctcctggcgccgcaccggcccaaggagcccgcgtggttcctggccaccgtcggcgtctcgcccgaccaccagggcaagggtctgggcagcgccgtcgtgctccccggagtggaggcggccgagcgcgccggggtgcccgccttcctggagacctccgcgccccgcaacctccccttctacgagcggctcggcttcaccgtcaccgccgacgtcgaggtgcccgaaggaccgcgcacctggtgcatgacccgcaagcccggtgcctga

SEQ ID NO: 2058 - DNA, 3138 bp, Artificial Sequence
  Synthetic Polynucleotide
atggccttaccagtgaccgccttgctcctgccgctggccttgctgctccacgccgccaggccggaagtgcagctggttgaatctggcggaggactggttcaggctggcggatctctgagactgtcttgtgccgccagcggcagaacctttagcatgggctggtttagacaggcccctggcaaagagagagagttcgtcgccgccatcacatactctggcggcagcccttactacgccgactctgtgaagggcagattcaccatcagccgggacaacgccaagaacaccgtgtacctccagatgaacagcctgaagcctgaggacaccgccgtgtactactgcgccgccaatccaacatacggcagcgactggaacgccgagaattggggccagggaacccaagtgacagtgtctagcctcgagggacagcctaaggccaatcctaccgtgacactgttccctccaagcagcgaagaactccaggccaacaaggccacacttgtgtgcctgatctccgacttctaccctggggctgtgacagtggcttggaaggccgatggatctcctgtgaaagccggcgtggaaaccaccaagccatccaagcagagcaacaacaaatacgccgccagctcctacctgagcctgacacctgagcagtggaagtcccacagatcctacagctgccaagtgacccacgaaggcagcaccgtggaaaagacagtggcccctacagagtgcagcggatcccagagcttcggcctgctggaccccaagctgagctacctgctggatggcatcctgttcatctacggcgtgatcctgaccgccctgttcctgagcactagtagagtgaagttcagcagaagcgccgacgcccctgcctaccagcagggacagaaccaactgtacaacgagctgaacctgggcagacgggaagagtacgacgtgctggacaagcggagaggcagggaccctgagatgggcggaaagccccagcggagaaagaacccccaggaaggactgtataacgaactccagaaagacaagatggccgaagcctacagcgagatcggcatgaagggcgagcggagaagaggcaagggccacgatggcctgtaccagggcctgagcaccgccaccaaggacacctatgacgccctgcacatgcaggccctgcctccaagaagggccaagcgatctggatctggagcaacaaacttctcactactcaaacaagcaggtgacgtggaggagaatcccgggcctatggactggatttggcgcatccttttccttgtcggcgctgctaccggcgcgcattccgggcccgaagtgcaactggttgaatccggtggcggcctggtgcaagcaggcggatctctcagacttagctgtgccgcctccggcagaaccttcacaatgggatggtttaggcaggctccagggaaagagagagagttcgtcgccgccatctctctgtctcccacactggcctactacgccgactctgtgaaaggccggttcaccatctccagagataatgccaagaacaccgtggtgctgcaaatgaactctctgaaacccgaggatacagccctgtactattgtgccgctgaccggaagtccgtgatgagcatcagacccgattactggggacagggcacacaagtcacagtgtcctctacgcgtgcctctacaaagggaccctccgtgtttcctctggctcccagcagcaagtctacaagcggaggaacagccgctctgggctgcctggtcaaggattactttcccgagcctgtgaccgtgtcctggaatagcggagcactgacaagcggcgtgcacacctttccagccgtgctgcaaagcagcggcctgtactctctgagcagcgtggtcacagtgcctagctctagcctgggcacccagacctacatctgcaatgtgaaccacaagcctagcaacaccaaggtggacaagagagtggaacccaagagctgtggtacccagagttttgggttgttggaccctaaattgagctatctgttggacggaatcctgttcatttacggagtgatcctgaccgcattgttcctgagctctagacgggttaagttttccagatccgcagacgcacccgcttaccaacaagggcagaaccaactctacaatgaacttaatttggggcggagggaagagtacgacgttctggacaaaaggaggggacgagatcccgagatgggcggaaagcctcagcgaaggaagaatccgcaagaggggctttataacgaactccagaaagataaaatggcagaagcctatagtgagattgggatgaagggagaaaggaggaggggtaaaggtcacgatgggttgtaccaaggattgagcacagccactaaagatacctatgatgcgctccacatgcaggccctgccgccaagacgcgccaagagaagcggatctggcgtgaagcagaccctgaatttcgacctgctgaagctggctggcgacgtggaatccaacccaggccctggccatatgaccgagtacaagcccacggtgcgcctcgccacccgcgacgacgtccccagggccgtacgcaccctcgccgccgcgttcgccgactaccccgccacgcgccacaccgtcgatccggaccgccacatcgagcgggtcaccgagctgcaagaactcttcctcacgcgcgtcgggctcgacatcggcaaggtgtgggtcgcggacgacggcgccgcggtggcggtctggaccacgccggagagcgtcgaagcgggggcggtgttcgccgagatcggcccgcgcatggccgagttgagcggttcccggctggccgcgcagcaacagatggaaggcctcctggcgccgcaccggcccaaggagcccgcgtggttcctggccaccgtcggcgtctcgcccgaccaccagggcaagggtctgggcagcgccgtcgtgctccccggagtggaggcggccgagcgcgccggggtgcccgccttcctggagacctccgcgccccgcaacctccccttctacgagcggctcggcttcaccgtcaccgccgacgtcgaggtgcccgaaggaccgcgcacctggtgcatgacccgcaagcccggtgcctga

SEQ ID NO: 2059 - DNA, 3162 bp, Artificial Sequence
  Synthetic Polynucleotide
atggccttaccagtgaccgccttgctcctgccgctggccttgctgctccacgccgccaggccggacatccagatgacacagagccctagcagcctgtctgccagcgtgggagacagagtgaccatcacatgcaaggccagcgaccacatcaacaactggctggcctggtatcagcagaagcctggacaggcccctaagctgctgatctacggcgctaccacactggaaacaggcgtgcccagcagattttctggcagcggctctggcaccgactacaccctgacaatatccagcctccagcctgaggacttcgccacctactactgtcagcagagctggaacaccccttggacattcggccagggcaccaagctggaaatcaagagactcgaggacctgaagaacgtgttcccacctgaggtggccgtgttcgagcctagcgaggccgagatcagccacacccagaaagccaccctcgtgtgcctggctaccggcttctaccccgaccatgtggaactgtcttggtgggtcaacggcaaagaggtgcacagcggcgtgtctaccgacccccagccactgaaagaacagcccgccctgaacgacagccggtactgcctgagcagcagactgagagtgtccgccaccttctggcagaacccccggaaccacttcagatgccaggtgcagttctacggcctgagcgagaacgacgagtggacccaggacagagccaagcccgtgacccagatcgtgtctgccgaagcctggggcagagccgattgcggatcccagagcttcggcctgctggaccccaagctgagctacctgctggatggcatcctgttcatctacggcgtgatcctgaccgccctgttcctgagcactagtagagtgaagttcagcagaagcgccgacgcccctgcctaccagcagggacagaaccaactgtacaacgagctgaacctgggcagacgggaagagtacgacgtgctggacaagcggagaggcagggaccctgagatgggcggaaagccccagcggagaaagaacccccaggaaggactgtataacgaactccagaaagacaagatggccgaagcctacagcgagatcggcatgaagggcgagcggagaagaggcaagggccacgatggcctgtaccagggcctgagcaccgccaccaaggacacctatgacgccctgcacatgcaggccctgcctccaagaagggccaagcgatctggatctggagcaacaaacttctcactactcaaacaagcaggtgacgtggaggagaatcccgggcctatggactggatttggcgcatccttttccttgtcggcgctgctaccggcgcgcattccttcgaacaagttcagcttcaacagcctggcgctgagctggtcaaacctggcgcttctgtgaagatgagctgcaaagccagcggctacgccttcagcagctactggatcaactggatgaagcagaaacccggccagggactcgaatggatcggccaaatctatcccggcgacggcgacaccaactacaacggcaagttcaagggcagagccacactgaccgccgatacctctagcagcacagcctacatgcagctgagcagcctgaccagcgaagatagcgccgtgtacttctgtgcccggtccatcacaacagtcgtgggctgcgctatggactattggggccagggaacaagcgtgaccgtgtctagtacgcgtatccagaaccctgatcctgccgtgtaccagctgcgggatagcaagagcagcgacaagagcgtgtgtctgttcaccgacttcgacagccagaccaacgtgtcccagagcaaggactccgacgtgtacatcaccgataagaccgtgctggacatgcggagcatggacttcaagagcaactccgccgtggcctggtccaacaagtccgatttcgcctgcgccaacgccttcaacaacagcattatccccgaggacacattcttcccaagccccgagagcagctgcggtacccagagttttgggttgttggaccctaaattgagctatctgttggacggaatcctgttcatttacggagtgatcctgaccgcattgttcctgagctctagacgggttaagttttccagatccgcagacgcacccgcttaccaacaagggcagaaccaactctacaatgaacttaatttggggcggagggaagagtacgacgttctggacaaaaggaggggacgagatcccgagatgggcggaaagcctcagcgaaggaagaatccgcaagaggggctttataacgaactccagaaagataaaatggcagaagcctatagtgagattgggatgaagggagaaaggaggaggggtaaaggtcacgatgggttgtaccaaggattgagcacagccactaaagatacctatgatgcgctccacatgcaggccctgccgccaagacgcgccaagagaagcggatctggcgtgaagcagaccctgaatttcgacctgctgaagctggctggcgacgtggaatccaacccaggccctggccatatgaccgagtacaagcccacggtgcgcctcgccacccgcgacgacgtccccagggccgtacgcaccctcgccgccgcgttcgccgactaccccgccacgcgccacaccgtcgatccggaccgccacatcgagcgggtcaccgagctgcaagaactcttcctcacgcgcgtcgggctcgacatcggcaaggtgtgggtcgcggacgacggcgccgcggtggcggtctggaccacgccggagagcgtcgaagcgggggcggtgttcgccgagatcggcccgcgcatggccgagttgagcggttcccggctggccgcgcagcaacagatggaaggcctcctggcgccgcaccggcccaaggagcccgcgtggttcctggccaccgtcggcgtctcgcccgaccaccagggcaagggtctgggcagcgccgtcgtgctccccggagtggaggcggccgagcgcgccggggtgcccgccttcctggagacctccgcgccccgcaacctccccttctacgagcggctcggcttcaccgtcaccgccgacgtcgaggtgcccgaaggaccgcgcacctggtgcatgacccgcaagcccggtgcctga

SEQ ID NO: 2060 - DNA, 3573 bp, Artificial Sequence
  Synthetic Polynucleotide
atggccttaccagtgaccgccttgctcctgccgctggccttgctgctccacgccgccaggccggaagtgcagctggttgaatctggcggaggactggttcaggctggcggatctctgagactgtcttgtgccgccagcggcagaacctttagcatgggctggtttagacaggcccctggcaaagagagagagttcgtcgccgccatcacatactctggcggcagcccttactacgccgactctgtgaagggcagattcaccatcagccgggacaacgccaagaacaccgtgtacctccagatgaacagcctgaagcctgaggacaccgccgtgtactactgcgccgccaatccaacatacggcagcgactggaacgccgagaattggggccagggaacccaagtgacagtgtctagcggtaccggcggaggcggatctggcggcggaggtagcggtggcggaggatctgaattcgacatccagatgacacagagccctagcagcctgtctgccagcgtgggagacagagtgaccatcacatgcaaggccagcgaccacatcaacaactggctggcctggtatcagcagaagcctggacaggcccctaagctgctgatctacggcgctaccacactggaaacaggcgtgcccagcagattttctggcagcggctctggcaccgactacaccctgacaatatccagcctccagcctgaggacttcgccacctactactgtcagcagagctggaacaccccttggacattcggccagggcaccaagctggaaatcaagagactcgaggacctgaagaacgtgttcccacctgaggtggccgtgttcgagcctagcgaggccgagatcagccacacccagaaagccaccctcgtgtgcctggctaccggcttctaccccgaccatgtggaactgtcttggtgggtcaacggcaaagaggtgcacagcggcgtgtctaccgacccccagccactgaaagaacagcccgccctgaacgacagccggtactgcctgagcagcagactgagagtgtccgccaccttctggcagaacccccggaaccacttcagatgccaggtgcagttctacggcctgagcgagaacgacgagtggacccaggacagagccaagcccgtgacccagatcgtgtctgccgaagcctggggcagagccgattgcggatcccagagcttcggcctgctggaccccaagctgagctacctgctggatggcatcctgttcatctacggcgtgatcctgaccgccctgttcctgagcactagtagagtgaagttcagcagaagcgccgacgcccctgcctaccagcagggacagaaccaactgtacaacgagctgaacctgggcagacgggaagagtacgacgtgctggacaagcggagaggcagggaccctgagatgggcggaaagccccagcggagaaagaacccccaggaaggactgtataacgaactccagaaagacaagatggccgaagcctacagcgagatcggcatgaagggcgagcggagaagaggcaagggccacgatggcctgtaccagggcctgagcaccgccaccaaggacacctatgacgccctgcacatgcaggccctgcctccaagaagggccaagcgatctggatctggagcaacaaacttctcactactcaaacaagcaggtgacgtggaggagaatcccgggcctatggactggatttggcgcatccttttccttgtcggcgctgctaccggcgcgcattccttcgaacaagttcagcttcaacagcctggcgctgagctggtcaaacctggcgcttctgtgaagatgagctgcaaagccagcggctacgccttcagcagctactggatcaactggatgaagcagaaacccggccagggactcgaatggatcggccaaatctatcccggcgacggcgacaccaactacaacggcaagttcaagggcagagccacactgaccgccgatacctctagcagcacagcctacatgcagctgagcagcctgaccagcgaagatagcgccgtgtacttctgtgcccggtccatcacaacagtcgtgggctgcgctatggactattggggccagggaacaagcgtgaccgtgtctagtacgcgtatccagaaccctgatcctgccgtgtaccagctgcgggatagcaagagcagcgacaagagcgtgtgtctgttcaccgacttcgacagccagaccaacgtgtcccagagcaaggactccgacgtgtacatcaccgataagaccgtgctggacatgcggagcatggacttcaagagcaactccgccgtggcctggtccaacaagtccgatttcgcctgcgccaacgccttcaacaacagcattatccccgaggacacattcttcccaagccccgagagcagctgcggtacccagagttttgggttgttggaccctaaattgagctatctgttggacggaatcctgttcatttacggagtgatcctgaccgcattgttcctgagctctagacgggttaagttttccagatccgcagacgcacccgcttaccaacaagggcagaaccaactctacaatgaacttaatttggggcggagggaagagtacgacgttctggacaaaaggaggggacgagatcccgagatgggcggaaagcctcagcgaaggaagaatccgcaagaggggctttataacgaactccagaaagataaaatggcagaagcctatagtgagattgggatgaagggagaaaggaggaggggtaaaggtcacgatgggttgtaccaaggattgagcacagccactaaagatacctatgatgcgctccacatgcaggccctgccgccaagacgcgccaagagaagcggatctggcgtgaagcagaccctgaatttcgacctgctgaagctggctggcgacgtggaatccaacccaggccctggccatatgaccgagtacaagcccacggtgcgcctcgccacccgcgacgacgtccccagggccgtacgcaccctcgccgccgcgttcgccgactaccccgccacgcgccacaccgtcgatccggaccgccacatcgagcgggtcaccgagctgcaagaactcttcctcacgcgcgtcgggctcgacatcggcaaggtgtgggtcgcggacgacggcgccgcggtggcggtctggaccacgccggagagcgtcgaagcgggggcggtgttcgccgagatcggcccgcgcatggccgagttgagcggttcccggctggccgcgcagcaacagatggaaggcctcctggcgccgcaccggcccaaggagcccgcgtggttcctggccaccgtcggcgtctcgcccgaccaccagggcaagggtctgggcagcgccgtcgtgctccccggagtggaggcggccgagcgcgccggggtgcccgccttcctggagacctccgcgccccgcaacctccccttctacgagcggctcggcttcaccgtcaccgccgacgtcgaggtgcccgaaggaccgcgcacctggtgcatgacccgcaagcccggtgcctga

SEQ ID NO: 2061 - DNA, 3984 bp, Artificial Sequence
  Synthetic Polynucleotide
atggccttaccagtgaccgccttgctcctgccgctggccttgctgctccacgccgccaggccggaagtgcagctggttgaatctggcggaggactggttcaggctggcggatctctgagactgtcttgtgccgccagcggcagaacctttagcatgggctggtttagacaggcccctggcaaagagagagagttcgtcgccgccatcacatactctggcggcagcccttactacgccgactctgtgaagggcagattcaccatcagccgggacaacgccaagaacaccgtgtacctccagatgaacagcctgaagcctgaggacaccgccgtgtactactgcgccgccaatccaacatacggcagcgactggaacgccgagaattggggccagggaacccaagtgacagtgtctagcggtaccggcggaggcggatctggcggcggaggtagcggtggcggaggatctgaattcgacatccagatgacacagagccctagcagcctgtctgccagcgtgggagacagagtgaccatcacatgcaaggccagcgaccacatcaacaactggctggcctggtatcagcagaagcctggacaggcccctaagctgctgatctacggcgctaccacactggaaacaggcgtgcccagcagattttctggcagcggctctggcaccgactacaccctgacaatatccagcctccagcctgaggacttcgccacctactactgtcagcagagctggaacaccccttggacattcggccagggcaccaagctggaaatcaagagactcgaggacctgaagaacgtgttcccacctgaggtggccgtgttcgagcctagcgaggccgagatcagccacacccagaaagccaccctcgtgtgcctggctaccggcttctaccccgaccatgtggaactgtcttggtgggtcaacggcaaagaggtgcacagcggcgtgtctaccgacccccagccactgaaagaacagcccgccctgaacgacagccggtactgcctgagcagcagactgagagtgtccgccaccttctggcagaacccccggaaccacttcagatgccaggtgcagttctacggcctgagcgagaacgacgagtggacccaggacagagccaagcccgtgacccagatcgtgtctgccgaagcctggggcagagccgattgcggatcccagagcttcggcctgctggaccccaagctgagctacctgctggatggcatcctgttcatctacggcgtgatcctgaccgccctgttcctgagcactagtagagtgaagttcagcagaagcgccgacgcccctgcctaccagcagggacagaaccaactgtacaacgagctgaacctgggcagacgggaagagtacgacgtgctggacaagcggagaggcagggaccctgagatgggcggaaagccccagcggagaaagaacccccaggaaggactgtataacgaactccagaaagacaagatggccgaagcctacagcgagatcggcatgaagggcgagcggagaagaggcaagggccacgatggcctgtaccagggcctgagcaccgccaccaaggacacctatgacgccctgcacatgcaggccctgcctccaagaagggccaagcgatctggatctggagcaacaaacttctcactactcaaacaagcaggtgacgtggaggagaatcccgggcctatggactggatttggcgcatccttttccttgtcggcgctgctaccggcgcgcattccgggcccgaagtgcaactggttgaatccggtggcggcctggtgcaagcaggcggatctctcagacttagctgtgccgcctccggcagaaccttcacaatgggatggtttaggcaggctccagggaaagagagagagttcgtcgccgccatctctctgtctcccacactggcctactacgccgactctgtgaaaggccggttcaccatctccagagataatgccaagaacaccgtggtgctgcaaatgaactctctgaaacccgaggatacagccctgtactattgtgccgctgaccggaagtccgtgatgagcatcagacccgattactggggacagggcacacaagtcacagtgtcctctggatccggcggcggaggatctggcggaggcggatctgggggcggaggctctttcgaacaagttcagcttcaacagcctggcgctgagctggtcaaacctggcgcttctgtgaagatgagctgcaaagccagcggctacgccttcagcagctactggatcaactggatgaagcagaaacccggccagggactcgaatggatcggccaaatctatcccggcgacggcgacaccaactacaacggcaagttcaagggcagagccacactgaccgccgatacctctagcagcacagcctacatgcagctgagcagcctgaccagcgaagatagcgccgtgtacttctgtgcccggtccatcacaacagtcgtgggctgcgctatggactattggggccagggaacaagcgtgaccgtgtctagtacgcgtatccagaaccctgatcctgccgtgtaccagctgcgggatagcaagagcagcgacaagagcgtgtgtctgttcaccgacttcgacagccagaccaacgtgtcccagagcaaggactccgacgtgtacatcaccgataagaccgtgctggacatgcggagcatggacttcaagagcaactccgccgtggcctggtccaacaagtccgatttcgcctgcgccaacgccttcaacaacagcattatccccgaggacacattcttcccaagccccgagagcagctgcggtacccagagttttgggttgttggaccctaaattgagctatctgttggacggaatcctgttcatttacggagtgatcctgaccgcattgttcctgagctctagacgggttaagttttccagatccgcagacgcacccgcttaccaacaagggcagaaccaactctacaatgaacttaatttggggcggagggaagagtacgacgttctggacaaaaggaggggacgagatcccgagatgggcggaaagcctcagcgaaggaagaatccgcaagaggggctttataacgaactccagaaagataaaatggcagaagcctatagtgagattgggatgaagggagaaaggaggaggggtaaaggtcacgatgggttgtaccaaggattgagcacagccactaaagatacctatgatgcgctccacatgcaggccctgccgccaagacgcgccaagagaagcggatctggcgtgaagcagaccctgaatttcgacctgctgaagctggctggcgacgtggaatccaacccaggccctggccatatgaccgagtacaagcccacggtgcgcctcgccacccgcgacgacgtccccagggccgtacgcaccctcgccgccgcgttcgccgactaccccgccacgcgccacaccgtcgatccggaccgccacatcgagcgggtcaccgagctgcaagaactcttcctcacgcgcgtcgggctcgacatcggcaaggtgtgggtcgcggacgacggcgccgcggtggcggtctggaccacgccggagagcgtcgaagcgggggcggtgttcgccgagatcggcccgcgcatggccgagttgagcggttcccggctggccgcgcagcaacagatggaaggcctcctggcgccgcaccggcccaaggagcccgcgtggttcctggccaccgtcggcgtctcgcccgaccaccagggcaagggtctgggcagcgccgtcgtgctccccggagtggaggcggccgagcgcgccggggtgcccgccttcctggagacctccgcgccccgcaacctccccttctacgagcggctcggcttcaccgtcaccgccgacgtcgaggtgcccgaaggaccgcgcacctggtgcatgacccgcaagcccggtgcctga

SEQ ID NO: 2062 - DNA, 3183 bp, Artificial Sequence
  Synthetic Polynucleotide
atggccttaccagtgaccgccttgctcctgccgctggccttgctgctccacgccgccaggccggaagtgcagctggttgaatctggcggaggactggttcaggctggcggatctctgagactgtcttgtgccgccagcggcagaacctttagcatgggctggtttagacaggcccctggcaaagagagagagttcgtcgccgccatcacatactctggcggcagcccttactacgccgactctgtgaagggcagattcaccatcagccgggacaacgccaagaacaccgtgtacctccagatgaacagcctgaagcctgaggacaccgccgtgtactactgcgccgccaatccaacatacggcagcgactggaacgccgagaattggggccagggaacccaagtgacagtgtctagcctcgaggacctgaagaacgtgttcccacctgaggtggccgtgttcgagcctagcgaggccgagatcagccacacccagaaagccaccctcgtgtgcctggctaccggcttctaccccgaccatgtggaactgtcttggtgggtcaacggcaaagaggtgcacagcggcgtgtctaccgacccccagccactgaaagaacagcccgccctgaacgacagccggtactgcctgagcagcagactgagagtgtccgccaccttctggcagaacccccggaaccacttcagatgccaggtgcagttctacggcctgagcgagaacgacgagtggacccaggacagagccaagcccgtgacccagatcgtgtctgccgaagcctggggcagagccgattgcggatcccagagcttcggcctgctggaccccaagctgagctacctgctggatggcatcctgttcatctacggcgtgatcctgaccgccctgttcctgagcactagtagagtgaagttcagcagaagcgccgacgcccctgcctaccagcagggacagaaccaactgtacaacgagctgaacctgggcagacgggaagagtacgacgtgctggacaagcggagaggcagggaccctgagatgggcggaaagccccagcggagaaagaacccccaggaaggactgtataacgaactccagaaagacaagatggccgaagcctacagcgagatcggcatgaagggcgagcggagaagaggcaagggccacgatggcctgtaccagggcctgagcaccgccaccaaggacacctatgacgccctgcacatgcaggccctgcctccaagaagggccaagcgatctggatctggagcaacaaacttctcactactcaaacaagcaggtgacgtggaggagaatcccgggcctatggactggatttggcgcatccttttccttgtcggcgctgctaccggcgcgcattccgggcccgaagtgcaactggttgaatccggtggcggcctggtgcaagcaggcggatctctcagacttagctgtgccgcctccggcagaaccttcacaatgggatggtttaggcaggctccagggaaagagagagagttcgtcgccgccatctctctgtctcccacactggcctactacgccgactctgtgaaaggccggttcaccatctccagagataatgccaagaacaccgtggtgctgcaaatgaactctctgaaacccgaggatacagccctgtactattgtgccgctgaccggaagtccgtgatgagcatcagacccgattactggggacagggcacacaagtcacagtgtcctctacgcgtatccagaaccctgatcctgccgtgtaccagctgcgggatagcaagagcagcgacaagagcgtgtgtctgttcaccgacttcgacagccagaccaacgtgtcccagagcaaggactccgacgtgtacatcaccgataagaccgtgctggacatgcggagcatggacttcaagagcaactccgccgtggcctggtccaacaagtccgatttcgcctgcgccaacgccttcaacaacagcattatccccgaggacacattcttcccaagccccgagagcagctgcggtacccagagttttgggttgttggaccctaaattgagctatctgttggacggaatcctgttcatttacggagtgatcctgaccgcattgttcctgagctctagacgggttaagttttccagatccgcagacgcacccgcttaccaacaagggcagaaccaactctacaatgaacttaatttggggcggagggaagagtacgacgttctggacaaaaggaggggacgagatcccgagatgggcggaaagcctcagcgaaggaagaatccgcaagaggggctttataacgaactccagaaagataaaatggcagaagcctatagtgagattgggatgaagggagaaaggaggaggggtaaaggtcacgatgggttgtaccaaggattgagcacagccactaaagatacctatgatgcgctccacatgcaggccctgccgccaagacgcgccaagagaagcggatctggcgtgaagcagaccctgaatttcgacctgctgaagctggctggcgacgtggaatccaacccaggccctggccatatgaccgagtacaagcccacggtgcgcctcgccacccgcgacgacgtccccagggccgtacgcaccctcgccgccgcgttcgccgactaccccgccacgcgccacaccgtcgatccggaccgccacatcgagcgggtcaccgagctgcaagaactcttcctcacgcgcgtcgggctcgacatcggcaaggtgtgggtcgcggacgacggcgccgcggtggcggtctggaccacgccggagagcgtcgaagcgggggcggtgttcgccgagatcggcccgcgcatggccgagttgagcggttcccggctggccgcgcagcaacagatggaaggcctcctggcgccgcaccggcccaaggagcccgcgtggttcctggccaccgtcggcgtctcgcccgaccaccagggcaagggtctgggcagcgccgtcgtgctccccggagtggaggcggccgagcgcgccggggtgcccgccttcctggagacctccgcgccccgcaacctccccttctacgagcggctcggcttcaccgtcaccgccgacgtcgaggtgcccgaaggaccgcgcacctggtgcatgacccgcaagcccggtgcctga

SEQ ID NO: 2063 - DNA, 1626 bp, Artificial Sequence
  Synthetic Polynucleotide
atggccttaccagtgaccgccttgctcctgccgctggccttgctgctccacgccgccaggccggcatgcgaagtgcagctgcttgaaagtggcggcggactgattcagcctggcggatctctgagactgagctgtgccgccagcggcttcaccttttctagccacgccatgacctgggtccgacaggcacctggaaaagggcttgaatgggtgtccgccatcagcggctctggcgattacacacactacgccgacagcgtgaagggcagattcaccatcagcagagacaacagcaagaacaccgtgtacctccagatgaacagcctgagagccgaggacagcgccgtgtattattgcgccaaggatgaggatggcggcagcctgcttggacacagaggacaaggcaccctggtcaccgtttcttccggtaccggcggaggcggatctggcggcggaggtagcggtggcggaggatctgaattcggatctctcgagcagagcttcggcctgctggaccccaagctgagctacctgctggatggcatcctgttcatctacggcgtgatcctgaccgccctgttcctgagcactagtagagtgaagttcagcagaagcgccgacgcccctgcctaccagcagggacagaaccaactgtacaacgagctgaacctgggcagacgggaagagtacgacgtgctggacaagcggagaggcagggaccctgagatgggcggaaagccccagcggagaaagaacccccaggaaggactgtataacgaactccagaaagacaagatggccgaagcctacagcgagatcggcatgaagggcgagcggagaagaggcaagggccacgatggcctgtaccagggcctgagcaccgccaccaaggacacctatgacgccctgcacatgcaggccctgcctccaagaagggccaagcgatctggatctggagcaacaaacttctcactactcaaacaagcaggtgacgtggaggagaatcccgggcctactagaggccatatgaccgagtacaagcccacggtgcgcctcgccacccgcgacgacgtccccagggccgtacgcaccctcgccgccgcgttcgccgactaccccgccacgcgccacaccgtcgatccggaccgccacatcgagcgggtcaccgagctgcaagaactcttcctcacgcgcgtcgggctcgacatcggcaaggtgtgggtcgcggacgacggcgccgcggtggcggtctggaccacgccggagagcgtcgaagcgggggcggtgttcgccgagatcggcccgcgcatggccgagttgagcggttcccggctggccgcgcagcaacagatggaaggcctcctggcgccgcaccggcccaaggagcccgcgtggttcctggccaccgtcggcgtctcgcccgaccaccagggcaagggtctgggcagcgccgtcgtgctccccggagtggaggcggccgagcgcgccggggtgcccgccttcctggagacctccgcgccccgcaacctccccttctacgagcggctcggcttcaccgtcaccgccgacgtcgaggtgcccgaaggaccgcgcacctggtgcatgacccgcaagcccggtgcctga

SEQ ID NO: 2064 - DNA, 2718 bp, Artificial Sequence
  Synthetic Polynucleotide
atggccttaccagtgaccgccttgctcctgccgctggccttgctgctccacgccgccaggccggacatccagatgacacagagccctagcagcctgtctgccagcgtgggagacagagtgaccatcacatgcaaggccagcgaccacatcaacaactggctggcctggtatcagcagaagcctggacaggcccctaagctgctgatctacggcgctaccacactggaaacaggcgtgcccagcagattttctggcagcggctctggcaccgactacaccctgacaatatccagcctccagcctgaggacttcgccacctactactgtcagcagagctggaacaccccttggacattcggccagggcaccaagctggaaatcaagagactcgagacaacacctggcgagagaagtagcctgcctgccttctatcctggcaccagcggctcttgttctggctgtggatctctgagcctgcctctgctggctggactggttgctgctgatgctgtggcctctctgctgattgtgggagccgtgttcctgtgcgccagacctagaagaagccccgctcaagaggacggcaaggtgtacatcaacatgcccggcagaggaagcactagtagagtgaagttcagcagaagcgccgacgcccctgcctaccagcagggacagaaccaactgtacaacgagctgaacctgggcagacgggaagagtacgacgtgctggacaagcggagaggcagggaccctgagatgggcggaaagccccagcggagaaagaacccccaggaaggactgtataacgaactccagaaagacaagatggccgaagcctacagcgagatcggcatgaagggcgagcggagaagaggcaagggccacgatggcctgtaccagggcctgagcaccgccaccaaggacacctatgacgccctgcacatgcaggccctgcctccaagaagggccaagcgatctggatctggagcaacaaacttctcactactcaaacaagcaggtgacgtggaggagaatcccgggcctatggactggatttggcgcatccttttccttgtcggcgctgctaccggcgcgcattccttcgaacaagttcagcttcaacagcctggcgctgagctggtcaaacctggcgcttctgtgaagatgagctgcaaagccagcggctacgccttcagcagctactggatcaactggatgaagcagaaacccggccagggactcgaatggatcggccaaatctatcccggcgacggcgacaccaactacaacggcaagttcaagggcagagccacactgaccgccgatacctctagcagcacagcctacatgcagctgagcagcctgaccagcgaagatagcgccgtgtacttctgtgcccggtccatcacaacagtcgtgggctgcgctatggactattggggccagggaacaagcgtgaccgtgtctagtacgcgtcagagttttgggttgttggaccctaaattgtgctatctgttggacggaatcctgttcatttacggagtgatcctgaccgcattgttcctgcgcgatcagaggctgccacctgatgctcataagccacctggcggcggatctttcaggaccccaattcaagaagaacaagccgacgctcactctaccctggctaagatcagctctagacgggttaagttttccagatccgcagacgcacccgcttaccaacaagggcagaaccaactctacaatgaacttaatttggggcggagggaagagtacgacgttctggacaaaaggaggggacgagatcccgagatgggcggaaagcctcagcgaaggaagaatccgcaagaggggctttataacgaactccagaaagataaaatggcagaagcctatagtgagattgggatgaagggagaaaggaggaggggtaaaggtcacgatgggttgtaccaaggattgagcacagccactaaagatacctatgatgcgctccacatgcaggccctgccgccaagacgcgccaagagaagcggatctggcgtgaagcagaccctgaatttcgacctgctgaagctggctggcgacgtggaatccaacccaggccctggccatatgaccgagtacaagcccacggtgcgcctcgccacccgcgacgacgtccccagggccgtacgcaccctcgccgccgcgttcgccgactaccccgccacgcgccacaccgtcgatccggaccgccacatcgagcgggtcaccgagctgcaagaactcttcctcacgcgcgtcgggctcgacatcggcaaggtgtgggtcgcggacgacggcgccgcggtggcggtctggaccacgccggagagcgtcgaagcgggggcggtgttcgccgagatcggcccgcgcatggccgagttgagcggttcccggctggccgcgcagcaacagatggaaggcctcctggcgccgcaccggcccaaggagcccgcgtggttcctggccaccgtcggcgtctcgcccgaccaccagggcaagggtctgggcagcgccgtcgtgctccccggagtggaggcggccgagcgcgccggggtgcccgccttcctggagacctccgcgccccgcaacctccccttctacgagcggctcggcttcaccgtcaccgccgacgtcgaggtgcccgaaggaccgcgcacctggtgcatgacccgcaagcccggtgcctga

SEQ ID NO: 2065 - DNA, 2874 bp, Artificial Sequence
  Synthetic Polynucleotide
atggccttaccagtgaccgccttgctcctgccgctggccttgctgctccacgccgccaggccggcatgcgaagtgcagctgcttgaaagtggcggcggactgattcagcctggcggatctctgagactgagctgtgccgccagcggcttcaccttttctagccacgccatgacctgggtccgacaggcacctggaaaagggcttgaatgggtgtccgccatcagcggctctggcgattacacacactacgccgacagcgtgaagggcagattcaccatcagcagagacaacagcaagaacaccgtgtacctccagatgaacagcctgagagccgaggacagcgccgtgtattattgcgccaaggatgaggatggcggcagcctgcttggacacagaggacaaggcaccctggtcaccgtttcttccggtaccggcggaggcggatctggcggcggaggtagcggtggcggaggatctgaattcggatctctcgagacaacacctggcgagagaagtagcctgcctgccttctatcctggcaccagcggctcttgttctggctgtggatctctgagcctgcctctgctggctggactggttgctgctgatgctgtggcctctctgctgattgtgggagccgtgttcctgtgcgccagacctagaagaagccccgctcaagaggacggcaaggtgtacatcaacatgcccggcagaggaagcactagtagagtgaagttcagcagaagcgccgacgcccctgcctaccagcagggacagaaccaactgtacaacgagctgaacctgggcagacgggaagagtacgacgtgctggacaagcggagaggcagggaccctgagatgggcggaaagccccagcggagaaagaacccccaggaaggactgtataacgaactccagaaagacaagatggccgaagcctacagcgagatcggcatgaagggcgagcggagaagaggcaagggccacgatggcctgtaccagggcctgagcaccgccaccaaggacacctatgacgccctgcacatgcaggccctgcctccaagaagggccaagcgatctggatctggagcaacaaacttctcactactcaaacaagcaggtgacgtggaggagaatcccgggcctatggactggatttggcgcatccttttccttgtcggcgctgctaccggcgcgcattccgggcccgaagtgcagctggttgaatctggcggaggactggttcaggctggcggatctctgagactgtcttgtgccgccagcggcagaacctttagcatgggctggtttagacaggcccctggcaaagagagagagttcgtcgccgccatcacatactctggcggcagcccttactacgccgactctgtgaagggcagattcaccatcagccgggacaacgccaagaacaccgtgtacctccagatgaacagcctgaagcctgaggacaccgccgtgtactactgcgccgccaatccaacatacggcagcgactggaacgccgagaattggggccagggaacccaagtgacagtgtctagcggatccggcggcggaggatctggcggaggcggatctgggggcggaggctctttcgaaggcagcacgcgtcagagttttgggttgttggaccctaaattgtgctatctgttggacggaatcctgttcatttacggagtgatcctgaccgcattgttcctgcgcgatcagaggctgccacctgatgctcataagccacctggcggcggatctttcaggaccccaattcaagaagaacaagccgacgctcactctaccctggctaagatcagctctagacgggttaagttttccagatccgcagacgcacccgcttaccaacaagggcagaaccaactctacaatgaacttaatttggggcggagggaagagtacgacgttctggacaaaaggaggggacgagatcccgagatgggcggaaagcctcagcgaaggaagaatccgcaagaggggctttataacgaactccagaaagataaaatggcagaagcctatagtgagattgggatgaagggagaaaggaggaggggtaaaggtcacgatgggttgtaccaaggattgagcacagccactaaagatacctatgatgcgctccacatgcaggccctgccgccaagacgcgccaagagaagcggatctggcgtgaagcagaccctgaatttcgacctgctgaagctggctggcgacgtggaatccaacccaggccctggccatatgaccgagtacaagcccacggtgcgcctcgccacccgcgacgacgtccccagggccgtacgcaccctcgccgccgcgttcgccgactaccccgccacgcgccacaccgtcgatccggaccgccacatcgagcgggtcaccgagctgcaagaactcttcctcacgcgcgtcgggctcgacatcggcaaggtgtgggtcgcggacgacggcgccgcggtggcggtctggaccacgccggagagcgtcgaagcgggggcggtgttcgccgagatcggcccgcgcatggccgagttgagcggttcccggctggccgcgcagcaacagatggaaggcctcctggcgccgcaccggcccaaggagcccgcgtggttcctggccaccgtcggcgtctcgcccgaccaccagggcaagggtctgggcagcgccgtcgtgctccccggagtggaggcggccgagcgcgccggggtgcccgccttcctggagacctccgcgccccgcaacctccccttctacgagcggctcggcttcaccgtcaccgccgacgtcgaggtgcccgaaggaccgcgcacctggtgcatgacccgcaagcccggtgcctga

SEQ ID NO: 2066 - DNA, 3321 bp, Artificial Sequence
  Synthetic Polynucleotide
atggccttaccagtgaccgccttgctcctgccgctggccttgctgctccacgccgccaggccggacatccagatgacacagagccctagcagcctgtctgccagcgtgggagacagagtgaccatcacatgcaaggccagcgaccacatcaacaactggctggcctggtatcagcagaagcctggacaggcccctaagctgctgatctacggcgctaccacactggaaacaggcgtgcccagcagattttctggcagcggctctggcaccgactacaccctgacaatatccagcctccagcctgaggacttcgccacctactactgtcagcagagctggaacaccccttggacattcggccagggcaccaagctggaaatcaagagactcgagggacagcctaaggccaatcctaccgtgacactgttccctccaagcagcgaagaactccaggccaacaaggccacacttgtgtgcctgatctccgacttctaccctggggctgtgacagtggcttggaaggccgatggatctcctgtgaaagccggcgtggaaaccaccaagccatccaagcagagcaacaacaaatacgccgccagctcctacctgagcctgacacctgagcagtggaagtcccacagatcctacagctgccaagtgacccacgaaggcagcaccgtggaaaagacagtggcccctacagagtgcagcggatccacaacacctggcgagagaagtagcctgcctgccttctatcctggcaccagcggctcttgttctggctgtggatctctgagcctgcctctgctggctggactggttgctgctgatgctgtggcctctctgctgattgtgggagccgtgttcctgtgcgccagacctagaagaagccccgctcaagaggacggcaaggtgtacatcaacatgcccggcagaggaagcactagtagagtgaagttcagcagaagcgccgacgcccctgcctaccagcagggacagaaccaactgtacaacgagctgaacctgggcagacgggaagagtacgacgtgctggacaagcggagaggcagggaccctgagatgggcggaaagccccagcggagaaagaacccccaggaaggactgtataacgaactccagaaagacaagatggccgaagcctacagcgagatcggcatgaagggcgagcggagaagaggcaagggccacgatggcctgtaccagggcctgagcaccgccaccaaggacacctatgacgccctgcacatgcaggccctgcctccaagaagggccaagcgatctggatctggagcaacaaacttctcactactcaaacaagcaggtgacgtggaggagaatcccgggcctatggactggatttggcgcatccttttccttgtcggcgctgctaccggcgcgcattccttcgaacaagttcagcttcaacagcctggcgctgagctggtcaaacctggcgcttctgtgaagatgagctgcaaagccagcggctacgccttcagcagctactggatcaactggatgaagcagaaacccggccagggactcgaatggatcggccaaatctatcccggcgacggcgacaccaactacaacggcaagttcaagggcagagccacactgaccgccgatacctctagcagcacagcctacatgcagctgagcagcctgaccagcgaagatagcgccgtgtacttctgtgcccggtccatcacaacagtcgtgggctgcgctatggactattggggccagggaacaagcgtgaccgtgtctagtacgcgtgcctctacaaagggaccctccgtgtttcctctggctcccagcagcaagtctacaagcggaggaacagccgctctgggctgcctggtcaaggattactttcccgagcctgtgaccgtgtcctggaatagcggagcactgacaagcggcgtgcacacctttccagccgtgctgcaaagcagcggcctgtactctctgagcagcgtggtcacagtgcctagctctagcctgggcacccagacctacatctgcaatgtgaaccacaagcctagcaacaccaaggtggacaagagagtggaacccaagagctgtggtacccagagttttgggttgttggaccctaaattgtgctatctgttggacggaatcctgttcatttacggagtgatcctgaccgcattgttcctgcgcgatcagaggctgccacctgatgctcataagccacctggcggcggatctttcaggaccccaattcaagaagaacaagccgacgctcactctaccctggctaagatcagctctagacgggttaagttttccagatccgcagacgcacccgcttaccaacaagggcagaaccaactctacaatgaacttaatttggggcggagggaagagtacgacgttctggacaaaaggaggggacgagatcccgagatgggcggaaagcctcagcgaaggaagaatccgcaagaggggctttataacgaactccagaaagataaaatggcagaagcctatagtgagattgggatgaagggagaaaggaggaggggtaaaggtcacgatgggttgtaccaaggattgagcacagccactaaagatacctatgatgcgctccacatgcaggccctgccgccaagacgcgccaagagaagcggatctggcgtgaagcagaccctgaatttcgacctgctgaagctggctggcgacgtggaatccaacccaggccctggccatatggctacctacgaggtgctgtgcgaggtggcaagaaagctgggcaccgacgacagagaagtggtgctgttcctgctgaacgtgttcatccctcagcctacactggcccagctgatcggtgcactgagagccctgaaagaggaaggccggctgacctttcctctgctggccgaatgcctgttcagagccggaagaagggatctgctgcgggacctgctgcatctggaccccagatttctggaaagacacctggccggcaccatgagctacttcagcccttaccagctgaccgtgctgcacgttgacggcgaactgtgcgccagagatattcggagcctgatcttcctgagcaaggacaccatcggcagccggtctacccctcagacatttctgcactgggtgtactgcatggaaaacctggacctgctcggccccacagatgtggatgccctgatgtccatgctgagaagcctgagcagagtggacctccagagacaggtgcagacactgatgggactgcacctgagcggacctagccacagccagcactacagacacacccct

SEQ ID NO: 2067 - DNA, 3480 bp, Artificial Sequence
  Synthetic Polynucleotide
atggccttaccagtgaccgccttgctcctgccgctggccttgctgctccacgccgccaggccggacatccagatgacacagagccctagcagcctgtctgccagcgtgggagacagagtgaccatcacatgcaaggccagcgaccacatcaacaactggctggcctggtatcagcagaagcctggacaggcccctaagctgctgatctacggcgctaccacactggaaacaggcgtgcccagcagattttctggcagcggctctggcaccgactacaccctgacaatatccagcctccagcctgaggacttcgccacctactactgtcagcagagctggaacaccccttggacattcggccagggcaccaagctggaaatcaagagactcgagggacagcctaaggccaatcctaccgtgacactgttccctccaagcagcgaagaactccaggccaacaaggccacacttgtgtgcctgatctccgacttctaccctggggctgtgacagtggcttggaaggccgatggatctcctgtgaaagccggcgtggaaaccaccaagccatccaagcagagcaacaacaaatacgccgccagctcctacctgagcctgacacctgagcagtggaagtcccacagatcctacagctgccaagtgacccacgaaggcagcaccgtggaaaagacagtggcccctacagagtgcagcggatccacaacacctggcgagagaagtagcctgcctgccttctatcctggcaccagcggctcttgttctggctgtggatctctgagcctgcctctgctggctggactggttgctgctgatgctgtggcctctctgctgattgtgggagccgtgttcctgtgcgccagacctagaagaagccccgctcaagaggacggcaaggtgtacatcaacatgcccggcagaggaagcactagtagagtgaagttcagcagaagcgccgacgcccctgcctaccagcagggacagaaccaactgtacaacgagctgaacctgggcagacgggaagagtacgacgtgctggacaagcggagaggcagggaccctgagatgggcggaaagccccagcggagaaagaacccccaggaaggactgtataacgaactccagaaagacaagatggccgaagcctacagcgagatcggcatgaagggcgagcggagaagaggcaagggccacgatggcctgtaccagggcctgagcaccgccaccaaggacacctatgacgccctgcacatgcaggccctgcctccaagaagggccaagcgatctggatctggagcaacaaacttctcactactcaaacaagcaggtgacgtggaggagaatcccgggcctatggactggatttggcgcatccttttccttgtcggcgctgctaccggcgcgcattccttcgaacaagttcagcttcaacagcctggcgctgagctggtcaaacctggcgcttctgtgaagatgagctgcaaagccagcggctacgccttcagcagctactggatcaactggatgaagcagaaacccggccagggactcgaatggatcggccaaatctatcccggcgacggcgacaccaactacaacggcaagttcaagggcagagccacactgaccgccgatacctctagcagcacagcctacatgcagctgagcagcctgaccagcgaagatagcgccgtgtacttctgtgcccggtccatcacaacagtcgtgggctgcgctatggactattggggccagggaacaagcgtgaccgtgtctagtacgcgtgcctctacaaagggaccctccgtgtttcctctggctcccagcagcaagtctacaagcggaggaacagccgctctgggctgcctggtcaaggattactttcccgagcctgtgaccgtgtcctggaatagcggagcactgacaagcggcgtgcacacctttccagccgtgctgcaaagcagcggcctgtactctctgagcagcgtggtcacagtgcctagctctagcctgggcacccagacctacatctgcaatgtgaaccacaagcctagcaacaccaaggtggacaagagagtggaacccaagagctgtggtacccagagttttgggttgttggaccctaaattgtgctatctgttggacggaatcctgttcatttacggagtgatcctgaccgcattgttcctgcgcgatcagaggctgccacctgatgctcataagccacctggcggcggatctttcaggaccccaattcaagaagaacaagccgacgctcactctaccctggctaagatcagctctagacgggttaagttttccagatccgcagacgcacccgcttaccaacaagggcagaaccaactctacaatgaacttaatttggggcggagggaagagtacgacgttctggacaaaaggaggggacgagatcccgagatgggcggaaagcctcagcgaaggaagaatccgcaagaggggctttataacgaactccagaaagataaaatggcagaagcctatagtgagattgggatgaagggagaaaggaggaggggtaaaggtcacgatgggttgtaccaaggattgagcacagccactaaagatacctatgatgcgctccacatgcaggccctgccgccaagacgcgccaagagaagcggatctggcgtgaagcagaccctgaatttcgacctgctgaagctggctggcgacgtggaatccaacccaggccctggccatatgtccgactccaaggaggtccctagccttccatttttgcgacacttgctcgaagagttggacagccatgaggacagcttgctgctgtttctgtgtcacgacgcggccccgggctgcacgacggtcacgcaagctttgtgctcgcttagccaacagcgcaagctgaccctcgcggctctggtcgagatgctctacgtgctgcagcgtatggatcttctcaagagccgcttcgggctcagcaaggagggggccgagcaattgctgggcacaagctttctcacgcgctaccgcaagctcatggtttgcgtgggtgaggagctcgactcgagcgagctacgcgctctacgcttgttcgcgtgcaacctgaatccgagcctgagcacggcgctttctgagagcagccgctttgtcgagcttgtactcgcgcttgaaaacgtaggactcgtctcgccatcgagtgtttccgtgcttgcggacatgttgcgcactcttcggcgcctcgatttgtgccagcagcttgttgagtacgaacaacaagagcaagccaggtaccgttactgttacgcggcctcgccctcattgccagttcgtacgttacgtcgggggcacggcgcgagtgaacacgagcagctgtgcatgcccgtgcaagaatcctctgacagccccgagctgctgcgcacgcccgtacaagaatcctccagcgacagccccgagcaaacgact

SEQ ID NO: 2068 - DNA, 3357 bp, Artificial Sequence
  Synthetic Polynucleotide
atggccttaccagtgaccgccttgctcctgccgctggccttgctgctccacgccgccaggccggacatccagatgacacagagccctagcagcctgtctgccagcgtgggagacagagtgaccatcacatgcaaggccagcgaccacatcaacaactggctggcctggtatcagcagaagcctggacaggcccctaagctgctgatctacggcgctaccacactggaaacaggcgtgcccagcagattttctggcagcggctctggcaccgactacaccctgacaatatccagcctccagcctgaggacttcgccacctactactgtcagcagagctggaacaccccttggacattcggccagggcaccaagctggaaatcaagagactcgagggacagcctaaggccaatcctaccgtgacactgttccctccaagcagcgaagaactccaggccaacaaggccacacttgtgtgcctgatctccgacttctaccctggggctgtgacagtggcttggaaggccgatggatctcctgtgaaagccggcgtggaaaccaccaagccatccaagcagagcaacaacaaatacgccgccagctcctacctgagcctgacacctgagcagtggaagtcccacagatcctacagctgccaagtgacccacgaaggcagcaccgtggaaaagacagtggcccctacagagtgcagcggatccacaacacctggcgagagaagtagcctgcctgccttctatcctggcaccagcggctcttgttctggctgtggatctctgagcctgcctctgctggctggactggttgctgctgatgctgtggcctctctgctgattgtgggagccgtgttcctgtgcgccagacctagaagaagccccgctcaagaggacggcaaggtgtacatcaacatgcccggcagaggaagcactagtagagtgaagttcagcagaagcgccgacgcccctgcctaccagcagggacagaaccaactgtacaacgagctgaacctgggcagacgggaagagtacgacgtgctggacaagcggagaggcagggaccctgagatgggcggaaagccccagcggagaaagaacccccaggaaggactgtataacgaactccagaaagacaagatggccgaagcctacagcgagatcggcatgaagggcgagcggagaagaggcaagggccacgatggcctgtaccagggcctgagcaccgccaccaaggacacctatgacgccctgcacatgcaggccctgcctccaagaagggccaagcgatctggatctggagcaacaaacttctcactactcaaacaagcaggtgacgtggaggagaatcccgggcctatggactggatttggcgcatccttttccttgtcggcgctgctaccggcgcgcattccttcgaacaagttcagcttcaacagcctggcgctgagctggtcaaacctggcgcttctgtgaagatgagctgcaaagccagcggctacgccttcagcagctactggatcaactggatgaagcagaaacccggccagggactcgaatggatcggccaaatctatcccggcgacggcgacaccaactacaacggcaagttcaagggcagagccacactgaccgccgatacctctagcagcacagcctacatgcagctgagcagcctgaccagcgaagatagcgccgtgtacttctgtgcccggtccatcacaacagtcgtgggctgcgctatggactattggggccagggaacaagcgtgaccgtgtctagtacgcgtgcctctacaaagggaccctccgtgtttcctctggctcccagcagcaagtctacaagcggaggaacagccgctctgggctgcctggtcaaggattactttcccgagcctgtgaccgtgtcctggaatagcggagcactgacaagcggcgtgcacacctttccagccgtgctgcaaagcagcggcctgtactctctgagcagcgtggtcacagtgcctagctctagcctgggcacccagacctacatctgcaatgtgaaccacaagcctagcaacaccaaggtggacaagagagtggaacccaagagctgtggtacccagagttttgggttgttggaccctaaattgtgctatctgttggacggaatcctgttcatttacggagtgatcctgaccgcattgttcctgcgcgatcagaggctgccacctgatgctcataagccacctggcggcggatctttcaggaccccaattcaagaagaacaagccgacgctcactctaccctggctaagatcagctctagacgggttaagttttccagatccgcagacgcacccgcttaccaacaagggcagaaccaactctacaatgaacttaatttggggcggagggaagagtacgacgttctggacaaaaggaggggacgagatcccgagatgggcggaaagcctcagcgaaggaagaatccgcaagaggggctttataacgaactccagaaagataaaatggcagaagcctatagtgagattgggatgaagggagaaaggaggaggggtaaaggtcacgatgggttgtaccaaggattgagcacagccactaaagatacctatgatgcgctccacatgcaggccctgccgccaagacgcgccaagagaagcggatctggcgtgaagcagaccctgaatttcgacctgctgaagctggctggcgacgtggaatccaacccaggccctggccatatgaccgagtacaagcccacggtgcgcctcgccacccgcgacgacgtccccagggccgtacgcaccctcgccgccgcgttcgccgactaccccgccacgcgccacaccgtcgatccggaccgccacatcgagcgggtcaccgagctgcaagaactcttcctcacgcgcgtcgggctcgacatcggcaaggtgtgggtcgcggacgacggcgccgcggtggcggtctggaccacgccggagagcgtcgaagcgggggcggtgttcgccgagatcggcccgcgcatggccgagttgagcggttcccggctggccgcgcagcaacagatggaaggcctcctggcgccgcaccggcccaaggagcccgcgtggttcctggccaccgtcggcgtctcgcccgaccaccagggcaagggtctgggcagcgccgtcgtgctccccggagtggaggcggccgagcgcgccggggtgcccgccttcctggagacctccgcgccccgcaacctccccttctacgagcggctcggcttcaccgtcaccgccgacgtcgaggtgcccgaaggaccgcgcacctggtgcatgacccgcaagcccggtgcctga

SEQ ID NO: 2069 - DNA, 3768 bp, Artificial Sequence
  Synthetic Polynucleotide
atggccttaccagtgaccgccttgctcctgccgctggccttgctgctccacgccgccaggccggaagtgcagctggttgaatctggcggaggactggttcaggctggcggatctctgagactgtcttgtgccgccagcggcagaacctttagcatgggctggtttagacaggcccctggcaaagagagagagttcgtcgccgccatcacatactctggcggcagcccttactacgccgactctgtgaagggcagattcaccatcagccgggacaacgccaagaacaccgtgtacctccagatgaacagcctgaagcctgaggacaccgccgtgtactactgcgccgccaatccaacatacggcagcgactggaacgccgagaattggggccagggaacccaagtgacagtgtctagcggtaccggcggaggcggatctggcggcggaggtagcggtggcggaggatctgaattcgacatccagatgacacagagccctagcagcctgtctgccagcgtgggagacagagtgaccatcacatgcaaggccagcgaccacatcaacaactggctggcctggtatcagcagaagcctggacaggcccctaagctgctgatctacggcgctaccacactggaaacaggcgtgcccagcagattttctggcagcggctctggcaccgactacaccctgacaatatccagcctccagcctgaggacttcgccacctactactgtcagcagagctggaacaccccttggacattcggccagggcaccaagctggaaatcaagagactcgagggacagcctaaggccaatcctaccgtgacactgttccctccaagcagcgaagaactccaggccaacaaggccacacttgtgtgcctgatctccgacttctaccctggggctgtgacagtggcttggaaggccgatggatctcctgtgaaagccggcgtggaaaccaccaagccatccaagcagagcaacaacaaatacgccgccagctcctacctgagcctgacacctgagcagtggaagtcccacagatcctacagctgccaagtgacccacgaaggcagcaccgtggaaaagacagtggcccctacagagtgcagcggatccacaacacctggcgagagaagtagcctgcctgccttctatcctggcaccagcggctcttgttctggctgtggatctctgagcctgcctctgctggctggactggttgctgctgatgctgtggcctctctgctgattgtgggagccgtgttcctgtgcgccagacctagaagaagccccgctcaagaggacggcaaggtgtacatcaacatgcccggcagaggaagcactagtagagtgaagttcagcagaagcgccgacgcccctgcctaccagcagggacagaaccaactgtacaacgagctgaacctgggcagacgggaagagtacgacgtgctggacaagcggagaggcagggaccctgagatgggcggaaagccccagcggagaaagaacccccaggaaggactgtataacgaactccagaaagacaagatggccgaagcctacagcgagatcggcatgaagggcgagcggagaagaggcaagggccacgatggcctgtaccagggcctgagcaccgccaccaaggacacctatgacgccctgcacatgcaggccctgcctccaagaagggccaagcgatctggatctggagcaacaaacttctcactactcaaacaagcaggtgacgtggaggagaatcccgggcctatggactggatttggcgcatccttttccttgtcggcgctgctaccggcgcgcattccttcgaacaagttcagcttcaacagcctggcgctgagctggtcaaacctggcgcttctgtgaagatgagctgcaaagccagcggctacgccttcagcagctactggatcaactggatgaagcagaaacccggccagggactcgaatggatcggccaaatctatcccggcgacggcgacaccaactacaacggcaagttcaagggcagagccacactgaccgccgatacctctagcagcacagcctacatgcagctgagcagcctgaccagcgaagatagcgccgtgtacttctgtgcccggtccatcacaacagtcgtgggctgcgctatggactattggggccagggaacaagcgtgaccgtgtctagtacgcgtgcctctacaaagggaccctccgtgtttcctctggctcccagcagcaagtctacaagcggaggaacagccgctctgggctgcctggtcaaggattactttcccgagcctgtgaccgtgtcctggaatagcggagcactgacaagcggcgtgcacacctttccagccgtgctgcaaagcagcggcctgtactctctgagcagcgtggtcacagtgcctagctctagcctgggcacccagacctacatctgcaatgtgaaccacaagcctagcaacaccaaggtggacaagagagtggaacccaagagctgtggtacccagagttttgggttgttggaccctaaattgtgctatctgttggacggaatcctgttcatttacggagtgatcctgaccgcattgttcctgcgcgatcagaggctgccacctgatgctcataagccacctggcggcggatctttcaggaccccaattcaagaagaacaagccgacgctcactctaccctggctaagatcagctctagacgggttaagttttccagatccgcagacgcacccgcttaccaacaagggcagaaccaactctacaatgaacttaatttggggcggagggaagagtacgacgttctggacaaaaggaggggacgagatcccgagatgggcggaaagcctcagcgaaggaagaatccgcaagaggggctttataacgaactccagaaagataaaatggcagaagcctatagtgagattgggatgaagggagaaaggaggaggggtaaaggtcacgatgggttgtaccaaggattgagcacagccactaaagatacctatgatgcgctccacatgcaggccctgccgccaagacgcgccaagagaagcggatctggcgtgaagcagaccctgaatttcgacctgctgaagctggctggcgacgtggaatccaacccaggccctggccatatgaccgagtacaagcccacggtgcgcctcgccacccgcgacgacgtccccagggccgtacgcaccctcgccgccgcgttcgccgactaccccgccacgcgccacaccgtcgatccggaccgccacatcgagcgggtcaccgagctgcaagaactcttcctcacgcgcgtcgggctcgacatcggcaaggtgtgggtcgcggacgacggcgccgcggtggcggtctggaccacgccggagagcgtcgaagcgggggcggtgttcgccgagatcggcccgcgcatggccgagttgagcggttcccggctggccgcgcagcaacagatggaaggcctcctggcgccgcaccggcccaaggagcccgcgtggttcctggccaccgtcggcgtctcgcccgaccaccagggcaagggtctgggcagcgccgtcgtgctccccggagtggaggcggccgagcgcgccggggtgcccgccttcctggagacctccgcgccccgcaacctccccttctacgagcggctcggcttcaccgtcaccgccgacgtcgaggtgcccgaaggaccgcgcacctggtgcatgacccgcaagcccggtgcctga

SEQ ID NO: 2070 - DNA, 4179 bp, Artificial Sequence
  Synthetic Polynucleotide
atggccttaccagtgaccgccttgctcctgccgctggccttgctgctccacgccgccaggccggaagtgcagctggttgaatctggcggaggactggttcaggctggcggatctctgagactgtcttgtgccgccagcggcagaacctttagcatgggctggtttagacaggcccctggcaaagagagagagttcgtcgccgccatcacatactctggcggcagcccttactacgccgactctgtgaagggcagattcaccatcagccgggacaacgccaagaacaccgtgtacctccagatgaacagcctgaagcctgaggacaccgccgtgtactactgcgccgccaatccaacatacggcagcgactggaacgccgagaattggggccagggaacccaagtgacagtgtctagcggtaccggcggaggcggatctggcggcggaggtagcggtggcggaggatctgaattcgacatccagatgacacagagccctagcagcctgtctgccagcgtgggagacagagtgaccatcacatgcaaggccagcgaccacatcaacaactggctggcctggtatcagcagaagcctggacaggcccctaagctgctgatctacggcgctaccacactggaaacaggcgtgcccagcagattttctggcagcggctctggcaccgactacaccctgacaatatccagcctccagcctgaggacttcgccacctactactgtcagcagagctggaacaccccttggacattcggccagggcaccaagctggaaatcaagagactcgagggacagcctaaggccaatcctaccgtgacactgttccctccaagcagcgaagaactccaggccaacaaggccacacttgtgtgcctgatctccgacttctaccctggggctgtgacagtggcttggaaggccgatggatctcctgtgaaagccggcgtggaaaccaccaagccatccaagcagagcaacaacaaatacgccgccagctcctacctgagcctgacacctgagcagtggaagtcccacagatcctacagctgccaagtgacccacgaaggcagcaccgtggaaaagacagtggcccctacagagtgcagcggatccacaacacctggcgagagaagtagcctgcctgccttctatcctggcaccagcggctcttgttctggctgtggatctctgagcctgcctctgctggctggactggttgctgctgatgctgtggcctctctgctgattgtgggagccgtgttcctgtgcgccagacctagaagaagccccgctcaagaggacggcaaggtgtacatcaacatgcccggcagaggaagcactagtagagtgaagttcagcagaagcgccgacgcccctgcctaccagcagggacagaaccaactgtacaacgagctgaacctgggcagacgggaagagtacgacgtgctggacaagcggagaggcagggaccctgagatgggcggaaagccccagcggagaaagaacccccaggaaggactgtataacgaactccagaaagacaagatggccgaagcctacagcgagatcggcatgaagggcgagcggagaagaggcaagggccacgatggcctgtaccagggcctgagcaccgccaccaaggacacctatgacgccctgcacatgcaggccctgcctccaagaagggccaagcgatctggatctggagcaacaaacttctcactactcaaacaagcaggtgacgtggaggagaatcccgggcctatggactggatttggcgcatccttttccttgtcggcgctgctaccggcgcgcattccgggcccgaagtgcaactggttgaatccggtggcggcctggtgcaagcaggcggatctctcagacttagctgtgccgcctccggcagaaccttcacaatgggatggtttaggcaggctccagggaaagagagagagttcgtcgccgccatctctctgtctcccacactggcctactacgccgactctgtgaaaggccggttcaccatctccagagataatgccaagaacaccgtggtgctgcaaatgaactctctgaaacccgaggatacagccctgtactattgtgccgctgaccggaagtccgtgatgagcatcagacccgattactggggacagggcacacaagtcacagtgtcctctggatccggcggcggaggatctggcggaggcggatctgggggcggaggctctttcgaacaagttcagcttcaacagcctggcgctgagctggtcaaacctggcgcttctgtgaagatgagctgcaaagccagcggctacgccttcagcagctactggatcaactggatgaagcagaaacccggccagggactcgaatggatcggccaaatctatcccggcgacggcgacaccaactacaacggcaagttcaagggcagagccacactgaccgccgatacctctagcagcacagcctacatgcagctgagcagcctgaccagcgaagatagcgccgtgtacttctgtgcccggtccatcacaacagtcgtgggctgcgctatggactattggggccagggaacaagcgtgaccgtgtctagtacgcgtgcctctacaaagggaccctccgtgtttcctctggctcccagcagcaagtctacaagcggaggaacagccgctctgggctgcctggtcaaggattactttcccgagcctgtgaccgtgtcctggaatagcggagcactgacaagcggcgtgcacacctttccagccgtgctgcaaagcagcggcctgtactctctgagcagcgtggtcacagtgcctagctctagcctgggcacccagacctacatctgcaatgtgaaccacaagcctagcaacaccaaggtggacaagagagtggaacccaagagctgtggtacccagagttttgggttgttggaccctaaattgtgctatctgttggacggaatcctgttcatttacggagtgatcctgaccgcattgttcctgcgcgatcagaggctgccacctgatgctcataagccacctggcggcggatctttcaggaccccaattcaagaagaacaagccgacgctcactctaccctggctaagatcagctctagacgggttaagttttccagatccgcagacgcacccgcttaccaacaagggcagaaccaactctacaatgaacttaatttggggcggagggaagagtacgacgttctggacaaaaggaggggacgagatcccgagatgggcggaaagcctcagcgaaggaagaatccgcaagaggggctttataacgaactccagaaagataaaatggcagaagcctatagtgagattgggatgaagggagaaaggaggaggggtaaaggtcacgatgggttgtaccaaggattgagcacagccactaaagatacctatgatgcgctccacatgcaggccctgccgccaagacgcgccaagagaagcggatctggcgtgaagcagaccctgaatttcgacctgctgaagctggctggcgacgtggaatccaacccaggccctggccatatgaccgagtacaagcccacggtgcgcctcgccacccgcgacgacgtccccagggccgtacgcaccctcgccgccgcgttcgccgactaccccgccacgcgccacaccgtcgatccggaccgccacatcgagcgggtcaccgagctgcaagaactcttcctcacgcgcgtcgggctcgacatcggcaaggtgtgggtcgcggacgacggcgccgcggtggcggtctggaccacgccggagagcgtcgaagcgggggcggtgttcgccgagatcggcccgcgcatggccgagttgagcggttcccggctggccgcgcagcaacagatggaaggcctcctggcgccgcaccggcccaaggagcccgcgtggttcctggccaccgtcggcgtctcgcccgaccaccagggcaagggtctgggcagcgccgtcgtgctccccggagtggaggcggccgagcgcgccggggtgcccgccttcctggagacctccgcgccccgcaacctccccttctacgagcggctcggcttcaccgtcaccgccgacgtcgaggtgcccgaaggaccgcgcacctggtgcatgacccgcaagcccggtgcctga

SEQ ID NO: 2071 - DNA, 3378 bp, Artificial Sequence
  Synthetic Polynucleotide
atggccttaccagtgaccgccttgctcctgccgctggccttgctgctccacgccgccaggccggaagtgcagctggttgaatctggcggaggactggttcaggctggcggatctctgagactgtcttgtgccgccagcggcagaacctttagcatgggctggtttagacaggcccctggcaaagagagagagttcgtcgccgccatcacatactctggcggcagcccttactacgccgactctgtgaagggcagattcaccatcagccgggacaacgccaagaacaccgtgtacctccagatgaacagcctgaagcctgaggacaccgccgtgtactactgcgccgccaatccaacatacggcagcgactggaacgccgagaattggggccagggaacccaagtgacagtgtctagcctcgagggacagcctaaggccaatcctaccgtgacactgttccctccaagcagcgaagaactccaggccaacaaggccacacttgtgtgcctgatctccgacttctaccctggggctgtgacagtggcttggaaggccgatggatctcctgtgaaagccggcgtggaaaccaccaagccatccaagcagagcaacaacaaatacgccgccagctcctacctgagcctgacacctgagcagtggaagtcccacagatcctacagctgccaagtgacccacgaaggcagcaccgtggaaaagacagtggcccctacagagtgcagcggatccacaacacctggcgagagaagtagcctgcctgccttctatcctggcaccagcggctcttgttctggctgtggatctctgagcctgcctctgctggctggactggttgctgctgatgctgtggcctctctgctgattgtgggagccgtgttcctgtgcgccagacctagaagaagccccgctcaagaggacggcaaggtgtacatcaacatgcccggcagaggaagcactagtagagtgaagttcagcagaagcgccgacgcccctgcctaccagcagggacagaaccaactgtacaacgagctgaacctgggcagacgggaagagtacgacgtgctggacaagcggagaggcagggaccctgagatgggcggaaagccccagcggagaaagaacccccaggaaggactgtataacgaactccagaaagacaagatggccgaagcctacagcgagatcggcatgaagggcgagcggagaagaggcaagggccacgatggcctgtaccagggcctgagcaccgccaccaaggacacctatgacgccctgcacatgcaggccctgcctccaagaagggccaagcgatctggatctggagcaacaaacttctcactactcaaacaagcaggtgacgtggaggagaatcccgggcctatggactggatttggcgcatccttttccttgtcggcgctgctaccggcgcgcattccgggcccgaagtgcaactggttgaatccggtggcggcctggtgcaagcaggcggatctctcagacttagctgtgccgcctccggcagaaccttcacaatgggatggtttaggcaggctccagggaaagagagagagttcgtcgccgccatctctctgtctcccacactggcctactacgccgactctgtgaaaggccggttcaccatctccagagataatgccaagaacaccgtggtgctgcaaatgaactctctgaaacccgaggatacagccctgtactattgtgccgctgaccggaagtccgtgatgagcatcagacccgattactggggacagggcacacaagtcacagtgtcctctacgcgtgcctctacaaagggaccctccgtgtttcctctggctcccagcagcaagtctacaagcggaggaacagccgctctgggctgcctggtcaaggattactttcccgagcctgtgaccgtgtcctggaatagcggagcactgacaagcggcgtgcacacctttccagccgtgctgcaaagcagcggcctgtactctctgagcagcgtggtcacagtgcctagctctagcctgggcacccagacctacatctgcaatgtgaaccacaagcctagcaacaccaaggtggacaagagagtggaacccaagagctgtggtacccagagttttgggttgttggaccctaaattgtgctatctgttggacggaatcctgttcatttacggagtgatcctgaccgcattgttcctgcgcgatcagaggctgccacctgatgctcataagccacctggcggcggatctttcaggaccccaattcaagaagaacaagccgacgctcactctaccctggctaagatcagctctagacgggttaagttttccagatccgcagacgcacccgcttaccaacaagggcagaaccaactctacaatgaacttaatttggggcggagggaagagtacgacgttctggacaaaaggaggggacgagatcccgagatgggcggaaagcctcagcgaaggaagaatccgcaagaggggctttataacgaactccagaaagataaaatggcagaagcctatagtgagattgggatgaagggagaaaggaggaggggtaaaggtcacgatgggttgtaccaaggattgagcacagccactaaagatacctatgatgcgctccacatgcaggccctgccgccaagacgcgccaagagaagcggatctggcgtgaagcagaccctgaatttcgacctgctgaagctggctggcgacgtggaatccaacccaggccctggccatatgaccgagtacaagcccacggtgcgcctcgccacccgcgacgacgtccccagggccgtacgcaccctcgccgccgcgttcgccgactaccccgccacgcgccacaccgtcgatccggaccgccacatcgagcgggtcaccgagctgcaagaactcttcctcacgcgcgtcgggctcgacatcggcaaggtgtgggtcgcggacgacggcgccgcggtggcggtctggaccacgccggagagcgtcgaagcgggggcggtgttcgccgagatcggcccgcgcatggccgagttgagcggttcccggctggccgcgcagcaacagatggaaggcctcctggcgccgcaccggcccaaggagcccgcgtggttcctggccaccgtcggcgtctcgcccgaccaccagggcaagggtctgggcagcgccgtcgtgctccccggagtggaggcggccgagcgcgccggggtgcccgccttcctggagacctccgcgccccgcaacctccccttctacgagcggctcggcttcaccgtcaccgccgacgtcgaggtgcccgaaggaccgcgcacctggtgcatgacccgcaagcccggtgcctga

SEQ ID NO: 2072 - DNA, 3402 bp, Artificial Sequence
  Synthetic Polynucleotide
atggccttaccagtgaccgccttgctcctgccgctggccttgctgctccacgccgccaggccggacatccagatgacacagagccctagcagcctgtctgccagcgtgggagacagagtgaccatcacatgcaaggccagcgaccacatcaacaactggctggcctggtatcagcagaagcctggacaggcccctaagctgctgatctacggcgctaccacactggaaacaggcgtgcccagcagattttctggcagcggctctggcaccgactacaccctgacaatatccagcctccagcctgaggacttcgccacctactactgtcagcagagctggaacaccccttggacattcggccagggcaccaagctggaaatcaagagactcgaggacctgaagaacgtgttcccacctgaggtggccgtgttcgagcctagcgaggccgagatcagccacacccagaaagccaccctcgtgtgcctggctaccggcttctaccccgaccatgtggaactgtcttggtgggtcaacggcaaagaggtgcacagcggcgtgtctaccgacccccagccactgaaagaacagcccgccctgaacgacagccggtactgcctgagcagcagactgagagtgtccgccaccttctggcagaacccccggaaccacttcagatgccaggtgcagttctacggcctgagcgagaacgacgagtggacccaggacagagccaagcccgtgacccagatcgtgtctgccgaagcctggggcagagccgattgcggatccacaacacctggcgagagaagtagcctgcctgccttctatcctggcaccagcggctcttgttctggctgtggatctctgagcctgcctctgctggctggactggttgctgctgatgctgtggcctctctgctgattgtgggagccgtgttcctgtgcgccagacctagaagaagccccgctcaagaggacggcaaggtgtacatcaacatgcccggcagaggaagcactagtagagtgaagttcagcagaagcgccgacgcccctgcctaccagcagggacagaaccaactgtacaacgagctgaacctgggcagacgggaagagtacgacgtgctggacaagcggagaggcagggaccctgagatgggcggaaagccccagcggagaaagaacccccaggaaggactgtataacgaactccagaaagacaagatggccgaagcctacagcgagatcggcatgaagggcgagcggagaagaggcaagggccacgatggcctgtaccagggcctgagcaccgccaccaaggacacctatgacgccctgcacatgcaggccctgcctccaagaagggccaagcgatctggatctggagcaacaaacttctcactactcaaacaagcaggtgacgtggaggagaatcccgggcctatggactggatttggcgcatccttttccttgtcggcgctgctaccggcgcgcattccttcgaacaagttcagcttcaacagcctggcgctgagctggtcaaacctggcgcttctgtgaagatgagctgcaaagccagcggctacgccttcagcagctactggatcaactggatgaagcagaaacccggccagggactcgaatggatcggccaaatctatcccggcgacggcgacaccaactacaacggcaagttcaagggcagagccacactgaccgccgatacctctagcagcacagcctacatgcagctgagcagcctgaccagcgaagatagcgccgtgtacttctgtgcccggtccatcacaacagtcgtgggctgcgctatggactattggggccagggaacaagcgtgaccgtgtctagtacgcgtatccagaaccctgatcctgccgtgtaccagctgcgggatagcaagagcagcgacaagagcgtgtgtctgttcaccgacttcgacagccagaccaacgtgtcccagagcaaggactccgacgtgtacatcaccgataagaccgtgctggacatgcggagcatggacttcaagagcaactccgccgtggcctggtccaacaagtccgatttcgcctgcgccaacgccttcaacaacagcattatccccgaggacacattcttcccaagccccgagagcagctgcggtacccagagttttgggttgttggaccctaaattgtgctatctgttggacggaatcctgttcatttacggagtgatcctgaccgcattgttcctgcgcgatcagaggctgccacctgatgctcataagccacctggcggcggatctttcaggaccccaattcaagaagaacaagccgacgctcactctaccctggctaagatcagctctagacgggttaagttttccagatccgcagacgcacccgcttaccaacaagggcagaaccaactctacaatgaacttaatttggggcggagggaagagtacgacgttctggacaaaaggaggggacgagatcccgagatgggcggaaagcctcagcgaaggaagaatccgcaagaggggctttataacgaactccagaaagataaaatggcagaagcctatagtgagattgggatgaagggagaaaggaggaggggtaaaggtcacgatgggttgtaccaaggattgagcacagccactaaagatacctatgatgcgctccacatgcaggccctgccgccaagacgcgccaagagaagcggatctggcgtgaagcagaccctgaatttcgacctgctgaagctggctggcgacgtggaatccaacccaggccctggccatatgaccgagtacaagcccacggtgcgcctcgccacccgcgacgacgtccccagggccgtacgcaccctcgccgccgcgttcgccgactaccccgccacgcgccacaccgtcgatccggaccgccacatcgagcgggtcaccgagctgcaagaactcttcctcacgcgcgtcgggctcgacatcggcaaggtgtgggtcgcggacgacggcgccgcggtggcggtctggaccacgccggagagcgtcgaagcgggggcggtgttcgccgagatcggcccgcgcatggccgagttgagcggttcccggctggccgcgcagcaacagatggaaggcctcctggcgccgcaccggcccaaggagcccgcgtggttcctggccaccgtcggcgtctcgcccgaccaccagggcaagggtctgggcagcgccgtcgtgctccccggagtggaggcggccgagcgcgccggggtgcccgccttcctggagacctccgcgccccgcaacctccccttctacgagcggctcggcttcaccgtcaccgccgacgtcgaggtgcccgaaggaccgcgcacctggtgcatgacccgcaagcccggtgcctga

SEQ ID NO: 2073 - DNA, 3813 bp, Artificial Sequence
  Synthetic Polynucleotide
atggccttaccagtgaccgccttgctcctgccgctggccttgctgctccacgccgccaggccggaagtgcagctggttgaatctggcggaggactggttcaggctggcggatctctgagactgtcttgtgccgccagcggcagaacctttagcatgggctggtttagacaggcccctggcaaagagagagagttcgtcgccgccatcacatactctggcggcagcccttactacgccgactctgtgaagggcagattcaccatcagccgggacaacgccaagaacaccgtgtacctccagatgaacagcctgaagcctgaggacaccgccgtgtactactgcgccgccaatccaacatacggcagcgactggaacgccgagaattggggccagggaacccaagtgacagtgtctagcggtaccggcggaggcggatctggcggcggaggtagcggtggcggaggatctgaattcgacatccagatgacacagagccctagcagcctgtctgccagcgtgggagacagagtgaccatcacatgcaaggccagcgaccacatcaacaactggctggcctggtatcagcagaagcctggacaggcccctaagctgctgatctacggcgctaccacactggaaacaggcgtgcccagcagattttctggcagcggctctggcaccgactacaccctgacaatatccagcctccagcctgaggacttcgccacctactactgtcagcagagctggaacaccccttggacattcggccagggcaccaagctggaaatcaagagactcgaggacctgaagaacgtgttcccacctgaggtggccgtgttcgagcctagcgaggccgagatcagccacacccagaaagccaccctcgtgtgcctggctaccggcttctaccccgaccatgtggaactgtcttggtgggtcaacggcaaagaggtgcacagcggcgtgtctaccgacccccagccactgaaagaacagcccgccctgaacgacagccggtactgcctgagcagcagactgagagtgtccgccaccttctggcagaacccccggaaccacttcagatgccaggtgcagttctacggcctgagcgagaacgacgagtggacccaggacagagccaagcccgtgacccagatcgtgtctgccgaagcctggggcagagccgattgcggatccacaacacctggcgagagaagtagcctgcctgccttctatcctggcaccagcggctcttgttctggctgtggatctctgagcctgcctctgctggctggactggttgctgctgatgctgtggcctctctgctgattgtgggagccgtgttcctgtgcgccagacctagaagaagccccgctcaagaggacggcaaggtgtacatcaacatgcccggcagaggaagcactagtagagtgaagttcagcagaagcgccgacgcccctgcctaccagcagggacagaaccaactgtacaacgagctgaacctgggcagacgggaagagtacgacgtgctggacaagcggagaggcagggaccctgagatgggcggaaagccccagcggagaaagaacccccaggaaggactgtataacgaactccagaaagacaagatggccgaagcctacagcgagatcggcatgaagggcgagcggagaagaggcaagggccacgatggcctgtaccagggcctgagcaccgccaccaaggacacctatgacgccctgcacatgcaggccctgcctccaagaagggccaagcgatctggatctggagcaacaaacttctcactactcaaacaagcaggtgacgtggaggagaatcccgggcctatggactggatttggcgcatccttttccttgtcggcgctgctaccggcgcgcattccttcgaacaagttcagcttcaacagcctggcgctgagctggtcaaacctggcgcttctgtgaagatgagctgcaaagccagcggctacgccttcagcagctactggatcaactggatgaagcagaaacccggccagggactcgaatggatcggccaaatctatcccggcgacggcgacaccaactacaacggcaagttcaagggcagagccacactgaccgccgatacctctagcagcacagcctacatgcagctgagcagcctgaccagcgaagatagcgccgtgtacttctgtgcccggtccatcacaacagtcgtgggctgcgctatggactattggggccagggaacaagcgtgaccgtgtctagtacgcgtatccagaaccctgatcctgccgtgtaccagctgcgggatagcaagagcagcgacaagagcgtgtgtctgttcaccgacttcgacagccagaccaacgtgtcccagagcaaggactccgacgtgtacatcaccgataagaccgtgctggacatgcggagcatggacttcaagagcaactccgccgtggcctggtccaacaagtccgatttcgcctgcgccaacgccttcaacaacagcattatccccgaggacacattcttcccaagccccgagagcagctgcggtacccagagttttgggttgttggaccctaaattgtgctatctgttggacggaatcctgttcatttacggagtgatcctgaccgcattgttcctgcgcgatcagaggctgccacctgatgctcataagccacctggcggcggatctttcaggaccccaattcaagaagaacaagccgacgctcactctaccctggctaagatcagctctagacgggttaagttttccagatccgcagacgcacccgcttaccaacaagggcagaaccaactctacaatgaacttaatttggggcggagggaagagtacgacgttctggacaaaaggaggggacgagatcccgagatgggcggaaagcctcagcgaaggaagaatccgcaagaggggctttataacgaactccagaaagataaaatggcagaagcctatagtgagattgggatgaagggagaaaggaggaggggtaaaggtcacgatgggttgtaccaaggattgagcacagccactaaagatacctatgatgcgctccacatgcaggccctgccgccaagacgcgccaagagaagcggatctggcgtgaagcagaccctgaatttcgacctgctgaagctggctggcgacgtggaatccaacccaggccctggccatatgaccgagtacaagcccacggtgcgcctcgccacccgcgacgacgtccccagggccgtacgcaccctcgccgccgcgttcgccgactaccccgccacgcgccacaccgtcgatccggaccgccacatcgagcgggtcaccgagctgcaagaactcttcctcacgcgcgtcgggctcgacatcggcaaggtgtgggtcgcggacgacggcgccgcggtggcggtctggaccacgccggagagcgtcgaagcgggggcggtgttcgccgagatcggcccgcgcatggccgagttgagcggttcccggctggccgcgcagcaacagatggaaggcctcctggcgccgcaccggcccaaggagcccgcgtggttcctggccaccgtcggcgtctcgcccgaccaccagggcaagggtctgggcagcgccgtcgtgctccccggagtggaggcggccgagcgcgccggggtgcccgccttcctggagacctccgcgccccgcaacctccccttctacgagcggctcggcttcaccgtcaccgccgacgtcgaggtgcccgaaggaccgcgcacctggtgcatgacccgcaagcccggtgcctga

SEQ ID NO: 2074 - DNA, 4224 bp, Artificial Sequence
  Synthetic Polynucleotide
atggccttaccagtgaccgccttgctcctgccgctggccttgctgctccacgccgccaggccggaagtgcagctggttgaatctggcggaggactggttcaggctggcggatctctgagactgtcttgtgccgccagcggcagaacctttagcatgggctggtttagacaggcccctggcaaagagagagagttcgtcgccgccatcacatactctggcggcagcccttactacgccgactctgtgaagggcagattcaccatcagccgggacaacgccaagaacaccgtgtacctccagatgaacagcctgaagcctgaggacaccgccgtgtactactgcgccgccaatccaacatacggcagcgactggaacgccgagaattggggccagggaacccaagtgacagtgtctagcggtaccggcggaggcggatctggcggcggaggtagcggtggcggaggatctgaattcgacatccagatgacacagagccctagcagcctgtctgccagcgtgggagacagagtgaccatcacatgcaaggccagcgaccacatcaacaactggctggcctggtatcagcagaagcctggacaggcccctaagctgctgatctacggcgctaccacactggaaacaggcgtgcccagcagattttctggcagcggctctggcaccgactacaccctgacaatatccagcctccagcctgaggacttcgccacctactactgtcagcagagctggaacaccccttggacattcggccagggcaccaagctggaaatcaagagactcgaggacctgaagaacgtgttcccacctgaggtggccgtgttcgagcctagcgaggccgagatcagccacacccagaaagccaccctcgtgtgcctggctaccggcttctaccccgaccatgtggaactgtcttggtgggtcaacggcaaagaggtgcacagcggcgtgtctaccgacccccagccactgaaagaacagcccgccctgaacgacagccggtactgcctgagcagcagactgagagtgtccgccaccttctggcagaacccccggaaccacttcagatgccaggtgcagttctacggcctgagcgagaacgacgagtggacccaggacagagccaagcccgtgacccagatcgtgtctgccgaagcctggggcagagccgattgcggatccacaacacctggcgagagaagtagcctgcctgccttctatcctggcaccagcggctcttgttctggctgtggatctctgagcctgcctctgctggctggactggttgctgctgatgctgtggcctctctgctgattgtgggagccgtgttcctgtgcgccagacctagaagaagccccgctcaagaggacggcaaggtgtacatcaacatgcccggcagaggaagcactagtagagtgaagttcagcagaagcgccgacgcccctgcctaccagcagggacagaaccaactgtacaacgagctgaacctgggcagacgggaagagtacgacgtgctggacaagcggagaggcagggaccctgagatgggcggaaagccccagcggagaaagaacccccaggaaggactgtataacgaactccagaaagacaagatggccgaagcctacagcgagatcggcatgaagggcgagcggagaagaggcaagggccacgatggcctgtaccagggcctgagcaccgccaccaaggacacctatgacgccctgcacatgcaggccctgcctccaagaagggccaagcgatctggatctggagcaacaaacttctcactactcaaacaagcaggtgacgtggaggagaatcccgggcctatggactggatttggcgcatccttttccttgtcggcgctgctaccggcgcgcattccgggcccgaagtgcaactggttgaatccggtggcggcctggtgcaagcaggcggatctctcagacttagctgtgccgcctccggcagaaccttcacaatgggatggtttaggcaggctccagggaaagagagagagttcgtcgccgccatctctctgtctcccacactggcctactacgccgactctgtgaaaggccggttcaccatctccagagataatgccaagaacaccgtggtgctgcaaatgaactctctgaaacccgaggatacagccctgtactattgtgccgctgaccggaagtccgtgatgagcatcagacccgattactggggacagggcacacaagtcacagtgtcctctggatccggcggcggaggatctggcggaggcggatctgggggcggaggctctttcgaacaagttcagcttcaacagcctggcgctgagctggtcaaacctggcgcttctgtgaagatgagctgcaaagccagcggctacgccttcagcagctactggatcaactggatgaagcagaaacccggccagggactcgaatggatcggccaaatctatcccggcgacggcgacaccaactacaacggcaagttcaagggcagagccacactgaccgccgatacctctagcagcacagcctacatgcagctgagcagcctgaccagcgaagatagcgccgtgtacttctgtgcccggtccatcacaacagtcgtgggctgcgctatggactattggggccagggaacaagcgtgaccgtgtctagtacgcgtatccagaaccctgatcctgccgtgtaccagctgcgggatagcaagagcagcgacaagagcgtgtgtctgttcaccgacttcgacagccagaccaacgtgtcccagagcaaggactccgacgtgtacatcaccgataagaccgtgctggacatgcggagcatggacttcaagagcaactccgccgtggcctggtccaacaagtccgatttcgcctgcgccaacgccttcaacaacagcattatccccgaggacacattcttcccaagccccgagagcagctgcggtacccagagttttgggttgttggaccctaaattgtgctatctgttggacggaatcctgttcatttacggagtgatcctgaccgcattgttcctgcgcgatcagaggctgccacctgatgctcataagccacctggcggcggatctttcaggaccccaattcaagaagaacaagccgacgctcactctaccctggctaagatcagctctagacgggttaagttttccagatccgcagacgcacccgcttaccaacaagggcagaaccaactctacaatgaacttaatttggggcggagggaagagtacgacgttctggacaaaaggaggggacgagatcccgagatgggcggaaagcctcagcgaaggaagaatccgcaagaggggctttataacgaactccagaaagataaaatggcagaagcctatagtgagattgggatgaagggagaaaggaggaggggtaaaggtcacgatgggttgtaccaaggattgagcacagccactaaagatacctatgatgcgctccacatgcaggccctgccgccaagacgcgccaagagaagcggatctggcgtgaagcagaccctgaatttcgacctgctgaagctggctggcgacgtggaatccaacccaggccctggccatatgaccgagtacaagcccacggtgcgcctcgccacccgcgacgacgtccccagggccgtacgcaccctcgccgccgcgttcgccgactaccccgccacgcgccacaccgtcgatccggaccgccacatcgagcgggtcaccgagctgcaagaactcttcctcacgcgcgtcgggctcgacatcggcaaggtgtgggtcgcggacgacggcgccgcggtggcggtctggaccacgccggagagcgtcgaagcgggggcggtgttcgccgagatcggcccgcgcatggccgagttgagcggttcccggctggccgcgcagcaacagatggaaggcctcctggcgccgcaccggcccaaggagcccgcgtggttcctggccaccgtcggcgtctcgcccgaccaccagggcaagggtctgggcagcgccgtcgtgctccccggagtggaggcggccgagcgcgccggggtgcccgccttcctggagacctccgcgccccgcaacctccccttctacgagcggctcggcttcaccgtcaccgccgacgtcgaggtgcccgaaggaccgcgcacctggtgcatgacccgcaagcccggtgcctga

SEQ ID NO: 2075 - DNA, 3423 bp, Artificial Sequence
  Synthetic Polynucleotide
atggccttaccagtgaccgccttgctcctgccgctggccttgctgctccacgccgccaggccggaagtgcagctggttgaatctggcggaggactggttcaggctggcggatctctgagactgtcttgtgccgccagcggcagaacctttagcatgggctggtttagacaggcccctggcaaagagagagagttcgtcgccgccatcacatactctggcggcagcccttactacgccgactctgtgaagggcagattcaccatcagccgggacaacgccaagaacaccgtgtacctccagatgaacagcctgaagcctgaggacaccgccgtgtactactgcgccgccaatccaacatacggcagcgactggaacgccgagaattggggccagggaacccaagtgacagtgtctagcctcgaggacctgaagaacgtgttcccacctgaggtggccgtgttcgagcctagcgaggccgagatcagccacacccagaaagccaccctcgtgtgcctggctaccggcttctaccccgaccatgtggaactgtcttggtgggtcaacggcaaagaggtgcacagcggcgtgtctaccgacccccagccactgaaagaacagcccgccctgaacgacagccggtactgcctgagcagcagactgagagtgtccgccaccttctggcagaacccccggaaccacttcagatgccaggtgcagttctacggcctgagcgagaacgacgagtggacccaggacagagccaagcccgtgacccagatcgtgtctgccgaagcctggggcagagccgattgcggatccacaacacctggcgagagaagtagcctgcctgccttctatcctggcaccagcggctcttgttctggctgtggatctctgagcctgcctctgctggctggactggttgctgctgatgctgtggcctctctgctgattgtgggagccgtgttcctgtgcgccagacctagaagaagccccgctcaagaggacggcaaggtgtacatcaacatgcccggcagaggaagcactagtagagtgaagttcagcagaagcgccgacgcccctgcctaccagcagggacagaaccaactgtacaacgagctgaacctgggcagacgggaagagtacgacgtgctggacaagcggagaggcagggaccctgagatgggcggaaagccccagcggagaaagaacccccaggaaggactgtataacgaactccagaaagacaagatggccgaagcctacagcgagatcggcatgaagggcgagcggagaagaggcaagggccacgatggcctgtaccagggcctgagcaccgccaccaaggacacctatgacgccctgcacatgcaggccctgcctccaagaagggccaagcgatctggatctggagcaacaaacttctcactactcaaacaagcaggtgacgtggaggagaatcccgggcctatggactggatttggcgcatccttttccttgtcggcgctgctaccggcgcgcattccgggcccgaagtgcaactggttgaatccggtggcggcctggtgcaagcaggcggatctctcagacttagctgtgccgcctccggcagaaccttcacaatgggatggtttaggcaggctccagggaaagagagagagttcgtcgccgccatctctctgtctcccacactggcctactacgccgactctgtgaaaggccggttcaccatctccagagataatgccaagaacaccgtggtgctgcaaatgaactctctgaaacccgaggatacagccctgtactattgtgccgctgaccggaagtccgtgatgagcatcagacccgattactggggacagggcacacaagtcacagtgtcctctacgcgtatccagaaccctgatcctgccgtgtaccagctgcgggatagcaagagcagcgacaagagcgtgtgtctgttcaccgacttcgacagccagaccaacgtgtcccagagcaaggactccgacgtgtacatcaccgataagaccgtgctggacatgcggagcatggacttcaagagcaactccgccgtggcctggtccaacaagtccgatttcgcctgcgccaacgccttcaacaacagcattatccccgaggacacattcttcccaagccccgagagcagctgcggtacccagagttttgggttgttggaccctaaattgtgctatctgttggacggaatcctgttcatttacggagtgatcctgaccgcattgttcctgcgcgatcagaggctgccacctgatgctcataagccacctggcggcggatctttcaggaccccaattcaagaagaacaagccgacgctcactctaccctggctaagatcagctctagacgggttaagttttccagatccgcagacgcacccgcttaccaacaagggcagaaccaactctacaatgaacttaatttggggcggagggaagagtacgacgttctggacaaaaggaggggacgagatcccgagatgggcggaaagcctcagcgaaggaagaatccgcaagaggggctttataacgaactccagaaagataaaatggcagaagcctatagtgagattgggatgaagggagaaaggaggaggggtaaaggtcacgatgggttgtaccaaggattgagcacagccactaaagatacctatgatgcgctccacatgcaggccctgccgccaagacgcgccaagagaagcggatctggcgtgaagcagaccctgaatttcgacctgctgaagctggctggcgacgtggaatccaacccaggccctggccatatgaccgagtacaagcccacggtgcgcctcgccacccgcgacgacgtccccagggccgtacgcaccctcgccgccgcgttcgccgactaccccgccacgcgccacaccgtcgatccggaccgccacatcgagcgggtcaccgagctgcaagaactcttcctcacgcgcgtcgggctcgacatcggcaaggtgtgggtcgcggacgacggcgccgcggtggcggtctggaccacgccggagagcgtcgaagcgggggcggtgttcgccgagatcggcccgcgcatggccgagttgagcggttcccggctggccgcgcagcaacagatggaaggcctcctggcgccgcaccggcccaaggagcccgcgtggttcctggccaccgtcggcgtctcgcccgaccaccagggcaagggtctgggcagcgccgtcgtgctccccggagtggaggcggccgagcgcgccggggtgcccgccttcctggagacctccgcgccccgcaacctccccttctacgagcggctcggcttcaccgtcaccgccgacgtcgaggtgcccgaaggaccgcgcacctggtgcatgacccgcaagcccggtgcctga

SEQ ID NO: 2076 - DNA, 1758 bp, Artificial Sequence; identical to SEQ ID NO: 2037
  Synthetic Polynucleotide

SEQ ID NO: 2077 - DNA, 2694 bp, Artificial Sequence
  Synthetic Polynucleotide
atggccttaccagtgaccgccttgctcctgccgctggccttgctgctccacgccgccaggccggacatccagatgacacagagccctagcagcctgtctgccagcgtgggagacagagtgaccatcacatgcaaggccagcgaccacatcaacaactggctggcctggtatcagcagaagcctggacaggcccctaagctgctgatctacggcgctaccacactggaaacaggcgtgcccagcagattttctggcagcggctctggcaccgactacaccctgacaatatccagcctccagcctgaggacttcgccacctactactgtcagcagagctggaacaccccttggacattcggccagggcaccaagctggaaatcaagagactcgagcagagcttcggcctgctggaccccaagctgtgctacctgctggatggcatcctgttcatctacggcgtgatcctgaccgccctgttcctgagggaccaaagactgcctcctgacgctcacaaacctccaggcggaggcagcttcagaacccctatccaagaggaacaggctgacgcccacagcaccctggcaaaaattagcactagtagagtgaagttcagcagaagcgccgacgcccctgcctaccagcagggacagaaccaactgtacaacgagctgaacctgggcagacgggaagagtacgacgtgctggacaagcggagaggcagggaccctgagatgggcggaaagccccagcggagaaagaacccccaggaaggactgtataacgaactccagaaagacaagatggccgaagcctacagcgagatcggcatgaagggcgagcggagaagaggcaagggccacgatggcctgtaccagggcctgagcaccgccaccaaggacacctatgacgccctgcacatgcaggccctgcctccaagaagggccaagcgatctggatctggagcaacaaacttctcactactcaaacaagcaggtgacgtggaggagaatcccgggcctatggactggatttggcgcatccttttccttgtcggcgctgctaccggcgcgcattccttcgaacaagttcagcttcaacagcctggcgctgagctggtcaaacctggcgcttctgtgaagatgagctgcaaagccagcggctacgccttcagcagctactggatcaactggatgaagcagaaacccggccagggactcgaatggatcggccaaatctatcccggcgacggcgacaccaactacaacggcaagttcaagggcagagccacactgaccgccgatacctctagcagcacagcctacatgcagctgagcagcctgaccagcgaagatagcgccgtgtacttctgtgcccggtccatcacaacagtcgtgggctgcgctatggactattggggccagggaacaagcgtgaccgtgtctagtacgcgtcagagttttgggttgttggaccctaaattgtgctatctgttggacggaatcctgttcatttacggagtgatcctgaccgcattgttcctgcgcgatcagaggctgccacctgatgctcataagccacctggcggcggatctttcaggaccccaattcaagaagaacaagccgacgctcactctaccctggctaagatcagctctagacgggttaagttttccagatccgcagacgcacccgcttaccaacaagggcagaaccaactctacaatgaacttaatttggggcggagggaagagtacgacgttctggacaaaaggaggggacgagatcccgagatgggcggaaagcctcagcgaaggaagaatccgcaagaggggctttataacgaactccagaaagataaaatggcagaagcctatagtgagattgggatgaagggagaaaggaggaggggtaaaggtcacgatgggttgtaccaaggattgagcacagccactaaagatacctatgatgcgctccacatgcaggccctgccgccaagacgcgccaagagaagcggatctggcgtgaagcagaccctgaatttcgacctgctgaagctggctggcgacgtggaatccaacccaggccctggccatatgaccgagtacaagcccacggtgcgcctcgccacccgcgacgacgtccccagggccgtacgcaccctcgccgccgcgttcgccgactaccccgccacgcgccacaccgtcgatccggaccgccacatcgagcgggtcaccgagctgcaagaactcttcctcacgcgcgtcgggctcgacatcggcaaggtgtgggtcgcggacgacggcgccgcggtggcggtctggaccacgccggagagcgtcgaagcgggggcggtgttcgccgagatcggcccgcgcatggccgagttgagcggttcccggctggccgcgcagcaacagatggaaggcctcctggcgccgcaccggcccaaggagcccgcgtggttcctggccaccgtcggcgtctcgcccgaccaccagggcaagggtctgggcagcgccgtcgtgctccccggagtggaggcggccgagcgcgccggggtgcccgccttcctggagacctccgcgccccgcaacctccccttctacgagcggctcggcttcaccgtcaccgccgacgtcgaggtgcccgaaggaccgcgcacctggtgcatgacccgcaagcccggtgcctga

SEQ ID NO: 2078 - DNA, 2850 bp, Artificial Sequence
  Synthetic Polynucleotide
atggccttaccagtgaccgccttgctcctgccgctggccttgctgctccacgccgccaggccggcatgcgaagtgcagctgcttgaaagtggcggcggactgattcagcctggcggatctctgagactgagctgtgccgccagcggcttcaccttttctagccacgccatgacctgggtccgacaggcacctggaaaagggcttgaatgggtgtccgccatcagcggctctggcgattacacacactacgccgacagcgtgaagggcagattcaccatcagcagagacaacagcaagaacaccgtgtacctccagatgaacagcctgagagccgaggacagcgccgtgtattattgcgccaaggatgaggatggcggcagcctgcttggacacagaggacaaggcaccctggtcaccgtttcttccggtaccggcggaggcggatctggcggcggaggtagcggtggcggaggatctgaattcggatctctcgagcagagcttcggcctgctggaccccaagctgtgctacctgctggatggcatcctgttcatctacggcgtgatcctgaccgccctgttcctgagggaccaaagactgcctcctgacgctcacaaacctccaggcggaggcagcttcagaacccctatccaagaggaacaggctgacgcccacagcaccctggcaaaaattagcactagtagagtgaagttcagcagaagcgccgacgcccctgcctaccagcagggacagaaccaactgtacaacgagctgaacctgggcagacgggaagagtacgacgtgctggacaagcggagaggcagggaccctgagatgggcggaaagccccagcggagaaagaacccccaggaaggactgtataacgaactccagaaagacaagatggccgaagcctacagcgagatcggcatgaagggcgagcggagaagaggcaagggccacgatggcctgtaccagggcctgagcaccgccaccaaggacacctatgacgccctgcacatgcaggccctgcctccaagaagggccaagcgatctggatctggagcaacaaacttctcactactcaaacaagcaggtgacgtggaggagaatcccgggcctatggactggatttggcgcatccttttccttgtcggcgctgctaccggcgcgcattccgggcccgaagtgcagctggttgaatctggcggaggactggttcaggctggcggatctctgagactgtcttgtgccgccagcggcagaacctttagcatgggctggtttagacaggcccctggcaaagagagagagttcgtcgccgccatcacatactctggcggcagcccttactacgccgactctgtgaagggcagattcaccatcagccgggacaacgccaagaacaccgtgtacctccagatgaacagcctgaagcctgaggacaccgccgtgtactactgcgccgccaatccaacatacggcagcgactggaacgccgagaattggggccagggaacccaagtgacagtgtctagcggatccggcggcggaggatctggcggaggcggatctgggggcggaggctctttcgaaggcagcacgcgtcagagttttgggttgttggaccctaaattgtgctatctgttggacggaatcctgttcatttacggagtgatcctgaccgcattgttcctgcgcgatcagaggctgccacctgatgctcataagccacctggcggcggatctttcaggaccccaattcaagaagaacaagccgacgctcactctaccctggctaagatcagctctagacgggttaagttttccagatccgcagacgcacccgcttaccaacaagggcagaaccaactctacaatgaacttaatttggggcggagggaagagtacgacgttctggacaaaaggaggggacgagatcccgagatgggcggaaagcctcagcgaaggaagaatccgcaagaggggctttataacgaactccagaaagataaaatggcagaagcctatagtgagattgggatgaagggagaaaggaggaggggtaaaggtcacgatgggttgtaccaaggattgagcacagccactaaagatacctatgatgcgctccacatgcaggccctgccgccaagacgcgccaagagaagcggatctggcgtgaagcagaccctgaatttcgacctgctgaagctggctggcgacgtggaatccaacccaggccctggccatatgaccgagtacaagcccacggtgcgcctcgccacccgcgacgacgtccccagggccgtacgcaccctcgccgccgcgttcgccgactaccccgccacgcgccacaccgtcgatccggaccgccacatcgagcgggtcaccgagctgcaagaactcttcctcacgcgcgtcgggctcgacatcggcaaggtgtgggtcgcggacgacggcgccgcggtggcggtctggaccacgccggagagcgtcgaagcgggggcggtgttcgccgagatcggcccgcgcatggccgagttgagcggttcccggctggccgcgcagcaacagatggaaggcctcctggcgccgcaccggcccaaggagcccgcgtggttcctggccaccgtcggcgtctcgcccgaccaccagggcaagggtctgggcagcgccgtcgtgctccccggagtggaggcggccgagcgcgccggggtgcccgccttcctggagacctccgcgccccgcaacctccccttctacgagcggctcggcttcaccgtcaccgccgacgtcgaggtgcccgaaggaccgcgcacctggtgcatgacccgcaagcccggtgcctga

SEQ ID NO: 2079 - DNA, 3297 bp, Artificial Sequence
  Synthetic Polynucleotide
atggccttaccagtgaccgccttgctcctgccgctggccttgctgctccacgccgccaggccggacatccagatgacacagagccctagcagcctgtctgccagcgtgggagacagagtgaccatcacatgcaaggccagcgaccacatcaacaactggctggcctggtatcagcagaagcctggacaggcccctaagctgctgatctacggcgctaccacactggaaacaggcgtgcccagcagattttctggcagcggctctggcaccgactacaccctgacaatatccagcctccagcctgaggacttcgccacctactactgtcagcagagctggaacaccccttggacattcggccagggcaccaagctggaaatcaagagactcgagggacagcctaaggccaatcctaccgtgacactgttccctccaagcagcgaagaactccaggccaacaaggccacacttgtgtgcctgatctccgacttctaccctggggctgtgacagtggcttggaaggccgatggatctcctgtgaaagccggcgtggaaaccaccaagccatccaagcagagcaacaacaaatacgccgccagctcctacctgagcctgacacctgagcagtggaagtcccacagatcctacagctgccaagtgacccacgaaggcagcaccgtggaaaagacagtggcccctacagagtgcagcggatcccagagcttcggcctgctggaccccaagctgtgctacctgctggatggcatcctgttcatctacggcgtgatcctgaccgccctgttcctgagggaccaaagactgcctcctgacgctcacaaacctccaggcggaggcagcttcagaacccctatccaagaggaacaggctgacgcccacagcaccctggcaaaaattagcactagtagagtgaagttcagcagaagcgccgacgcccctgcctaccagcagggacagaaccaactgtacaacgagctgaacctgggcagacgggaagagtacgacgtgctggacaagcggagaggcagggaccctgagatgggcggaaagccccagcggagaaagaacccccaggaaggactgtataacgaactccagaaagacaagatggccgaagcctacagcgagatcggcatgaagggcgagcggagaagaggcaagggccacgatggcctgtaccagggcctgagcaccgccaccaaggacacctatgacgccctgcacatgcaggccctgcctccaagaagggccaagcgatctggatctggagcaacaaacttctcactactcaaacaagcaggtgacgtggaggagaatcccgggcctatggactggatttggcgcatccttttccttgtcggcgctgctaccggcgcgcattccttcgaacaagttcagcttcaacagcctggcgctgagctggtcaaacctggcgcttctgtgaagatgagctgcaaagccagcggctacgccttcagcagctactggatcaactggatgaagcagaaacccggccagggactcgaatggatcggccaaatctatcccggcgacggcgacaccaactacaacggcaagttcaagggcagagccacactgaccgccgatacctctagcagcacagcctacatgcagctgagcagcctgaccagcgaagatagcgccgtgtacttctgtgcccggtccatcacaacagtcgtgggctgcgctatggactattggggccagggaacaagcgtgaccgtgtctagtacgcgtgcctctacaaagggaccctccgtgtttcctctggctcccagcagcaagtctacaagcggaggaacagccgctctgggctgcctggtcaaggattactttcccgagcctgtgaccgtgtcctggaatagcggagcactgacaagcggcgtgcacacctttccagccgtgctgcaaagcagcggcctgtactctctgagcagcgtggtcacagtgcctagctctagcctgggcacccagacctacatctgcaatgtgaaccacaagcctagcaacaccaaggtggacaagagagtggaacccaagagctgtggtacccagagttttgggttgttggaccctaaattgtgctatctgttggacggaatcctgttcatttacggagtgatcctgaccgcattgttcctgcgcgatcagaggctgccacctgatgctcataagccacctggcggcggatctttcaggaccccaattcaagaagaacaagccgacgctcactctaccctggctaagatcagctctagacgggttaagttttccagatccgcagacgcacccgcttaccaacaagggcagaaccaactctacaatgaacttaatttggggcggagggaagagtacgacgttctggacaaaaggaggggacgagatcccgagatgggcggaaagcctcagcgaaggaagaatccgcaagaggggctttataacgaactccagaaagataaaatggcagaagcctatagtgagattgggatgaagggagaaaggaggaggggtaaaggtcacgatgggttgtaccaaggattgagcacagccactaaagatacctatgatgcgctccacatgcaggccctgccgccaagacgcgccaagagaagcggatctggcgtgaagcagaccctgaatttcgacctgctgaagctggctggcgacgtggaatccaacccaggccctggccatatggctacctacgaggtgctgtgcgaggtggcaagaaagctgggcaccgacgacagagaagtggtgctgttcctgctgaacgtgttcatccctcagcctacactggcccagctgatcggtgcactgagagccctgaaagaggaaggccggctgacctttcctctgctggccgaatgcctgttcagagccggaagaagggatctgctgcgggacctgctgcatctggaccccagatttctggaaagacacctggccggcaccatgagctacttcagcccttaccagctgaccgtgctgcacgttgacggcgaactgtgcgccagagatattcggagcctgatcttcctgagcaaggacaccatcggcagccggtctacccctcagacatttctgcactgggtgtactgcatggaaaacctggacctgctcggccccacagatgtggatgccctgatgtccatgctgagaagcctgagcagagtggacctccagagacaggtgcagacactgatgggactgcacctgagcggacctagccacagccagcactacagacacacccct

SEQ ID NO: 2080 - DNA, 3456 bp, Artificial Sequence
  Synthetic Polynucleotide
atggccttaccagtgaccgccttgctcctgccgctggccttgctgctccacgccgccaggccggacatccagatgacacagagccctagcagcctgtctgccagcgtgggagacagagtgaccatcacatgcaaggccagcgaccacatcaacaactggctggcctggtatcagcagaagcctggacaggcccctaagctgctgatctacggcgctaccacactggaaacaggcgtgcccagcagattttctggcagcggctctggcaccgactacaccctgacaatatccagcctccagcctgaggacttcgccacctactactgtcagcagagctggaacaccccttggacattcggccagggcaccaagctggaaatcaagagactcgagggacagcctaaggccaatcctaccgtgacactgttccctccaagcagcgaagaactccaggccaacaaggccacacttgtgtgcctgatctccgacttctaccctggggctgtgacagtggcttggaaggccgatggatctcctgtgaaagccggcgtggaaaccaccaagccatccaagcagagcaacaacaaatacgccgccagctcctacctgagcctgacacctgagcagtggaagtcccacagatcctacagctgccaagtgacccacgaaggcagcaccgtggaaaagacagtggcccctacagagtgcagcggatcccagagcttcggcctgctggaccccaagctgtgctacctgctggatggcatcctgttcatctacggcgtgatcctgaccgccctgttcctgagggaccaaagactgcctcctgacgctcacaaacctccaggcggaggcagcttcagaacccctatccaagaggaacaggctgacgcccacagcaccctggcaaaaattagcactagtagagtgaagttcagcagaagcgccgacgcccctgcctaccagcagggacagaaccaactgtacaacgagctgaacctgggcagacgggaagagtacgacgtgctggacaagcggagaggcagggaccctgagatgggcggaaagccccagcggagaaagaacccccaggaaggactgtataacgaactccagaaagacaagatggccgaagcctacagcgagatcggcatgaagggcgagcggagaagaggcaagggccacgatggcctgtaccagggcctgagcaccgccaccaaggacacctatgacgccctgcacatgcaggccctgcctccaagaagggccaagcgatctggatctggagcaacaaacttctcactactcaaacaagcaggtgacgtggaggagaatcccgggcctatggactggatttggcgcatccttttccttgtcggcgctgctaccggcgcgcattccttcgaacaagttcagcttcaacagcctggcgctgagctggtcaaacctggcgcttctgtgaagatgagctgcaaagccagcggctacgccttcagcagctactggatcaactggatgaagcagaaacccggccagggactcgaatggatcggccaaatctatcccggcgacggcgacaccaactacaacggcaagttcaagggcagagccacactgaccgccgatacctctagcagcacagcctacatgcagctgagcagcctgaccagcgaagatagcgccgtgtacttctgtgcccggtccatcacaacagtcgtgggctgcgctatggactattggggccagggaacaagcgtgaccgtgtctagtacgcgtgcctctacaaagggaccctccgtgtttcctctggctcccagcagcaagtctacaagcggaggaacagccgctctgggctgcctggtcaaggattactttcccgagcctgtgaccgtgtcctggaatagcggagcactgacaagcggcgtgcacacctttccagccgtgctgcaaagcagcggcctgtactctctgagcagcgtggtcacagtgcctagctctagcctgggcacccagacctacatctgcaatgtgaaccacaagcctagcaacaccaaggtggacaagagagtggaacccaagagctgtggtacccagagttttgggttgttggaccctaaattgtgctatctgttggacggaatcctgttcatttacggagtgatcctgaccgcattgttcctgcgcgatcagaggctgccacctgatgctcataagccacctggcggcggatctttcaggaccccaattcaagaagaacaagccgacgctcactctaccctggctaagatcagctctagacgggttaagttttccagatccgcagacgcacccgcttaccaacaagggcagaaccaactctacaatgaacttaatttggggcggagggaagagtacgacgttctggacaaaaggaggggacgagatcccgagatgggcggaaagcctcagcgaaggaagaatccgcaagaggggctttataacgaactccagaaagataaaatggcagaagcctatagtgagattgggatgaagggagaaaggaggaggggtaaaggtcacgatgggttgtaccaaggattgagcacagccactaaagatacctatgatgcgctccacatgcaggccctgccgccaagacgcgccaagagaagcggatctggcgtgaagcagaccctgaatttcgacctgctgaagctggctggcgacgtggaatccaacccaggccctggccatatgtccgactccaaggaggtccctagccttccatttttgcgacacttgctcgaagagttggacagccatgaggacagcttgctgctgtttctgtgtcacgacgcggccccgggctgcacgacggtcacgcaagctttgtgctcgcttagccaacagcgcaagctgaccctcgcggctctggtcgagatgctctacgtgctgcagcgtatggatcttctcaagagccgcttcgggctcagcaaggagggggccgagcaattgctgggcacaagctttctcacgcgctaccgcaagctcatggtttgcgtgggtgaggagctcgactcgagcgagctacgcgctctacgcttgttcgcgtgcaacctgaatccgagcctgagcacggcgctttctgagagcagccgctttgtcgagcttgtactcgcgcttgaaaacgtaggactcgtctcgccatcgagtgtttccgtgcttgcggacatgttgcgcactcttcggcgcctcgatttgtgccagcagcttgttgagtacgaacaacaagagcaagccaggtaccgttactgttacgcggcctcgccctcattgccagttcgtacgttacgtcgggggcacggcgcgagtgaacacgagcagctgtgcatgcccgtgcaagaatcctctgacagccccgagctgctgcgcacgcccgtacaagaatcctccagcgacagccccgagcaaacgact

SEQ ID NO: 2081 - DNA, 3333 bp, Artificial Sequence
  Synthetic Polynucleotide
atggccttaccagtgaccgccttgctcctgccgctggccttgctgctccacgccgccaggccggacatccagatgacacagagccctagcagcctgtctgccagcgtgggagacagagtgaccatcacatgcaaggccagcgaccacatcaacaactggctggcctggtatcagcagaagcctggacaggcccctaagctgctgatctacggcgctaccacactggaaacaggcgtgcccagcagattttctggcagcggctctggcaccgactacaccctgacaatatccagcctccagcctgaggacttcgccacctactactgtcagcagagctggaacaccccttggacattcggccagggcaccaagctggaaatcaagagactcgagggacagcctaaggccaatcctaccgtgacactgttccctccaagcagcgaagaactccaggccaacaaggccacacttgtgtgcctgatctccgacttctaccctggggctgtgacagtggcttggaaggccgatggatctcctgtgaaagccggcgtggaaaccaccaagccatccaagcagagcaacaacaaatacgccgccagctcctacctgagcctgacacctgagcagtggaagtcccacagatcctacagctgccaagtgacccacgaaggcagcaccgtggaaaagacagtggcccctacagagtgcagcggatcccagagcttcggcctgctggaccccaagctgtgctacctgctggatggcatcctgttcatctacggcgtgatcctgaccgccctgttcctgagggaccaaagactgcctcctgacgctcacaaacctccaggcggaggcagcttcagaacccctatccaagaggaacaggctgacgcccacagcaccctggcaaaaattagcactagtagagtgaagttcagcagaagcgccgacgcccctgcctaccagcagggacagaaccaactgtacaacgagctgaacctgggcagacgggaagagtacgacgtgctggacaagcggagaggcagggaccctgagatgggcggaaagccccagcggagaaagaacccccaggaaggactgtataacgaactccagaaagacaagatggccgaagcctacagcgagatcggcatgaagggcgagcggagaagaggcaagggccacgatggcctgtaccagggcctgagcaccgccaccaaggacacctatgacgccctgcacatgcaggccctgcctccaagaagggccaagcgatctggatctggagcaacaaacttctcactactcaaacaagcaggtgacgtggaggagaatcccgggcctatggactggatttggcgcatccttttccttgtcggcgctgctaccggcgcgcattccttcgaacaagttcagcttcaacagcctggcgctgagctggtcaaacctggcgcttctgtgaagatgagctgcaaagccagcggctacgccttcagcagctactggatcaactggatgaagcagaaacccggccagggactcgaatggatcggccaaatctatcccggcgacggcgacaccaactacaacggcaagttcaagggcagagccacactgaccgccgatacctctagcagcacagcctacatgcagctgagcagcctgaccagcgaagatagcgccgtgtacttctgtgcccggtccatcacaacagtcgtgggctgcgctatggactattggggccagggaacaagcgtgaccgtgtctagtacgcgtgcctctacaaagggaccctccgtgtttcctctggctcccagcagcaagtctacaagcggaggaacagccgctctgggctgcctggtcaaggattactttcccgagcctgtgaccgtgtcctggaatagcggagcactgacaagcggcgtgcacacctttccagccgtgctgcaaagcagcggcctgtactctctgagcagcgtggtcacagtgcctagctctagcctgggcacccagacctacatctgcaatgtgaaccacaagcctagcaacaccaaggtggacaagagagtggaacccaagagctgtggtacccagagttttgggttgttggaccctaaattgtgctatctgttggacggaatcctgttcatttacggagtgatcctgaccgcattgttcctgcgcgatcagaggctgccacctgatgctcataagccacctggcggcggatctttcaggaccccaattcaagaagaacaagccgacgctcactctaccctggctaagatcagctctagacgggttaagttttccagatccgcagacgcacccgcttaccaacaagggcagaaccaactctacaatgaacttaatttggggcggagggaagagtacgacgttctggacaaaaggaggggacgagatcccgagatgggcggaaagcctcagcgaaggaagaatccgcaagaggggctttataacgaactccagaaagataaaatggcagaagcctatagtgagattgggatgaagggagaaaggaggaggggtaaaggtcacgatgggttgtaccaaggattgagcacagccactaaagatacctatgatgcgctccacatgcaggccctgccgccaagacgcgccaagagaagcggatctggcgtgaagcagaccctgaatttcgacctgctgaagctggctggcgacgtggaatccaacccaggccctggccatatgaccgagtacaagcccacggtgcgcctcgccacccgcgacgacgtccccagggccgtacgcaccctcgccgccgcgttcgccgactaccccgccacgcgccacaccgtcgatccggaccgccacatcgagcgggtcaccgagctgcaagaactcttcctcacgcgcgtcgggctcgacatcggcaaggtgtgggtcgcggacgacggcgccgcggtggcggtctggaccacgccggagagcgtcgaagcgggggcggtgttcgccgagatcggcccgcgcatggccgagttgagcggttcccggctggccgcgcagcaacagatggaaggcctcctggcgccgcaccggcccaaggagcccgcgtggttcctggccaccgtcggcgtctcgcccgaccaccagggcaagggtctgggcagcgccgtcgtgctccccggagtggaggcggccgagcgcgccggggtgcccgccttcctggagacctccgcgccccgcaacctccccttctacgagcggctcggcttcaccgtcaccgccgacgtcgaggtgcccgaaggaccgcgcacctggtgcatgacccgcaagcccggtgcctga

SEQ ID NO: 2082 - DNA, 3744 bp, Artificial Sequence
  Synthetic Polynucleotide
atggccttaccagtgaccgccttgctcctgccgctggccttgctgctccacgccgccaggccggaagtgcagctggttgaatctggcggaggactggttcaggctggcggatctctgagactgtcttgtgccgccagcggcagaacctttagcatgggctggtttagacaggcccctggcaaagagagagagttcgtcgccgccatcacatactctggcggcagcccttactacgccgactctgtgaagggcagattcaccatcagccgggacaacgccaagaacaccgtgtacctccagatgaacagcctgaagcctgaggacaccgccgtgtactactgcgccgccaatccaacatacggcagcgactggaacgccgagaattggggccagggaacccaagtgacagtgtctagcggtaccggcggaggcggatctggcggcggaggtagcggtggcggaggatctgaattcgacatccagatgacacagagccctagcagcctgtctgccagcgtgggagacagagtgaccatcacatgcaaggccagcgaccacatcaacaactggctggcctggtatcagcagaagcctggacaggcccctaagctgctgatctacggcgctaccacactggaaacaggcgtgcccagcagattttctggcagcggctctggcaccgactacaccctgacaatatccagcctccagcctgaggacttcgccacctactactgtcagcagagctggaacaccccttggacattcggccagggcaccaagctggaaatcaagagactcgagggacagcctaaggccaatcctaccgtgacactgttccctccaagcagcgaagaactccaggccaacaaggccacacttgtgtgcctgatctccgacttctaccctggggctgtgacagtggcttggaaggccgatggatctcctgtgaaagccggcgtggaaaccaccaagccatccaagcagagcaacaacaaatacgccgccagctcctacctgagcctgacacctgagcagtggaagtcccacagatcctacagctgccaagtgacccacgaaggcagcaccgtggaaaagacagtggcccctacagagtgcagcggatcccagagcttcggcctgctggaccccaagctgtgctacctgctggatggcatcctgttcatctacggcgtgatcctgaccgccctgttcctgagggaccaaagactgcctcctgacgctcacaaacctccaggcggaggcagcttcagaacccctatccaagaggaacaggctgacgcccacagcaccctggcaaaaattagcactagtagagtgaagttcagcagaagcgccgacgcccctgcctaccagcagggacagaaccaactgtacaacgagctgaacctgggcagacgggaagagtacgacgtgctggacaagcggagaggcagggaccctgagatgggcggaaagccccagcggagaaagaacccccaggaaggactgtataacgaactccagaaagacaagatggccgaagcctacagcgagatcggcatgaagggcgagcggagaagaggcaagggccacgatggcctgtaccagggcctgagcaccgccaccaaggacacctatgacgccctgcacatgcaggccctgcctccaagaagggccaagcgatctggatctggagcaacaaacttctcactactcaaacaagcaggtgacgtggaggagaatcccgggcctatggactggatttggcgcatccttttccttgtcggcgctgctaccggcgcgcattccttcgaacaagttcagcttcaacagcctggcgctgagctggtcaaacctggcgcttctgtgaagatgagctgcaaagccagcggctacgccttcagcagctactggatcaactggatgaagcagaaacccggccagggactcgaatggatcggccaaatctatcccggcgacggcgacaccaactacaacggcaagttcaagggcagagccacactgaccgccgatacctctagcagcacagcctacatgcagctgagcagcctgaccagcgaagatagcgccgtgtacttctgtgcccggtccatcacaacagtcgtgggctgcgctatggactattggggccagggaacaagcgtgaccgtgtctagtacgcgtgcctctacaaagggaccctccgtgtttcctctggctcccagcagcaagtctacaagcggaggaacagccgctctgggctgcctggtcaaggattactttcccgagcctgtgaccgtgtcctggaatagcggagcactgacaagcggcgtgcacacctttccagccgtgctgcaaagcagcggcctgtactctctgagcagcgtggtcacagtgcctagctctagcctgggcacccagacctacatctgcaatgtgaaccacaagcctagcaacaccaaggtggacaagagagtggaacccaagagctgtggtacccagagttttgggttgttggaccctaaattgtgctatctgttggacggaatcctgttcatttacggagtgatcctgaccgcattgttcctgcgcgatcagaggctgccacctgatgctcataagccacctggcggcggatctttcaggaccccaattcaagaagaacaagccgacgctcactctaccctggctaagatcagctctagacgggttaagttttccagatccgcagacgcacccgcttaccaacaagggcagaaccaactctacaatgaacttaatttggggcggagggaagagtacgacgttctggacaaaaggaggggacgagatcccgagatgggcggaaagcctcagcgaaggaagaatccgcaagaggggctttataacgaactccagaaagataaaatggcagaagcctatagtgagattgggatgaagggagaaaggaggaggggtaaaggtcacgatgggttgtaccaaggattgagcacagccactaaagatacctatgatgcgctccacatgcaggccctgccgccaagacgcgccaagagaagcggatctggcgtgaagcagaccctgaatttcgacctgctgaagctggctggcgacgtggaatccaacccaggccctggccatatgaccgagtacaagcccacggtgcgcctcgccacccgcgacgacgtccccagggccgtacgcaccctcgccgccgcgttcgccgactaccccgccacgcgccacaccgtcgatccggaccgccacatcgagcgggtcaccgagctgcaagaactcttcctcacgcgcgtcgggctcgacatcggcaaggtgtgggtcgcggacgacggcgccgcggtggcggtctggaccacgccggagagcgtcgaagcgggggcggtgttcgccgagatcggcccgcgcatggccgagttgagcggttcccggctggccgcgcagcaacagatggaaggcctcctggcgccgcaccggcccaaggagcccgcgtggttcctggccaccgtcggcgtctcgcccgaccaccagggcaagggtctgggcagcgccgtcgtgctccccggagtggaggcggccgagcgcgccggggtgcccgccttcctggagacctccgcgccccgcaacctccccttctacgagcggctcggcttcaccgtcaccgccgacgtcgaggtgcccgaaggaccgcgcacctggtgcatgacccgcaagcccggtgcctga

SEQ ID NO: 2083 - DNA, 4155 bp, Artificial Sequence
  Synthetic Polynucleotide
atggccttaccagtgaccgccttgctcctgccgctggccttgctgctccacgccgccaggccggaagtgcagctggttgaatctggcggaggactggttcaggctggcggatctctgagactgtcttgtgccgccagcggcagaacctttagcatgggctggtttagacaggcccctggcaaagagagagagttcgtcgccgccatcacatactctggcggcagcccttactacgccgactctgtgaagggcagattcaccatcagccgggacaacgccaagaacaccgtgtacctccagatgaacagcctgaagcctgaggacaccgccgtgtactactgcgccgccaatccaacatacggcagcgactggaacgccgagaattggggccagggaacccaagtgacagtgtctagcggtaccggcggaggcggatctggcggcggaggtagcggtggcggaggatctgaattcgacatccagatgacacagagccctagcagcctgtctgccagcgtgggagacagagtgaccatcacatgcaaggccagcgaccacatcaacaactggctggcctggtatcagcagaagcctggacaggcccctaagctgctgatctacggcgctaccacactggaaacaggcgtgcccagcagattttctggcagcggctctggcaccgactacaccctgacaatatccagcctccagcctgaggacttcgccacctactactgtcagcagagctggaacaccccttggacattcggccagggcaccaagctggaaatcaagagactcgagggacagcctaaggccaatcctaccgtgacactgttccctccaagcagcgaagaactccaggccaacaaggccacacttgtgtgcctgatctccgacttctaccctggggctgtgacagtggcttggaaggccgatggatctcctgtgaaagccggcgtggaaaccaccaagccatccaagcagagcaacaacaaatacgccgccagctcctacctgagcctgacacctgagcagtggaagtcccacagatcctacagctgccaagtgacccacgaaggcagcaccgtggaaaagacagtggcccctacagagtgcagcggatcccagagcttcggcctgctggaccccaagctgtgctacctgctggatggcatcctgttcatctacggcgtgatcctgaccgccctgttcctgagggaccaaagactgcctcctgacgctcacaaacctccaggcggaggcagcttcagaacccctatccaagaggaacaggctgacgcccacagcaccctggcaaaaattagcactagtagagtgaagttcagcagaagcgccgacgcccctgcctaccagcagggacagaaccaactgtacaacgagctgaacctgggcagacgggaagagtacgacgtgctggacaagcggagaggcagggaccctgagatgggcggaaagccccagcggagaaagaacccccaggaaggactgtataacgaactccagaaagacaagatggccgaagcctacagcgagatcggcatgaagggcgagcggagaagaggcaagggccacgatggcctgtaccagggcctgagcaccgccaccaaggacacctatgacgccctgcacatgcaggccctgcctccaagaagggccaagcgatctggatctggagcaacaaacttctcactactcaaacaagcaggtgacgtggaggagaatcccgggcctatggactggatttggcgcatccttttccttgtcggcgctgctaccggcgcgcattccgggcccgaagtgcaactggttgaatccggtggcggcctggtgcaagcaggcggatctctcagacttagctgtgccgcctccggcagaaccttcacaatgggatggtttaggcaggctccagggaaagagagagagttcgtcgccgccatctctctgtctcccacactggcctactacgccgactctgtgaaaggccggttcaccatctccagagataatgccaagaacaccgtggtgctgcaaatgaactctctgaaacccgaggatacagccctgtactattgtgccgctgaccggaagtccgtgatgagcatcagacccgattactggggacagggcacacaagtcacagtgtcctctggatccggcggcggaggatctggcggaggcggatctgggggcggaggctctttcgaacaagttcagcttcaacagcctggcgctgagctggtcaaacctggcgcttctgtgaagatgagctgcaaagccagcggctacgccttcagcagctactggatcaactggatgaagcagaaacccggccagggactcgaatggatcggccaaatctatcccggcgacggcgacaccaactacaacggcaagttcaagggcagagccacactgaccgccgatacctctagcagcacagcctacatgcagctgagcagcctgaccagcgaagatagcgccgtgtacttctgtgcccggtccatcacaacagtcgtgggctgcgctatggactattggggccagggaacaagcgtgaccgtgtctagtacgcgtgcctctacaaagggaccctccgtgtttcctctggctcccagcagcaagtctacaagcggaggaacagccgctctgggctgcctggtcaaggattactttcccgagcctgtgaccgtgtcctggaatagcggagcactgacaagcggcgtgcacacctttccagccgtgctgcaaagcagcggcctgtactctctgagcagcgtggtcacagtgcctagctctagcctgggcacccagacctacatctgcaatgtgaaccacaagcctagcaacaccaaggtggacaagagagtggaacccaagagctgtggtacccagagttttgggttgttggaccctaaattgtgctatctgttggacggaatcctgttcatttacggagtgatcctgaccgcattgttcctgcgcgatcagaggctgccacctgatgctcataagccacctggcggcggatctttcaggaccccaattcaagaagaacaagccgacgctcactctaccctggctaagatcagctctagacgggttaagttttccagatccgcagacgcacccgcttaccaacaagggcagaaccaactctacaatgaacttaatttggggcggagggaagagtacgacgttctggacaaaaggaggggacgagatcccgagatgggcggaaagcctcagcgaaggaagaatccgcaagaggggctttataacgaactccagaaagataaaatggcagaagcctatagtgagattgggatgaagggagaaaggaggaggggtaaaggtcacgatgggttgtaccaaggattgagcacagccactaaagatacctatgatgcgctccacatgcaggccctgccgccaagacgcgccaagagaagcggatctggcgtgaagcagaccctgaatttcgacctgctgaagctggctggcgacgtggaatccaacccaggccctggccatatgaccgagtacaagcccacggtgcgcctcgccacccgcgacgacgtccccagggccgtacgcaccctcgccgccgcgttcgccgactaccccgccacgcgccacaccgtcgatccggaccgccacatcgagcgggtcaccgagctgcaagaactcttcctcacgcgcgtcgggctcgacatcggcaaggtgtgggtcgcggacgacggcgccgcggtggcggtctggaccacgccggagagcgtcgaagcgggggcggtgttcgccgagatcggcccgcgcatggccgagttgagcggttcccggctggccgcgcagcaacagatggaaggcctcctggcgccgcaccggcccaaggagcccgcgtggttcctggccaccgtcggcgtctcgcccgaccaccagggcaagggtctgggcagcgccgtcgtgctccccggagtggaggcggccgagcgcgccggggtgcccgccttcctggagacctccgcgccccgcaacctccccttctacgagcggctcggcttcaccgtcaccgccgacgtcgaggtgcccgaaggaccgcgcacctggtgcatgacccgcaagcccggtgcctga

SEQ ID NO: 2084 - DNA, 3354 bp, Artificial Sequence
  Synthetic Polynucleotide
atggccttaccagtgaccgccttgctcctgccgctggccttgctgctccacgccgccaggccggaagtgcagctggttgaatctggcggaggactggttcaggctggcggatctctgagactgtcttgtgccgccagcggcagaacctttagcatgggctggtttagacaggcccctggcaaagagagagagttcgtcgccgccatcacatactctggcggcagcccttactacgccgactctgtgaagggcagattcaccatcagccgggacaacgccaagaacaccgtgtacctccagatgaacagcctgaagcctgaggacaccgccgtgtactactgcgccgccaatccaacatacggcagcgactggaacgccgagaattggggccagggaacccaagtgacagtgtctagcctcgagggacagcctaaggccaatcctaccgtgacactgttccctccaagcagcgaagaactccaggccaacaaggccacacttgtgtgcctgatctccgacttctaccctggggctgtgacagtggcttggaaggccgatggatctcctgtgaaagccggcgtggaaaccaccaagccatccaagcagagcaacaacaaatacgccgccagctcctacctgagcctgacacctgagcagtggaagtcccacagatcctacagctgccaagtgacccacgaaggcagcaccgtggaaaagacagtggcccctacagagtgcagcggatcccagagcttcggcctgctggaccccaagctgtgctacctgctggatggcatcctgttcatctacggcgtgatcctgaccgccctgttcctgagggaccaaagactgcctcctgacgctcacaaacctccaggcggaggcagcttcagaacccctatccaagaggaacaggctgacgcccacagcaccctggcaaaaattagcactagtagagtgaagttcagcagaagcgccgacgcccctgcctaccagcagggacagaaccaactgtacaacgagctgaacctgggcagacgggaagagtacgacgtgctggacaagcggagaggcagggaccctgagatgggcggaaagccccagcggagaaagaacccccaggaaggactgtataacgaactccagaaagacaagatggccgaagcctacagcgagatcggcatgaagggcgagcggagaagaggcaagggccacgatggcctgtaccagggcctgagcaccgccaccaaggacacctatgacgccctgcacatgcaggccctgcctccaagaagggccaagcgatctggatctggagcaacaaacttctcactactcaaacaagcaggtgacgtggaggagaatcccgggcctatggactggatttggcgcatccttttccttgtcggcgctgctaccggcgcgcattccgggcccgaagtgcaactggttgaatccggtggcggcctggtgcaagcaggcggatctctcagacttagctgtgccgcctccggcagaaccttcacaatgggatggtttaggcaggctccagggaaagagagagagttcgtcgccgccatctctctgtctcccacactggcctactacgccgactctgtgaaaggccggttcaccatctccagagataatgccaagaacaccgtggtgctgcaaatgaactctctgaaacccgaggatacagccctgtactattgtgccgctgaccggaagtccgtgatgagcatcagacccgattactggggacagggcacacaagtcacagtgtcctctacgcgtgcctctacaaagggaccctccgtgtttcctctggctcccagcagcaagtctacaagcggaggaacagccgctctgggctgcctggtcaaggattactttcccgagcctgtgaccgtgtcctggaatagcggagcactgacaagcggcgtgcacacctttccagccgtgctgcaaagcagcggcctgtactctctgagcagcgtggtcacagtgcctagctctagcctgggcacccagacctacatctgcaatgtgaaccacaagcctagcaacaccaaggtggacaagagagtggaacccaagagctgtggtacccagagttttgggttgttggaccctaaattgtgctatctgttggacggaatcctgttcatttacggagtgatcctgaccgcattgttcctgcgcgatcagaggctgccacctgatgctcataagccacctggcggcggatctttcaggaccccaattcaagaagaacaagccgacgctcactctaccctggctaagatcagctctagacgggttaagttttccagatccgcagacgcacccgcttaccaacaagggcagaaccaactctacaatgaacttaatttggggcggagggaagagtacgacgttctggacaaaaggaggggacgagatcccgagatgggcggaaagcctcagcgaaggaagaatccgcaagaggggctttataacgaactccagaaagataaaatggcagaagcctatagtgagattgggatgaagggagaaaggaggaggggtaaaggtcacgatgggttgtaccaaggattgagcacagccactaaagatacctatgatgcgctccacatgcaggccctgccgccaagacgcgccaagagaagcggatctggcgtgaagcagaccctgaatttcgacctgctgaagctggctggcgacgtggaatccaacccaggccctggccatatgaccgagtacaagcccacggtgcgcctcgccacccgcgacgacgtccccagggccgtacgcaccctcgccgccgcgttcgccgactaccccgccacgcgccacaccgtcgatccggaccgccacatcgagcgggtcaccgagctgcaagaactcttcctcacgcgcgtcgggctcgacatcggcaaggtgtgggtcgcggacgacggcgccgcggtggcggtctggaccacgccggagagcgtcgaagcgggggcggtgttcgccgagatcggcccgcgcatggccgagttgagcggttcccggctggccgcgcagcaacagatggaaggcctcctggcgccgcaccggcccaaggagcccgcgtggttcctggccaccgtcggcgtctcgcccgaccaccagggcaagggtctgggcagcgccgtcgtgctccccggagtggaggcggccgagcgcgccggggtgcccgccttcctggagacctccgcgccccgcaacctccccttctacgagcggctcggcttcaccgtcaccgccgacgtcgaggtgcccgaaggaccgcgcacctggtgcatgacccgcaagcccggtgcctga

SEQ ID NO: 2085 - DNA, 3378 bp, Artificial Sequence
  Synthetic Polynucleotide
atggccttaccagtgaccgccttgctcctgccgctggccttgctgctccacgccgccaggccggacatccagatgacacagagccctagcagcctgtctgccagcgtgggagacagagtgaccatcacatgcaaggccagcgaccacatcaacaactggctggcctggtatcagcagaagcctggacaggcccctaagctgctgatctacggcgctaccacactggaaacaggcgtgcccagcagattttctggcagcggctctggcaccgactacaccctgacaatatccagcctccagcctgaggacttcgccacctactactgtcagcagagctggaacaccccttggacattcggccagggcaccaagctggaaatcaagagactcgaggacctgaagaacgtgttcccacctgaggtggccgtgttcgagcctagcgaggccgagatcagccacacccagaaagccaccctcgtgtgcctggctaccggcttctaccccgaccatgtggaactgtcttggtgggtcaacggcaaagaggtgcacagcggcgtgtctaccgacccccagccactgaaagaacagcccgccctgaacgacagccggtactgcctgagcagcagactgagagtgtccgccaccttctggcagaacccccggaaccacttcagatgccaggtgcagttctacggcctgagcgagaacgacgagtggacccaggacagagccaagcccgtgacccagatcgtgtctgccgaagcctggggcagagccgattgcggatcccagagcttcggcctgctggaccccaagctgtgctacctgctggatggcatcctgttcatctacggcgtgatcctgaccgccctgttcctgagggaccaaagactgcctcctgacgctcacaaacctccaggcggaggcagcttcagaacccctatccaagaggaacaggctgacgcccacagcaccctggcaaaaattagcactagtagagtgaagttcagcagaagcgccgacgcccctgcctaccagcagggacagaaccaactgtacaacgagctgaacctgggcagacgggaagagtacgacgtgctggacaagcggagaggcagggaccctgagatgggcggaaagccccagcggagaaagaacccccaggaaggactgtataacgaactccagaaagacaagatggccgaagcctacagcgagatcggcatgaagggcgagcggagaagaggcaagggccacgatggcctgtaccagggcctgagcaccgccaccaaggacacctatgacgccctgcacatgcaggccctgcctccaagaagggccaagcgatctggatctggagcaacaaacttctcactactcaaacaagcaggtgacgtggaggagaatcccgggcctatggactggatttggcgcatccttttccttgtcggcgctgctaccggcgcgcattccttcgaacaagttcagcttcaacagcctggcgctgagctggtcaaacctggcgcttctgtgaagatgagctgcaaagccagcggctacgccttcagcagctactggatcaactggatgaagcagaaacccggccagggactcgaatggatcggccaaatctatcccggcgacggcgacaccaactacaacggcaagttcaagggcagagccacactgaccgccgatacctctagcagcacagcctacatgcagctgagcagcctgaccagcgaagatagcgccgtgtacttctgtgcccggtccatcacaacagtcgtgggctgcgctatggactattggggccagggaacaagcgtgaccgtgtctagtacgcgtatccagaaccctgatcctgccgtgtaccagctgcgggatagcaagagcagcgacaagagcgtgtgtctgttcaccgacttcgacagccagaccaacgtgtcccagagcaaggactccgacgtgtacatcaccgataagaccgtgctggacatgcggagcatggacttcaagagcaactccgccgtggcctggtccaacaagtccgatttcgcctgcgccaacgccttcaacaacagcattatccccgaggacacattcttcccaagccccgagagcagctgcggtacccagagttttgggttgttggaccctaaattgtgctatctgttggacggaatcctgttcatttacggagtgatcctgaccgcattgttcctgcgcgatcagaggctgccacctgatgctcataagccacctggcggcggatctttcaggaccccaattcaagaagaacaagccgacgctcactctaccctggctaagatcagctctagacgggttaagttttccagatccgcagacgcacccgcttaccaacaagggcagaaccaactctacaatgaacttaatttggggcggagggaagagtacgacgttctggacaaaaggaggggacgagatcccgagatgggcggaaagcctcagcgaaggaagaatccgcaagaggggctttataacgaactccagaaagataaaatggcagaagcctatagtgagattgggatgaagggagaaaggaggaggggtaaaggtcacgatgggttgtaccaaggattgagcacagccactaaagatacctatgatgcgctccacatgcaggccctgccgccaagacgcgccaagagaagcggatctggcgtgaagcagaccctgaatttcgacctgctgaagctggctggcgacgtggaatccaacccaggccctggccatatgaccgagtacaagcccacggtgcgcctcgccacccgcgacgacgtccccagggccgtacgcaccctcgccgccgcgttcgccgactaccccgccacgcgccacaccgtcgatccggaccgccacatcgagcgggtcaccgagctgcaagaactcttcctcacgcgcgtcgggctcgacatcggcaaggtgtgggtcgcggacgacggcgccgcggtggcggtctggaccacgccggagagcgtcgaagcgggggcggtgttcgccgagatcggcccgcgcatggccgagttgagcggttcccggctggccgcgcagcaacagatggaaggcctcctggcgccgcaccggcccaaggagcccgcgtggttcctggccaccgtcggcgtctcgcccgaccaccagggcaagggtctgggcagcgccgtcgtgctccccggagtggaggcggccgagcgcgccggggtgcccgccttcctggagacctccgcgccccgcaacctccccttctacgagcggctcggcttcaccgtcaccgccgacgtcgaggtgcccgaaggaccgcgcacctggtgcatgacccgcaagcccggtgcctga

SEQ ID NO: 2086 - DNA, 3789 bp, Artificial Sequence
  Synthetic Polynucleotide
atggccttaccagtgaccgccttgctcctgccgctggccttgctgctccacgccgccaggccggaagtgcagctggttgaatctggcggaggactggttcaggctggcggatctctgagactgtcttgtgccgccagcggcagaacctttagcatgggctggtttagacaggcccctggcaaagagagagagttcgtcgccgccatcacatactctggcggcagcccttactacgccgactctgtgaagggcagattcaccatcagccgggacaacgccaagaacaccgtgtacctccagatgaacagcctgaagcctgaggacaccgccgtgtactactgcgccgccaatccaacatacggcagcgactggaacgccgagaattggggccagggaacccaagtgacagtgtctagcggtaccggcggaggcggatctggcggcggaggtagcggtggcggaggatctgaattcgacatccagatgacacagagccctagcagcctgtctgccagcgtgggagacagagtgaccatcacatgcaaggccagcgaccacatcaacaactggctggcctggtatcagcagaagcctggacaggcccctaagctgctgatctacggcgctaccacactggaaacaggcgtgcccagcagattttctggcagcggctctggcaccgactacaccctgacaatatccagcctccagcctgaggacttcgccacctactactgtcagcagagctggaacaccccttggacattcggccagggcaccaagctggaaatcaagagactcgaggacctgaagaacgtgttcccacctgaggtggccgtgttcgagcctagcgaggccgagatcagccacacccagaaagccaccctcgtgtgcctggctaccggcttctaccccgaccatgtggaactgtcttggtgggtcaacggcaaagaggtgcacagcggcgtgtctaccgacccccagccactgaaagaacagcccgccctgaacgacagccggtactgcctgagcagcagactgagagtgtccgccaccttctggcagaacccccggaaccacttcagatgccaggtgcagttctacggcctgagcgagaacgacgagtggacccaggacagagccaagcccgtgacccagatcgtgtctgccgaagcctggggcagagccgattgcggatcccagagcttcggcctgctggaccccaagctgtgctacctgctggatggcatcctgttcatctacggcgtgatcctgaccgccctgttcctgagggaccaaagactgcctcctgacgctcacaaacctccaggcggaggcagcttcagaacccctatccaagaggaacaggctgacgcccacagcaccctggcaaaaattagcactagtagagtgaagttcagcagaagcgccgacgcccctgcctaccagcagggacagaaccaactgtacaacgagctgaacctgggcagacgggaagagtacgacgtgctggacaagcggagaggcagggaccctgagatgggcggaaagccccagcggagaaagaacccccaggaaggactgtataacgaactccagaaagacaagatggccgaagcctacagcgagatcggcatgaagggcgagcggagaagaggcaagggccacgatggcctgtaccagggcctgagcaccgccaccaaggacacctatgacgccctgcacatgcaggccctgcctccaagaagggccaagcgatctggatctggagcaacaaacttctcactactcaaacaagcaggtgacgtggaggagaatcccgggcctatggactggatttggcgcatccttttccttgtcggcgctgctaccggcgcgcattccttcgaacaagttcagcttcaacagcctggcgctgagctggtcaaacctggcgcttctgtgaagatgagctgcaaagccagcggctacgccttcagcagctactggatcaactggatgaagcagaaacccggccagggactcgaatggatcggccaaatctatcccggcgacggcgacaccaactacaacggcaagttcaagggcagagccacactgaccgccgatacctctagcagcacagcctacatgcagctgagcagcctgaccagcgaagatagcgccgtgtacttctgtgcccggtccatcacaacagtcgtgggctgcgctatggactattggggccagggaacaagcgtgaccgtgtctagtacgcgtatccagaaccctgatcctgccgtgtaccagctgcgggatagcaagagcagcgacaagagcgtgtgtctgttcaccgacttcgacagccagaccaacgtgtcccagagcaaggactccgacgtgtacatcaccgataagaccgtgctggacatgcggagcatggacttcaagagcaactccgccgtggcctggtccaacaagtccgatttcgcctgcgccaacgccttcaacaacagcattatccccgaggacacattcttcccaagccccgagagcagctgcggtacccagagttttgggttgttggaccctaaattgtgctatctgttggacggaatcctgttcatttacggagtgatcctgaccgcattgttcctgcgcgatcagaggctgccacctgatgctcataagccacctggcggcggatctttcaggaccccaattcaagaagaacaagccgacgctcactctaccctggctaagatcagctctagacgggttaagttttccagatccgcagacgcacccgcttaccaacaagggcagaaccaactctacaatgaacttaatttggggcggagggaagagtacgacgttctggacaaaaggaggggacgagatcccgagatgggcggaaagcctcagcgaaggaagaatccgcaagaggggctttataacgaactccagaaagataaaatggcagaagcctatagtgagattgggatgaagggagaaaggaggaggggtaaaggtcacgatgggttgtaccaaggattgagcacagccactaaagatacctatgatgcgctccacatgcaggccctgccgccaagacgcgccaagagaagcggatctggcgtgaagcagaccctgaatttcgacctgctgaagctggctggcgacgtggaatccaacccaggccctggccatatgaccgagtacaagcccacggtgcgcctcgccacccgcgacgacgtccccagggccgtacgcaccctcgccgccgcgttcgccgactaccccgccacgcgccacaccgtcgatccggaccgccacatcgagcgggtcaccgagctgcaagaactcttcctcacgcgcgtcgggctcgacatcggcaaggtgtgggtcgcggacgacggcgccgcggtggcggtctggaccacgccggagagcgtcgaagcgggggcggtgttcgccgagatcggcccgcgcatggccgagttgagcggttcccggctggccgcgcagcaacagatggaaggcctcctggcgccgcaccggcccaaggagcccgcgtggttcctggccaccgtcggcgtctcgcccgaccaccagggcaagggtctgggcagcgccgtcgtgctccccggagtggaggcggccgagcgcgccggggtgcccgccttcctggagacctccgcgccccgcaacctccccttctacgagcggctcggcttcaccgtcaccgccgacgtcgaggtgcccgaaggaccgcgcacctggtgcatgacccgcaagcccggtgcctga

SEQ ID NO: 2087 - DNA, 4200 bp, Artificial Sequence
  Synthetic Polynucleotide
atggccttaccagtgaccgccttgctcctgccgctggccttgctgctccacgccgccaggccggaagtgcagctggttgaatctggcggaggactggttcaggctggcggatctctgagactgtcttgtgccgccagcggcagaacctttagcatgggctggtttagacaggcccctggcaaagagagagagttcgtcgccgccatcacatactctggcggcagcccttactacgccgactctgtgaagggcagattcaccatcagccgggacaacgccaagaacaccgtgtacctccagatgaacagcctgaagcctgaggacaccgccgtgtactactgcgccgccaatccaacatacggcagcgactggaacgccgagaattggggccagggaacccaagtgacagtgtctagcggtaccggcggaggcggatctggcggcggaggtagcggtggcggaggatctgaattcgacatccagatgacacagagccctagcagcctgtctgccagcgtgggagacagagtgaccatcacatgcaaggccagcgaccacatcaacaactggctggcctggtatcagcagaagcctggacaggcccctaagctgctgatctacggcgctaccacactggaaacaggcgtgcccagcagattttctggcagcggctctggcaccgactacaccctgacaatatccagcctccagcctgaggacttcgccacctactactgtcagcagagctggaacaccccttggacattcggccagggcaccaagctggaaatcaagagactcgaggacctgaagaacgtgttcccacctgaggtggccgtgttcgagcctagcgaggccgagatcagccacacccagaaagccaccctcgtgtgcctggctaccggcttctaccccgaccatgtggaactgtcttggtgggtcaacggcaaagaggtgcacagcggcgtgtctaccgacccccagccactgaaagaacagcccgccctgaacgacagccggtactgcctgagcagcagactgagagtgtccgccaccttctggcagaacccccggaaccacttcagatgccaggtgcagttctacggcctgagcgagaacgacgagtggacccaggacagagccaagcccgtgacccagatcgtgtctgccgaagcctggggcagagccgattgcggatcccagagcttcggcctgctggaccccaagctgtgctacctgctggatggcatcctgttcatctacggcgtgatcctgaccgccctgttcctgagggaccaaagactgcctcctgacgctcacaaacctccaggcggaggcagcttcagaacccctatccaagaggaacaggctgacgcccacagcaccctggcaaaaattagcactagtagagtgaagttcagcagaagcgccgacgcccctgcctaccagcagggacagaaccaactgtacaacgagctgaacctgggcagacgggaagagtacgacgtgctggacaagcggagaggcagggaccctgagatgggcggaaagccccagcggagaaagaacccccaggaaggactgtataacgaactccagaaagacaagatggccgaagcctacagcgagatcggcatgaagggcgagcggagaagaggcaagggccacgatggcctgtaccagggcctgagcaccgccaccaaggacacctatgacgccctgcacatgcaggccctgcctccaagaagggccaagcgatctggatctggagcaacaaacttctcactactcaaacaagcaggtgacgtggaggagaatcccgggcctatggactggatttggcgcatccttttccttgtcggcgctgctaccggcgcgcattccgggcccgaagtgcaactggttgaatccggtggcggcctggtgcaagcaggcggatctctcagacttagctgtgccgcctccggcagaaccttcacaatgggatggtttaggcaggctccagggaaagagagagagttcgtcgccgccatctctctgtctcccacactggcctactacgccgactctgtgaaaggccggttcaccatctccagagataatgccaagaacaccgtggtgctgcaaatgaactctctgaaacccgaggatacagccctgtactattgtgccgctgaccggaagtccgtgatgagcatcagacccgattactggggacagggcacacaagtcacagtgtcctctggatccggcggcggaggatctggcggaggcggatctgggggcggaggctctttcgaacaagttcagcttcaacagcctggcgctgagctggtcaaacctggcgcttctgtgaagatgagctgcaaagccagcggctacgccttcagcagctactggatcaactggatgaagcagaaacccggccagggactcgaatggatcggccaaatctatcccggcgacggcgacaccaactacaacggcaagttcaagggcagagccacactgaccgccgatacctctagcagcacagcctacatgcagctgagcagcctgaccagcgaagatagcgccgtgtacttctgtgcccggtccatcacaacagtcgtgggctgcgctatggactattggggccagggaacaagcgtgaccgtgtctagtacgcgtatccagaaccctgatcctgccgtgtaccagctgcgggatagcaagagcagcgacaagagcgtgtgtctgttcaccgacttcgacagccagaccaacgtgtcccagagcaaggactccgacgtgtacatcaccgataagaccgtgctggacatgcggagcatggacttcaagagcaactccgccgtggcctggtccaacaagtccgatttcgcctgcgccaacgccttcaacaacagcattatccccgaggacacattcttcccaagccccgagagcagctgcggtacccagagttttgggttgttggaccctaaattgtgctatctgttggacggaatcctgttcatttacggagtgatcctgaccgcattgttcctgcgcgatcagaggctgccacctgatgctcataagccacctggcggcggatctttcaggaccccaattcaagaagaacaagccgacgctcactctaccctggctaagatcagctctagacgggttaagttttccagatccgcagacgcacccgcttaccaacaagggcagaaccaactctacaatgaacttaatttggggcggagggaagagtacgacgttctggacaaaaggaggggacgagatcccgagatgggcggaaagcctcagcgaaggaagaatccgcaagaggggctttataacgaactccagaaagataaaatggcagaagcctatagtgagattgggatgaagggagaaaggaggaggggtaaaggtcacgatgggttgtaccaaggattgagcacagccactaaagatacctatgatgcgctccacatgcaggccctgccgccaagacgcgccaagagaagcggatctggcgtgaagcagaccctgaatttcgacctgctgaagctggctggcgacgtggaatccaacccaggccctggccatatgaccgagtacaagcccacggtgcgcctcgccacccgcgacgacgtccccagggccgtacgcaccctcgccgccgcgttcgccgactaccccgccacgcgccacaccgtcgatccggaccgccacatcgagcgggtcaccgagctgcaagaactcttcctcacgcgcgtcgggctcgacatcggcaaggtgtgggtcgcggacgacggcgccgcggtggcggtctggaccacgccggagagcgtcgaagcgggggcggtgttcgccgagatcggcccgcgcatggccgagttgagcggttcccggctggccgcgcagcaacagatggaaggcctcctggcgccgcaccggcccaaggagcccgcgtggttcctggccaccgtcggcgtctcgcccgaccaccagggcaagggtctgggcagcgccgtcgtgctccccggagtggaggcggccgagcgcgccggggtgcccgccttcctggagacctccgcgccccgcaacctccccttctacgagcggctcggcttcaccgtcaccgccgacgtcgaggtgcccgaaggaccgcgcacctggtgcatgacccgcaagcccggtgcctga

SEQ ID NO: 2088 - DNA, 3399 bp, Artificial Sequence
  Synthetic Polynucleotide
atggccttaccagtgaccgccttgctcctgccgctggccttgctgctccacgccgccaggccggaagtgcagctggttgaatctggcggaggactggttcaggctggcggatctctgagactgtcttgtgccgccagcggcagaacctttagcatgggctggtttagacaggcccctggcaaagagagagagttcgtcgccgccatcacatactctggcggcagcccttactacgccgactctgtgaagggcagattcaccatcagccgggacaacgccaagaacaccgtgtacctccagatgaacagcctgaagcctgaggacaccgccgtgtactactgcgccgccaatccaacatacggcagcgactggaacgccgagaattggggccagggaacccaagtgacagtgtctagcctcgaggacctgaagaacgtgttcccacctgaggtggccgtgttcgagcctagcgaggccgagatcagccacacccagaaagccaccctcgtgtgcctggctaccggcttctaccccgaccatgtggaactgtcttggtgggtcaacggcaaagaggtgcacagcggcgtgtctaccgacccccagccactgaaagaacagcccgccctgaacgacagccggtactgcctgagcagcagactgagagtgtccgccaccttctggcagaacccccggaaccacttcagatgccaggtgcagttctacggcctgagcgagaacgacgagtggacccaggacagagccaagcccgtgacccagatcgtgtctgccgaagcctggggcagagccgattgcggatcccagagcttcggcctgctggaccccaagctgtgctacctgctggatggcatcctgttcatctacggcgtgatcctgaccgccctgttcctgagggaccaaagactgcctcctgacgctcacaaacctccaggcggaggcagcttcagaacccctatccaagaggaacaggctgacgcccacagcaccctggcaaaaattagcactagtagagtgaagttcagcagaagcgccgacgcccctgcctaccagcagggacagaaccaactgtacaacgagctgaacctgggcagacgggaagagtacgacgtgctggacaagcggagaggcagggaccctgagatgggcggaaagccccagcggagaaagaacccccaggaaggactgtataacgaactccagaaagacaagatggccgaagcctacagcgagatcggcatgaagggcgagcggagaagaggcaagggccacgatggcctgtaccagggcctgagcaccgccaccaaggacacctatgacgccctgcacatgcaggccctgcctccaagaagggccaagcgatctggatctggagcaacaaacttctcactactcaaacaagcaggtgacgtggaggagaatcccgggcctatggactggatttggcgcatccttttccttgtcggcgctgctaccggcgcgcattccgggcccgaagtgcaactggttgaatccggtggcggcctggtgcaagcaggcggatctctcagacttagctgtgccgcctccggcagaaccttcacaatgggatggtttaggcaggctccagggaaagagagagagttcgtcgccgccatctctctgtctcccacactggcctactacgccgactctgtgaaaggccggttcaccatctccagagataatgccaagaacaccgtggtgctgcaaatgaactctctgaaacccgaggatacagccctgtactattgtgccgctgaccggaagtccgtgatgagcatcagacccgattactggggacagggcacacaagtcacagtgtcctctacgcgtatccagaaccctgatcctgccgtgtaccagctgcgggatagcaagagcagcgacaagagcgtgtgtctgttcaccgacttcgacagccagaccaacgtgtcccagagcaaggactccgacgtgtacatcaccgataagaccgtgctggacatgcggagcatggacttcaagagcaactccgccgtggcctggtccaacaagtccgatttcgcctgcgccaacgccttcaacaacagcattatccccgaggacacattcttcccaagccccgagagcagctgcggtacccagagttttgggttgttggaccctaaattgtgctatctgttggacggaatcctgttcatttacggagtgatcctgaccgcattgttcctgcgcgatcagaggctgccacctgatgctcataagccacctggcggcggatctttcaggaccccaattcaagaagaacaagccgacgctcactctaccctggctaagatcagctctagacgggttaagttttccagatccgcagacgcacccgcttaccaacaagggcagaaccaactctacaatgaacttaatttggggcggagggaagagtacgacgttctggacaaaaggaggggacgagatcccgagatgggcggaaagcctcagcgaaggaagaatccgcaagaggggctttataacgaactccagaaagataaaatggcagaagcctatagtgagattgggatgaagggagaaaggaggaggggtaaaggtcacgatgggttgtaccaaggattgagcacagccactaaagatacctatgatgcgctccacatgcaggccctgccgccaagacgcgccaagagaagcggatctggcgtgaagcagaccctgaatttcgacctgctgaagctggctggcgacgtggaatccaacccaggccctggccatatgaccgagtacaagcccacggtgcgcctcgccacccgcgacgacgtccccagggccgtacgcaccctcgccgccgcgttcgccgactaccccgccacgcgccacaccgtcgatccggaccgccacatcgagcgggtcaccgagctgcaagaactcttcctcacgcgcgtcgggctcgacatcggcaaggtgtgggtcgcggacgacggcgccgcggtggcggtctggaccacgccggagagcgtcgaagcgggggcggtgttcgccgagatcggcccgcgcatggccgagttgagcggttcccggctggccgcgcagcaacagatggaaggcctcctggcgccgcaccggcccaaggagcccgcgtggttcctggccaccgtcggcgtctcgcccgaccaccagggcaagggtctgggcagcgccgtcgtgctccccggagtggaggcggccgagcgcgccggggtgcccgccttcctggagacctccgcgccccgcaacctccccttctacgagcggctcggcttcaccgtcaccgccgacgtcgaggtgcccgaaggaccgcgcacctggtgcatgacccgcaagcccggtgcctga

SEQ ID NO: 2089 - DNA, 1734 bp, Artificial Sequence
  Synthetic Polynucleotide
atggccttaccagtgaccgccttgctcctgccgctggccttgctgctccacgccgccaggccggcatgcgaagtgcagctgcttgaaagtggcggcggactgattcagcctggcggatctctgagactgagctgtgccgccagcggcttcaccttttctagccacgccatgacctgggtccgacaggcacctggaaaagggcttgaatgggtgtccgccatcagcggctctggcgattacacacactacgccgacagcgtgaagggcagattcaccatcagcagagacaacagcaagaacaccgtgtacctccagatgaacagcctgagagccgaggacagcgccgtgtattattgcgccaaggatgaggatggcggcagcctgcttggacacagaggacaaggcaccctggtcaccgtttcttccggtaccggcggaggcggatctggcggcggaggtagcggtggcggaggatctgaattcggatctctcgagcagagcttcggcctgctggaccccaagctgtgctacctgctggatggcatcctgttcatctacggcgtgatcctgaccgccctgttcctgagggaccaaagactgcctcctgacgctcacaaacctccaggcggaggcagcttcagaacccctatccaagaggaacaggctgacgcccacagcaccctggcaaaaattagcactagtagagtgaagttcagcagaagcgccgacgcccctgcctaccagcagggacagaaccaactgtacaacgagctgaacctgggcagacgggaagagtacgacgtgctggacaagcggagaggcagggaccctgagatgggcggaaagccccagcggagaaagaacccccaggaaggactgtataacgaactccagaaagacaagatggccgaagcctacagcgagatcggcatgaagggcgagcggagaagaggcaagggccacgatggcctgtaccagggcctgagcaccgccaccaaggacacctatgacgccctgcacatgcaggccctgcctccaagaagggccaagcgatctggatctggagcaacaaacttctcactactcaaacaagcaggtgacgtggaggagaatcccgggcctactagaggccatatgaccgagtacaagcccacggtgcgcctcgccacccgcgacgacgtccccagggccgtacgcaccctcgccgccgcgttcgccgactaccccgccacgcgccacaccgtcgatccggaccgccacatcgagcgggtcaccgagctgcaagaactcttcctcacgcgcgtcgggctcgacatcggcaaggtgtgggtcgcggacgacggcgccgcggtggcggtctggaccacgccggagagcgtcgaagcgggggcggtgttcgccgagatcggcccgcgcatggccgagttgagcggttcccggctggccgcgcagcaacagatggaaggcctcctggcgccgcaccggcccaaggagcccgcgtggttcctggccaccgtcggcgtctcgcccgaccaccagggcaagggtctgggcagcgccgtcgtgctccccggagtggaggcggccgagcgcgccggggtgcccgccttcctggagacctccgcgccccgcaacctccccttctacgagcggctcggcttcaccgtcaccgccgacgtcgaggtgcccgaaggaccgcgcacctggtgcatgacccgcaagcccggtgcctga

SEQ ID NO: 2090 - DNA, 2718 bp, Artificial Sequence
  Synthetic Polynucleotide
atggccttaccagtgaccgccttgctcctgccgctggccttgctgctccacgccgccaggccggacatccagatgacacagagccctagcagcctgtctgccagcgtgggagacagagtgaccatcacatgcaaggccagcgaccacatcaacaactggctggcctggtatcagcagaagcctggacaggcccctaagctgctgatctacggcgctaccacactggaaacaggcgtgcccagcagattttctggcagcggctctggcaccgactacaccctgacaatatccagcctccagcctgaggacttcgccacctactactgtcagcagagctggaacaccccttggacattcggccagggcaccaagctggaaatcaagagactcgagacaacacctggcgagagaagtagcctgcctgccttctatcctggcaccagcggctcttgttctggctgtggatctctgagcctgcctctgctggctggactggttgctgctgatgctgtggcctctctgctgattgtgggagccgtgttcctgtgcgccagacctagaagaagccccgctcaagaggacggcaaggtgtacatcaacatgcccggcagaggaagcactagtagagtgaagttcagcagaagcgccgacgcccctgcctaccagcagggacagaaccaactgtacaacgagctgaacctgggcagacgggaagagtacgacgtgctggacaagcggagaggcagggaccctgagatgggcggaaagccccagcggagaaagaacccccaggaaggactgtataacgaactccagaaagacaagatggccgaagcctacagcgagatcggcatgaagggcgagcggagaagaggcaagggccacgatggcctgtaccagggcctgagcaccgccaccaaggacacctatgacgccctgcacatgcaggccctgcctccaagaagggccaagcgatctggatctggagcaacaaacttctcactactcaaacaagcaggtgacgtggaggagaatcccgggcctatggactggatttggcgcatccttttccttgtcggcgctgctaccggcgcgcattccttcgaacaagttcagcttcaacagcctggcgctgagctggtcaaacctggcgcttctgtgaagatgagctgcaaagccagcggctacgccttcagcagctactggatcaactggatgaagcagaaacccggccagggactcgaatggatcggccaaatctatcccggcgacggcgacaccaactacaacggcaagttcaagggcagagccacactgaccgccgatacctctagcagcacagcctacatgcagctgagcagcctgaccagcgaagatagcgccgtgtacttctgtgcccggtccatcacaacagtcgtgggctgcgctatggactattggggccagggaacaagcgtgaccgtgtctagtacgcgtcagagttttgggttgttggaccctaaattgagctatctgttggacggaatcctgttcatttacggagtgatcctgaccgcattgttcctgcgcgatcagaggctgccacctgatgctcataagccacctggcggcggatctttcaggaccccaattcaagaagaacaagccgacgctcactctaccctggctaagatcagctctagacgggttaagttttccagatccgcagacgcacccgcttaccaacaagggcagaaccaactctacaatgaacttaatttggggcggagggaagagtacgacgttctggacaaaaggaggggacgagatcccgagatgggcggaaagcctcagcgaaggaagaatccgcaagaggggctttataacgaactccagaaagataaaatggcagaagcctatagtgagattgggatgaagggagaaaggaggaggggtaaaggtcacgatgggttgtaccaaggattgagcacagccactaaagatacctatgatgcgctccacatgcaggccctgccgccaagacgcgccaagagaagcggatctggcgtgaagcagaccctgaatttcgacctgctgaagctggctggcgacgtggaatccaacccaggccctggccatatgaccgagtacaagcccacggtgcgcctcgccacccgcgacgacgtccccagggccgtacgcaccctcgccgccgcgttcgccgactaccccgccacgcgccacaccgtcgatccggaccgccacatcgagcgggtcaccgagctgcaagaactcttcctcacgcgcgtcgggctcgacatcggcaaggtgtgggtcgcggacgacggcgccgcggtggcggtctggaccacgccggagagcgtcgaagcgggggcggtgttcgccgagatcggcccgcgcatggccgagttgagcggttcccggctggccgcgcagcaacagatggaaggcctcctggcgccgcaccggcccaaggagcccgcgtggttcctggccaccgtcggcgtctcgcccgaccaccagggcaagggtctgggcagcgccgtcgtgctccccggagtggaggcggccgagcgcgccggggtgcccgccttcctggagacctccgcgccccgcaacctccccttctacgagcggctcggcttcaccgtcaccgccgacgtcgaggtgcccgaaggaccgcgcacctggtgcatgacccgcaagcccggtgcctga

SEQ ID NO: 2091 - DNA, 2874 bp, Artificial Sequence
  Synthetic Polynucleotide
atggccttaccagtgaccgccttgctcctgccgctggccttgctgctccacgccgccaggccggcatgcgaagtgcagctgcttgaaagtggcggcggactgattcagcctggcggatctctgagactgagctgtgccgccagcggcttcaccttttctagccacgccatgacctgggtccgacaggcacctggaaaagggcttgaatgggtgtccgccatcagcggctctggcgattacacacactacgccgacagcgtgaagggcagattcaccatcagcagagacaacagcaagaacaccgtgtacctccagatgaacagcctgagagccgaggacagcgccgtgtattattgcgccaaggatgaggatggcggcagcctgcttggacacagaggacaaggcaccctggtcaccgtttcttccggtaccggcggaggcggatctggcggcggaggtagcggtggcggaggatctgaattcggatctctcgagacaacacctggcgagagaagtagcctgcctgccttctatcctggcaccagcggctcttgttctggctgtggatctctgagcctgcctctgctggctggactggttgctgctgatgctgtggcctctctgctgattgtgggagccgtgttcctgtgcgccagacctagaagaagccccgctcaagaggacggcaaggtgtacatcaacatgcccggcagaggaagcactagtagagtgaagttcagcagaagcgccgacgcccctgcctaccagcagggacagaaccaactgtacaacgagctgaacctgggcagacgggaagagtacgacgtgctggacaagcggagaggcagggaccctgagatgggcggaaagccccagcggagaaagaacccccaggaaggactgtataacgaactccagaaagacaagatggccgaagcctacagcgagatcggcatgaagggcgagcggagaagaggcaagggccacgatggcctgtaccagggcctgagcaccgccaccaaggacacctatgacgccctgcacatgcaggccctgcctccaagaagggccaagcgatctggatctggagcaacaaacttctcactactcaaacaagcaggtgacgtggaggagaatcccgggcctatggactggatttggcgcatccttttccttgtcggcgctgctaccggcgcgcattccgggcccgaagtgcagctggttgaatctggcggaggactggttcaggctggcggatctctgagactgtcttgtgccgccagcggcagaacctttagcatgggctggtttagacaggcccctggcaaagagagagagttcgtcgccgccatcacatactctggcggcagcccttactacgccgactctgtgaagggcagattcaccatcagccgggacaacgccaagaacaccgtgtacctccagatgaacagcctgaagcctgaggacaccgccgtgtactactgcgccgccaatccaacatacggcagcgactggaacgccgagaattggggccagggaacccaagtgacagtgtctagcggatccggcggcggaggatctggcggaggcggatctgggggcggaggctctttcgaaggcagcacgcgtcagagttttgggttgttggaccctaaattgagctatctgttggacggaatcctgttcatttacggagtgatcctgaccgcattgttcctgcgcgatcagaggctgccacctgatgctcataagccacctggcggcggatctttcaggaccccaattcaagaagaacaagccgacgctcactctaccctggctaagatcagctctagacgggttaagttttccagatccgcagacgcacccgcttaccaacaagggcagaaccaactctacaatgaacttaatttggggcggagggaagagtacgacgttctggacaaaaggaggggacgagatcccgagatgggcggaaagcctcagcgaaggaagaatccgcaagaggggctttataacgaactccagaaagataaaatggcagaagcctatagtgagattgggatgaagggagaaaggaggaggggtaaaggtcacgatgggttgtaccaaggattgagcacagccactaaagatacctatgatgcgctccacatgcaggccctgccgccaagacgcgccaagagaagcggatctggcgtgaagcagaccctgaatttcgacctgctgaagctggctggcgacgtggaatccaacccaggccctggccatatgaccgagtacaagcccacggtgcgcctcgccacccgcgacgacgtccccagggccgtacgcaccctcgccgccgcgttcgccgactaccccgccacgcgccacaccgtcgatccggaccgccacatcgagcgggtcaccgagctgcaagaactcttcctcacgcgcgtcgggctcgacatcggcaaggtgtgggtcgcggacgacggcgccgcggtggcggtctggaccacgccggagagcgtcgaagcgggggcggtgttcgccgagatcggcccgcgcatggccgagttgagcggttcccggctggccgcgcagcaacagatggaaggcctcctggcgccgcaccggcccaaggagcccgcgtggttcctggccaccgtcggcgtctcgcccgaccaccagggcaagggtctgggcagcgccgtcgtgctccccggagtggaggcggccgagcgcgccggggtgcccgccttcctggagacctccgcgccccgcaacctccccttctacgagcggctcggcttcaccgtcaccgccgacgtcgaggtgcccgaaggaccgcgcacctggtgcatgacccgcaagcccggtgcctga

SEQ ID NO: 2092 - DNA, 3321 bp, Artificial Sequence
  Synthetic Polynucleotide
atggccttaccagtgaccgccttgctcctgccgctggccttgctgctccacgccgccaggccggacatccagatgacacagagccctagcagcctgtctgccagcgtgggagacagagtgaccatcacatgcaaggccagcgaccacatcaacaactggctggcctggtatcagcagaagcctggacaggcccctaagctgctgatctacggcgctaccacactggaaacaggcgtgcccagcagattttctggcagcggctctggcaccgactacaccctgacaatatccagcctccagcctgaggacttcgccacctactactgtcagcagagctggaacaccccttggacattcggccagggcaccaagctggaaatcaagagactcgagggacagcctaaggccaatcctaccgtgacactgttccctccaagcagcgaagaactccaggccaacaaggccacacttgtgtgcctgatctccgacttctaccctggggctgtgacagtggcttggaaggccgatggatctcctgtgaaagccggcgtggaaaccaccaagccatccaagcagagcaacaacaaatacgccgccagctcctacctgagcctgacacctgagcagtggaagtcccacagatcctacagctgccaagtgacccacgaaggcagcaccgtggaaaagacagtggcccctacagagtgcagcggatccacaacacctggcgagagaagtagcctgcctgccttctatcctggcaccagcggctcttgttctggctgtggatctctgagcctgcctctgctggctggactggttgctgctgatgctgtggcctctctgctgattgtgggagccgtgttcctgtgcgccagacctagaagaagccccgctcaagaggacggcaaggtgtacatcaacatgcccggcagaggaagcactagtagagtgaagttcagcagaagcgccgacgcccctgcctaccagcagggacagaaccaactgtacaacgagctgaacctgggcagacgggaagagtacgacgtgctggacaagcggagaggcagggaccctgagatgggcggaaagccccagcggagaaagaacccccaggaaggactgtataacgaactccagaaagacaagatggccgaagcctacagcgagatcggcatgaagggcgagcggagaagaggcaagggccacgatggcctgtaccagggcctgagcaccgccaccaaggacacctatgacgccctgcacatgcaggccctgcctccaagaagggccaagcgatctggatctggagcaacaaacttctcactactcaaacaagcaggtgacgtggaggagaatcccgggcctatggactggatttggcgcatccttttccttgtcggcgctgctaccggcgcgcattccttcgaacaagttcagcttcaacagcctggcgctgagctggtcaaacctggcgcttctgtgaagatgagctgcaaagccagcggctacgccttcagcagctactggatcaactggatgaagcagaaacccggccagggactcgaatggatcggccaaatctatcccggcgacggcgacaccaactacaacggcaagttcaagggcagagccacactgaccgccgatacctctagcagcacagcctacatgcagctgagcagcctgaccagcgaagatagcgccgtgtacttctgtgcccggtccatcacaacagtcgtgggctgcgctatggactattggggccagggaacaagcgtgaccgtgtctagtacgcgtgcctctacaaagggaccctccgtgtttcctctggctcccagcagcaagtctacaagcggaggaacagccgctctgggctgcctggtcaaggattactttcccgagcctgtgaccgtgtcctggaatagcggagcactgacaagcggcgtgcacacctttccagccgtgctgcaaagcagcggcctgtactctctgagcagcgtggtcacagtgcctagctctagcctgggcacccagacctacatctgcaatgtgaaccacaagcctagcaacaccaaggtggacaagagagtggaacccaagagctgtggtacccagagttttgggttgttggaccctaaattgagctatctgttggacggaatcctgttcatttacggagtgatcctgaccgcattgttcctgcgcgatcagaggctgccacctgatgctcataagccacctggcggcggatctttcaggaccccaattcaagaagaacaagccgacgctcactctaccctggctaagatcagctctagacgggttaagttttccagatccgcagacgcacccgcttaccaacaagggcagaaccaactctacaatgaacttaatttggggcggagggaagagtacgacgttctggacaaaaggaggggacgagatcccgagatgggcggaaagcctcagcgaaggaagaatccgcaagaggggctttataacgaactccagaaagataaaatggcagaagcctatagtgagattgggatgaagggagaaaggaggaggggtaaaggtcacgatgggttgtaccaaggattgagcacagccactaaagatacctatgatgcgctccacatgcaggccctgccgccaagacgcgccaagagaagcggatctggcgtgaagcagaccctgaatttcgacctgctgaagctggctggcgacgtggaatccaacccaggccctggccatatggctacctacgaggtgctgtgcgaggtggcaagaaagctgggcaccgacgacagagaagtggtgctgttcctgctgaacgtgttcatccctcagcctacactggcccagctgatcggtgcactgagagccctgaaagaggaaggccggctgacctttcctctgctggccgaatgcctgttcagagccggaagaagggatctgctgcgggacctgctgcatctggaccccagatttctggaaagacacctggccggcaccatgagctacttcagcccttaccagctgaccgtgctgcacgttgacggcgaactgtgcgccagagatattcggagcctgatcttcctgagcaaggacaccatcggcagccggtctacccctcagacatttctgcactgggtgtactgcatggaaaacctggacctgctcggccccacagatgtggatgccctgatgtccatgctgagaagcctgagcagagtggacctccagagacaggtgcagacactgatgggactgcacctgagcggacctagccacagccagcactacagacacacccct

SEQ ID NO: 2093 - DNA, 3480 bp, Artificial Sequence
  Synthetic Polynucleotide
atggccttaccagtgaccgccttgctcctgccgctggccttgctgctccacgccgccaggccggacatccagatgacacagagccctagcagcctgtctgccagcgtgggagacagagtgaccatcacatgcaaggccagcgaccacatcaacaactggctggcctggtatcagcagaagcctggacaggcccctaagctgctgatctacggcgctaccacactggaaacaggcgtgcccagcagattttctggcagcggctctggcaccgactacaccctgacaatatccagcctccagcctgaggacttcgccacctactactgtcagcagagctggaacaccccttggacattcggccagggcaccaagctggaaatcaagagactcgagggacagcctaaggccaatcctaccgtgacactgttccctccaagcagcgaagaactccaggccaacaaggccacacttgtgtgcctgatctccgacttctaccctggggctgtgacagtggcttggaaggccgatggatctcctgtgaaagccggcgtggaaaccaccaagccatccaagcagagcaacaacaaatacgccgccagctcctacctgagcctgacacctgagcagtggaagtcccacagatcctacagctgccaagtgacccacgaaggcagcaccgtggaaaagacagtggcccctacagagtgcagcggatccacaacacctggcgagagaagtagcctgcctgccttctatcctggcaccagcggctcttgttctggctgtggatctctgagcctgcctctgctggctggactggttgctgctgatgctgtggcctctctgctgattgtgggagccgtgttcctgtgcgccagacctagaagaagccccgctcaagaggacggcaaggtgtacatcaacatgcccggcagaggaagcactagtagagtgaagttcagcagaagcgccgacgcccctgcctaccagcagggacagaaccaactgtacaacgagctgaacctgggcagacgggaagagtacgacgtgctggacaagcggagaggcagggaccctgagatgggcggaaagccccagcggagaaagaacccccaggaaggactgtataacgaactccagaaagacaagatggccgaagcctacagcgagatcggcatgaagggcgagcggagaagaggcaagggccacgatggcctgtaccagggcctgagcaccgccaccaaggacacctatgacgccctgcacatgcaggccctgcctccaagaagggccaagcgatctggatctggagcaacaaacttctcactactcaaacaagcaggtgacgtggaggagaatcccgggcctatggactggatttggcgcatccttttccttgtcggcgctgctaccggcgcgcattccttcgaacaagttcagcttcaacagcctggcgctgagctggtcaaacctggcgcttctgtgaagatgagctgcaaagccagcggctacgccttcagcagctactggatcaactggatgaagcagaaacccggccagggactcgaatggatcggccaaatctatcccggcgacggcgacaccaactacaacggcaagttcaagggcagagccacactgaccgccgatacctctagcagcacagcctacatgcagctgagcagcctgaccagcgaagatagcgccgtgtacttctgtgcccggtccatcacaacagtcgtgggctgcgctatggactattggggccagggaacaagcgtgaccgtgtctagtacgcgtgcctctacaaagggaccctccgtgtttcctctggctcccagcagcaagtctacaagcggaggaacagccgctctgggctgcctggtcaaggattactttcccgagcctgtgaccgtgtcctggaatagcggagcactgacaagcggcgtgcacacctttccagccgtgctgcaaagcagcggcctgtactctctgagcagcgtggtcacagtgcctagctctagcctgggcacccagacctacatctgcaatgtgaaccacaagcctagcaacaccaaggtggacaagagagtggaacccaagagctgtggtacccagagttttgggttgttggaccctaaattgagctatctgttggacggaatcctgttcatttacggagtgatcctgaccgcattgttcctgcgcgatcagaggctgccacctgatgctcataagccacctggcggcggatctttcaggaccccaattcaagaagaacaagccgacgctcactctaccctggctaagatcagctctagacgggttaagttttccagatccgcagacgcacccgcttaccaacaagggcagaaccaactctacaatgaacttaatttggggcggagggaagagtacgacgttctggacaaaaggaggggacgagatcccgagatgggcggaaagcctcagcgaaggaagaatccgcaagaggggctttataacgaactccagaaagataaaatggcagaagcctatagtgagattgggatgaagggagaaaggaggaggggtaaaggtcacgatgggttgtaccaaggattgagcacagccactaaagatacctatgatgcgctccacatgcaggccctgccgccaagacgcgccaagagaagcggatctggcgtgaagcagaccctgaatttcgacctgctgaagctggctggcgacgtggaatccaacccaggccctggccatatgtccgactccaaggaggtccctagccttccatttttgcgacacttgctcgaagagttggacagccatgaggacagcttgctgctgtttctgtgtcacgacgcggccccgggctgcacgacggtcacgcaagctttgtgctcgcttagccaacagcgcaagctgaccctcgcggctctggtcgagatgctctacgtgctgcagcgtatggatcttctcaagagccgcttcgggctcagcaaggagggggccgagcaattgctgggcacaagctttctcacgcgctaccgcaagctcatggtttgcgtgggtgaggagctcgactcgagcgagctacgcgctctacgcttgttcgcgtgcaacctgaatccgagcctgagcacggcgctttctgagagcagccgctttgtcgagcttgtactcgcgcttgaaaacgtaggactcgtctcgccatcgagtgtttccgtgcttgcggacatgttgcgcactcttcggcgcctcgatttgtgccagcagcttgttgagtacgaacaacaagagcaagccaggtaccgttactgttacgcggcctcgccctcattgccagttcgtacgttacgtcgggggcacggcgcgagtgaacacgagcagctgtgcatgcccgtgcaagaatcctctgacagccccgagctgctgcgcacgcccgtacaagaatcctccagcgacagccccgagcaaacgact

SEQ ID NO: 2094 - DNA, 3357 bp, Artificial Sequence
  Synthetic Polynucleotide
atggccttaccagtgaccgccttgctcctgccgctggccttgctgctccacgccgccaggccggacatccagatgacacagagccctagcagcctgtctgccagcgtgggagacagagtgaccatcacatgcaaggccagcgaccacatcaacaactggctggcctggtatcagcagaagcctggacaggcccctaagctgctgatctacggcgctaccacactggaaacaggcgtgcccagcagattttctggcagcggctctggcaccgactacaccctgacaatatccagcctccagcctgaggacttcgccacctactactgtcagcagagctggaacaccccttggacattcggccagggcaccaagctggaaatcaagagactcgagggacagcctaaggccaatcctaccgtgacactgttccctccaagcagcgaagaactccaggccaacaaggccacacttgtgtgcctgatctccgacttctaccctggggctgtgacagtggcttggaaggccgatggatctcctgtgaaagccggcgtggaaaccaccaagccatccaagcagagcaacaacaaatacgccgccagctcctacctgagcctgacacctgagcagtggaagtcccacagatcctacagctgccaagtgacccacgaaggcagcaccgtggaaaagacagtggcccctacagagtgcagcggatccacaacacctggcgagagaagtagcctgcctgccttctatcctggcaccagcggctcttgttctggctgtggatctctgagcctgcctctgctggctggactggttgctgctgatgctgtggcctctctgctgattgtgggagccgtgttcctgtgcgccagacctagaagaagccccgctcaagaggacggcaaggtgtacatcaacatgcccggcagaggaagcactagtagagtgaagttcagcagaagcgccgacgcccctgcctaccagcagggacagaaccaactgtacaacgagctgaacctgggcagacgggaagagtacgacgtgctggacaagcggagaggcagggaccctgagatgggcggaaagccccagcggagaaagaacccccaggaaggactgtataacgaactccagaaagacaagatggccgaagcctacagcgagatcggcatgaagggcgagcggagaagaggcaagggccacgatggcctgtaccagggcctgagcaccgccaccaaggacacctatgacgccctgcacatgcaggccctgcctccaagaagggccaagcgatctggatctggagcaacaaacttctcactactcaaacaagcaggtgacgtggaggagaatcccgggcctatggactggatttggcgcatccttttccttgtcggcgctgctaccggcgcgcattccttcgaacaagttcagcttcaacagcctggcgctgagctggtcaaacctggcgcttctgtgaagatgagctgcaaagccagcggctacgccttcagcagctactggatcaactggatgaagcagaaacccggccagggactcgaatggatcggccaaatctatcccggcgacggcgacaccaactacaacggcaagttcaagggcagagccacactgaccgccgatacctctagcagcacagcctacatgcagctgagcagcctgaccagcgaagatagcgccgtgtacttctgtgcccggtccatcacaacagtcgtgggctgcgctatggactattggggccagggaacaagcgtgaccgtgtctagtacgcgtgcctctacaaagggaccctccgtgtttcctctggctcccagcagcaagtctacaagcggaggaacagccgctctgggctgcctggtcaaggattactttcccgagcctgtgaccgtgtcctggaatagcggagcactgacaagcggcgtgcacacctttccagccgtgctgcaaagcagcggcctgtactctctgagcagcgtggtcacagtgcctagctctagcctgggcacccagacctacatctgcaatgtgaaccacaagcctagcaacaccaaggtggacaagagagtggaacccaagagctgtggtacccagagttttgggttgttggaccctaaattgagctatctgttggacggaatcctgttcatttacggagtgatcctgaccgcattgttcctgcgcgatcagaggctgccacctgatgctcataagccacctggcggcggatctttcaggaccccaattcaagaagaacaagccgacgctcactctaccctggctaagatcagctctagacgggttaagttttccagatccgcagacgcacccgcttaccaacaagggcagaaccaactctacaatgaacttaatttggggcggagggaagagtacgacgttctggacaaaaggaggggacgagatcccgagatgggcggaaagcctcagcgaaggaagaatccgcaagaggggctttataacgaactccagaaagataaaatggcagaagcctatagtgagattgggatgaagggagaaaggaggaggggtaaaggtcacgatgggttgtaccaaggattgagcacagccactaaagatacctatgatgcgctccacatgcaggccctgccgccaagacgcgccaagagaagcggatctggcgtgaagcagaccctgaatttcgacctgctgaagctggctggcgacgtggaatccaacccaggccctggccatatgaccgagtacaagcccacggtgcgcctcgccacccgcgacgacgtccccagggccgtacgcaccctcgccgccgcgttcgccgactaccccgccacgcgccacaccgtcgatccggaccgccacatcgagcgggtcaccgagctgcaagaactcttcctcacgcgcgtcgggctcgacatcggcaaggtgtgggtcgcggacgacggcgccgcggtggcggtctggaccacgccggagagcgtcgaagcgggggcggtgttcgccgagatcggcccgcgcatggccgagttgagcggttcccggctggccgcgcagcaacagatggaaggcctcctggcgccgcaccggcccaaggagcccgcgtggttcctggccaccgtcggcgtctcgcccgaccaccagggcaagggtctgggcagcgccgtcgtgctccccggagtggaggcggccgagcgcgccggggtgcccgccttcctggagacctccgcgccccgcaacctccccttctacgagcggctcggcttcaccgtcaccgccgacgtcgaggtgcccgaaggaccgcgcacctggtgcatgacccgcaagcccggtgcctga

SEQ ID NO: 2095 - DNA, 3768 bp, Artificial Sequence
  Synthetic Polynucleotide
atggccttaccagtgaccgccttgctcctgccgctggccttgctgctccacgccgccaggccggaagtgcagctggttgaatctggcggaggactggttcaggctggcggatctctgagactgtcttgtgccgccagcggcagaacctttagcatgggctggtttagacaggcccctggcaaagagagagagttcgtcgccgccatcacatactctggcggcagcccttactacgccgactctgtgaagggcagattcaccatcagccgggacaacgccaagaacaccgtgtacctccagatgaacagcctgaagcctgaggacaccgccgtgtactactgcgccgccaatccaacatacggcagcgactggaacgccgagaattggggccagggaacccaagtgacagtgtctagcggtaccggcggaggcggatctggcggcggaggtagcggtggcggaggatctgaattcgacatccagatgacacagagccctagcagcctgtctgccagcgtgggagacagagtgaccatcacatgcaaggccagcgaccacatcaacaactggctggcctggtatcagcagaagcctggacaggcccctaagctgctgatctacggcgctaccacactggaaacaggcgtgcccagcagattttctggcagcggctctggcaccgactacaccctgacaatatccagcctccagcctgaggacttcgccacctactactgtcagcagagctggaacaccccttggacattcggccagggcaccaagctggaaatcaagagactcgagggacagcctaaggccaatcctaccgtgacactgttccctccaagcagcgaagaactccaggccaacaaggccacacttgtgtgcctgatctccgacttctaccctggggctgtgacagtggcttggaaggccgatggatctcctgtgaaagccggcgtggaaaccaccaagccatccaagcagagcaacaacaaatacgccgccagctcctacctgagcctgacacctgagcagtggaagtcccacagatcctacagctgccaagtgacccacgaaggcagcaccgtggaaaagacagtggcccctacagagtgcagcggatccacaacacctggcgagagaagtagcctgcctgccttctatcctggcaccagcggctcttgttctggctgtggatctctgagcctgcctctgctggctggactggttgctgctgatgctgtggcctctctgctgattgtgggagccgtgttcctgtgcgccagacctagaagaagccccgctcaagaggacggcaaggtgtacatcaacatgcccggcagaggaagcactagtagagtgaagttcagcagaagcgccgacgcccctgcctaccagcagggacagaaccaactgtacaacgagctgaacctgggcagacgggaagagtacgacgtgctggacaagcggagaggcagggaccctgagatgggcggaaagccccagcggagaaagaacccccaggaaggactgtataacgaactccagaaagacaagatggccgaagcctacagcgagatcggcatgaagggcgagcggagaagaggcaagggccacgatggcctgtaccagggcctgagcaccgccaccaaggacacctatgacgccctgcacatgcaggccctgcctccaagaagggccaagcgatctggatctggagcaacaaacttctcactactcaaacaagcaggtgacgtggaggagaatcccgggcctatggactggatttggcgcatccttttccttgtcggcgctgctaccggcgcgcattccttcgaacaagttcagcttcaacagcctggcgctgagctggtcaaacctggcgcttctgtgaagatgagctgcaaagccagcggctacgccttcagcagctactggatcaactggatgaagcagaaacccggccagggactcgaatggatcggccaaatctatcccggcgacggcgacaccaactacaacggcaagttcaagggcagagccacactgaccgccgatacctctagcagcacagcctacatgcagctgagcagcctgaccagcgaagatagcgccgtgtacttctgtgcccggtccatcacaacagtcgtgggctgcgctatggactattggggccagggaacaagcgtgaccgtgtctagtacgcgtgcctctacaaagggaccctccgtgtttcctctggctcccagcagcaagtctacaagcggaggaacagccgctctgggctgcctggtcaaggattactttcccgagcctgtgaccgtgtcctggaatagcggagcactgacaagcggcgtgcacacctttccagccgtgctgcaaagcagcggcctgtactctctgagcagcgtggtcacagtgcctagctctagcctgggcacccagacctacatctgcaatgtgaaccacaagcctagcaacaccaaggtggacaagagagtggaacccaagagctgtggtacccagagttttgggttgttggaccctaaattgagctatctgttggacggaatcctgttcatttacggagtgatcctgaccgcattgttcctgcgcgatcagaggctgccacctgatgctcataagccacctggcggcggatctttcaggaccccaattcaagaagaacaagccgacgctcactctaccctggctaagatcagctctagacgggttaagttttccagatccgcagacgcacccgcttaccaacaagggcagaaccaactctacaatgaacttaatttggggcggagggaagagtacgacgttctggacaaaaggaggggacgagatcccgagatgggcggaaagcctcagcgaaggaagaatccgcaagaggggctttataacgaactccagaaagataaaatggcagaagcctatagtgagattgggatgaagggagaaaggaggaggggtaaaggtcacgatgggttgtaccaaggattgagcacagccactaaagatacctatgatgcgctccacatgcaggccctgccgccaagacgcgccaagagaagcggatctggcgtgaagcagaccctgaatttcgacctgctgaagctggctggcgacgtggaatccaacccaggccctggccatatgaccgagtacaagcccacggtgcgcctcgccacccgcgacgacgtccccagggccgtacgcaccctcgccgccgcgttcgccgactaccccgccacgcgccacaccgtcgatccggaccgccacatcgagcgggtcaccgagctgcaagaactcttcctcacgcgcgtcgggctcgacatcggcaaggtgtgggtcgcggacgacggcgccgcggtggcggtctggaccacgccggagagcgtcgaagcgggggcggtgttcgccgagatcggcccgcgcatggccgagttgagcggttcccggctggccgcgcagcaacagatggaaggcctcctggcgccgcaccggcccaaggagcccgcgtggttcctggccaccgtcggcgtctcgcccgaccaccagggcaagggtctgggcagcgccgtcgtgctccccggagtggaggcggccgagcgcgccggggtgcccgccttcctggagacctccgcgccccgcaacctccccttctacgagcggctcggcttcaccgtcaccgccgacgtcgaggtgcccgaaggaccgcgcacctggtgcatgacccgcaagcccggtgcctga

SEQ ID NO: 2096 - DNA, 4179 bp, Artificial Sequence
  Synthetic Polynucleotide
atggccttaccagtgaccgccttgctcctgccgctggccttgctgctccacgccgccaggccggaagtgcagctggttgaatctggcggaggactggttcaggctggcggatctctgagactgtcttgtgccgccagcggcagaacctttagcatgggctggtttagacaggcccctggcaaagagagagagttcgtcgccgccatcacatactctggcggcagcccttactacgccgactctgtgaagggcagattcaccatcagccgggacaacgccaagaacaccgtgtacctccagatgaacagcctgaagcctgaggacaccgccgtgtactactgcgccgccaatccaacatacggcagcgactggaacgccgagaattggggccagggaacccaagtgacagtgtctagcggtaccggcggaggcggatctggcggcggaggtagcggtggcggaggatctgaattcgacatccagatgacacagagccctagcagcctgtctgccagcgtgggagacagagtgaccatcacatgcaaggccagcgaccacatcaacaactggctggcctggtatcagcagaagcctggacaggcccctaagctgctgatctacggcgctaccacactggaaacaggcgtgcccagcagattttctggcagcggctctggcaccgactacaccctgacaatatccagcctccagcctgaggacttcgccacctactactgtcagcagagctggaacaccccttggacattcggccagggcaccaagctggaaatcaagagactcgagggacagcctaaggccaatcctaccgtgacactgttccctccaagcagcgaagaactccaggccaacaaggccacacttgtgtgcctgatctccgacttctaccctggggctgtgacagtggcttggaaggccgatggatctcctgtgaaagccggcgtggaaaccaccaagccatccaagcagagcaacaacaaatacgccgccagctcctacctgagcctgacacctgagcagtggaagtcccacagatcctacagctgccaagtgacccacgaaggcagcaccgtggaaaagacagtggcccctacagagtgcagcggatccacaacacctggcgagagaagtagcctgcctgccttctatcctggcaccagcggctcttgttctggctgtggatctctgagcctgcctctgctggctggactggttgctgctgatgctgtggcctctctgctgattgtgggagccgtgttcctgtgcgccagacctagaagaagccccgctcaagaggacggcaaggtgtacatcaacatgcccggcagaggaagcactagtagagtgaagttcagcagaagcgccgacgcccctgcctaccagcagggacagaaccaactgtacaacgagctgaacctgggcagacgggaagagtacgacgtgctggacaagcggagaggcagggaccctgagatgggcggaaagccccagcggagaaagaacccccaggaaggactgtataacgaactccagaaagacaagatggccgaagcctacagcgagatcggcatgaagggcgagcggagaagaggcaagggccacgatggcctgtaccagggcctgagcaccgccaccaaggacacctatgacgccctgcacatgcaggccctgcctccaagaagggccaagcgatctggatctggagcaacaaacttctcactactcaaacaagcaggtgacgtggaggagaatcccgggcctatggactggatttggcgcatccttttccttgtcggcgctgctaccggcgcgcattccgggcccgaagtgcaactggttgaatccggtggcggcctggtgcaagcaggcggatctctcagacttagctgtgccgcctccggcagaaccttcacaatgggatggtttaggcaggctccagggaaagagagagagttcgtcgccgccatctctctgtctcccacactggcctactacgccgactctgtgaaaggccggttcaccatctccagagataatgccaagaacaccgtggtgctgcaaatgaactctctgaaacccgaggatacagccctgtactattgtgccgctgaccggaagtccgtgatgagcatcagacccgattactggggacagggcacacaagtcacagtgtcctctggatccggcggcggaggatctggcggaggcggatctgggggcggaggctctttcgaacaagttcagcttcaacagcctggcgctgagctggtcaaacctggcgcttctgtgaagatgagctgcaaagccagcggctacgccttcagcagctactggatcaactggatgaagcagaaacccggccagggactcgaatggatcggccaaatctatcccggcgacggcgacaccaactacaacggcaagttcaagggcagagccacactgaccgccgatacctctagcagcacagcctacatgcagctgagcagcctgaccagcgaagatagcgccgtgtacttctgtgcccggtccatcacaacagtcgtgggctgcgctatggactattggggccagggaacaagcgtgaccgtgtctagtacgcgtgcctctacaaagggaccctccgtgtttcctctggctcccagcagcaagtctacaagcggaggaacagccgctctgggctgcctggtcaaggattactttcccgagcctgtgaccgtgtcctggaatagcggagcactgacaagcggcgtgcacacctttccagccgtgctgcaaagcagcggcctgtactctctgagcagcgtggtcacagtgcctagctctagcctgggcacccagacctacatctgcaatgtgaaccacaagcctagcaacaccaaggtggacaagagagtggaacccaagagctgtggtacccagagttttgggttgttggaccctaaattgagctatctgttggacggaatcctgttcatttacggagtgatcctgaccgcattgttcctgcgcgatcagaggctgccacctgatgctcataagccacctggcggcggatctttcaggaccccaattcaagaagaacaagccgacgctcactctaccctggctaagatcagctctagacgggttaagttttccagatccgcagacgcacccgcttaccaacaagggcagaaccaactctacaatgaacttaatttggggcggagggaagagtacgacgttctggacaaaaggaggggacgagatcccgagatgggcggaaagcctcagcgaaggaagaatccgcaagaggggctttataacgaactccagaaagataaaatggcagaagcctatagtgagattgggatgaagggagaaaggaggaggggtaaaggtcacgatgggttgtaccaaggattgagcacagccactaaagatacctatgatgcgctccacatgcaggccctgccgccaagacgcgccaagagaagcggatctggcgtgaagcagaccctgaatttcgacctgctgaagctggctggcgacgtggaatccaacccaggccctggccatatgaccgagtacaagcccacggtgcgcctcgccacccgcgacgacgtccccagggccgtacgcaccctcgccgccgcgttcgccgactaccccgccacgcgccacaccgtcgatccggaccgccacatcgagcgggtcaccgagctgcaagaactcttcctcacgcgcgtcgggctcgacatcggcaaggtgtgggtcgcggacgacggcgccgcggtggcggtctggaccacgccggagagcgtcgaagcgggggcggtgttcgccgagatcggcccgcgcatggccgagttgagcggttcccggctggccgcgcagcaacagatggaaggcctcctggcgccgcaccggcccaaggagcccgcgtggttcctggccaccgtcggcgtctcgcccgaccaccagggcaagggtctgggcagcgccgtcgtgctccccggagtggaggcggccgagcgcgccggggtgcccgccttcctggagacctccgcgccccgcaacctccccttctacgagcggctcggcttcaccgtcaccgccgacgtcgaggtgcccgaaggaccgcgcacctggtgcatgacccgcaagcccggtgcctga

SEQ ID NO: 2097 - DNA, 3378 bp, Artificial Sequence
  Synthetic Polynucleotide
atggccttaccagtgaccgccttgctcctgccgctggccttgctgctccacgccgccaggccggaagtgcagctggttgaatctggcggaggactggttcaggctggcggatctctgagactgtcttgtgccgccagcggcagaacctttagcatgggctggtttagacaggcccctggcaaagagagagagttcgtcgccgccatcacatactctggcggcagcccttactacgccgactctgtgaagggcagattcaccatcagccgggacaacgccaagaacaccgtgtacctccagatgaacagcctgaagcctgaggacaccgccgtgtactactgcgccgccaatccaacatacggcagcgactggaacgccgagaattggggccagggaacccaagtgacagtgtctagcctcgagggacagcctaaggccaatcctaccgtgacactgttccctccaagcagcgaagaactccaggccaacaaggccacacttgtgtgcctgatctccgacttctaccctggggctgtgacagtggcttggaaggccgatggatctcctgtgaaagccggcgtggaaaccaccaagccatccaagcagagcaacaacaaatacgccgccagctcctacctgagcctgacacctgagcagtggaagtcccacagatcctacagctgccaagtgacccacgaaggcagcaccgtggaaaagacagtggcccctacagagtgcagcggatccacaacacctggcgagagaagtagcctgcctgccttctatcctggcaccagcggctcttgttctggctgtggatctctgagcctgcctctgctggctggactggttgctgctgatgctgtggcctctctgctgattgtgggagccgtgttcctgtgcgccagacctagaagaagccccgctcaagaggacggcaaggtgtacatcaacatgcccggcagaggaagcactagtagagtgaagttcagcagaagcgccgacgcccctgcctaccagcagggacagaaccaactgtacaacgagctgaacctgggcagacgggaagagtacgacgtgctggacaagcggagaggcagggaccctgagatgggcggaaagccccagcggagaaagaacccccaggaaggactgtataacgaactccagaaagacaagatggccgaagcctacagcgagatcggcatgaagggcgagcggagaagaggcaagggccacgatggcctgtaccagggcctgagcaccgccaccaaggacacctatgacgccctgcacatgcaggccctgcctccaagaagggccaagcgatctggatctggagcaacaaacttctcactactcaaacaagcaggtgacgtggaggagaatcccgggcctatggactggatttggcgcatccttttccttgtcggcgctgctaccggcgcgcattccgggcccgaagtgcaactggttgaatccggtggcggcctggtgcaagcaggcggatctctcagacttagctgtgccgcctccggcagaaccttcacaatgggatggtttaggcaggctccagggaaagagagagagttcgtcgccgccatctctctgtctcccacactggcctactacgccgactctgtgaaaggccggttcaccatctccagagataatgccaagaacaccgtggtgctgcaaatgaactctctgaaacccgaggatacagccctgtactattgtgccgctgaccggaagtccgtgatgagcatcagacccgattactggggacagggcacacaagtcacagtgtcctctacgcgtgcctctacaaagggaccctccgtgtttcctctggctcccagcagcaagtctacaagcggaggaacagccgctctgggctgcctggtcaaggattactttcccgagcctgtgaccgtgtcctggaatagcggagcactgacaagcggcgtgcacacctttccagccgtgctgcaaagcagcggcctgtactctctgagcagcgtggtcacagtgcctagctctagcctgggcacccagacctacatctgcaatgtgaaccacaagcctagcaacaccaaggtggacaagagagtggaacccaagagctgtggtacccagagttttgggttgttggaccctaaattgagctatctgttggacggaatcctgttcatttacggagtgatcctgaccgcattgttcctgcgcgatcagaggctgccacctgatgctcataagccacctggcggcggatctttcaggaccccaattcaagaagaacaagccgacgctcactctaccctggctaagatcagctctagacgggttaagttttccagatccgcagacgcacccgcttaccaacaagggcagaaccaactctacaatgaacttaatttggggcggagggaagagtacgacgttctggacaaaaggaggggacgagatcccgagatgggcggaaagcctcagcgaaggaagaatccgcaagaggggctttataacgaactccagaaagataaaatggcagaagcctatagtgagattgggatgaagggagaaaggaggaggggtaaaggtcacgatgggttgtaccaaggattgagcacagccactaaagatacctatgatgcgctccacatgcaggccctgccgccaagacgcgccaagagaagcggatctggcgtgaagcagaccctgaatttcgacctgctgaagctggctggcgacgtggaatccaacccaggccctggccatatgaccgagtacaagcccacggtgcgcctcgccacccgcgacgacgtccccagggccgtacgcaccctcgccgccgcgttcgccgactaccccgccacgcgccacaccgtcgatccggaccgccacatcgagcgggtcaccgagctgcaagaactcttcctcacgcgcgtcgggctcgacatcggcaaggtgtgggtcgcggacgacggcgccgcggtggcggtctggaccacgccggagagcgtcgaagcgggggcggtgttcgccgagatcggcccgcgcatggccgagttgagcggttcccggctggccgcgcagcaacagatggaaggcctcctggcgccgcaccggcccaaggagcccgcgtggttcctggccaccgtcggcgtctcgcccgaccaccagggcaagggtctgggcagcgccgtcgtgctccccggagtggaggcggccgagcgcgccggggtgcccgccttcctggagacctccgcgccccgcaacctccccttctacgagcggctcggcttcaccgtcaccgccgacgtcgaggtgcccgaaggaccgcgcacctggtgcatgacccgcaagcccggtgcctga

SEQ ID NO: 2098 - DNA, 3402 bp, Artificial Sequence
  Synthetic Polynucleotide
atggccttaccagtgaccgccttgctcctgccgctggccttgctgctccacgccgccaggccggacatccagatgacacagagccctagcagcctgtctgccagcgtgggagacagagtgaccatcacatgcaaggccagcgaccacatcaacaactggctggcctggtatcagcagaagcctggacaggcccctaagctgctgatctacggcgctaccacactggaaacaggcgtgcccagcagattttctggcagcggctctggcaccgactacaccctgacaatatccagcctccagcctgaggacttcgccacctactactgtcagcagagctggaacaccccttggacattcggccagggcaccaagctggaaatcaagagactcgaggacctgaagaacgtgttcccacctgaggtggccgtgttcgagcctagcgaggccgagatcagccacacccagaaagccaccctcgtgtgcctggctaccggcttctaccccgaccatgtggaactgtcttggtgggtcaacggcaaagaggtgcacagcggcgtgtctaccgacccccagccactgaaagaacagcccgccctgaacgacagccggtactgcctgagcagcagactgagagtgtccgccaccttctggcagaacccccggaaccacttcagatgccaggtgcagttctacggcctgagcgagaacgacgagtggacccaggacagagccaagcccgtgacccagatcgtgtctgccgaagcctggggcagagccgattgcggatccacaacacctggcgagagaagtagcctgcctgccttctatcctggcaccagcggctcttgttctggctgtggatctctgagcctgcctctgctggctggactggttgctgctgatgctgtggcctctctgctgattgtgggagccgtgttcctgtgcgccagacctagaagaagccccgctcaagaggacggcaaggtgtacatcaacatgcccggcagaggaagcactagtagagtgaagttcagcagaagcgccgacgcccctgcctaccagcagggacagaaccaactgtacaacgagctgaacctgggcagacgggaagagtacgacgtgctggacaagcggagaggcagggaccctgagatgggcggaaagccccagcggagaaagaacccccaggaaggactgtataacgaactccagaaagacaagatggccgaagcctacagcgagatcggcatgaagggcgagcggagaagaggcaagggccacgatggcctgtaccagggcctgagcaccgccaccaaggacacctatgacgccctgcacatgcaggccctgcctccaagaagggccaagcgatctggatctggagcaacaaacttctcactactcaaacaagcaggtgacgtggaggagaatcccgggcctatggactggatttggcgcatccttttccttgtcggcgctgctaccggcgcgcattccttcgaacaagttcagcttcaacagcctggcgctgagctggtcaaacctggcgcttctgtgaagatgagctgcaaagccagcggctacgccttcagcagctactggatcaactggatgaagcagaaacccggccagggactcgaatggatcggccaaatctatcccggcgacggcgacaccaactacaacggcaagttcaagggcagagccacactgaccgccgatacctctagcagcacagcctacatgcagctgagcagcctgaccagcgaagatagcgccgtgtacttctgtgcccggtccatcacaacagtcgtgggctgcgctatggactattggggccagggaacaagcgtgaccgtgtctagtacgcgtatccagaaccctgatcctgccgtgtaccagctgcgggatagcaagagcagcgacaagagcgtgtgtctgttcaccgacttcgacagccagaccaacgtgtcccagagcaaggactccgacgtgtacatcaccgataagaccgtgctggacatgcggagcatggacttcaagagcaactccgccgtggcctggtccaacaagtccgatttcgcctgcgccaacgccttcaacaacagcattatccccgaggacacattcttcccaagccccgagagcagctgcggtacccagagttttgggttgttggaccctaaattgagctatctgttggacggaatcctgttcatttacggagtgatcctgaccgcattgttcctgcgcgatcagaggctgccacctgatgctcataagccacctggcggcggatctttcaggaccccaattcaagaagaacaagccgacgctcactctaccctggctaagatcagctctagacgggttaagttttccagatccgcagacgcacccgcttaccaacaagggcagaaccaactctacaatgaacttaatttggggcggagggaagagtacgacgttctggacaaaaggaggggacgagatcccgagatgggcggaaagcctcagcgaaggaagaatccgcaagaggggctttataacgaactccagaaagataaaatggcagaagcctatagtgagattgggatgaagggagaaaggaggaggggtaaaggtcacgatgggttgtaccaaggattgagcacagccactaaagatacctatgatgcgctccacatgcaggccctgccgccaagacgcgccaagagaagcggatctggcgtgaagcagaccctgaatttcgacctgctgaagctggctggcgacgtggaatccaacccaggccctggccatatgaccgagtacaagcccacggtgcgcctcgccacccgcgacgacgtccccagggccgtacgcaccctcgccgccgcgttcgccgactaccccgccacgcgccacaccgtcgatccggaccgccacatcgagcgggtcaccgagctgcaagaactcttcctcacgcgcgtcgggctcgacatcggcaaggtgtgggtcgcggacgacggcgccgcggtggcggtctggaccacgccggagagcgtcgaagcgggggcggtgttcgccgagatcggcccgcgcatggccgagttgagcggttcccggctggccgcgcagcaacagatggaaggcctcctggcgccgcaccggcccaaggagcccgcgtggttcctggccaccgtcggcgtctcgcccgaccaccagggcaagggtctgggcagcgccgtcgtgctccccggagtggaggcggccgagcgcgccggggtgcccgccttcctggagacctccgcgccccgcaacctccccttctacgagcggctcggcttcaccgtcaccgccgacgtcgaggtgcccgaaggaccgcgcacctggtgcatgacccgcaagcccggtgcctga

SEQ ID NO: 2099 - DNA, 3813 bp, Artificial Sequence
  Synthetic Polynucleotide
atggccttaccagtgaccgccttgctcctgccgctggccttgctgctccacgccgccaggccggaagtgcagctggttgaatctggcggaggactggttcaggctggcggatctctgagactgtcttgtgccgccagcggcagaacctttagcatgggctggtttagacaggcccctggcaaagagagagagttcgtcgccgccatcacatactctggcggcagcccttactacgccgactctgtgaagggcagattcaccatcagccgggacaacgccaagaacaccgtgtacctccagatgaacagcctgaagcctgaggacaccgccgtgtactactgcgccgccaatccaacatacggcagcgactggaacgccgagaattggggccagggaacccaagtgacagtgtctagcggtaccggcggaggcggatctggcggcggaggtagcggtggcggaggatctgaattcgacatccagatgacacagagccctagcagcctgtctgccagcgtgggagacagagtgaccatcacatgcaaggccagcgaccacatcaacaactggctggcctggtatcagcagaagcctggacaggcccctaagctgctgatctacggcgctaccacactggaaacaggcgtgcccagcagattttctggcagcggctctggcaccgactacaccctgacaatatccagcctccagcctgaggacttcgccacctactactgtcagcagagctggaacaccccttggacattcggccagggcaccaagctggaaatcaagagactcgaggacctgaagaacgtgttcccacctgaggtggccgtgttcgagcctagcgaggccgagatcagccacacccagaaagccaccctcgtgtgcctggctaccggcttctaccccgaccatgtggaactgtcttggtgggtcaacggcaaagaggtgcacagcggcgtgtctaccgacccccagccactgaaagaacagcccgccctgaacgacagccggtactgcctgagcagcagactgagagtgtccgccaccttctggcagaacccccggaaccacttcagatgccaggtgcagttctacggcctgagcgagaacgacgagtggacccaggacagagccaagcccgtgacccagatcgtgtctgccgaagcctggggcagagccgattgcggatccacaacacctggcgagagaagtagcctgcctgccttctatcctggcaccagcggctcttgttctggctgtggatctctgagcctgcctctgctggctggactggttgctgctgatgctgtggcctctctgctgattgtgggagccgtgttcctgtgcgccagacctagaagaagccccgctcaagaggacggcaaggtgtacatcaacatgcccggcagaggaagcactagtagagtgaagttcagcagaagcgccgacgcccctgcctaccagcagggacagaaccaactgtacaacgagctgaacctgggcagacgggaagagtacgacgtgctggacaagcggagaggcagggaccctgagatgggcggaaagccccagcggagaaagaacccccaggaaggactgtataacgaactccagaaagacaagatggccgaagcctacagcgagatcggcatgaagggcgagcggagaagaggcaagggccacgatggcctgtaccagggcctgagcaccgccaccaaggacacctatgacgccctgcacatgcaggccctgcctccaagaagggccaagcgatctggatctggagcaacaaacttctcactactcaaacaagcaggtgacgtggaggagaatcccgggcctatggactggatttggcgcatccttttccttgtcggcgctgctaccggcgcgcattccttcgaacaagttcagcttcaacagcctggcgctgagctggtcaaacctggcgcttctgtgaagatgagctgcaaagccagcggctacgccttcagcagctactggatcaactggatgaagcagaaacccggccagggactcgaatggatcggccaaatctatcccggcgacggcgacaccaactacaacggcaagttcaagggcagagccacactgaccgccgatacctctagcagcacagcctacatgcagctgagcagcctgaccagcgaagatagcgccgtgtacttctgtgcccggtccatcacaacagtcgtgggctgcgctatggactattggggccagggaacaagcgtgaccgtgtctagtacgcgtatccagaaccctgatcctgccgtgtaccagctgcgggatagcaagagcagcgacaagagcgtgtgtctgttcaccgacttcgacagccagaccaacgtgtcccagagcaaggactccgacgtgtacatcaccgataagaccgtgctggacatgcggagcatggacttcaagagcaactccgccgtggcctggtccaacaagtccgatttcgcctgcgccaacgccttcaacaacagcattatccccgaggacacattcttcccaagccccgagagcagctgcggtacccagagttttgggttgttggaccctaaattgagctatctgttggacggaatcctgttcatttacggagtgatcctgaccgcattgttcctgcgcgatcagaggctgccacctgatgctcataagccacctggcggcggatctttcaggaccccaattcaagaagaacaagccgacgctcactctaccctggctaagatcagctctagacgggttaagttttccagatccgcagacgcacccgcttaccaacaagggcagaaccaactctacaatgaacttaatttggggcggagggaagagtacgacgttctggacaaaaggaggggacgagatcccgagatgggcggaaagcctcagcgaaggaagaatccgcaagaggggctttataacgaactccagaaagataaaatggcagaagcctatagtgagattgggatgaagggagaaaggaggaggggtaaaggtcacgatgggttgtaccaaggattgagcacagccactaaagatacctatgatgcgctccacatgcaggccctgccgccaagacgcgccaagagaagcggatctggcgtgaagcagaccctgaatttcgacctgctgaagctggctggcgacgtggaatccaacccaggccctggccatatgaccgagtacaagcccacggtgcgcctcgccacccgcgacgacgtccccagggccgtacgcaccctcgccgccgcgttcgccgactaccccgccacgcgccacaccgtcgatccggaccgccacatcgagcgggtcaccgagctgcaagaactcttcctcacgcgcgtcgggctcgacatcggcaaggtgtgggtcgcggacgacggcgccgcggtggcggtctggaccacgccggagagcgtcgaagcgggggcggtgttcgccgagatcggcccgcgcatggccgagttgagcggttcccggctggccgcgcagcaacagatggaaggcctcctggcgccgcaccggcccaaggagcccgcgtggttcctggccaccgtcggcgtctcgcccgaccaccagggcaagggtctgggcagcgccgtcgtgctccccggagtggaggcggccgagcgcgccggggtgcccgccttcctggagacctccgcgccccgcaacctccccttctacgagcggctcggcttcaccgtcaccgccgacgtcgaggtgcccgaaggaccgcgcacctggtgcatgacccgcaagcccggtgcctga

SEQ ID NO: 2100 - DNA, 4224 bp, Artificial Sequence
  Synthetic Polynucleotide
atggccttaccagtgaccgccttgctcctgccgctggccttgctgctccacgccgccaggccggaagtgcagctggttgaatctggcggaggactggttcaggctggcggatctctgagactgtcttgtgccgccagcggcagaacctttagcatgggctggtttagacaggcccctggcaaagagagagagttcgtcgccgccatcacatactctggcggcagcccttactacgccgactctgtgaagggcagattcaccatcagccgggacaacgccaagaacaccgtgtacctccagatgaacagcctgaagcctgaggacaccgccgtgtactactgcgccgccaatccaacatacggcagcgactggaacgccgagaattggggccagggaacccaagtgacagtgtctagcggtaccggcggaggcggatctggcggcggaggtagcggtggcggaggatctgaattcgacatccagatgacacagagccctagcagcctgtctgccagcgtgggagacagagtgaccatcacatgcaaggccagcgaccacatcaacaactggctggcctggtatcagcagaagcctggacaggcccctaagctgctgatctacggcgctaccacactggaaacaggcgtgcccagcagattttctggcagcggctctggcaccgactacaccctgacaatatccagcctccagcctgaggacttcgccacctactactgtcagcagagctggaacaccccttggacattcggccagggcaccaagctggaaatcaagagactcgaggacctgaagaacgtgttcccacctgaggtggccgtgttcgagcctagcgaggccgagatcagccacacccagaaagccaccctcgtgtgcctggctaccggcttctaccccgaccatgtggaactgtcttggtgggtcaacggcaaagaggtgcacagcggcgtgtctaccgacccccagccactgaaagaacagcccgccctgaacgacagccggtactgcctgagcagcagactgagagtgtccgccaccttctggcagaacccccggaaccacttcagatgccaggtgcagttctacggcctgagcgagaacgacgagtggacccaggacagagccaagcccgtgacccagatcgtgtctgccgaagcctggggcagagccgattgcggatccacaacacctggcgagagaagtagcctgcctgccttctatcctggcaccagcggctcttgttctggctgtggatctctgagcctgcctctgctggctggactggttgctgctgatgctgtggcctctctgctgattgtgggagccgtgttcctgtgcgccagacctagaagaagccccgctcaagaggacggcaaggtgtacatcaacatgcccggcagaggaagcactagtagagtgaagttcagcagaagcgccgacgcccctgcctaccagcagggacagaaccaactgtacaacgagctgaacctgggcagacgggaagagtacgacgtgctggacaagcggagaggcagggaccctgagatgggcggaaagccccagcggagaaagaacccccaggaaggactgtataacgaactccagaaagacaagatggccgaagcctacagcgagatcggcatgaagggcgagcggagaagaggcaagggccacgatggcctgtaccagggcctgagcaccgccaccaaggacacctatgacgccctgcacatgcaggccctgcctccaagaagggccaagcgatctggatctggagcaacaaacttctcactactcaaacaagcaggtgacgtggaggagaatcccgggcctatggactggatttggcgcatccttttccttgtcggcgctgctaccggcgcgcattccgggcccgaagtgcaactggttgaatccggtggcggcctggtgcaagcaggcggatctctcagacttagctgtgccgcctccggcagaaccttcacaatgggatggtttaggcaggctccagggaaagagagagagttcgtcgccgccatctctctgtctcccacactggcctactacgccgactctgtgaaaggccggttcaccatctccagagataatgccaagaacaccgtggtgctgcaaatgaactctctgaaacccgaggatacagccctgtactattgtgccgctgaccggaagtccgtgatgagcatcagacccgattactggggacagggcacacaagtcacagtgtcctctggatccggcggcggaggatctggcggaggcggatctgggggcggaggctctttcgaacaagttcagcttcaacagcctggcgctgagctggtcaaacctggcgcttctgtgaagatgagctgcaaagccagcggctacgccttcagcagctactggatcaactggatgaagcagaaacccggccagggactcgaatggatcggccaaatctatcccggcgacggcgacaccaactacaacggcaagttcaagggcagagccacactgaccgccgatacctctagcagcacagcctacatgcagctgagcagcctgaccagcgaagatagcgccgtgtacttctgtgcccggtccatcacaacagtcgtgggctgcgctatggactattggggccagggaacaagcgtgaccgtgtctagtacgcgtatccagaaccctgatcctgccgtgtaccagctgcgggatagcaagagcagcgacaagagcgtgtgtctgttcaccgacttcgacagccagaccaacgtgtcccagagcaaggactccgacgtgtacatcaccgataagaccgtgctggacatgcggagcatggacttcaagagcaactccgccgtggcctggtccaacaagtccgatttcgcctgcgccaacgccttcaacaacagcattatccccgaggacacattcttcccaagccccgagagcagctgcggtacccagagttttgggttgttggaccctaaattgagctatctgttggacggaatcctgttcatttacggagtgatcctgaccgcattgttcctgcgcgatcagaggctgccacctgatgctcataagccacctggcggcggatctttcaggaccccaattcaagaagaacaagccgacgctcactctaccctggctaagatcagctctagacgggttaagttttccagatccgcagacgcacccgcttaccaacaagggcagaaccaactctacaatgaacttaatttggggcggagggaagagtacgacgttctggacaaaaggaggggacgagatcccgagatgggcggaaagcctcagcgaaggaagaatccgcaagaggggctttataacgaactccagaaagataaaatggcagaagcctatagtgagattgggatgaagggagaaaggaggaggggtaaaggtcacgatgggttgtaccaaggattgagcacagccactaaagatacctatgatgcgctccacatgcaggccctgccgccaagacgcgccaagagaagcggatctggcgtgaagcagaccctgaatttcgacctgctgaagctggctggcgacgtggaatccaacccaggccctggccatatgaccgagtacaagcccacggtgcgcctcgccacccgcgacgacgtccccagggccgtacgcaccctcgccgccgcgttcgccgactaccccgccacgcgccacaccgtcgatccggaccgccacatcgagcgggtcaccgagctgcaagaactcttcctcacgcgcgtcgggctcgacatcggcaaggtgtgggtcgcggacgacggcgccgcggtggcggtctggaccacgccggagagcgtcgaagcgggggcggtgttcgccgagatcggcccgcgcatggccgagttgagcggttcccggctggccgcgcagcaacagatggaaggcctcctggcgccgcaccggcccaaggagcccgcgtggttcctggccaccgtcggcgtctcgcccgaccaccagggcaagggtctgggcagcgccgtcgtgctccccggagtggaggcggccgagcgcgccggggtgcccgccttcctggagacctccgcgccccgcaacctccccttctacgagcggctcggcttcaccgtcaccgccgacgtcgaggtgcccgaaggaccgcgcacctggtgcatgacccgcaagcccggtgcctga

SEQ ID NO: 2101 - DNA, 3423 bp, Artificial Sequence
  Synthetic Polynucleotide
atggccttaccagtgaccgccttgctcctgccgctggccttgctgctccacgccgccaggccggaagtgcagctggttgaatctggcggaggactggttcaggctggcggatctctgagactgtcttgtgccgccagcggcagaacctttagcatgggctggtttagacaggcccctggcaaagagagagagttcgtcgccgccatcacatactctggcggcagcccttactacgccgactctgtgaagggcagattcaccatcagccgggacaacgccaagaacaccgtgtacctccagatgaacagcctgaagcctgaggacaccgccgtgtactactgcgccgccaatccaacatacggcagcgactggaacgccgagaattggggccagggaacccaagtgacagtgtctagcctcgaggacctgaagaacgtgttcccacctgaggtggccgtgttcgagcctagcgaggccgagatcagccacacccagaaagccaccctcgtgtgcctggctaccggcttctaccccgaccatgtggaactgtcttggtgggtcaacggcaaagaggtgcacagcggcgtgtctaccgacccccagccactgaaagaacagcccgccctgaacgacagccggtactgcctgagcagcagactgagagtgtccgccaccttctggcagaacccccggaaccacttcagatgccaggtgcagttctacggcctgagcgagaacgacgagtggacccaggacagagccaagcccgtgacccagatcgtgtctgccgaagcctggggcagagccgattgcggatccacaacacctggcgagagaagtagcctgcctgccttctatcctggcaccagcggctcttgttctggctgtggatctctgagcctgcctctgctggctggactggttgctgctgatgctgtggcctctctgctgattgtgggagccgtgttcctgtgcgccagacctagaagaagccccgctcaagaggacggcaaggtgtacatcaacatgcccggcagaggaagcactagtagagtgaagttcagcagaagcgccgacgcccctgcctaccagcagggacagaaccaactgtacaacgagctgaacctgggcagacgggaagagtacgacgtgctggacaagcggagaggcagggaccctgagatgggcggaaagccccagcggagaaagaacccccaggaaggactgtataacgaactccagaaagacaagatggccgaagcctacagcgagatcggcatgaagggcgagcggagaagaggcaagggccacgatggcctgtaccagggcctgagcaccgccaccaaggacacctatgacgccctgcacatgcaggccctgcctccaagaagggccaagcgatctggatctggagcaacaaacttctcactactcaaacaagcaggtgacgtggaggagaatcccgggcctatggactggatttggcgcatccttttccttgtcggcgctgctaccggcgcgcattccgggcccgaagtgcaactggttgaatccggtggcggcctggtgcaagcaggcggatctctcagacttagctgtgccgcctccggcagaaccttcacaatgggatggtttaggcaggctccagggaaagagagagagttcgtcgccgccatctctctgtctcccacactggcctactacgccgactctgtgaaaggccggttcaccatctccagagataatgccaagaacaccgtggtgctgcaaatgaactctctgaaacccgaggatacagccctgtactattgtgccgctgaccggaagtccgtgatgagcatcagacccgattactggggacagggcacacaagtcacagtgtcctctacgcgtatccagaaccctgatcctgccgtgtaccagctgcgggatagcaagagcagcgacaagagcgtgtgtctgttcaccgacttcgacagccagaccaacgtgtcccagagcaaggactccgacgtgtacatcaccgataagaccgtgctggacatgcggagcatggacttcaagagcaactccgccgtggcctggtccaacaagtccgatttcgcctgcgccaacgccttcaacaacagcattatccccgaggacacattcttcccaagccccgagagcagctgcggtacccagagttttgggttgttggaccctaaattgagctatctgttggacggaatcctgttcatttacggagtgatcctgaccgcattgttcctgcgcgatcagaggctgccacctgatgctcataagccacctggcggcggatctttcaggaccccaattcaagaagaacaagccgacgctcactctaccctggctaagatcagctctagacgggttaagttttccagatccgcagacgcacccgcttaccaacaagggcagaaccaactctacaatgaacttaatttggggcggagggaagagtacgacgttctggacaaaaggaggggacgagatcccgagatgggcggaaagcctcagcgaaggaagaatccgcaagaggggctttataacgaactccagaaagataaaatggcagaagcctatagtgagattgggatgaagggagaaaggaggaggggtaaaggtcacgatgggttgtaccaaggattgagcacagccactaaagatacctatgatgcgctccacatgcaggccctgccgccaagacgcgccaagagaagcggatctggcgtgaagcagaccctgaatttcgacctgctgaagctggctggcgacgtggaatccaacccaggccctggccatatgaccgagtacaagcccacggtgcgcctcgccacccgcgacgacgtccccagggccgtacgcaccctcgccgccgcgttcgccgactaccccgccacgcgccacaccgtcgatccggaccgccacatcgagcgggtcaccgagctgcaagaactcttcctcacgcgcgtcgggctcgacatcggcaaggtgtgggtcgcggacgacggcgccgcggtggcggtctggaccacgccggagagcgtcgaagcgggggcggtgttcgccgagatcggcccgcgcatggccgagttgagcggttcccggctggccgcgcagcaacagatggaaggcctcctggcgccgcaccggcccaaggagcccgcgtggttcctggccaccgtcggcgtctcgcccgaccaccagggcaagggtctgggcagcgccgtcgtgctccccggagtggaggcggccgagcgcgccggggtgcccgccttcctggagacctccgcgccccgcaacctccccttctacgagcggctcggcttcaccgtcaccgccgacgtcgaggtgcccgaaggaccgcgcacctggtgcatgacccgcaagcccggtgcctga

SEQ ID NO: 2102 - DNA, 1758 bp, Artificial Sequence; identical to SEQ ID NO: 2037
  Synthetic Polynucleotide

SEQ ID NO: 2103 - DNA, 2694 bp, Artificial Sequence
  Synthetic Polynucleotide
atggccttaccagtgaccgccttgctcctgccgctggccttgctgctccacgccgccaggccggacatccagatgacacagagccctagcagcctgtctgccagcgtgggagacagagtgaccatcacatgcaaggccagcgaccacatcaacaactggctggcctggtatcagcagaagcctggacaggcccctaagctgctgatctacggcgctaccacactggaaacaggcgtgcccagcagattttctggcagcggctctggcaccgactacaccctgacaatatccagcctccagcctgaggacttcgccacctactactgtcagcagagctggaacaccccttggacattcggccagggcaccaagctggaaatcaagagactcgagcagagcttcggcctgctggaccccaagctgagctacctgctggatggcatcctgttcatctacggcgtgatcctgaccgccctgttcctgagggaccaaagactgcctcctgacgctcacaaacctccaggcggaggcagcttcagaacccctatccaagaggaacaggctgacgcccacagcaccctggcaaaaattagcactagtagagtgaagttcagcagaagcgccgacgcccctgcctaccagcagggacagaaccaactgtacaacgagctgaacctgggcagacgggaagagtacgacgtgctggacaagcggagaggcagggaccctgagatgggcggaaagccccagcggagaaagaacccccaggaaggactgtataacgaactccagaaagacaagatggccgaagcctacagcgagatcggcatgaagggcgagcggagaagaggcaagggccacgatggcctgtaccagggcctgagcaccgccaccaaggacacctatgacgccctgcacatgcaggccctgcctccaagaagggccaagcgatctggatctggagcaacaaacttctcactactcaaacaagcaggtgacgtggaggagaatcccgggcctatggactggatttggcgcatccttttccttgtcggcgctgctaccggcgcgcattccttcgaacaagttcagcttcaacagcctggcgctgagctggtcaaacctggcgcttctgtgaagatgagctgcaaagccagcggctacgccttcagcagctactggatcaactggatgaagcagaaacccggccagggactcgaatggatcggccaaatctatcccggcgacggcgacaccaactacaacggcaagttcaagggcagagccacactgaccgccgatacctctagcagcacagcctacatgcagctgagcagcctgaccagcgaagatagcgccgtgtacttctgtgcccggtccatcacaacagtcgtgggctgcgctatggactattggggccagggaacaagcgtgaccgtgtctagtacgcgtcagagttttgggttgttggaccctaaattgagctatctgttggacggaatcctgttcatttacggagtgatcctgaccgcattgttcctgcgcgatcagaggctgccacctgatgctcataagccacctggcggcggatctttcaggaccccaattcaagaagaacaagccgacgctcactctaccctggctaagatcagctctagacgggttaagttttccagatccgcagacgcacccgcttaccaacaagggcagaaccaactctacaatgaacttaatttggggcggagggaagagtacgacgttctggacaaaaggaggggacgagatcccgagatgggcggaaagcctcagcgaaggaagaatccgcaagaggggctttataacgaactccagaaagataaaatggcagaagcctatagtgagattgggatgaagggagaaaggaggaggggtaaaggtcacgatgggttgtaccaaggattgagcacagccactaaagatacctatgatgcgctccacatgcaggccctgccgccaagacgcgccaagagaagcggatctggcgtgaagcagaccctgaatttcgacctgctgaagctggctggcgacgtggaatccaacccaggccctggccatatgaccgagtacaagcccacggtgcgcctcgccacccgcgacgacgtccccagggccgtacgcaccctcgccgccgcgttcgccgactaccccgccacgcgccacaccgtcgatccggaccgccacatcgagcgggtcaccgagctgcaagaactcttcctcacgcgcgtcgggctcgacatcggcaaggtgtgggtcgcggacgacggcgccgcggtggcggtctggaccacgccggagagcgtcgaagcgggggcggtgttcgccgagatcggcccgcgcatggccgagttgagcggttcccggctggccgcgcagcaacagatggaaggcctcctggcgccgcaccggcccaaggagcccgcgtggttcctggccaccgtcggcgtctcgcccgaccaccagggcaagggtctgggcagcgccgtcgtgctccccggagtggaggcggccgagcgcgccggggtgcccgccttcctggagacctccgcgccccgcaacctccccttctacgagcggctcggcttcaccgtcaccgccgacgtcgaggtgcccgaaggaccgcgcacctggtgcatgacccgcaagcccggtgcctga

SEQ ID NO: 2104 - DNA, 2850 bp, Artificial Sequence
  Synthetic Polynucleotide
atggccttaccagtgaccgccttgctcctgccgctggccttgctgctccacgccgccaggccggcatgcgaagtgcagctgcttgaaagtggcggcggactgattcagcctggcggatctctgagactgagctgtgccgccagcggcttcaccttttctagccacgccatgacctgggtccgacaggcacctggaaaagggcttgaatgggtgtccgccatcagcggctctggcgattacacacactacgccgacagcgtgaagggcagattcaccatcagcagagacaacagcaagaacaccgtgtacctccagatgaacagcctgagagccgaggacagcgccgtgtattattgcgccaaggatgaggatggcggcagcctgcttggacacagaggacaaggcaccctggtcaccgtttcttccggtaccggcggaggcggatctggcggcggaggtagcggtggcggaggatctgaattcggatctctcgagcagagcttcggcctgctggaccccaagctgagctacctgctggatggcatcctgttcatctacggcgtgatcctgaccgccctgttcctgagggaccaaagactgcctcctgacgctcacaaacctccaggcggaggcagcttcagaacccctatccaagaggaacaggctgacgcccacagcaccctggcaaaaattagcactagtagagtgaagttcagcagaagcgccgacgcccctgcctaccagcagggacagaaccaactgtacaacgagctgaacctgggcagacgggaagagtacgacgtgctggacaagcggagaggcagggaccctgagatgggcggaaagccccagcggagaaagaacccccaggaaggactgtataacgaactccagaaagacaagatggccgaagcctacagcgagatcggcatgaagggcgagcggagaagaggcaagggccacgatggcctgtaccagggcctgagcaccgccaccaaggacacctatgacgccctgcacatgcaggccctgcctccaagaagggccaagcgatctggatctggagcaacaaacttctcactactcaaacaagcaggtgacgtggaggagaatcccgggcctatggactggatttggcgcatccttttccttgtcggcgctgctaccggcgcgcattccgggcccgaagtgcagctggttgaatctggcggaggactggttcaggctggcggatctctgagactgtcttgtgccgccagcggcagaacctttagcatgggctggtttagacaggcccctggcaaagagagagagttcgtcgccgccatcacatactctggcggcagcccttactacgccgactctgtgaagggcagattcaccatcagccgggacaacgccaagaacaccgtgtacctccagatgaacagcctgaagcctgaggacaccgccgtgtactactgcgccgccaatccaacatacggcagcgactggaacgccgagaattggggccagggaacccaagtgacagtgtctagcggatccggcggcggaggatctggcggaggcggatctgggggcggaggctctttcgaaggcagcacgcgtcagagttttgggttgttggaccctaaattgagctatctgttggacggaatcctgttcatttacggagtgatcctgaccgcattgttcctgcgcgatcagaggctgccacctgatgctcataagccacctggcggcggatctttcaggaccccaattcaagaagaacaagccgacgctcactctaccctggctaagatcagctctagacgggttaagttttccagatccgcagacgcacccgcttaccaacaagggcagaaccaactctacaatgaacttaatttggggcggagggaagagtacgacgttctggacaaaaggaggggacgagatcccgagatgggcggaaagcctcagcgaaggaagaatccgcaagaggggctttataacgaactccagaaagataaaatggcagaagcctatagtgagattgggatgaagggagaaaggaggaggggtaaaggtcacgatgggttgtaccaaggattgagcacagccactaaagatacctatgatgcgctccacatgcaggccctgccgccaagacgcgccaagagaagcggatctggcgtgaagcagaccctgaatttcgacctgctgaagctggctggcgacgtggaatccaacccaggccctggccatatgaccgagtacaagcccacggtgcgcctcgccacccgcgacgacgtccccagggccgtacgcaccctcgccgccgcgttcgccgactaccccgccacgcgccacaccgtcgatccggaccgccacatcgagcgggtcaccgagctgcaagaactcttcctcacgcgcgtcgggctcgacatcggcaaggtgtgggtcgcggacgacggcgccgcggtggcggtctggaccacgccggagagcgtcgaagcgggggcggtgttcgccgagatcggcccgcgcatggccgagttgagcggttcccggctggccgcgcagcaacagatggaaggcctcctggcgccgcaccggcccaaggagcccgcgtggttcctggccaccgtcggcgtctcgcccgaccaccagggcaagggtctgggcagcgccgtcgtgctccccggagtggaggcggccgagcgcgccggggtgcccgccttcctggagacctccgcgccccgcaacctccccttctacgagcggctcggcttcaccgtcaccgccgacgtcgaggtgcccgaaggaccgcgcacctggtgcatgacccgcaagcccggtgcctga

SEQ ID NO: 2105 - DNA, 3297 bp, Artificial Sequence
  Synthetic Polynucleotide
atggccttaccagtgaccgccttgctcctgccgctggccttgctgctccacgccgccaggccggacatccagatgacacagagccctagcagcctgtctgccagcgtgggagacagagtgaccatcacatgcaaggccagcgaccacatcaacaactggctggcctggtatcagcagaagcctggacaggcccctaagctgctgatctacggcgctaccacactggaaacaggcgtgcccagcagattttctggcagcggctctggcaccgactacaccctgacaatatccagcctccagcctgaggacttcgccacctactactgtcagcagagctggaacaccccttggacattcggccagggcaccaagctggaaatcaagagactcgagggacagcctaaggccaatcctaccgtgacactgttccctccaagcagcgaagaactccaggccaacaaggccacacttgtgtgcctgatctccgacttctaccctggggctgtgacagtggcttggaaggccgatggatctcctgtgaaagccggcgtggaaaccaccaagccatccaagcagagcaacaacaaatacgccgccagctcctacctgagcctgacacctgagcagtggaagtcccacagatcctacagctgccaagtgacccacgaaggcagcaccgtggaaaagacagtggcccctacagagtgcagcggatcccagagcttcggcctgctggaccccaagctgagctacctgctggatggcatcctgttcatctacggcgtgatcctgaccgccctgttcctgagggaccaaagactgcctcctgacgctcacaaacctccaggcggaggcagcttcagaacccctatccaagaggaacaggctgacgcccacagcaccctggcaaaaattagcactagtagagtgaagttcagcagaagcgccgacgcccctgcctaccagcagggacagaaccaactgtacaacgagctgaacctgggcagacgggaagagtacgacgtgctggacaagcggagaggcagggaccctgagatgggcggaaagccccagcggagaaagaacccccaggaaggactgtataacgaactccagaaagacaagatggccgaagcctacagcgagatcggcatgaagggcgagcggagaagaggcaagggccacgatggcctgtaccagggcctgagcaccgccaccaaggacacctatgacgccctgcacatgcaggccctgcctccaagaagggccaagcgatctggatctggagcaacaaacttctcactactcaaacaagcaggtgacgtggaggagaatcccgggcctatggactggatttggcgcatccttttccttgtcggcgctgctaccggcgcgcattccttcgaacaagttcagcttcaacagcctggcgctgagctggtcaaacctggcgcttctgtgaagatgagctgcaaagccagcggctacgccttcagcagctactggatcaactggatgaagcagaaacccggccagggactcgaatggatcggccaaatctatcccggcgacggcgacaccaactacaacggcaagttcaagggcagagccacactgaccgccgatacctctagcagcacagcctacatgcagctgagcagcctgaccagcgaagatagcgccgtgtacttctgtgcccggtccatcacaacagtcgtgggctgcgctatggactattggggccagggaacaagcgtgaccgtgtctagtacgcgtgcctctacaaagggaccctccgtgtttcctctggctcccagcagcaagtctacaagcggaggaacagccgctctgggctgcctggtcaaggattactttcccgagcctgtgaccgtgtcctggaatagcggagcactgacaagcggcgtgcacacctttccagccgtgctgcaaagcagcggcctgtactctctgagcagcgtggtcacagtgcctagctctagcctgggcacccagacctacatctgcaatgtgaaccacaagcctagcaacaccaaggtggacaagagagtggaacccaagagctgtggtacccagagttttgggttgttggaccctaaattgagctatctgttggacggaatcctgttcatttacggagtgatcctgaccgcattgttcctgcgcgatcagaggctgccacctgatgctcataagccacctggcggcggatctttcaggaccccaattcaagaagaacaagccgacgctcactctaccctggctaagatcagctctagacgggttaagttttccagatccgcagacgcacccgcttaccaacaagggcagaaccaactctacaatgaacttaatttggggcggagggaagagtacgacgttctggacaaaaggaggggacgagatcccgagatgggcggaaagcctcagcgaaggaagaatccgcaagaggggctttataacgaactccagaaagataaaatggcagaagcctatagtgagattgggatgaagggagaaaggaggaggggtaaaggtcacgatgggttgtaccaaggattgagcacagccactaaagatacctatgatgcgctccacatgcaggccctgccgccaagacgcgccaagagaagcggatctggcgtgaagcagaccctgaatttcgacctgctgaagctggctggcgacgtggaatccaacccaggccctggccatatggctacctacgaggtgctgtgcgaggtggcaagaaagctgggcaccgacgacagagaagtggtgctgttcctgctgaacgtgttcatccctcagcctacactggcccagctgatcggtgcactgagagccctgaaagaggaaggccggctgacctttcctctgctggccgaatgcctgttcagagccggaagaagggatctgctgcgggacctgctgcatctggaccccagatttctggaaagacacctggccggcaccatgagctacttcagcccttaccagctgaccgtgctgcacgttgacggcgaactgtgcgccagagatattcggagcctgatcttcctgagcaaggacaccatcggcagccggtctacccctcagacatttctgcactgggtgtactgcatggaaaacctggacctgctcggccccacagatgtggatgccctgatgtccatgctgagaagcctgagcagagtggacctccagagacaggtgcagacactgatgggactgcacctgagcggacctagccacagccagcactacagacacacccct

SEQ ID NO: 2106 - DNA, 3456 bp, Artificial Sequence
  Synthetic Polynucleotide
atggccttaccagtgaccgccttgctcctgccgctggccttgctgctccacgccgccaggccggacatccagatgacacagagccctagcagcctgtctgccagcgtgggagacagagtgaccatcacatgcaaggccagcgaccacatcaacaactggctggcctggtatcagcagaagcctggacaggcccctaagctgctgatctacggcgctaccacactggaaacaggcgtgcccagcagattttctggcagcggctctggcaccgactacaccctgacaatatccagcctccagcctgaggacttcgccacctactactgtcagcagagctggaacaccccttggacattcggccagggcaccaagctggaaatcaagagactcgagggacagcctaaggccaatcctaccgtgacactgttccctccaagcagcgaagaactccaggccaacaaggccacacttgtgtgcctgatctccgacttctaccctggggctgtgacagtggcttggaaggccgatggatctcctgtgaaagccggcgtggaaaccaccaagccatccaagcagagcaacaacaaatacgccgccagctcctacctgagcctgacacctgagcagtggaagtcccacagatcctacagctgccaagtgacccacgaaggcagcaccgtggaaaagacagtggcccctacagagtgcagcggatcccagagcttcggcctgctggaccccaagctgagctacctgctggatggcatcctgttcatctacggcgtgatcctgaccgccctgttcctgagggaccaaagactgcctcctgacgctcacaaacctccaggcggaggcagcttcagaacccctatccaagaggaacaggctgacgcccacagcaccctggcaaaaattagcactagtagagtgaagttcagcagaagcgccgacgcccctgcctaccagcagggacagaaccaactgtacaacgagctgaacctgggcagacgggaagagtacgacgtgctggacaagcggagaggcagggaccctgagatgggcggaaagccccagcggagaaagaacccccaggaaggactgtataacgaactccagaaagacaagatggccgaagcctacagcgagatcggcatgaagggcgagcggagaagaggcaagggccacgatggcctgtaccagggcctgagcaccgccaccaaggacacctatgacgccctgcacatgcaggccctgcctccaagaagggccaagcgatctggatctggagcaacaaacttctcactactcaaacaagcaggtgacgtggaggagaatcccgggcctatggactggatttggcgcatccttttccttgtcggcgctgctaccggcgcgcattccttcgaacaagttcagcttcaacagcctggcgctgagctggtcaaacctggcgcttctgtgaagatgagctgcaaagccagcggctacgccttcagcagctactggatcaactggatgaagcagaaacccggccagggactcgaatggatcggccaaatctatcccggcgacggcgacaccaactacaacggcaagttcaagggcagagccacactgaccgccgatacctctagcagcacagcctacatgcagctgagcagcctgaccagcgaagatagcgccgtgtacttctgtgcccggtccatcacaacagtcgtgggctgcgctatggactattggggccagggaacaagcgtgaccgtgtctagtacgcgtgcctctacaaagggaccctccgtgtttcctctggctcccagcagcaagtctacaagcggaggaacagccgctctgggctgcctggtcaaggattactttcccgagcctgtgaccgtgtcctggaatagcggagcactgacaagcggcgtgcacacctttccagccgtgctgcaaagcagcggcctgtactctctgagcagcgtggtcacagtgcctagctctagcctgggcacccagacctacatctgcaatgtgaaccacaagcctagcaacaccaaggtggacaagagagtggaacccaagagctgtggtacccagagttttgggttgttggaccctaaattgagctatctgttggacggaatcctgttcatttacggagtgatcctgaccgcattgttcctgcgcgatcagaggctgccacctgatgctcataagccacctggcggcggatctttcaggaccccaattcaagaagaacaagccgacgctcactctaccctggctaagatcagctctagacgggttaagttttccagatccgcagacgcacccgcttaccaacaagggcagaaccaactctacaatgaacttaatttggggcggagggaagagtacgacgttctggacaaaaggaggggacgagatcccgagatgggcggaaagcctcagcgaaggaagaatccgcaagaggggctttataacgaactccagaaagataaaatggcagaagcctatagtgagattgggatgaagggagaaaggaggaggggtaaaggtcacgatgggttgtaccaaggattgagcacagccactaaagatacctatgatgcgctccacatgcaggccctgccgccaagacgcgccaagagaagcggatctggcgtgaagcagaccctgaatttcgacctgctgaagctggctggcgacgtggaatccaacccaggccctggccatatgtccgactccaaggaggtccctagccttccatttttgcgacacttgctcgaagagttggacagccatgaggacagcttgctgctgtttctgtgtcacgacgcggccccgggctgcacgacggtcacgcaagctttgtgctcgcttagccaacagcgcaagctgaccctcgcggctctggtcgagatgctctacgtgctgcagcgtatggatcttctcaagagccgcttcgggctcagcaaggagggggccgagcaattgctgggcacaagctttctcacgcgctaccgcaagctcatggtttgcgtgggtgaggagctcgactcgagcgagctacgcgctctacgcttgttcgcgtgcaacctgaatccgagcctgagcacggcgctttctgagagcagccgctttgtcgagcttgtactcgcgcttgaaaacgtaggactcgtctcgccatcgagtgtttccgtgcttgcggacatgttgcgcactcttcggcgcctcgatttgtgccagcagcttgttgagtacgaacaacaagagcaagccaggtaccgttactgttacgcggcctcgccctcattgccagttcgtacgttacgtcgggggcacggcgcgagtgaacacgagcagctgtgcatgcccgtgcaagaatcctctgacagccccgagctgctgcgcacgcccgtacaagaatcctccagcgacagccccgagcaaacgact

SEQ ID NO: 2107 - DNA, 3333 bp, Artificial Sequence
  Synthetic Polynucleotide
atggccttaccagtgaccgccttgctcctgccgctggccttgctgctccacgccgccaggccggacatccagatgacacagagccctagcagcctgtctgccagcgtgggagacagagtgaccatcacatgcaaggccagcgaccacatcaacaactggctggcctggtatcagcagaagcctggacaggcccctaagctgctgatctacggcgctaccacactggaaacaggcgtgcccagcagattttctggcagcggctctggcaccgactacaccctgacaatatccagcctccagcctgaggacttcgccacctactactgtcagcagagctggaacaccccttggacattcggccagggcaccaagctggaaatcaagagactcgagggacagcctaaggccaatcctaccgtgacactgttccctccaagcagcgaagaactccaggccaacaaggccacacttgtgtgcctgatctccgacttctaccctggggctgtgacagtggcttggaaggccgatggatctcctgtgaaagccggcgtggaaaccaccaagccatccaagcagagcaacaacaaatacgccgccagctcctacctgagcctgacacctgagcagtggaagtcccacagatcctacagctgccaagtgacccacgaaggcagcaccgtggaaaagacagtggcccctacagagtgcagcggatcccagagcttcggcctgctggaccccaagctgagctacctgctggatggcatcctgttcatctacggcgtgatcctgaccgccctgttcctgagggaccaaagactgcctcctgacgctcacaaacctccaggcggaggcagcttcagaacccctatccaagaggaacaggctgacgcccacagcaccctggcaaaaattagcactagtagagtgaagttcagcagaagcgccgacgcccctgcctaccagcagggacagaaccaactgtacaacgagctgaacctgggcagacgggaagagtacgacgtgctggacaagcggagaggcagggaccctgagatgggcggaaagccccagcggagaaagaacccccaggaaggactgtataacgaactccagaaagacaagatggccgaagcctacagcgagatcggcatgaagggcgagcggagaagaggcaagggccacgatggcctgtaccagggcctgagcaccgccaccaaggacacctatgacgccctgcacatgcaggccctgcctccaagaagggccaagcgatctggatctggagcaacaaacttctcactactcaaacaagcaggtgacgtggaggagaatcccgggcctatggactggatttggcgcatccttttccttgtcggcgctgctaccggcgcgcattccttcgaacaagttcagcttcaacagcctggcgctgagctggtcaaacctggcgcttctgtgaagatgagctgcaaagccagcggctacgccttcagcagctactggatcaactggatgaagcagaaacccggccagggactcgaatggatcggccaaatctatcccggcgacggcgacaccaactacaacggcaagttcaagggcagagccacactgaccgccgatacctctagcagcacagcctacatgcagctgagcagcctgaccagcgaagatagcgccgtgtacttctgtgcccggtccatcacaacagtcgtgggctgcgctatggactattggggccagggaacaagcgtgaccgtgtctagtacgcgtgcctctacaaagggaccctccgtgtttcctctggctcccagcagcaagtctacaagcggaggaacagccgctctgggctgcctggtcaaggattactttcccgagcctgtgaccgtgtcctggaatagcggagcactgacaagcggcgtgcacacctttccagccgtgctgcaaagcagcggcctgtactctctgagcagcgtggtcacagtgcctagctctagcctgggcacccagacctacatctgcaatgtgaaccacaagcctagcaacaccaaggtggacaagagagtggaacccaagagctgtggtacccagagttttgggttgttggaccctaaattgagctatctgttggacggaatcctgttcatttacggagtgatcctgaccgcattgttcctgcgcgatcagaggctgccacctgatgctcataagccacctggcggcggatctttcaggaccccaattcaagaagaacaagccgacgctcactctaccctggctaagatcagctctagacgggttaagttttccagatccgcagacgcacccgcttaccaacaagggcagaaccaactctacaatgaacttaatttggggcggagggaagagtacgacgttctggacaaaaggaggggacgagatcccgagatgggcggaaagcctcagcgaaggaagaatccgcaagaggggctttataacgaactccagaaagataaaatggcagaagcctatagtgagattgggatgaagggagaaaggaggaggggtaaaggtcacgatgggttgtaccaaggattgagcacagccactaaagatacctatgatgcgctccacatgcaggccctgccgccaagacgcgccaagagaagcggatctggcgtgaagcagaccctgaatttcgacctgctgaagctggctggcgacgtggaatccaacccaggccctggccatatgaccgagtacaagcccacggtgcgcctcgccacccgcgacgacgtccccagggccgtacgcaccctcgccgccgcgttcgccgactaccccgccacgcgccacaccgtcgatccggaccgccacatcgagcgggtcaccgagctgcaagaactcttcctcacgcgcgtcgggctcgacatcggcaaggtgtgggtcgcggacgacggcgccgcggtggcggtctggaccacgccggagagcgtcgaagcgggggcggtgttcgccgagatcggcccgcgcatggccgagttgagcggttcccggctggccgcgcagcaacagatggaaggcctcctggcgccgcaccggcccaaggagcccgcgtggttcctggccaccgtcggcgtctcgcccgaccaccagggcaagggtctgggcagcgccgtcgtgctccccggagtggaggcggccgagcgcgccggggtgcccgccttcctggagacctccgcgccccgcaacctccccttctacgagcggctcggcttcaccgtcaccgccgacgtcgaggtgcccgaaggaccgcgcacctggtgcatgacccgcaagcccggtgcctga

SEQ ID NO: 2108 - DNA, 3744 bp, Artificial Sequence
  Synthetic Polynucleotide
atggccttaccagtgaccgccttgctcctgccgctggccttgctgctccacgccgccaggccggaagtgcagctggttgaatctggcggaggactggttcaggctggcggatctctgagactgtcttgtgccgccagcggcagaacctttagcatgggctggtttagacaggcccctggcaaagagagagagttcgtcgccgccatcacatactctggcggcagcccttactacgccgactctgtgaagggcagattcaccatcagccgggacaacgccaagaacaccgtgtacctccagatgaacagcctgaagcctgaggacaccgccgtgtactactgcgccgccaatccaacatacggcagcgactggaacgccgagaattggggccagggaacccaagtgacagtgtctagcggtaccggcggaggcggatctggcggcggaggtagcggtggcggaggatctgaattcgacatccagatgacacagagccctagcagcctgtctgccagcgtgggagacagagtgaccatcacatgcaaggccagcgaccacatcaacaactggctggcctggtatcagcagaagcctggacaggcccctaagctgctgatctacggcgctaccacactggaaacaggcgtgcccagcagattttctggcagcggctctggcaccgactacaccctgacaatatccagcctccagcctgaggacttcgccacctactactgtcagcagagctggaacaccccttggacattcggccagggcaccaagctggaaatcaagagactcgagggacagcctaaggccaatcctaccgtgacactgttccctccaagcagcgaagaactccaggccaacaaggccacacttgtgtgcctgatctccgacttctaccctggggctgtgacagtggcttggaaggccgatggatctcctgtgaaagccggcgtggaaaccaccaagccatccaagcagagcaacaacaaatacgccgccagctcctacctgagcctgacacctgagcagtggaagtcccacagatcctacagctgccaagtgacccacgaaggcagcaccgtggaaaagacagtggcccctacagagtgcagcggatcccagagcttcggcctgctggaccccaagctgagctacctgctggatggcatcctgttcatctacggcgtgatcctgaccgccctgttcctgagggaccaaagactgcctcctgacgctcacaaacctccaggcggaggcagcttcagaacccctatccaagaggaacaggctgacgcccacagcaccctggcaaaaattagcactagtagagtgaagttcagcagaagcgccgacgcccctgcctaccagcagggacagaaccaactgtacaacgagctgaacctgggcagacgggaagagtacgacgtgctggacaagcggagaggcagggaccctgagatgggcggaaagccccagcggagaaagaacccccaggaaggactgtataacgaactccagaaagacaagatggccgaagcctacagcgagatcggcatgaagggcgagcggagaagaggcaagggccacgatggcctgtaccagggcctgagcaccgccaccaaggacacctatgacgccctgcacatgcaggccctgcctccaagaagggccaagcgatctggatctggagcaacaaacttctcactactcaaacaagcaggtgacgtggaggagaatcccgggcctatggactggatttggcgcatccttttccttgtcggcgctgctaccggcgcgcattccttcgaacaagttcagcttcaacagcctggcgctgagctggtcaaacctggcgcttctgtgaagatgagctgcaaagccagcggctacgccttcagcagctactggatcaactggatgaagcagaaacccggccagggactcgaatggatcggccaaatctatcccggcgacggcgacaccaactacaacggcaagttcaagggcagagccacactgaccgccgatacctctagcagcacagcctacatgcagctgagcagcctgaccagcgaagatagcgccgtgtacttctgtgcccggtccatcacaacagtcgtgggctgcgctatggactattggggccagggaacaagcgtgaccgtgtctagtacgcgtgcctctacaaagggaccctccgtgtttcctctggctcccagcagcaagtctacaagcggaggaacagccgctctgggctgcctggtcaaggattactttcccgagcctgtgaccgtgtcctggaatagcggagcactgacaagcggcgtgcacacctttccagccgtgctgcaaagcagcggcctgtactctctgagcagcgtggtcacagtgcctagctctagcctgggcacccagacctacatctgcaatgtgaaccacaagcctagcaacaccaaggtggacaagagagtggaacccaagagctgtggtacccagagttttgggttgttggaccctaaattgagctatctgttggacggaatcctgttcatttacggagtgatcctgaccgcattgttcctgcgcgatcagaggctgccacctgatgctcataagccacctggcggcggatctttcaggaccccaattcaagaagaacaagccgacgctcactctaccctggctaagatcagctctagacgggttaagttttccagatccgcagacgcacccgcttaccaacaagggcagaaccaactctacaatgaacttaatttggggcggagggaagagtacgacgttctggacaaaaggaggggacgagatcccgagatgggcggaaagcctcagcgaaggaagaatccgcaagaggggctttataacgaactccagaaagataaaatggcagaagcctatagtgagattgggatgaagggagaaaggaggaggggtaaaggtcacgatgggttgtaccaaggattgagcacagccactaaagatacctatgatgcgctccacatgcaggccctgccgccaagacgcgccaagagaagcggatctggcgtgaagcagaccctgaatttcgacctgctgaagctggctggcgacgtggaatccaacccaggccctggccatatgaccgagtacaagcccacggtgcgcctcgccacccgcgacgacgtccccagggccgtacgcaccctcgccgccgcgttcgccgactaccccgccacgcgccacaccgtcgatccggaccgccacatcgagcgggtcaccgagctgcaagaactcttcctcacgcgcgtcgggctcgacatcggcaaggtgtgggtcgcggacgacggcgccgcggtggcggtctggaccacgccggagagcgtcgaagcgggggcggtgttcgccgagatcggcccgcgcatggccgagttgagcggttcccggctggccgcgcagcaacagatggaaggcctcctggcgccgcaccggcccaaggagcccgcgtggttcctggccaccgtcggcgtctcgcccgaccaccagggcaagggtctgggcagcgccgtcgtgctccccggagtggaggcggccgagcgcgccggggtgcccgccttcctggagacctccgcgccccgcaacctccccttctacgagcggctcggcttcaccgtcaccgccgacgtcgaggtgcccgaaggaccgcgcacctggtgcatgacccgcaagcccggtgcctga

SEQ ID NO: 2109 - DNA, 4155 bp, Artificial Sequence
  Synthetic Polynucleotide
atggccttaccagtgaccgccttgctcctgccgctggccttgctgctccacgccgccaggccggaagtgcagctggttgaatctggcggaggactggttcaggctggcggatctctgagactgtcttgtgccgccagcggcagaacctttagcatgggctggtttagacaggcccctggcaaagagagagagttcgtcgccgccatcacatactctggcggcagcccttactacgccgactctgtgaagggcagattcaccatcagccgggacaacgccaagaacaccgtgtacctccagatgaacagcctgaagcctgaggacaccgccgtgtactactgcgccgccaatccaacatacggcagcgactggaacgccgagaattggggccagggaacccaagtgacagtgtctagcggtaccggcggaggcggatctggcggcggaggtagcggtggcggaggatctgaattcgacatccagatgacacagagccctagcagcctgtctgccagcgtgggagacagagtgaccatcacatgcaaggccagcgaccacatcaacaactggctggcctggtatcagcagaagcctggacaggcccctaagctgctgatctacggcgctaccacactggaaacaggcgtgcccagcagattttctggcagcggctctggcaccgactacaccctgacaatatccagcctccagcctgaggacttcgccacctactactgtcagcagagctggaacaccccttggacattcggccagggcaccaagctggaaatcaagagactcgagggacagcctaaggccaatcctaccgtgacactgttccctccaagcagcgaagaactccaggccaacaaggccacacttgtgtgcctgatctccgacttctaccctggggctgtgacagtggcttggaaggccgatggatctcctgtgaaagccggcgtggaaaccaccaagccatccaagcagagcaacaacaaatacgccgccagctcctacctgagcctgacacctgagcagtggaagtcccacagatcctacagctgccaagtgacccacgaaggcagcaccgtggaaaagacagtggcccctacagagtgcagcggatcccagagcttcggcctgctggaccccaagctgagctacctgctggatggcatcctgttcatctacggcgtgatcctgaccgccctgttcctgagggaccaaagactgcctcctgacgctcacaaacctccaggcggaggcagcttcagaacccctatccaagaggaacaggctgacgcccacagcaccctggcaaaaattagcactagtagagtgaagttcagcagaagcgccgacgcccctgcctaccagcagggacagaaccaactgtacaacgagctgaacctgggcagacgggaagagtacgacgtgctggacaagcggagaggcagggaccctgagatgggcggaaagccccagcggagaaagaacccccaggaaggactgtataacgaactccagaaagacaagatggccgaagcctacagcgagatcggcatgaagggcgagcggagaagaggcaagggccacgatggcctgtaccagggcctgagcaccgccaccaaggacacctatgacgccctgcacatgcaggccctgcctccaagaagggccaagcgatctggatctggagcaacaaacttctcactactcaaacaagcaggtgacgtggaggagaatcccgggcctatggactggatttggcgcatccttttccttgtcggcgctgctaccggcgcgcattccgggcccgaagtgcaactggttgaatccggtggcggcctggtgcaagcaggcggatctctcagacttagctgtgccgcctccggcagaaccttcacaatgggatggtttaggcaggctccagggaaagagagagagttcgtcgccgccatctctctgtctcccacactggcctactacgccgactctgtgaaaggccggttcaccatctccagagataatgccaagaacaccgtggtgctgcaaatgaactctctgaaacccgaggatacagccctgtactattgtgccgctgaccggaagtccgtgatgagcatcagacccgattactggggacagggcacacaagtcacagtgtcctctggatccggcggcggaggatctggcggaggcggatctgggggcggaggctctttcgaacaagttcagcttcaacagcctggcgctgagctggtcaaacctggcgcttctgtgaagatgagctgcaaagccagcggctacgccttcagcagctactggatcaactggatgaagcagaaacccggccagggactcgaatggatcggccaaatctatcccggcgacggcgacaccaactacaacggcaagttcaagggcagagccacactgaccgccgatacctctagcagcacagcctacatgcagctgagcagcctgaccagcgaagatagcgccgtgtacttctgtgcccggtccatcacaacagtcgtgggctgcgctatggactattggggccagggaacaagcgtgaccgtgtctagtacgcgtgcctctacaaagggaccctccgtgtttcctctggctcccagcagcaagtctacaagcggaggaacagccgctctgggctgcctggtcaaggattactttcccgagcctgtgaccgtgtcctggaatagcggagcactgacaagcggcgtgcacacctttccagccgtgctgcaaagcagcggcctgtactctctgagcagcgtggtcacagtgcctagctctagcctgggcacccagacctacatctgcaatgtgaaccacaagcctagcaacaccaaggtggacaagagagtggaacccaagagctgtggtacccagagttttgggttgttggaccctaaattgagctatctgttggacggaatcctgttcatttacggagtgatcctgaccgcattgttcctgcgcgatcagaggctgccacctgatgctcataagccacctggcggcggatctttcaggaccccaattcaagaagaacaagccgacgctcactctaccctggctaagatcagctctagacgggttaagttttccagatccgcagacgcacccgcttaccaacaagggcagaaccaactctacaatgaacttaatttggggcggagggaagagtacgacgttctggacaaaaggaggggacgagatcccgagatgggcggaaagcctcagcgaaggaagaatccgcaagaggggctttataacgaactccagaaagataaaatggcagaagcctatagtgagattgggatgaagggagaaaggaggaggggtaaaggtcacgatgggttgtaccaaggattgagcacagccactaaagatacctatgatgcgctccacatgcaggccctgccgccaagacgcgccaagagaagcggatctggcgtgaagcagaccctgaatttcgacctgctgaagctggctggcgacgtggaatccaacccaggccctggccatatgaccgagtacaagcccacggtgcgcctcgccacccgcgacgacgtccccagggccgtacgcaccctcgccgccgcgttcgccgactaccccgccacgcgccacaccgtcgatccggaccgccacatcgagcgggtcaccgagctgcaagaactcttcctcacgcgcgtcgggctcgacatcggcaaggtgtgggtcgcggacgacggcgccgcggtggcggtctggaccacgccggagagcgtcgaagcgggggcggtgttcgccgagatcggcccgcgcatggccgagttgagcggttcccggctggccgcgcagcaacagatggaaggcctcctggcgccgcaccggcccaaggagcccgcgtggttcctggccaccgtcggcgtctcgcccgaccaccagggcaagggtctgggcagcgccgtcgtgctccccggagtggaggcggccgagcgcgccggggtgcccgccttcctggagacctccgcgccccgcaacctccccttctacgagcggctcggcttcaccgtcaccgccgacgtcgaggtgcccgaaggaccgcgcacctggtgcatgacccgcaagcccggtgcctga

SEQ ID NO: 2110 - DNA, 3354 bp, Artificial Sequence
  Synthetic Polynucleotide
atggccttaccagtgaccgccttgctcctgccgctggccttgctgctccacgccgccaggccggaagtgcagctggttgaatctggcggaggactggttcaggctggcggatctctgagactgtcttgtgccgccagcggcagaacctttagcatgggctggtttagacaggcccctggcaaagagagagagttcgtcgccgccatcacatactctggcggcagcccttactacgccgactctgtgaagggcagattcaccatcagccgggacaacgccaagaacaccgtgtacctccagatgaacagcctgaagcctgaggacaccgccgtgtactactgcgccgccaatccaacatacggcagcgactggaacgccgagaattggggccagggaacccaagtgacagtgtctagcctcgagggacagcctaaggccaatcctaccgtgacactgttccctccaagcagcgaagaactccaggccaacaaggccacacttgtgtgcctgatctccgacttctaccctggggctgtgacagtggcttggaaggccgatggatctcctgtgaaagccggcgtggaaaccaccaagccatccaagcagagcaacaacaaatacgccgccagctcctacctgagcctgacacctgagcagtggaagtcccacagatcctacagctgccaagtgacccacgaaggcagcaccgtggaaaagacagtggcccctacagagtgcagcggatcccagagcttcggcctgctggaccccaagctgagctacctgctggatggcatcctgttcatctacggcgtgatcctgaccgccctgttcctgagggaccaaagactgcctcctgacgctcacaaacctccaggcggaggcagcttcagaacccctatccaagaggaacaggctgacgcccacagcaccctggcaaaaattagcactagtagagtgaagttcagcagaagcgccgacgcccctgcctaccagcagggacagaaccaactgtacaacgagctgaacctgggcagacgggaagagtacgacgtgctggacaagcggagaggcagggaccctgagatgggcggaaagccccagcggagaaagaacccccaggaaggactgtataacgaactccagaaagacaagatggccgaagcctacagcgagatcggcatgaagggcgagcggagaagaggcaagggccacgatggcctgtaccagggcctgagcaccgccaccaaggacacctatgacgccctgcacatgcaggccctgcctccaagaagggccaagcgatctggatctggagcaacaaacttctcactactcaaacaagcaggtgacgtggaggagaatcccgggcctatggactggatttggcgcatccttttccttgtcggcgctgctaccggcgcgcattccgggcccgaagtgcaactggttgaatccggtggcggcctggtgcaagcaggcggatctctcagacttagctgtgccgcctccggcagaaccttcacaatgggatggtttaggcaggctccagggaaagagagagagttcgtcgccgccatctctctgtctcccacactggcctactacgccgactctgtgaaaggccggttcaccatctccagagataatgccaagaacaccgtggtgctgcaaatgaactctctgaaacccgaggatacagccctgtactattgtgccgctgaccggaagtccgtgatgagcatcagacccgattactggggacagggcacacaagtcacagtgtcctctacgcgtgcctctacaaagggaccctccgtgtttcctctggctcccagcagcaagtctacaagcggaggaacagccgctctgggctgcctggtcaaggattactttcccgagcctgtgaccgtgtcctggaatagcggagcactgacaagcggcgtgcacacctttccagccgtgctgcaaagcagcggcctgtactctctgagcagcgtggtcacagtgcctagctctagcctgggcacccagacctacatctgcaatgtgaaccacaagcctagcaacaccaaggtggacaagagagtggaacccaagagctgtggtacccagagttttgggttgttggaccctaaattgagctatctgttggacggaatcctgttcatttacggagtgatcctgaccgcattgttcctgcgcgatcagaggctgccacctgatgctcataagccacctggcggcggatctttcaggaccccaattcaagaagaacaagccgacgctcactctaccctggctaagatcagctctagacgggttaagttttccagatccgcagacgcacccgcttaccaacaagggcagaaccaactctacaatgaacttaatttggggcggagggaagagtacgacgttctggacaaaaggaggggacgagatcccgagatgggcggaaagcctcagcgaaggaagaatccgcaagaggggctttataacgaactccagaaagataaaatggcagaagcctatagtgagattgggatgaagggagaaaggaggaggggtaaaggtcacgatgggttgtaccaaggattgagcacagccactaaagatacctatgatgcgctccacatgcaggccctgccgccaagacgcgccaagagaagcggatctggcgtgaagcagaccctgaatttcgacctgctgaagctggctggcgacgtggaatccaacccaggccctggccatatgaccgagtacaagcccacggtgcgcctcgccacccgcgacgacgtccccagggccgtacgcaccctcgccgccgcgttcgccgactaccccgccacgcgccacaccgtcgatccggaccgccacatcgagcgggtcaccgagctgcaagaactcttcctcacgcgcgtcgggctcgacatcggcaaggtgtgggtcgcggacgacggcgccgcggtggcggtctggaccacgccggagagcgtcgaagcgggggcggtgttcgccgagatcggcccgcgcatggccgagttgagcggttcccggctggccgcgcagcaacagatggaaggcctcctggcgccgcaccggcccaaggagcccgcgtggttcctggccaccgtcggcgtctcgcccgaccaccagggcaagggtctgggcagcgccgtcgtgctccccggagtggaggcggccgagcgcgccggggtgcccgccttcctggagacctccgcgccccgcaacctccccttctacgagcggctcggcttcaccgtcaccgccgacgtcgaggtgcccgaaggaccgcgcacctggtgcatgacccgcaagcccggtgcctga

SEQ ID NO: 2111 - DNA, 3378 bp, Artificial Sequence
  Synthetic Polynucleotide
atggccttaccagtgaccgccttgctcctgccgctggccttgctgctccacgccgccaggccggacatccagatgacacagagccctagcagcctgtctgccagcgtgggagacagagtgaccatcacatgcaaggccagcgaccacatcaacaactggctggcctggtatcagcagaagcctggacaggcccctaagctgctgatctacggcgctaccacactggaaacaggcgtgcccagcagattttctggcagcggctctggcaccgactacaccctgacaatatccagcctccagcctgaggacttcgccacctactactgtcagcagagctggaacaccccttggacattcggccagggcaccaagctggaaatcaagagactcgaggacctgaagaacgtgttcccacctgaggtggccgtgttcgagcctagcgaggccgagatcagccacacccagaaagccaccctcgtgtgcctggctaccggcttctaccccgaccatgtggaactgtcttggtgggtcaacggcaaagaggtgcacagcggcgtgtctaccgacccccagccactgaaagaacagcccgccctgaacgacagccggtactgcctgagcagcagactgagagtgtccgccaccttctggcagaacccccggaaccacttcagatgccaggtgcagttctacggcctgagcgagaacgacgagtggacccaggacagagccaagcccgtgacccagatcgtgtctgccgaagcctggggcagagccgattgcggatcccagagcttcggcctgctggaccccaagctgagctacctgctggatggcatcctgttcatctacggcgtgatcctgaccgccctgttcctgagggaccaaagactgcctcctgacgctcacaaacctccaggcggaggcagcttcagaacccctatccaagaggaacaggctgacgcccacagcaccctggcaaaaattagcactagtagagtgaagttcagcagaagcgccgacgcccctgcctaccagcagggacagaaccaactgtacaacgagctgaacctgggcagacgggaagagtacgacgtgctggacaagcggagaggcagggaccctgagatgggcggaaagccccagcggagaaagaacccccaggaaggactgtataacgaactccagaaagacaagatggccgaagcctacagcgagatcggcatgaagggcgagcggagaagaggcaagggccacgatggcctgtaccagggcctgagcaccgccaccaaggacacctatgacgccctgcacatgcaggccctgcctccaagaagggccaagcgatctggatctggagcaacaaacttctcactactcaaacaagcaggtgacgtggaggagaatcccgggcctatggactggatttggcgcatccttttccttgtcggcgctgctaccggcgcgcattccttcgaacaagttcagcttcaacagcctggcgctgagctggtcaaacctggcgcttctgtgaagatgagctgcaaagccagcggctacgccttcagcagctactggatcaactggatgaagcagaaacccggccagggactcgaatggatcggccaaatctatcccggcgacggcgacaccaactacaacggcaagttcaagggcagagccacactgaccgccgatacctctagcagcacagcctacatgcagctgagcagcctgaccagcgaagatagcgccgtgtacttctgtgcccggtccatcacaacagtcgtgggctgcgctatggactattggggccagggaacaagcgtgaccgtgtctagtacgcgtatccagaaccctgatcctgccgtgtaccagctgcgggatagcaagagcagcgacaagagcgtgtgtctgttcaccgacttcgacagccagaccaacgtgtcccagagcaaggactccgacgtgtacatcaccgataagaccgtgctggacatgcggagcatggacttcaagagcaactccgccgtggcctggtccaacaagtccgatttcgcctgcgccaacgccttcaacaacagcattatccccgaggacacattcttcccaagccccgagagcagctgcggtacccagagttttgggttgttggaccctaaattgagctatctgttggacggaatcctgttcatttacggagtgatcctgaccgcattgttcctgcgcgatcagaggctgccacctgatgctcataagccacctggcggcggatctttcaggaccccaattcaagaagaacaagccgacgctcactctaccctggctaagatcagctctagacgggttaagttttccagatccgcagacgcacccgcttaccaacaagggcagaaccaactctacaatgaacttaatttggggcggagggaagagtacgacgttctggacaaaaggaggggacgagatcccgagatgggcggaaagcctcagcgaaggaagaatccgcaagaggggctttataacgaactccagaaagataaaatggcagaagcctatagtgagattgggatgaagggagaaaggaggaggggtaaaggtcacgatgggttgtaccaaggattgagcacagccactaaagatacctatgatgcgctccacatgcaggccctgccgccaagacgcgccaagagaagcggatctggcgtgaagcagaccctgaatttcgacctgctgaagctggctggcgacgtggaatccaacccaggccctggccatatgaccgagtacaagcccacggtgcgcctcgccacccgcgacgacgtccccagggccgtacgcaccctcgccgccgcgttcgccgactaccccgccacgcgccacaccgtcgatccggaccgccacatcgagcgggtcaccgagctgcaagaactcttcctcacgcgcgtcgggctcgacatcggcaaggtgtgggtcgcggacgacggcgccgcggtggcggtctggaccacgccggagagcgtcgaagcgggggcggtgttcgccgagatcggcccgcgcatggccgagttgagcggttcccggctggccgcgcagcaacagatggaaggcctcctggcgccgcaccggcccaaggagcccgcgtggttcctggccaccgtcggcgtctcgcccgaccaccagggcaagggtctgggcagcgccgtcgtgctccccggagtggaggcggccgagcgcgccggggtgcccgccttcctggagacctccgcgccccgcaacctccccttctacgagcggctcggcttcaccgtcaccgccgacgtcgaggtgcccgaaggaccgcgcacctggtgcatgacccgcaagcccggtgcctga

SEQ ID NO: 2112 - DNA, 3789 bp, Artificial Sequence
  Synthetic Polynucleotide
atggccttaccagtgaccgccttgctcctgccgctggccttgctgctccacgccgccaggccggaagtgcagctggttgaatctggcggaggactggttcaggctggcggatctctgagactgtcttgtgccgccagcggcagaacctttagcatgggctggtttagacaggcccctggcaaagagagagagttcgtcgccgccatcacatactctggcggcagcccttactacgccgactctgtgaagggcagattcaccatcagccgggacaacgccaagaacaccgtgtacctccagatgaacagcctgaagcctgaggacaccgccgtgtactactgcgccgccaatccaacatacggcagcgactggaacgccgagaattggggccagggaacccaagtgacagtgtctagcggtaccggcggaggcggatctggcggcggaggtagcggtggcggaggatctgaattcgacatccagatgacacagagccctagcagcctgtctgccagcgtgggagacagagtgaccatcacatgcaaggccagcgaccacatcaacaactggctggcctggtatcagcagaagcctggacaggcccctaagctgctgatctacggcgctaccacactggaaacaggcgtgcccagcagattttctggcagcggctctggcaccgactacaccctgacaatatccagcctccagcctgaggacttcgccacctactactgtcagcagagctggaacaccccttggacattcggccagggcaccaagctggaaatcaagagactcgaggacctgaagaacgtgttcccacctgaggtggccgtgttcgagcctagcgaggccgagatcagccacacccagaaagccaccctcgtgtgcctggctaccggcttctaccccgaccatgtggaactgtcttggtgggtcaacggcaaagaggtgcacagcggcgtgtctaccgacccccagccactgaaagaacagcccgccctgaacgacagccggtactgcctgagcagcagactgagagtgtccgccaccttctggcagaacccccggaaccacttcagatgccaggtgcagttctacggcctgagcgagaacgacgagtggacccaggacagagccaagcccgtgacccagatcgtgtctgccgaagcctggggcagagccgattgcggatcccagagcttcggcctgctggaccccaagctgagctacctgctggatggcatcctgttcatctacggcgtgatcctgaccgccctgttcctgagggaccaaagactgcctcctgacgctcacaaacctccaggcggaggcagcttcagaacccctatccaagaggaacaggctgacgcccacagcaccctggcaaaaattagcactagtagagtgaagttcagcagaagcgccgacgcccctgcctaccagcagggacagaaccaactgtacaacgagctgaacctgggcagacgggaagagtacgacgtgctggacaagcggagaggcagggaccctgagatgggcggaaagccccagcggagaaagaacccccaggaaggactgtataacgaactccagaaagacaagatggccgaagcctacagcgagatcggcatgaagggcgagcggagaagaggcaagggccacgatggcctgtaccagggcctgagcaccgccaccaaggacacctatgacgccctgcacatgcaggccctgcctccaagaagggccaagcgatctggatctggagcaacaaacttctcactactcaaacaagcaggtgacgtggaggagaatcccgggcctatggactggatttggcgcatccttttccttgtcggcgctgctaccggcgcgcattccttcgaacaagttcagcttcaacagcctggcgctgagctggtcaaacctggcgcttctgtgaagatgagctgcaaagccagcggctacgccttcagcagctactggatcaactggatgaagcagaaacccggccagggactcgaatggatcggccaaatctatcccggcgacggcgacaccaactacaacggcaagttcaagggcagagccacactgaccgccgatacctctagcagcacagcctacatgcagctgagcagcctgaccagcgaagatagcgccgtgtacttctgtgcccggtccatcacaacagtcgtgggctgcgctatggactattggggccagggaacaagcgtgaccgtgtctagtacgcgtatccagaaccctgatcctgccgtgtaccagctgcgggatagcaagagcagcgacaagagcgtgtgtctgttcaccgacttcgacagccagaccaacgtgtcccagagcaaggactccgacgtgtacatcaccgataagaccgtgctggacatgcggagcatggacttcaagagcaactccgccgtggcctggtccaacaagtccgatttcgcctgcgccaacgccttcaacaacagcattatccccgaggacacattcttcccaagccccgagagcagctgcggtacccagagttttgggttgttggaccctaaattgagctatctgttggacggaatcctgttcatttacggagtgatcctgaccgcattgttcctgcgcgatcagaggctgccacctgatgctcataagccacctggcggcggatctttcaggaccccaattcaagaagaacaagccgacgctcactctaccctggctaagatcagctctagacgggttaagttttccagatccgcagacgcacccgcttaccaacaagggcagaaccaactctacaatgaacttaatttggggcggagggaagagtacgacgttctggacaaaaggaggggacgagatcccgagatgggcggaaagcctcagcgaaggaagaatccgcaagaggggctttataacgaactccagaaagataaaatggcagaagcctatagtgagattgggatgaagggagaaaggaggaggggtaaaggtcacgatgggttgtaccaaggattgagcacagccactaaagatacctatgatgcgctccacatgcaggccctgccgccaagacgcgccaagagaagcggatctggcgtgaagcagaccctgaatttcgacctgctgaagctggctggcgacgtggaatccaacccaggccctggccatatgaccgagtacaagcccacggtgcgcctcgccacccgcgacgacgtccccagggccgtacgcaccctcgccgccgcgttcgccgactaccccgccacgcgccacaccgtcgatccggaccgccacatcgagcgggtcaccgagctgcaagaactcttcctcacgcgcgtcgggctcgacatcggcaaggtgtgggtcgcggacgacggcgccgcggtggcggtctggaccacgccggagagcgtcgaagcgggggcggtgttcgccgagatcggcccgcgcatggccgagttgagcggttcccggctggccgcgcagcaacagatggaaggcctcctggcgccgcaccggcccaaggagcccgcgtggttcctggccaccgtcggcgtctcgcccgaccaccagggcaagggtctgggcagcgccgtcgtgctccccggagtggaggcggccgagcgcgccggggtgcccgccttcctggagacctccgcgccccgcaacctccccttctacgagcggctcggcttcaccgtcaccgccgacgtcgaggtgcccgaaggaccgcgcacctggtgcatgacccgcaagcccggtgcctga

SEQ ID NO: 2113 - DNA, 4200 bp, Artificial Sequence
  Synthetic Polynucleotide
atggccttaccagtgaccgccttgctcctgccgctggccttgctgctccacgccgccaggccggaagtgcagctggttgaatctggcggaggactggttcaggctggcggatctctgagactgtcttgtgccgccagcggcagaacctttagcatgggctggtttagacaggcccctggcaaagagagagagttcgtcgccgccatcacatactctggcggcagcccttactacgccgactctgtgaagggcagattcaccatcagccgggacaacgccaagaacaccgtgtacctccagatgaacagcctgaagcctgaggacaccgccgtgtactactgcgccgccaatccaacatacggcagcgactggaacgccgagaattggggccagggaacccaagtgacagtgtctagcggtaccggcggaggcggatctggcggcggaggtagcggtggcggaggatctgaattcgacatccagatgacacagagccctagcagcctgtctgccagcgtgggagacagagtgaccatcacatgcaaggccagcgaccacatcaacaactggctggcctggtatcagcagaagcctggacaggcccctaagctgctgatctacggcgctaccacactggaaacaggcgtgcccagcagattttctggcagcggctctggcaccgactacaccctgacaatatccagcctccagcctgaggacttcgccacctactactgtcagcagagctggaacaccccttggacattcggccagggcaccaagctggaaatcaagagactcgaggacctgaagaacgtgttcccacctgaggtggccgtgttcgagcctagcgaggccgagatcagccacacccagaaagccaccctcgtgtgcctggctaccggcttctaccccgaccatgtggaactgtcttggtgggtcaacggcaaagaggtgcacagcggcgtgtctaccgacccccagccactgaaagaacagcccgccctgaacgacagccggtactgcctgagcagcagactgagagtgtccgccaccttctggcagaacccccggaaccacttcagatgccaggtgcagttctacggcctgagcgagaacgacgagtggacccaggacagagccaagcccgtgacccagatcgtgtctgccgaagcctggggcagagccgattgcggatcccagagcttcggcctgctggaccccaagctgagctacctgctggatggcatcctgttcatctacggcgtgatcctgaccgccctgttcctgagggaccaaagactgcctcctgacgctcacaaacctccaggcggaggcagcttcagaacccctatccaagaggaacaggctgacgcccacagcaccctggcaaaaattagcactagtagagtgaagttcagcagaagcgccgacgcccctgcctaccagcagggacagaaccaactgtacaacgagctgaacctgggcagacgggaagagtacgacgtgctggacaagcggagaggcagggaccctgagatgggcggaaagccccagcggagaaagaacccccaggaaggactgtataacgaactccagaaagacaagatggccgaagcctacagcgagatcggcatgaagggcgagcggagaagaggcaagggccacgatggcctgtaccagggcctgagcaccgccaccaaggacacctatgacgccctgcacatgcaggccctgcctccaagaagggccaagcgatctggatctggagcaacaaacttctcactactcaaacaagcaggtgacgtggaggagaatcccgggcctatggactggatttggcgcatccttttccttgtcggcgctgctaccggcgcgcattccgggcccgaagtgcaactggttgaatccggtggcggcctggtgcaagcaggcggatctctcagacttagctgtgccgcctccggcagaaccttcacaatgggatggtttaggcaggctccagggaaagagagagagttcgtcgccgccatctctctgtctcccacactggcctactacgccgactctgtgaaaggccggttcaccatctccagagataatgccaagaacaccgtggtgctgcaaatgaactctctgaaacccgaggatacagccctgtactattgtgccgctgaccggaagtccgtgatgagcatcagacccgattactggggacagggcacacaagtcacagtgtcctctggatccggcggcggaggatctggcggaggcggatctgggggcggaggctctttcgaacaagttcagcttcaacagcctggcgctgagctggtcaaacctggcgcttctgtgaagatgagctgcaaagccagcggctacgccttcagcagctactggatcaactggatgaagcagaaacccggccagggactcgaatggatcggccaaatctatcccggcgacggcgacaccaactacaacggcaagttcaagggcagagccacactgaccgccgatacctctagcagcacagcctacatgcagctgagcagcctgaccagcgaagatagcgccgtgtacttctgtgcccggtccatcacaacagtcgtgggctgcgctatggactattggggccagggaacaagcgtgaccgtgtctagtacgcgtatccagaaccctgatcctgccgtgtaccagctgcgggatagcaagagcagcgacaagagcgtgtgtctgttcaccgacttcgacagccagaccaacgtgtcccagagcaaggactccgacgtgtacatcaccgataagaccgtgctggacatgcggagcatggacttcaagagcaactccgccgtggcctggtccaacaagtccgatttcgcctgcgccaacgccttcaacaacagcattatccccgaggacacattcttcccaagccccgagagcagctgcggtacccagagttttgggttgttggaccctaaattgagctatctgttggacggaatcctgttcatttacggagtgatcctgaccgcattgttcctgcgcgatcagaggctgccacctgatgctcataagccacctggcggcggatctttcaggaccccaattcaagaagaacaagccgacgctcactctaccctggctaagatcagctctagacgggttaagttttccagatccgcagacgcacccgcttaccaacaagggcagaaccaactctacaatgaacttaatttggggcggagggaagagtacgacgttctggacaaaaggaggggacgagatcccgagatgggcggaaagcctcagcgaaggaagaatccgcaagaggggctttataacgaactccagaaagataaaatggcagaagcctatagtgagattgggatgaagggagaaaggaggaggggtaaaggtcacgatgggttgtaccaaggattgagcacagccactaaagatacctatgatgcgctccacatgcaggccctgccgccaagacgcgccaagagaagcggatctggcgtgaagcagaccctgaatttcgacctgctgaagctggctggcgacgtggaatccaacccaggccctggccatatgaccgagtacaagcccacggtgcgcctcgccacccgcgacgacgtccccagggccgtacgcaccctcgccgccgcgttcgccgactaccccgccacgcgccacaccgtcgatccggaccgccacatcgagcgggtcaccgagctgcaagaactcttcctcacgcgcgtcgggctcgacatcggcaaggtgtgggtcgcggacgacggcgccgcggtggcggtctggaccacgccggagagcgtcgaagcgggggcggtgttcgccgagatcggcccgcgcatggccgagttgagcggttcccggctggccgcgcagcaacagatggaaggcctcctggcgccgcaccggcccaaggagcccgcgtggttcctggccaccgtcggcgtctcgcccgaccaccagggcaagggtctgggcagcgccgtcgtgctccccggagtggaggcggccgagcgcgccggggtgcccgccttcctggagacctccgcgccccgcaacctccccttctacgagcggctcggcttcaccgtcaccgccgacgtcgaggtgcccgaaggaccgcgcacctggtgcatgacccgcaagcccggtgcctga

SEQ ID NO: 2114 - DNA, 3399 bp, Artificial Sequence
  Synthetic Polynucleotide
atggccttaccagtgaccgccttgctcctgccgctggccttgctgctccacgccgccaggccggaagtgcagctggttgaatctggcggaggactggttcaggctggcggatctctgagactgtcttgtgccgccagcggcagaacctttagcatgggctggtttagacaggcccctggcaaagagagagagttcgtcgccgccatcacatactctggcggcagcccttactacgccgactctgtgaagggcagattcaccatcagccgggacaacgccaagaacaccgtgtacctccagatgaacagcctgaagcctgaggacaccgccgtgtactactgcgccgccaatccaacatacggcagcgactggaacgccgagaattggggccagggaacccaagtgacagtgtctagcctcgaggacctgaagaacgtgttcccacctgaggtggccgtgttcgagcctagcgaggccgagatcagccacacccagaaagccaccctcgtgtgcctggctaccggcttctaccccgaccatgtggaactgtcttggtgggtcaacggcaaagaggtgcacagcggcgtgtctaccgacccccagccactgaaagaacagcccgccctgaacgacagccggtactgcctgagcagcagactgagagtgtccgccaccttctggcagaacccccggaaccacttcagatgccaggtgcagttctacggcctgagcgagaacgacgagtggacccaggacagagccaagcccgtgacccagatcgtgtctgccgaagcctggggcagagccgattgcggatcccagagcttcggcctgctggaccccaagctgagctacctgctggatggcatcctgttcatctacggcgtgatcctgaccgccctgttcctgagggaccaaagactgcctcctgacgctcacaaacctccaggcggaggcagcttcagaacccctatccaagaggaacaggctgacgcccacagcaccctggcaaaaattagcactagtagagtgaagttcagcagaagcgccgacgcccctgcctaccagcagggacagaaccaactgtacaacgagctgaacctgggcagacgggaagagtacgacgtgctggacaagcggagaggcagggaccctgagatgggcggaaagccccagcggagaaagaacccccaggaaggactgtataacgaactccagaaagacaagatggccgaagcctacagcgagatcggcatgaagggcgagcggagaagaggcaagggccacgatggcctgtaccagggcctgagcaccgccaccaaggacacctatgacgccctgcacatgcaggccctgcctccaagaagggccaagcgatctggatctggagcaacaaacttctcactactcaaacaagcaggtgacgtggaggagaatcccgggcctatggactggatttggcgcatccttttccttgtcggcgctgctaccggcgcgcattccgggcccgaagtgcaactggttgaatccggtggcggcctggtgcaagcaggcggatctctcagacttagctgtgccgcctccggcagaaccttcacaatgggatggtttaggcaggctccagggaaagagagagagttcgtcgccgccatctctctgtctcccacactggcctactacgccgactctgtgaaaggccggttcaccatctccagagataatgccaagaacaccgtggtgctgcaaatgaactctctgaaacccgaggatacagccctgtactattgtgccgctgaccggaagtccgtgatgagcatcagacccgattactggggacagggcacacaagtcacagtgtcctctacgcgtatccagaaccctgatcctgccgtgtaccagctgcgggatagcaagagcagcgacaagagcgtgtgtctgttcaccgacttcgacagccagaccaacgtgtcccagagcaaggactccgacgtgtacatcaccgataagaccgtgctggacatgcggagcatggacttcaagagcaactccgccgtggcctggtccaacaagtccgatttcgcctgcgccaacgccttcaacaacagcattatccccgaggacacattcttcccaagccccgagagcagctgcggtacccagagttttgggttgttggaccctaaattgagctatctgttggacggaatcctgttcatttacggagtgatcctgaccgcattgttcctgcgcgatcagaggctgccacctgatgctcataagccacctggcggcggatctttcaggaccccaattcaagaagaacaagccgacgctcactctaccctggctaagatcagctctagacgggttaagttttccagatccgcagacgcacccgcttaccaacaagggcagaaccaactctacaatgaacttaatttggggcggagggaagagtacgacgttctggacaaaaggaggggacgagatcccgagatgggcggaaagcctcagcgaaggaagaatccgcaagaggggctttataacgaactccagaaagataaaatggcagaagcctatagtgagattgggatgaagggagaaaggaggaggggtaaaggtcacgatgggttgtaccaaggattgagcacagccactaaagatacctatgatgcgctccacatgcaggccctgccgccaagacgcgccaagagaagcggatctggcgtgaagcagaccctgaatttcgacctgctgaagctggctggcgacgtggaatccaacccaggccctggccatatgaccgagtacaagcccacggtgcgcctcgccacccgcgacgacgtccccagggccgtacgcaccctcgccgccgcgttcgccgactaccccgccacgcgccacaccgtcgatccggaccgccacatcgagcgggtcaccgagctgcaagaactcttcctcacgcgcgtcgggctcgacatcggcaaggtgtgggtcgcggacgacggcgccgcggtggcggtctggaccacgccggagagcgtcgaagcgggggcggtgttcgccgagatcggcccgcgcatggccgagttgagcggttcccggctggccgcgcagcaacagatggaaggcctcctggcgccgcaccggcccaaggagcccgcgtggttcctggccaccgtcggcgtctcgcccgaccaccagggcaagggtctgggcagcgccgtcgtgctccccggagtggaggcggccgagcgcgccggggtgcccgccttcctggagacctccgcgccccgcaacctccccttctacgagcggctcggcttcaccgtcaccgccgacgtcgaggtgcccgaaggaccgcgcacctggtgcatgacccgcaagcccggtgcctga

SEQ ID NO: 2115 - DNA, 1734 bp, Artificial Sequence
  Synthetic Polynucleotide
atggccttaccagtgaccgccttgctcctgccgctggccttgctgctccacgccgccaggccggcatgcgaagtgcagctgcttgaaagtggcggcggactgattcagcctggcggatctctgagactgagctgtgccgccagcggcttcaccttttctagccacgccatgacctgggtccgacaggcacctggaaaagggcttgaatgggtgtccgccatcagcggctctggcgattacacacactacgccgacagcgtgaagggcagattcaccatcagcagagacaacagcaagaacaccgtgtacctccagatgaacagcctgagagccgaggacagcgccgtgtattattgcgccaaggatgaggatggcggcagcctgcttggacacagaggacaaggcaccctggtcaccgtttcttccggtaccggcggaggcggatctggcggcggaggtagcggtggcggaggatctgaattcggatctctcgagcagagcttcggcctgctggaccccaagctgagctacctgctggatggcatcctgttcatctacggcgtgatcctgaccgccctgttcctgagggaccaaagactgcctcctgacgctcacaaacctccaggcggaggcagcttcagaacccctatccaagaggaacaggctgacgcccacagcaccctggcaaaaattagcactagtagagtgaagttcagcagaagcgccgacgcccctgcctaccagcagggacagaaccaactgtacaacgagctgaacctgggcagacgggaagagtacgacgtgctggacaagcggagaggcagggaccctgagatgggcggaaagccccagcggagaaagaacccccaggaaggactgtataacgaactccagaaagacaagatggccgaagcctacagcgagatcggcatgaagggcgagcggagaagaggcaagggccacgatggcctgtaccagggcctgagcaccgccaccaaggacacctatgacgccctgcacatgcaggccctgcctccaagaagggccaagcgatctggatctggagcaacaaacttctcactactcaaacaagcaggtgacgtggaggagaatcccgggcctactagaggccatatgaccgagtacaagcccacggtgcgcctcgccacccgcgacgacgtccccagggccgtacgcaccctcgccgccgcgttcgccgactaccccgccacgcgccacaccgtcgatccggaccgccacatcgagcgggtcaccgagctgcaagaactcttcctcacgcgcgtcgggctcgacatcggcaaggtgtgggtcgcggacgacggcgccgcggtggcggtctggaccacgccggagagcgtcgaagcgggggcggtgttcgccgagatcggcccgcgcatggccgagttgagcggttcccggctggccgcgcagcaacagatggaaggcctcctggcgccgcaccggcccaaggagcccgcgtggttcctggccaccgtcggcgtctcgcccgaccaccagggcaagggtctgggcagcgccgtcgtgctccccggagtggaggcggccgagcgcgccggggtgcccgccttcctggagacctccgcgccccgcaacctccccttctacgagcggctcggcttcaccgtcaccgccgacgtcgaggtgcccgaaggaccgcgcacctggtgcatgacccgcaagcccggtgcctga

SEQ ID NO: 2116 - DNA, 2778 bp, Artificial Sequence
  Synthetic Polynucleotide
atggccttaccagtgaccgccttgctcctgccgctggccttgctgctccacgccgccaggccggacatccagatgacacagagccctagcagcctgtctgccagcgtgggagacagagtgaccatcacatgcaaggccagcgaccacatcaacaactggctggcctggtatcagcagaagcctggacaggcccctaagctgctgatctacggcgctaccacactggaaacaggcgtgcccagcagattttctggcagcggctctggcaccgactacaccctgacaatatccagcctccagcctgaggacttcgccacctactactgtcagcagagctggaacaccccttggacattcggccagggcaccaagctggaaatcaagagactcgagacaacacctggcgagagaagtagcctgcctgccttctatcctggcaccagcggctcttgttctggctgtggatctctgagcctgcctctgctggctggactggttgctgctgatgctgtggcctctctgctgattgtgggagccgtgttcctgtgcgccagacctagaagaagccccgctcaagaggacggcaaggtgtacatcaacatgcccggcagaggaagcactagtagagtgaagttcagcagaagcgccgacgcccctgcctaccagcagggacagaaccaactgtacaacgagctgaacctgggcagacgggaagagtacgacgtgctggacaagcggagaggcagggaccctgagatgggcggaaagccccagcggagaaagaacccccaggaaggactgtataacgaactccagaaagacaagatggccgaagcctacagcgagatcggcatgaagggcgagcggagaagaggcaagggccacgatggcctgtaccagggcctgagcaccgccaccaaggacacctatgacgccctgcacatgcaggccctgcctccaagaagggccaagcgatctggatctggagcaacaaacttctcactactcaaacaagcaggtgacgtggaggagaatcccgggcctatggactggatttggcgcatccttttccttgtcggcgctgctaccggcgcgcattccttcgaacaagttcagcttcaacagcctggcgctgagctggtcaaacctggcgcttctgtgaagatgagctgcaaagccagcggctacgccttcagcagctactggatcaactggatgaagcagaaacccggccagggactcgaatggatcggccaaatctatcccggcgacggcgacaccaactacaacggcaagttcaagggcagagccacactgaccgccgatacctctagcagcacagcctacatgcagctgagcagcctgaccagcgaagatagcgccgtgtacttctgtgcccggtccatcacaacagtcgtgggctgcgctatggactattggggccagggaacaagcgtgaccgtgtctagtacgcgtcaggcacagtctgactgtagctgctccacagttagccctggcgttctggctggcatcgttatgggcgacctcgtcctgactgtcctgatcgctctggcagtgtattttctcggacggctggtcccaagaggaaggggagcagctgaagctgctacccggaagcagcggatcacagagactgagtctccataccaagaactccagggacagagatccgatgtgtactccgacctgaacacacagaggccctattataagagctctagacgggttaagttttccagatccgcagacgcacccgcttaccaacaagggcagaaccaactctacaatgaacttaatttggggcggagggaagagtacgacgttctggacaaaaggaggggacgagatcccgagatgggcggaaagcctcagcgaaggaagaatccgcaagaggggctttataacgaactccagaaagataaaatggcagaagcctatagtgagattgggatgaagggagaaaggaggaggggtaaaggtcacgatgggttgtaccaaggattgagcacagccactaaagatacctatgatgcgctccacatgcaggccctgccgccaagacgcgccaagagaagcggatctggcgtgaagcagaccctgaatttcgacctgctgaagctggctggcgacgtggaatccaacccaggccctggccatatgaccgagtacaagcccacggtgcgcctcgccacccgcgacgacgtccccagggccgtacgcaccctcgccgccgcgttcgccgactaccccgccacgcgccacaccgtcgatccggaccgccacatcgagcgggtcaccgagctgcaagaactcttcctcacgcgcgtcgggctcgacatcggcaaggtgtgggtcgcggacgacggcgccgcggtggcggtctggaccacgccggagagcgtcgaagcgggggcggtgttcgccgagatcggcccgcgcatggccgagttgagcggttcccggctggccgcgcagcaacagatggaaggcctcctggcgccgcaccggcccaaggagcccgcgtggttcctggccaccgtcggcgtctcgcccgaccaccagggcaagggtctgggcagcgccgtcgtgctccccggagtggaggcggccgagcgcgccggggtgcccgccttcctggagacctccgcgccccgcaacctccccttctacgagcggctcggcttcaccgtcaccgccgacgtcgaggtgcccgaaggaccgcgcacctggtgcatgacccgcaagcccggtgcctga

SEQ ID NO: 2117 - DNA, 2934 bp, Artificial Sequence
  Synthetic Polynucleotide
atggccttaccagtgaccgccttgctcctgccgctggccttgctgctccacgccgccaggccggcatgcgaagtgcagctgcttgaaagtggcggcggactgattcagcctggcggatctctgagactgagctgtgccgccagcggcttcaccttttctagccacgccatgacctgggtccgacaggcacctggaaaagggcttgaatgggtgtccgccatcagcggctctggcgattacacacactacgccgacagcgtgaagggcagattcaccatcagcagagacaacagcaagaacaccgtgtacctccagatgaacagcctgagagccgaggacagcgccgtgtattattgcgccaaggatgaggatggcggcagcctgcttggacacagaggacaaggcaccctggtcaccgtttcttccggtaccggcggaggcggatctggcggcggaggtagcggtggcggaggatctgaattcggatctctcgagacaacacctggcgagagaagtagcctgcctgccttctatcctggcaccagcggctcttgttctggctgtggatctctgagcctgcctctgctggctggactggttgctgctgatgctgtggcctctctgctgattgtgggagccgtgttcctgtgcgccagacctagaagaagccccgctcaagaggacggcaaggtgtacatcaacatgcccggcagaggaagcactagtagagtgaagttcagcagaagcgccgacgcccctgcctaccagcagggacagaaccaactgtacaacgagctgaacctgggcagacgggaagagtacgacgtgctggacaagcggagaggcagggaccctgagatgggcggaaagccccagcggagaaagaacccccaggaaggactgtataacgaactccagaaagacaagatggccgaagcctacagcgagatcggcatgaagggcgagcggagaagaggcaagggccacgatggcctgtaccagggcctgagcaccgccaccaaggacacctatgacgccctgcacatgcaggccctgcctccaagaagggccaagcgatctggatctggagcaacaaacttctcactactcaaacaagcaggtgacgtggaggagaatcccgggcctatggactggatttggcgcatccttttccttgtcggcgctgctaccggcgcgcattccgggcccgaagtgcagctggttgaatctggcggaggactggttcaggctggcggatctctgagactgtcttgtgccgccagcggcagaacctttagcatgggctggtttagacaggcccctggcaaagagagagagttcgtcgccgccatcacatactctggcggcagcccttactacgccgactctgtgaagggcagattcaccatcagccgggacaacgccaagaacaccgtgtacctccagatgaacagcctgaagcctgaggacaccgccgtgtactactgcgccgccaatccaacatacggcagcgactggaacgccgagaattggggccagggaacccaagtgacagtgtctagcggatccggcggcggaggatctggcggaggcggatctgggggcggaggctctttcgaaggcagcacgcgtcaggcacagtctgactgtagctgctccacagttagccctggcgttctggctggcatcgttatgggcgacctcgtcctgactgtcctgatcgctctggcagtgtattttctcggacggctggtcccaagaggaaggggagcagctgaagctgctacccggaagcagcggatcacagagactgagtctccataccaagaactccagggacagagatccgatgtgtactccgacctgaacacacagaggccctattataagagctctagacgggttaagttttccagatccgcagacgcacccgcttaccaacaagggcagaaccaactctacaatgaacttaatttggggcggagggaagagtacgacgttctggacaaaaggaggggacgagatcccgagatgggcggaaagcctcagcgaaggaagaatccgcaagaggggctttataacgaactccagaaagataaaatggcagaagcctatagtgagattgggatgaagggagaaaggaggaggggtaaaggtcacgatgggttgtaccaaggattgagcacagccactaaagatacctatgatgcgctccacatgcaggccctgccgccaagacgcgccaagagaagcggatctggcgtgaagcagaccctgaatttcgacctgctgaagctggctggcgacgtggaatccaacccaggccctggccatatgaccgagtacaagcccacggtgcgcctcgccacccgcgacgacgtccccagggccgtacgcaccctcgccgccgcgttcgccgactaccccgccacgcgccacaccgtcgatccggaccgccacatcgagcgggtcaccgagctgcaagaactcttcctcacgcgcgtcgggctcgacatcggcaaggtgtgggtcgcggacgacggcgccgcggtggcggtctggaccacgccggagagcgtcgaagcgggggcggtgttcgccgagatcggcccgcgcatggccgagttgagcggttcccggctggccgcgcagcaacagatggaaggcctcctggcgccgcaccggcccaaggagcccgcgtggttcctggccaccgtcggcgtctcgcccgaccaccagggcaagggtctgggcagcgccgtcgtgctccccggagtggaggcggccgagcgcgccggggtgcccgccttcctggagacctccgcgccccgcaacctccccttctacgagcggctcggcttcaccgtcaccgccgacgtcgaggtgcccgaaggaccgcgcacctggtgcatgacccgcaagcccggtgcctga

SEQ ID NO: 2118 - DNA, 3381 bp, Artificial Sequence
  Synthetic Polynucleotide
atggccttaccagtgaccgccttgctcctgccgctggccttgctgctccacgccgccaggccggacatccagatgacacagagccctagcagcctgtctgccagcgtgggagacagagtgaccatcacatgcaaggccagcgaccacatcaacaactggctggcctggtatcagcagaagcctggacaggcccctaagctgctgatctacggcgctaccacactggaaacaggcgtgcccagcagattttctggcagcggctctggcaccgactacaccctgacaatatccagcctccagcctgaggacttcgccacctactactgtcagcagagctggaacaccccttggacattcggccagggcaccaagctggaaatcaagagactcgagggacagcctaaggccaatcctaccgtgacactgttccctccaagcagcgaagaactccaggccaacaaggccacacttgtgtgcctgatctccgacttctaccctggggctgtgacagtggcttggaaggccgatggatctcctgtgaaagccggcgtggaaaccaccaagccatccaagcagagcaacaacaaatacgccgccagctcctacctgagcctgacacctgagcagtggaagtcccacagatcctacagctgccaagtgacccacgaaggcagcaccgtggaaaagacagtggcccctacagagtgcagcggatccacaacacctggcgagagaagtagcctgcctgccttctatcctggcaccagcggctcttgttctggctgtggatctctgagcctgcctctgctggctggactggttgctgctgatgctgtggcctctctgctgattgtgggagccgtgttcctgtgcgccagacctagaagaagccccgctcaagaggacggcaaggtgtacatcaacatgcccggcagaggaagcactagtagagtgaagttcagcagaagcgccgacgcccctgcctaccagcagggacagaaccaactgtacaacgagctgaacctgggcagacgggaagagtacgacgtgctggacaagcggagaggcagggaccctgagatgggcggaaagccccagcggagaaagaacccccaggaaggactgtataacgaactccagaaagacaagatggccgaagcctacagcgagatcggcatgaagggcgagcggagaagaggcaagggccacgatggcctgtaccagggcctgagcaccgccaccaaggacacctatgacgccctgcacatgcaggccctgcctccaagaagggccaagcgatctggatctggagcaacaaacttctcactactcaaacaagcaggtgacgtggaggagaatcccgggcctatggactggatttggcgcatccttttccttgtcggcgctgctaccggcgcgcattccttcgaacaagttcagcttcaacagcctggcgctgagctggtcaaacctggcgcttctgtgaagatgagctgcaaagccagcggctacgccttcagcagctactggatcaactggatgaagcagaaacccggccagggactcgaatggatcggccaaatctatcccggcgacggcgacaccaactacaacggcaagttcaagggcagagccacactgaccgccgatacctctagcagcacagcctacatgcagctgagcagcctgaccagcgaagatagcgccgtgtacttctgtgcccggtccatcacaacagtcgtgggctgcgctatggactattggggccagggaacaagcgtgaccgtgtctagtacgcgtgcctctacaaagggaccctccgtgtttcctctggctcccagcagcaagtctacaagcggaggaacagccgctctgggctgcctggtcaaggattactttcccgagcctgtgaccgtgtcctggaatagcggagcactgacaagcggcgtgcacacctttccagccgtgctgcaaagcagcggcctgtactctctgagcagcgtggtcacagtgcctagctctagcctgggcacccagacctacatctgcaatgtgaaccacaagcctagcaacaccaaggtggacaagagagtggaacccaagagctgtggtacccaggcacagtctgactgtagctgctccacagttagccctggcgttctggctggcatcgttatgggcgacctcgtcctgactgtcctgatcgctctggcagtgtattttctcggacggctggtcccaagaggaaggggagcagctgaagctgctacccggaagcagcggatcacagagactgagtctccataccaagaactccagggacagagatccgatgtgtactccgacctgaacacacagaggccctattataagagctctagacgggttaagttttccagatccgcagacgcacccgcttaccaacaagggcagaaccaactctacaatgaacttaatttggggcggagggaagagtacgacgttctggacaaaaggaggggacgagatcccgagatgggcggaaagcctcagcgaaggaagaatccgcaagaggggctttataacgaactccagaaagataaaatggcagaagcctatagtgagattgggatgaagggagaaaggaggaggggtaaaggtcacgatgggttgtaccaaggattgagcacagccactaaagatacctatgatgcgctccacatgcaggccctgccgccaagacgcgccaagagaagcggatctggcgtgaagcagaccctgaatttcgacctgctgaagctggctggcgacgtggaatccaacccaggccctggccatatggctacctacgaggtgctgtgcgaggtggcaagaaagctgggcaccgacgacagagaagtggtgctgttcctgctgaacgtgttcatccctcagcctacactggcccagctgatcggtgcactgagagccctgaaagaggaaggccggctgacctttcctctgctggccgaatgcctgttcagagccggaagaagggatctgctgcgggacctgctgcatctggaccccagatttctggaaagacacctggccggcaccatgagctacttcagcccttaccagctgaccgtgctgcacgttgacggcgaactgtgcgccagagatattcggagcctgatcttcctgagcaaggacaccatcggcagccggtctacccctcagacatttctgcactgggtgtactgcatggaaaacctggacctgctcggccccacagatgtggatgccctgatgtccatgctgagaagcctgagcagagtggacctccagagacaggtgcagacactgatgggactgcacctgagcggacctagccacagccagcactacagacacacccct

SEQ ID NO: 2119 - DNA, 3540 bp, Artificial Sequence
  Synthetic Polynucleotide
atggccttaccagtgaccgccttgctcctgccgctggccttgctgctccacgccgccaggccggacatccagatgacacagagccctagcagcctgtctgccagcgtgggagacagagtgaccatcacatgcaaggccagcgaccacatcaacaactggctggcctggtatcagcagaagcctggacaggcccctaagctgctgatctacggcgctaccacactggaaacaggcgtgcccagcagattttctggcagcggctctggcaccgactacaccctgacaatatccagcctccagcctgaggacttcgccacctactactgtcagcagagctggaacaccccttggacattcggccagggcaccaagctggaaatcaagagactcgagggacagcctaaggccaatcctaccgtgacactgttccctccaagcagcgaagaactccaggccaacaaggccacacttgtgtgcctgatctccgacttctaccctggggctgtgacagtggcttggaaggccgatggatctcctgtgaaagccggcgtggaaaccaccaagccatccaagcagagcaacaacaaatacgccgccagctcctacctgagcctgacacctgagcagtggaagtcccacagatcctacagctgccaagtgacccacgaaggcagcaccgtggaaaagacagtggcccctacagagtgcagcggatccacaacacctggcgagagaagtagcctgcctgccttctatcctggcaccagcggctcttgttctggctgtggatctctgagcctgcctctgctggctggactggttgctgctgatgctgtggcctctctgctgattgtgggagccgtgttcctgtgcgccagacctagaagaagccccgctcaagaggacggcaaggtgtacatcaacatgcccggcagaggaagcactagtagagtgaagttcagcagaagcgccgacgcccctgcctaccagcagggacagaaccaactgtacaacgagctgaacctgggcagacgggaagagtacgacgtgctggacaagcggagaggcagggaccctgagatgggcggaaagccccagcggagaaagaacccccaggaaggactgtataacgaactccagaaagacaagatggccgaagcctacagcgagatcggcatgaagggcgagcggagaagaggcaagggccacgatggcctgtaccagggcctgagcaccgccaccaaggacacctatgacgccctgcacatgcaggccctgcctccaagaagggccaagcgatctggatctggagcaacaaacttctcactactcaaacaagcaggtgacgtggaggagaatcccgggcctatggactggatttggcgcatccttttccttgtcggcgctgctaccggcgcgcattccttcgaacaagttcagcttcaacagcctggcgctgagctggtcaaacctggcgcttctgtgaagatgagctgcaaagccagcggctacgccttcagcagctactggatcaactggatgaagcagaaacccggccagggactcgaatggatcggccaaatctatcccggcgacggcgacaccaactacaacggcaagttcaagggcagagccacactgaccgccgatacctctagcagcacagcctacatgcagctgagcagcctgaccagcgaagatagcgccgtgtacttctgtgcccggtccatcacaacagtcgtgggctgcgctatggactattggggccagggaacaagcgtgaccgtgtctagtacgcgtgcctctacaaagggaccctccgtgtttcctctggctcccagcagcaagtctacaagcggaggaacagccgctctgggctgcctggtcaaggattactttcccgagcctgtgaccgtgtcctggaatagcggagcactgacaagcggcgtgcacacctttccagccgtgctgcaaagcagcggcctgtactctctgagcagcgtggtcacagtgcctagctctagcctgggcacccagacctacatctgcaatgtgaaccacaagcctagcaacaccaaggtggacaagagagtggaacccaagagctgtggtacccaggcacagtctgactgtagctgctccacagttagccctggcgttctggctggcatcgttatgggcgacctcgtcctgactgtcctgatcgctctggcagtgtattttctcggacggctggtcccaagaggaaggggagcagctgaagctgctacccggaagcagcggatcacagagactgagtctccataccaagaactccagggacagagatccgatgtgtactccgacctgaacacacagaggccctattataagagctctagacgggttaagttttccagatccgcagacgcacccgcttaccaacaagggcagaaccaactctacaatgaacttaatttggggcggagggaagagtacgacgttctggacaaaaggaggggacgagatcccgagatgggcggaaagcctcagcgaaggaagaatccgcaagaggggctttataacgaactccagaaagataaaatggcagaagcctatagtgagattgggatgaagggagaaaggaggaggggtaaaggtcacgatgggttgtaccaaggattgagcacagccactaaagatacctatgatgcgctccacatgcaggccctgccgccaagacgcgccaagagaagcggatctggcgtgaagcagaccctgaatttcgacctgctgaagctggctggcgacgtggaatccaacccaggccctggccatatgtccgactccaaggaggtccctagccttccatttttgcgacacttgctcgaagagttggacagccatgaggacagcttgctgctgtttctgtgtcacgacgcggccccgggctgcacgacggtcacgcaagctttgtgctcgcttagccaacagcgcaagctgaccctcgcggctctggtcgagatgctctacgtgctgcagcgtatggatcttctcaagagccgcttcgggctcagcaaggagggggccgagcaattgctgggcacaagctttctcacgcgctaccgcaagctcatggtttgcgtgggtgaggagctcgactcgagcgagctacgcgctctacgcttgttcgcgtgcaacctgaatccgagcctgagcacggcgctttctgagagcagccgctttgtcgagcttgtactcgcgcttgaaaacgtaggactcgtctcgccatcgagtgtttccgtgcttgcggacatgttgcgcactcttcggcgcctcgatttgtgccagcagcttgttgagtacgaacaacaagagcaagccaggtaccgttactgttacgcggcctcgccctcattgccagttcgtacgttacgtcgggggcacggcgcgagtgaacacgagcagctgtgcatgcccgtgcaagaatcctctgacagccccgagctgctgcgcacgcccgtacaagaatcctccagcgacagccccgagcaaacgact

SEQ ID NO: 2120 - DNA, 3417 bp, Artificial Sequence
  Synthetic Polynucleotide
atggccttaccagtgaccgccttgctcctgccgctggccttgctgctccacgccgccaggccggacatccagatgacacagagccctagcagcctgtctgccagcgtgggagacagagtgaccatcacatgcaaggccagcgaccacatcaacaactggctggcctggtatcagcagaagcctggacaggcccctaagctgctgatctacggcgctaccacactggaaacaggcgtgcccagcagattttctggcagcggctctggcaccgactacaccctgacaatatccagcctccagcctgaggacttcgccacctactactgtcagcagagctggaacaccccttggacattcggccagggcaccaagctggaaatcaagagactcgagggacagcctaaggccaatcctaccgtgacactgttccctccaagcagcgaagaactccaggccaacaaggccacacttgtgtgcctgatctccgacttctaccctggggctgtgacagtggcttggaaggccgatggatctcctgtgaaagccggcgtggaaaccaccaagccatccaagcagagcaacaacaaatacgccgccagctcctacctgagcctgacacctgagcagtggaagtcccacagatcctacagctgccaagtgacccacgaaggcagcaccgtggaaaagacagtggcccctacagagtgcagcggatccacaacacctggcgagagaagtagcctgcctgccttctatcctggcaccagcggctcttgttctggctgtggatctctgagcctgcctctgctggctggactggttgctgctgatgctgtggcctctctgctgattgtgggagccgtgttcctgtgcgccagacctagaagaagccccgctcaagaggacggcaaggtgtacatcaacatgcccggcagaggaagcactagtagagtgaagttcagcagaagcgccgacgcccctgcctaccagcagggacagaaccaactgtacaacgagctgaacctgggcagacgggaagagtacgacgtgctggacaagcggagaggcagggaccctgagatgggcggaaagccccagcggagaaagaacccccaggaaggactgtataacgaactccagaaagacaagatggccgaagcctacagcgagatcggcatgaagggcgagcggagaagaggcaagggccacgatggcctgtaccagggcctgagcaccgccaccaaggacacctatgacgccctgcacatgcaggccctgcctccaagaagggccaagcgatctggatctggagcaacaaacttctcactactcaaacaagcaggtgacgtggaggagaatcccgggcctatggactggatttggcgcatccttttccttgtcggcgctgctaccggcgcgcattccttcgaacaagttcagcttcaacagcctggcgctgagctggtcaaacctggcgcttctgtgaagatgagctgcaaagccagcggctacgccttcagcagctactggatcaactggatgaagcagaaacccggccagggactcgaatggatcggccaaatctatcccggcgacggcgacaccaactacaacggcaagttcaagggcagagccacactgaccgccgatacctctagcagcacagcctacatgcagctgagcagcctgaccagcgaagatagcgccgtgtacttctgtgcccggtccatcacaacagtcgtgggctgcgctatggactattggggccagggaacaagcgtgaccgtgtctagtacgcgtgcctctacaaagggaccctccgtgtttcctctggctcccagcagcaagtctacaagcggaggaacagccgctctgggctgcctggtcaaggattactttcccgagcctgtgaccgtgtcctggaatagcggagcactgacaagcggcgtgcacacctttccagccgtgctgcaaagcagcggcctgtactctctgagcagcgtggtcacagtgcctagctctagcctgggcacccagacctacatctgcaatgtgaaccacaagcctagcaacaccaaggtggacaagagagtggaacccaagagctgtggtacccaggcacagtctgactgtagctgctccacagttagccctggcgttctggctggcatcgttatgggcgacctcgtcctgactgtcctgatcgctctggcagtgtattttctcggacggctggtcccaagaggaaggggagcagctgaagctgctacccggaagcagcggatcacagagactgagtctccataccaagaactccagggacagagatccgatgtgtactccgacctgaacacacagaggccctattataagagctctagacgggttaagttttccagatccgcagacgcacccgcttaccaacaagggcagaaccaactctacaatgaacttaatttggggcggagggaagagtacgacgttctggacaaaaggaggggacgagatcccgagatgggcggaaagcctcagcgaaggaagaatccgcaagaggggctttataacgaactccagaaagataaaatggcagaagcctatagtgagattgggatgaagggagaaaggaggaggggtaaaggtcacgatgggttgtaccaaggattgagcacagccactaaagatacctatgatgcgctccacatgcaggccctgccgccaagacgcgccaagagaagcggatctggcgtgaagcagaccctgaatttcgacctgctgaagctggctggcgacgtggaatccaacccaggccctggccatatgaccgagtacaagcccacggtgcgcctcgccacccgcgacgacgtccccagggccgtacgcaccctcgccgccgcgttcgccgactaccccgccacgcgccacaccgtcgatccggaccgccacatcgagcgggtcaccgagctgcaagaactcttcctcacgcgcgtcgggctcgacatcggcaaggtgtgggtcgcggacgacggcgccgcggtggcggtctggaccacgccggagagcgtcgaagcgggggcggtgttcgccgagatcggcccgcgcatggccgagttgagcggttcccggctggccgcgcagcaacagatggaaggcctcctggcgccgcaccggcccaaggagcccgcgtggttcctggccaccgtcggcgtctcgcccgaccaccagggcaagggtctgggcagcgccgtcgtgctccccggagtggaggcggccgagcgcgccggggtgcccgccttcctggagacctccgcgccccgcaacctccccttctacgagcggctcggcttcaccgtcaccgccgacgtcgaggtgcccgaaggaccgcgcacctggtgcatgacccgcaagcccggtgcctga

SEQ ID NO: 2121 - DNA, 3828 bp, Artificial Sequence
  Synthetic Polynucleotide
atggccttaccagtgaccgccttgctcctgccgctggccttgctgctccacgccgccaggccggaagtgcagctggttgaatctggcggaggactggttcaggctggcggatctctgagactgtcttgtgccgccagcggcagaacctttagcatgggctggtttagacaggcccctggcaaagagagagagttcgtcgccgccatcacatactctggcggcagcccttactacgccgactctgtgaagggcagattcaccatcagccgggacaacgccaagaacaccgtgtacctccagatgaacagcctgaagcctgaggacaccgccgtgtactactgcgccgccaatccaacatacggcagcgactggaacgccgagaattggggccagggaacccaagtgacagtgtctagcggtaccggcggaggcggatctggcggcggaggtagcggtggcggaggatctgaattcgacatccagatgacacagagccctagcagcctgtctgccagcgtgggagacagagtgaccatcacatgcaaggccagcgaccacatcaacaactggctggcctggtatcagcagaagcctggacaggcccctaagctgctgatctacggcgctaccacactggaaacaggcgtgcccagcagattttctggcagcggctctggcaccgactacaccctgacaatatccagcctccagcctgaggacttcgccacctactactgtcagcagagctggaacaccccttggacattcggccagggcaccaagctggaaatcaagagactcgagggacagcctaaggccaatcctaccgtgacactgttccctccaagcagcgaagaactccaggccaacaaggccacacttgtgtgcctgatctccgacttctaccctggggctgtgacagtggcttggaaggccgatggatctcctgtgaaagccggcgtggaaaccaccaagccatccaagcagagcaacaacaaatacgccgccagctcctacctgagcctgacacctgagcagtggaagtcccacagatcctacagctgccaagtgacccacgaaggcagcaccgtggaaaagacagtggcccctacagagtgcagcggatccacaacacctggcgagagaagtagcctgcctgccttctatcctggcaccagcggctcttgttctggctgtggatctctgagcctgcctctgctggctggactggttgctgctgatgctgtggcctctctgctgattgtgggagccgtgttcctgtgcgccagacctagaagaagccccgctcaagaggacggcaaggtgtacatcaacatgcccggcagaggaagcactagtagagtgaagttcagcagaagcgccgacgcccctgcctaccagcagggacagaaccaactgtacaacgagctgaacctgggcagacgggaagagtacgacgtgctggacaagcggagaggcagggaccctgagatgggcggaaagccccagcggagaaagaacccccaggaaggactgtataacgaactccagaaagacaagatggccgaagcctacagcgagatcggcatgaagggcgagcggagaagaggcaagggccacgatggcctgtaccagggcctgagcaccgccaccaaggacacctatgacgccctgcacatgcaggccctgcctccaagaagggccaagcgatctggatctggagcaacaaacttctcactactcaaacaagcaggtgacgtggaggagaatcccgggcctatggactggatttggcgcatccttttccttgtcggcgctgctaccggcgcgcattccttcgaacaagttcagcttcaacagcctggcgctgagctggtcaaacctggcgcttctgtgaagatgagctgcaaagccagcggctacgccttcagcagctactggatcaactggatgaagcagaaacccggccagggactcgaatggatcggccaaatctatcccggcgacggcgacaccaactacaacggcaagttcaagggcagagccacactgaccgccgatacctctagcagcacagcctacatgcagctgagcagcctgaccagcgaagatagcgccgtgtacttctgtgcccggtccatcacaacagtcgtgggctgcgctatggactattggggccagggaacaagcgtgaccgtgtctagtacgcgtgcctctacaaagggaccctccgtgtttcctctggctcccagcagcaagtctacaagcggaggaacagccgctctgggctgcctggtcaaggattactttcccgagcctgtgaccgtgtcctggaatagcggagcactgacaagcggcgtgcacacctttccagccgtgctgcaaagcagcggcctgtactctctgagcagcgtggtcacagtgcctagctctagcctgggcacccagacctacatctgcaatgtgaaccacaagcctagcaacaccaaggtggacaagagagtggaacccaagagctgtggtacccaggcacagtctgactgtagctgctccacagttagccctggcgttctggctggcatcgttatgggcgacctcgtcctgactgtcctgatcgctctggcagtgtattttctcggacggctggtcccaagaggaaggggagcagctgaagctgctacccggaagcagcggatcacagagactgagtctccataccaagaactccagggacagagatccgatgtgtactccgacctgaacacacagaggccctattataagagctctagacgggttaagttttccagatccgcagacgcacccgcttaccaacaagggcagaaccaactctacaatgaacttaatttggggcggagggaagagtacgacgttctggacaaaaggaggggacgagatcccgagatgggcggaaagcctcagcgaaggaagaatccgcaagaggggctttataacgaactccagaaagataaaatggcagaagcctatagtgagattgggatgaagggagaaaggaggaggggtaaaggtcacgatgggttgtaccaaggattgagcacagccactaaagatacctatgatgcgctccacatgcaggccctgccgccaagacgcgccaagagaagcggatctggcgtgaagcagaccctgaatttcgacctgctgaagctggctggcgacgtggaatccaacccaggccctggccatatgaccgagtacaagcccacggtgcgcctcgccacccgcgacgacgtccccagggccgtacgcaccctcgccgccgcgttcgccgactaccccgccacgcgccacaccgtcgatccggaccgccacatcgagcgggtcaccgagctgcaagaactcttcctcacgcgcgtcgggctcgacatcggcaaggtgtgggtcgcggacgacggcgccgcggtggcggtctggaccacgccggagagcgtcgaagcgggggcggtgttcgccgagatcggcccgcgcatggccgagttgagcggttcccggctggccgcgcagcaacagatggaaggcctcctggcgccgcaccggcccaaggagcccgcgtggttcctggccaccgtcggcgtctcgcccgaccaccagggcaagggtctgggcagcgccgtcgtgctccccggagtggaggcggccgagcgcgccggggtgcccgccttcctggagacctccgcgccccgcaacctccccttctacgagcggctcggcttcaccgtcaccgccgacgtcgaggtgcccgaaggaccgcgcacctggtgcatgacccgcaagcccggtgcctga

SEQ ID NO: 2122 - DNA, 4239 bp, Artificial Sequence
  Synthetic Polynucleotide
atggccttaccagtgaccgccttgctcctgccgctggccttgctgctccacgccgccaggccggaagtgcagctggttgaatctggcggaggactggttcaggctggcggatctctgagactgtcttgtgccgccagcggcagaacctttagcatgggctggtttagacaggcccctggcaaagagagagagttcgtcgccgccatcacatactctggcggcagcccttactacgccgactctgtgaagggcagattcaccatcagccgggacaacgccaagaacaccgtgtacctccagatgaacagcctgaagcctgaggacaccgccgtgtactactgcgccgccaatccaacatacggcagcgactggaacgccgagaattggggccagggaacccaagtgacagtgtctagcggtaccggcggaggcggatctggcggcggaggtagcggtggcggaggatctgaattcgacatccagatgacacagagccctagcagcctgtctgccagcgtgggagacagagtgaccatcacatgcaaggccagcgaccacatcaacaactggctggcctggtatcagcagaagcctggacaggcccctaagctgctgatctacggcgctaccacactggaaacaggcgtgcccagcagattttctggcagcggctctggcaccgactacaccctgacaatatccagcctccagcctgaggacttcgccacctactactgtcagcagagctggaacaccccttggacattcggccagggcaccaagctggaaatcaagagactcgagggacagcctaaggccaatcctaccgtgacactgttccctccaagcagcgaagaactccaggccaacaaggccacacttgtgtgcctgatctccgacttctaccctggggctgtgacagtggcttggaaggccgatggatctcctgtgaaagccggcgtggaaaccaccaagccatccaagcagagcaacaacaaatacgccgccagctcctacctgagcctgacacctgagcagtggaagtcccacagatcctacagctgccaagtgacccacgaaggcagcaccgtggaaaagacagtggcccctacagagtgcagcggatccacaacacctggcgagagaagtagcctgcctgccttctatcctggcaccagcggctcttgttctggctgtggatctctgagcctgcctctgctggctggactggttgctgctgatgctgtggcctctctgctgattgtgggagccgtgttcctgtgcgccagacctagaagaagccccgctcaagaggacggcaaggtgtacatcaacatgcccggcagaggaagcactagtagagtgaagttcagcagaagcgccgacgcccctgcctaccagcagggacagaaccaactgtacaacgagctgaacctgggcagacgggaagagtacgacgtgctggacaagcggagaggcagggaccctgagatgggcggaaagccccagcggagaaagaacccccaggaaggactgtataacgaactccagaaagacaagatggccgaagcctacagcgagatcggcatgaagggcgagcggagaagaggcaagggccacgatggcctgtaccagggcctgagcaccgccaccaaggacacctatgacgccctgcacatgcaggccctgcctccaagaagggccaagcgatctggatctggagcaacaaacttctcactactcaaacaagcaggtgacgtggaggagaatcccgggcctatggactggatttggcgcatccttttccttgtcggcgctgctaccggcgcgcattccgggcccgaagtgcaactggttgaatccggtggcggcctggtgcaagcaggcggatctctcagacttagctgtgccgcctccggcagaaccttcacaatgggatggtttaggcaggctccagggaaagagagagagttcgtcgccgccatctctctgtctcccacactggcctactacgccgactctgtgaaaggccggttcaccatctccagagataatgccaagaacaccgtggtgctgcaaatgaactctctgaaacccgaggatacagccctgtactattgtgccgctgaccggaagtccgtgatgagcatcagacccgattactggggacagggcacacaagtcacagtgtcctctggatccggcggcggaggatctggcggaggcggatctgggggcggaggctctttcgaacaagttcagcttcaacagcctggcgctgagctggtcaaacctggcgcttctgtgaagatgagctgcaaagccagcggctacgccttcagcagctactggatcaactggatgaagcagaaacccggccagggactcgaatggatcggccaaatctatcccggcgacggcgacaccaactacaacggcaagttcaagggcagagccacactgaccgccgatacctctagcagcacagcctacatgcagctgagcagcctgaccagcgaagatagcgccgtgtacttctgtgcccggtccatcacaacagtcgtgggctgcgctatggactattggggccagggaacaagcgtgaccgtgtctagtacgcgtgcctctacaaagggaccctccgtgtttcctctggctcccagcagcaagtctacaagcggaggaacagccgctctgggctgcctggtcaaggattactttcccgagcctgtgaccgtgtcctggaatagcggagcactgacaagcggcgtgcacacctttccagccgtgctgcaaagcagcggcctgtactctctgagcagcgtggtcacagtgcctagctctagcctgggcacccagacctacatctgcaatgtgaaccacaagcctagcaacaccaaggtggacaagagagtggaacccaagagctgtggtacccaggcacagtctgactgtagctgctccacagttagccctggcgttctggctggcatcgttatgggcgacctcgtcctgactgtcctgatcgctctggcagtgtattttctcggacggctggtcccaagaggaaggggagcagctgaagctgctacccggaagcagcggatcacagagactgagtctccataccaagaactccagggacagagatccgatgtgtactccgacctgaacacacagaggccctattataagagctctagacgggttaagttttccagatccgcagacgcacccgcttaccaacaagggcagaaccaactctacaatgaacttaatttggggcggagggaagagtacgacgttctggacaaaaggaggggacgagatcccgagatgggcggaaagcctcagcgaaggaagaatccgcaagaggggctttataacgaactccagaaagataaaatggcagaagcctatagtgagattgggatgaagggagaaaggaggaggggtaaaggtcacgatgggttgtaccaaggattgagcacagccactaaagatacctatgatgcgctccacatgcaggccctgccgccaagacgcgccaagagaagcggatctggcgtgaagcagaccctgaatttcgacctgctgaagctggctggcgacgtggaatccaacccaggccctggccatatgaccgagtacaagcccacggtgcgcctcgccacccgcgacgacgtccccagggccgtacgcaccctcgccgccgcgttcgccgactaccccgccacgcgccacaccgtcgatccggaccgccacatcgagcgggtcaccgagctgcaagaactcttcctcacgcgcgtcgggctcgacatcggcaaggtgtgggtcgcggacgacggcgccgcggtggcggtctggaccacgccggagagcgtcgaagcgggggcggtgttcgccgagatcggcccgcgcatggccgagttgagcggttcccggctggccgcgcagcaacagatggaaggcctcctggcgccgcaccggcccaaggagcccgcgtggttcctggccaccgtcggcgtctcgcccgaccaccagggcaagggtctgggcagcgccgtcgtgctccccggagtggaggcggccgagcgcgccggggtgcccgccttcctggagacctccgcgccccgcaacctccccttctacgagcggctcggcttcaccgtcaccgccgacgtcgaggtgcccgaaggaccgcgcacctggtgcatgacccgcaagcccggtgcctga

SEQ ID NO: 2123 - DNA, 3438 bp, Artificial Sequence
  Synthetic Polynucleotide
atggccttaccagtgaccgccttgctcctgccgctggccttgctgctccacgccgccaggccggaagtgcagctggttgaatctggcggaggactggttcaggctggcggatctctgagactgtcttgtgccgccagcggcagaacctttagcatgggctggtttagacaggcccctggcaaagagagagagttcgtcgccgccatcacatactctggcggcagcccttactacgccgactctgtgaagggcagattcaccatcagccgggacaacgccaagaacaccgtgtacctccagatgaacagcctgaagcctgaggacaccgccgtgtactactgcgccgccaatccaacatacggcagcgactggaacgccgagaattggggccagggaacccaagtgacagtgtctagcctcgagggacagcctaaggccaatcctaccgtgacactgttccctccaagcagcgaagaactccaggccaacaaggccacacttgtgtgcctgatctccgacttctaccctggggctgtgacagtggcttggaaggccgatggatctcctgtgaaagccggcgtggaaaccaccaagccatccaagcagagcaacaacaaatacgccgccagctcctacctgagcctgacacctgagcagtggaagtcccacagatcctacagctgccaagtgacccacgaaggcagcaccgtggaaaagacagtggcccctacagagtgcagcggatccacaacacctggcgagagaagtagcctgcctgccttctatcctggcaccagcggctcttgttctggctgtggatctctgagcctgcctctgctggctggactggttgctgctgatgctgtggcctctctgctgattgtgggagccgtgttcctgtgcgccagacctagaagaagccccgctcaagaggacggcaaggtgtacatcaacatgcccggcagaggaagcactagtagagtgaagttcagcagaagcgccgacgcccctgcctaccagcagggacagaaccaactgtacaacgagctgaacctgggcagacgggaagagtacgacgtgctggacaagcggagaggcagggaccctgagatgggcggaaagccccagcggagaaagaacccccaggaaggactgtataacgaactccagaaagacaagatggccgaagcctacagcgagatcggcatgaagggcgagcggagaagaggcaagggccacgatggcctgtaccagggcctgagcaccgccaccaaggacacctatgacgccctgcacatgcaggccctgcctccaagaagggccaagcgatctggatctggagcaacaaacttctcactactcaaacaagcaggtgacgtggaggagaatcccgggcctatggactggatttggcgcatccttttccttgtcggcgctgctaccggcgcgcattccgggcccgaagtgcaactggttgaatccggtggcggcctggtgcaagcaggcggatctctcagacttagctgtgccgcctccggcagaaccttcacaatgggatggtttaggcaggctccagggaaagagagagagttcgtcgccgccatctctctgtctcccacactggcctactacgccgactctgtgaaaggccggttcaccatctccagagataatgccaagaacaccgtggtgctgcaaatgaactctctgaaacccgaggatacagccctgtactattgtgccgctgaccggaagtccgtgatgagcatcagacccgattactggggacagggcacacaagtcacagtgtcctctacgcgtgcctctacaaagggaccctccgtgtttcctctggctcccagcagcaagtctacaagcggaggaacagccgctctgggctgcctggtcaaggattactttcccgagcctgtgaccgtgtcctggaatagcggagcactgacaagcggcgtgcacacctttccagccgtgctgcaaagcagcggcctgtactctctgagcagcgtggtcacagtgcctagctctagcctgggcacccagacctacatctgcaatgtgaaccacaagcctagcaacaccaaggtggacaagagagtggaacccaagagctgtggtacccaggcacagtctgactgtagctgctccacagttagccctggcgttctggctggcatcgttatgggcgacctcgtcctgactgtcctgatcgctctggcagtgtattttctcggacggctggtcccaagaggaaggggagcagctgaagctgctacccggaagcagcggatcacagagactgagtctccataccaagaactccagggacagagatccgatgtgtactccgacctgaacacacagaggccctattataagagctctagacgggttaagttttccagatccgcagacgcacccgcttaccaacaagggcagaaccaactctacaatgaacttaatttggggcggagggaagagtacgacgttctggacaaaaggaggggacgagatcccgagatgggcggaaagcctcagcgaaggaagaatccgcaagaggggctttataacgaactccagaaagataaaatggcagaagcctatagtgagattgggatgaagggagaaaggaggaggggtaaaggtcacgatgggttgtaccaaggattgagcacagccactaaagatacctatgatgcgctccacatgcaggccctgccgccaagacgcgccaagagaagcggatctggcgtgaagcagaccctgaatttcgacctgctgaagctggctggcgacgtggaatccaacccaggccctggccatatgaccgagtacaagcccacggtgcgcctcgccacccgcgacgacgtccccagggccgtacgcaccctcgccgccgcgttcgccgactaccccgccacgcgccacaccgtcgatccggaccgccacatcgagcgggtcaccgagctgcaagaactcttcctcacgcgcgtcgggctcgacatcggcaaggtgtgggtcgcggacgacggcgccgcggtggcggtctggaccacgccggagagcgtcgaagcgggggcggtgttcgccgagatcggcccgcgcatggccgagttgagcggttcccggctggccgcgcagcaacagatggaaggcctcctggcgccgcaccggcccaaggagcccgcgtggttcctggccaccgtcggcgtctcgcccgaccaccagggcaagggtctgggcagcgccgtcgtgctccccggagtggaggcggccgagcgcgccggggtgcccgccttcctggagacctccgcgccccgcaacctccccttctacgagcggctcggcttcaccgtcaccgccgacgtcgaggtgcccgaaggaccgcgcacctggtgcatgacccgcaagcccggtgcctga

SEQ ID NO: 2124 - DNA, 3462 bp, Artificial Sequence
  Synthetic Polynucleotide
atggccttaccagtgaccgccttgctcctgccgctggccttgctgctccacgccgccaggccggacatccagatgacacagagccctagcagcctgtctgccagcgtgggagacagagtgaccatcacatgcaaggccagcgaccacatcaacaactggctggcctggtatcagcagaagcctggacaggcccctaagctgctgatctacggcgctaccacactggaaacaggcgtgcccagcagattttctggcagcggctctggcaccgactacaccctgacaatatccagcctccagcctgaggacttcgccacctactactgtcagcagagctggaacaccccttggacattcggccagggcaccaagctggaaatcaagagactcgaggacctgaagaacgtgttcccacctgaggtggccgtgttcgagcctagcgaggccgagatcagccacacccagaaagccaccctcgtgtgcctggctaccggcttctaccccgaccatgtggaactgtcttggtgggtcaacggcaaagaggtgcacagcggcgtgtctaccgacccccagccactgaaagaacagcccgccctgaacgacagccggtactgcctgagcagcagactgagagtgtccgccaccttctggcagaacccccggaaccacttcagatgccaggtgcagttctacggcctgagcgagaacgacgagtggacccaggacagagccaagcccgtgacccagatcgtgtctgccgaagcctggggcagagccgattgcggatccacaacacctggcgagagaagtagcctgcctgccttctatcctggcaccagcggctcttgttctggctgtggatctctgagcctgcctctgctggctggactggttgctgctgatgctgtggcctctctgctgattgtgggagccgtgttcctgtgcgccagacctagaagaagccccgctcaagaggacggcaaggtgtacatcaacatgcccggcagaggaagcactagtagagtgaagttcagcagaagcgccgacgcccctgcctaccagcagggacagaaccaactgtacaacgagctgaacctgggcagacgggaagagtacgacgtgctggacaagcggagaggcagggaccctgagatgggcggaaagccccagcggagaaagaacccccaggaaggactgtataacgaactccagaaagacaagatggccgaagcctacagcgagatcggcatgaagggcgagcggagaagaggcaagggccacgatggcctgtaccagggcctgagcaccgccaccaaggacacctatgacgccctgcacatgcaggccctgcctccaagaagggccaagcgatctggatctggagcaacaaacttctcactactcaaacaagcaggtgacgtggaggagaatcccgggcctatggactggatttggcgcatccttttccttgtcggcgctgctaccggcgcgcattccttcgaacaagttcagcttcaacagcctggcgctgagctggtcaaacctggcgcttctgtgaagatgagctgcaaagccagcggctacgccttcagcagctactggatcaactggatgaagcagaaacccggccagggactcgaatggatcggccaaatctatcccggcgacggcgacaccaactacaacggcaagttcaagggcagagccacactgaccgccgatacctctagcagcacagcctacatgcagctgagcagcctgaccagcgaagatagcgccgtgtacttctgtgcccggtccatcacaacagtcgtgggctgcgctatggactattggggccagggaacaagcgtgaccgtgtctagtacgcgtatccagaaccctgatcctgccgtgtaccagctgcgggatagcaagagcagcgacaagagcgtgtgtctgttcaccgacttcgacagccagaccaacgtgtcccagagcaaggactccgacgtgtacatcaccgataagaccgtgctggacatgcggagcatggacttcaagagcaactccgccgtggcctggtccaacaagtccgatttcgcctgcgccaacgccttcaacaacagcattatccccgaggacacattcttcccaagccccgagagcagctgcggtacccaggcacagtctgactgtagctgctccacagttagccctggcgttctggctggcatcgttatgggcgacctcgtcctgactgtcctgatcgctctggcagtgtattttctcggacggctggtcccaagaggaaggggagcagctgaagctgctacccggaagcagcggatcacagagactgagtctccataccaagaactccagggacagagatccgatgtgtactccgacctgaacacacagaggccctattataagagctctagacgggttaagttttccagatccgcagacgcacccgcttaccaacaagggcagaaccaactctacaatgaacttaatttggggcggagggaagagtacgacgttctggacaaaaggaggggacgagatcccgagatgggcggaaagcctcagcgaaggaagaatccgcaagaggggctttataacgaactccagaaagataaaatggcagaagcctatagtgagattgggatgaagggagaaaggaggaggggtaaaggtcacgatgggttgtaccaaggattgagcacagccactaaagatacctatgatgcgctccacatgcaggccctgccgccaagacgcgccaagagaagcggatctggcgtgaagcagaccctgaatttcgacctgctgaagctggctggcgacgtggaatccaacccaggccctggccatatgaccgagtacaagcccacggtgcgcctcgccacccgcgacgacgtccccagggccgtacgcaccctcgccgccgcgttcgccgactaccccgccacgcgccacaccgtcgatccggaccgccacatcgagcgggtcaccgagctgcaagaactcttcctcacgcgcgtcgggctcgacatcggcaaggtgtgggtcgcggacgacggcgccgcggtggcggtctggaccacgccggagagcgtcgaagcgggggcggtgttcgccgagatcggcccgcgcatggccgagttgagcggttcccggctggccgcgcagcaacagatggaaggcctcctggcgccgcaccggcccaaggagcccgcgtggttcctggccaccgtcggcgtctcgcccgaccaccagggcaagggtctgggcagcgccgtcgtgctccccggagtggaggcggccgagcgcgccggggtgcccgccttcctggagacctccgcgccccgcaacctccccttctacgagcggctcggcttcaccgtcaccgccgacgtcgaggtgcccgaaggaccgcgcacctggtgcatgacccgcaagcccggtgcctga

SEQ ID NO: 2125 - DNA, 3873 bp, Artificial Sequence
  Synthetic Polynucleotide
atggccttaccagtgaccgccttgctcctgccgctggccttgctgctccacgccgccaggccggaagtgcagctggttgaatctggcggaggactggttcaggctggcggatctctgagactgtcttgtgccgccagcggcagaacctttagcatgggctggtttagacaggcccctggcaaagagagagagttcgtcgccgccatcacatactctggcggcagcccttactacgccgactctgtgaagggcagattcaccatcagccgggacaacgccaagaacaccgtgtacctccagatgaacagcctgaagcctgaggacaccgccgtgtactactgcgccgccaatccaacatacggcagcgactggaacgccgagaattggggccagggaacccaagtgacagtgtctagcggtaccggcggaggcggatctggcggcggaggtagcggtggcggaggatctgaattcgacatccagatgacacagagccctagcagcctgtctgccagcgtgggagacagagtgaccatcacatgcaaggccagcgaccacatcaacaactggctggcctggtatcagcagaagcctggacaggcccctaagctgctgatctacggcgctaccacactggaaacaggcgtgcccagcagattttctggcagcggctctggcaccgactacaccctgacaatatccagcctccagcctgaggacttcgccacctactactgtcagcagagctggaacaccccttggacattcggccagggcaccaagctggaaatcaagagactcgaggacctgaagaacgtgttcccacctgaggtggccgtgttcgagcctagcgaggccgagatcagccacacccagaaagccaccctcgtgtgcctggctaccggcttctaccccgaccatgtggaactgtcttggtgggtcaacggcaaagaggtgcacagcggcgtgtctaccgacccccagccactgaaagaacagcccgccctgaacgacagccggtactgcctgagcagcagactgagagtgtccgccaccttctggcagaacccccggaaccacttcagatgccaggtgcagttctacggcctgagcgagaacgacgagtggacccaggacagagccaagcccgtgacccagatcgtgtctgccgaagcctggggcagagccgattgcggatccacaacacctggcgagagaagtagcctgcctgccttctatcctggcaccagcggctcttgttctggctgtggatctctgagcctgcctctgctggctggactggttgctgctgatgctgtggcctctctgctgattgtgggagccgtgttcctgtgcgccagacctagaagaagccccgctcaagaggacggcaaggtgtacatcaacatgcccggcagaggaagcactagtagagtgaagttcagcagaagcgccgacgcccctgcctaccagcagggacagaaccaactgtacaacgagctgaacctgggcagacgggaagagtacgacgtgctggacaagcggagaggcagggaccctgagatgggcggaaagccccagcggagaaagaacccccaggaaggactgtataacgaactccagaaagacaagatggccgaagcctacagcgagatcggcatgaagggcgagcggagaagaggcaagggccacgatggcctgtaccagggcctgagcaccgccaccaaggacacctatgacgccctgcacatgcaggccctgcctccaagaagggccaagcgatctggatctggagcaacaaacttctcactactcaaacaagcaggtgacgtggaggagaatcccgggcctatggactggatttggcgcatccttttccttgtcggcgctgctaccggcgcgcattccttcgaacaagttcagcttcaacagcctggcgctgagctggtcaaacctggcgcttctgtgaagatgagctgcaaagccagcggctacgccttcagcagctactggatcaactggatgaagcagaaacccggccagggactcgaatggatcggccaaatctatcccggcgacggcgacaccaactacaacggcaagttcaagggcagagccacactgaccgccgatacctctagcagcacagcctacatgcagctgagcagcctgaccagcgaagatagcgccgtgtacttctgtgcccggtccatcacaacagtcgtgggctgcgctatggactattggggccagggaacaagcgtgaccgtgtctagtacgcgtatccagaaccctgatcctgccgtgtaccagctgcgggatagcaagagcagcgacaagagcgtgtgtctgttcaccgacttcgacagccagaccaacgtgtcccagagcaaggactccgacgtgtacatcaccgataagaccgtgctggacatgcggagcatggacttcaagagcaactccgccgtggcctggtccaacaagtccgatttcgcctgcgccaacgccttcaacaacagcattatccccgaggacacattcttcccaagccccgagagcagctgcggtacccaggcacagtctgactgtagctgctccacagttagccctggcgttctggctggcatcgttatgggcgacctcgtcctgactgtcctgatcgctctggcagtgtattttctcggacggctggtcccaagaggaaggggagcagctgaagctgctacccggaagcagcggatcacagagactgagtctccataccaagaactccagggacagagatccgatgtgtactccgacctgaacacacagaggccctattataagagctctagacgggttaagttttccagatccgcagacgcacccgcttaccaacaagggcagaaccaactctacaatgaacttaatttggggcggagggaagagtacgacgttctggacaaaaggaggggacgagatcccgagatgggcggaaagcctcagcgaaggaagaatccgcaagaggggctttataacgaactccagaaagataaaatggcagaagcctatagtgagattgggatgaagggagaaaggaggaggggtaaaggtcacgatgggttgtaccaaggattgagcacagccactaaagatacctatgatgcgctccacatgcaggccctgccgccaagacgcgccaagagaagcggatctggcgtgaagcagaccctgaatttcgacctgctgaagctggctggcgacgtggaatccaacccaggccctggccatatgaccgagtacaagcccacggtgcgcctcgccacccgcgacgacgtccccagggccgtacgcaccctcgccgccgcgttcgccgactaccccgccacgcgccacaccgtcgatccggaccgccacatcgagcgggtcaccgagctgcaagaactcttcctcacgcgcgtcgggctcgacatcggcaaggtgtgggtcgcggacgacggcgccgcggtggcggtctggaccacgccggagagcgtcgaagcgggggcggtgttcgccgagatcggcccgcgcatggccgagttgagcggttcccggctggccgcgcagcaacagatggaaggcctcctggcgccgcaccggcccaaggagcccgcgtggttcctggccaccgtcggcgtctcgcccgaccaccagggcaagggtctgggcagcgccgtcgtgctccccggagtggaggcggccgagcgcgccggggtgcccgccttcctggagacctccgcgccccgcaacctccccttctacgagcggctcggcttcaccgtcaccgccgacgtcgaggtgcccgaaggaccgcgcacctggtgcatgacccgcaagcccggtgcctga

SEQ ID NO: 2126 - DNA, 4284 bp, Artificial Sequence
  Synthetic Polynucleotide
atggccttaccagtgaccgccttgctcctgccgctggccttgctgctccacgccgccaggccggaagtgcagctggttgaatctggcggaggactggttcaggctggcggatctctgagactgtcttgtgccgccagcggcagaacctttagcatgggctggtttagacaggcccctggcaaagagagagagttcgtcgccgccatcacatactctggcggcagcccttactacgccgactctgtgaagggcagattcaccatcagccgggacaacgccaagaacaccgtgtacctccagatgaacagcctgaagcctgaggacaccgccgtgtactactgcgccgccaatccaacatacggcagcgactggaacgccgagaattggggccagggaacccaagtgacagtgtctagcggtaccggcggaggcggatctggcggcggaggtagcggtggcggaggatctgaattcgacatccagatgacacagagccctagcagcctgtctgccagcgtgggagacagagtgaccatcacatgcaaggccagcgaccacatcaacaactggctggcctggtatcagcagaagcctggacaggcccctaagctgctgatctacggcgctaccacactggaaacaggcgtgcccagcagattttctggcagcggctctggcaccgactacaccctgacaatatccagcctccagcctgaggacttcgccacctactactgtcagcagagctggaacaccccttggacattcggccagggcaccaagctggaaatcaagagactcgaggacctgaagaacgtgttcccacctgaggtggccgtgttcgagcctagcgaggccgagatcagccacacccagaaagccaccctcgtgtgcctggctaccggcttctaccccgaccatgtggaactgtcttggtgggtcaacggcaaagaggtgcacagcggcgtgtctaccgacccccagccactgaaagaacagcccgccctgaacgacagccggtactgcctgagcagcagactgagagtgtccgccaccttctggcagaacccccggaaccacttcagatgccaggtgcagttctacggcctgagcgagaacgacgagtggacccaggacagagccaagcccgtgacccagatcgtgtctgccgaagcctggggcagagccgattgcggatccacaacacctggcgagagaagtagcctgcctgccttctatcctggcaccagcggctcttgttctggctgtggatctctgagcctgcctctgctggctggactggttgctgctgatgctgtggcctctctgctgattgtgggagccgtgttcctgtgcgccagacctagaagaagccccgctcaagaggacggcaaggtgtacatcaacatgcccggcagaggaagcactagtagagtgaagttcagcagaagcgccgacgcccctgcctaccagcagggacagaaccaactgtacaacgagctgaacctgggcagacgggaagagtacgacgtgctggacaagcggagaggcagggaccctgagatgggcggaaagccccagcggagaaagaacccccaggaaggactgtataacgaactccagaaagacaagatggccgaagcctacagcgagatcggcatgaagggcgagcggagaagaggcaagggccacgatggcctgtaccagggcctgagcaccgccaccaaggacacctatgacgccctgcacatgcaggccctgcctccaagaagggccaagcgatctggatctggagcaacaaacttctcactactcaaacaagcaggtgacgtggaggagaatcccgggcctatggactggatttggcgcatccttttccttgtcggcgctgctaccggcgcgcattccgggcccgaagtgcaactggttgaatccggtggcggcctggtgcaagcaggcggatctctcagacttagctgtgccgcctccggcagaaccttcacaatgggatggtttaggcaggctccagggaaagagagagagttcgtcgccgccatctctctgtctcccacactggcctactacgccgactctgtgaaaggccggttcaccatctccagagataatgccaagaacaccgtggtgctgcaaatgaactctctgaaacccgaggatacagccctgtactattgtgccgctgaccggaagtccgtgatgagcatcagacccgattactggggacagggcacacaagtcacagtgtcctctggatccggcggcggaggatctggcggaggcggatctgggggcggaggctctttcgaacaagttcagcttcaacagcctggcgctgagctggtcaaacctggcgcttctgtgaagatgagctgcaaagccagcggctacgccttcagcagctactggatcaactggatgaagcagaaacccggccagggactcgaatggatcggccaaatctatcccggcgacggcgacaccaactacaacggcaagttcaagggcagagccacactgaccgccgatacctctagcagcacagcctacatgcagctgagcagcctgaccagcgaagatagcgccgtgtacttctgtgcccggtccatcacaacagtcgtgggctgcgctatggactattggggccagggaacaagcgtgaccgtgtctagtacgcgtatccagaaccctgatcctgccgtgtaccagctgcgggatagcaagagcagcgacaagagcgtgtgtctgttcaccgacttcgacagccagaccaacgtgtcccagagcaaggactccgacgtgtacatcaccgataagaccgtgctggacatgcggagcatggacttcaagagcaactccgccgtggcctggtccaacaagtccgatttcgcctgcgccaacgccttcaacaacagcattatccccgaggacacattcttcccaagccccgagagcagctgcggtacccaggcacagtctgactgtagctgctccacagttagccctggcgttctggctggcatcgttatgggcgacctcgtcctgactgtcctgatcgctctggcagtgtattttctcggacggctggtcccaagaggaaggggagcagctgaagctgctacccggaagcagcggatcacagagactgagtctccataccaagaactccagggacagagatccgatgtgtactccgacctgaacacacagaggccctattataagagctctagacgggttaagttttccagatccgcagacgcacccgcttaccaacaagggcagaaccaactctacaatgaacttaatttggggcggagggaagagtacgacgttctggacaaaaggaggggacgagatcccgagatgggcggaaagcctcagcgaaggaagaatccgcaagaggggctttataacgaactccagaaagataaaatggcagaagcctatagtgagattgggatgaagggagaaaggaggaggggtaaaggtcacgatgggttgtaccaaggattgagcacagccactaaagatacctatgatgcgctccacatgcaggccctgccgccaagacgcgccaagagaagcggatctggcgtgaagcagaccctgaatttcgacctgctgaagctggctggcgacgtggaatccaacccaggccctggccatatgaccgagtacaagcccacggtgcgcctcgccacccgcgacgacgtccccagggccgtacgcaccctcgccgccgcgttcgccgactaccccgccacgcgccacaccgtcgatccggaccgccacatcgagcgggtcaccgagctgcaagaactcttcctcacgcgcgtcgggctcgacatcggcaaggtgtgggtcgcggacgacggcgccgcggtggcggtctggaccacgccggagagcgtcgaagcgggggcggtgttcgccgagatcggcccgcgcatggccgagttgagcggttcccggctggccgcgcagcaacagatggaaggcctcctggcgccgcaccggcccaaggagcccgcgtggttcctggccaccgtcggcgtctcgcccgaccaccagggcaagggtctgggcagcgccgtcgtgctccccggagtggaggcggccgagcgcgccggggtgcccgccttcctggagacctccgcgccccgcaacctccccttctacgagcggctcggcttcaccgtcaccgccgacgtcgaggtgcccgaaggaccgcgcacctggtgcatgacccgcaagcccggtgcctga

SEQ ID NO: 2127 - DNA, 3483 bp, Artificial Sequence
  Synthetic Polynucleotide
atggccttaccagtgaccgccttgctcctgccgctggccttgctgctccacgccgccaggccggaagtgcagctggttgaatctggcggaggactggttcaggctggcggatctctgagactgtcttgtgccgccagcggcagaacctttagcatgggctggtttagacaggcccctggcaaagagagagagttcgtcgccgccatcacatactctggcggcagcccttactacgccgactctgtgaagggcagattcaccatcagccgggacaacgccaagaacaccgtgtacctccagatgaacagcctgaagcctgaggacaccgccgtgtactactgcgccgccaatccaacatacggcagcgactggaacgccgagaattggggccagggaacccaagtgacagtgtctagcctcgaggacctgaagaacgtgttcccacctgaggtggccgtgttcgagcctagcgaggccgagatcagccacacccagaaagccaccctcgtgtgcctggctaccggcttctaccccgaccatgtggaactgtcttggtgggtcaacggcaaagaggtgcacagcggcgtgtctaccgacccccagccactgaaagaacagcccgccctgaacgacagccggtactgcctgagcagcagactgagagtgtccgccaccttctggcagaacccccggaaccacttcagatgccaggtgcagttctacggcctgagcgagaacgacgagtggacccaggacagagccaagcccgtgacccagatcgtgtctgccgaagcctggggcagagccgattgcggatccacaacacctggcgagagaagtagcctgcctgccttctatcctggcaccagcggctcttgttctggctgtggatctctgagcctgcctctgctggctggactggttgctgctgatgctgtggcctctctgctgattgtgggagccgtgttcctgtgcgccagacctagaagaagccccgctcaagaggacggcaaggtgtacatcaacatgcccggcagaggaagcactagtagagtgaagttcagcagaagcgccgacgcccctgcctaccagcagggacagaaccaactgtacaacgagctgaacctgggcagacgggaagagtacgacgtgctggacaagcggagaggcagggaccctgagatgggcggaaagccccagcggagaaagaacccccaggaaggactgtataacgaactccagaaagacaagatggccgaagcctacagcgagatcggcatgaagggcgagcggagaagaggcaagggccacgatggcctgtaccagggcctgagcaccgccaccaaggacacctatgacgccctgcacatgcaggccctgcctccaagaagggccaagcgatctggatctggagcaacaaacttctcactactcaaacaagcaggtgacgtggaggagaatcccgggcctatggactggatttggcgcatccttttccttgtcggcgctgctaccggcgcgcattccgggcccgaagtgcaactggttgaatccggtggcggcctggtgcaagcaggcggatctctcagacttagctgtgccgcctccggcagaaccttcacaatgggatggtttaggcaggctccagggaaagagagagagttcgtcgccgccatctctctgtctcccacactggcctactacgccgactctgtgaaaggccggttcaccatctccagagataatgccaagaacaccgtggtgctgcaaatgaactctctgaaacccgaggatacagccctgtactattgtgccgctgaccggaagtccgtgatgagcatcagacccgattactggggacagggcacacaagtcacagtgtcctctacgcgtatccagaaccctgatcctgccgtgtaccagctgcgggatagcaagagcagcgacaagagcgtgtgtctgttcaccgacttcgacagccagaccaacgtgtcccagagcaaggactccgacgtgtacatcaccgataagaccgtgctggacatgcggagcatggacttcaagagcaactccgccgtggcctggtccaacaagtccgatttcgcctgcgccaacgccttcaacaacagcattatccccgaggacacattcttcccaagccccgagagcagctgcggtacccaggcacagtctgactgtagctgctccacagttagccctggcgttctggctggcatcgttatgggcgacctcgtcctgactgtcctgatcgctctggcagtgtattttctcggacggctggtcccaagaggaaggggagcagctgaagctgctacccggaagcagcggatcacagagactgagtctccataccaagaactccagggacagagatccgatgtgtactccgacctgaacacacagaggccctattataagagctctagacgggttaagttttccagatccgcagacgcacccgcttaccaacaagggcagaaccaactctacaatgaacttaatttggggcggagggaagagtacgacgttctggacaaaaggaggggacgagatcccgagatgggcggaaagcctcagcgaaggaagaatccgcaagaggggctttataacgaactccagaaagataaaatggcagaagcctatagtgagattgggatgaagggagaaaggaggaggggtaaaggtcacgatgggttgtaccaaggattgagcacagccactaaagatacctatgatgcgctccacatgcaggccctgccgccaagacgcgccaagagaagcggatctggcgtgaagcagaccctgaatttcgacctgctgaagctggctggcgacgtggaatccaacccaggccctggccatatgaccgagtacaagcccacggtgcgcctcgccacccgcgacgacgtccccagggccgtacgcaccctcgccgccgcgttcgccgactaccccgccacgcgccacaccgtcgatccggaccgccacatcgagcgggtcaccgagctgcaagaactcttcctcacgcgcgtcgggctcgacatcggcaaggtgtgggtcgcggacgacggcgccgcggtggcggtctggaccacgccggagagcgtcgaagcgggggcggtgttcgccgagatcggcccgcgcatggccgagttgagcggttcccggctggccgcgcagcaacagatggaaggcctcctggcgccgcaccggcccaaggagcccgcgtggttcctggccaccgtcggcgtctcgcccgaccaccagggcaagggtctgggcagcgccgtcgtgctccccggagtggaggcggccgagcgcgccggggtgcccgccttcctggagacctccgcgccccgcaacctccccttctacgagcggctcggcttcaccgtcaccgccgacgtcgaggtgcccgaaggaccgcgcacctggtgcatgacccgcaagcccggtgcctga

SEQ ID NO: 2128 - DNA, 1758 bp, Artificial Sequence; identical to SEQ ID NO: 2037
  Synthetic Polynucleotide

SEQ ID NO: 2129 - DNA, 2814 bp, Artificial Sequence
  Synthetic Polynucleotide
atggccttaccagtgaccgccttgctcctgccgctggccttgctgctccacgccgccaggccggacatccagatgacacagagccctagcagcctgtctgccagcgtgggagacagagtgaccatcacatgcaaggccagcgaccacatcaacaactggctggcctggtatcagcagaagcctggacaggcccctaagctgctgatctacggcgctaccacactggaaacaggcgtgcccagcagattttctggcagcggctctggcaccgactacaccctgacaatatccagcctccagcctgaggacttcgccacctactactgtcagcagagctggaacaccccttggacattcggccagggcaccaagctggaaatcaagagactcgagcaggctcagagcgattgcagctgtagcacagtgtctccaggcgtgctggccggaattgtgatgggcgatctggtgctgacagtgctgattgccctggccgtgtacttcctgggtagactggtgcctagaggaagaggcgctgccgaagccgccacaagaaagcagagaatcaccgagacagagagcccctaccaagagctgcaaggccagagaagcgacgtgtacagcgacctgaatacccagcggccttactacaaaagcactagtagagtgaagttcagcagaagcgccgacgcccctgcctaccagcagggacagaaccaactgtacaacgagctgaacctgggcagacgggaagagtacgacgtgctggacaagcggagaggcagggaccctgagatgggcggaaagccccagcggagaaagaacccccaggaaggactgtataacgaactccagaaagacaagatggccgaagcctacagcgagatcggcatgaagggcgagcggagaagaggcaagggccacgatggcctgtaccagggcctgagcaccgccaccaaggacacctatgacgccctgcacatgcaggccctgcctccaagaagggccaagcgatctggatctggagcaacaaacttctcactactcaaacaagcaggtgacgtggaggagaatcccgggcctatggactggatttggcgcatccttttccttgtcggcgctgctaccggcgcgcattccttcgaacaagttcagcttcaacagcctggcgctgagctggtcaaacctggcgcttctgtgaagatgagctgcaaagccagcggctacgccttcagcagctactggatcaactggatgaagcagaaacccggccagggactcgaatggatcggccaaatctatcccggcgacggcgacaccaactacaacggcaagttcaagggcagagccacactgaccgccgatacctctagcagcacagcctacatgcagctgagcagcctgaccagcgaagatagcgccgtgtacttctgtgcccggtccatcacaacagtcgtgggctgcgctatggactattggggccagggaacaagcgtgaccgtgtctagtacgcgtcaggcacagtctgactgtagctgctccacagttagccctggcgttctggctggcatcgttatgggcgacctcgtcctgactgtcctgatcgctctggcagtgtattttctcggacggctggtcccaagaggaaggggagcagctgaagctgctacccggaagcagcggatcacagagactgagtctccataccaagaactccagggacagagatccgatgtgtactccgacctgaacacacagaggccctattataagagctctagacgggttaagttttccagatccgcagacgcacccgcttaccaacaagggcagaaccaactctacaatgaacttaatttggggcggagggaagagtacgacgttctggacaaaaggaggggacgagatcccgagatgggcggaaagcctcagcgaaggaagaatccgcaagaggggctttataacgaactccagaaagataaaatggcagaagcctatagtgagattgggatgaagggagaaaggaggaggggtaaaggtcacgatgggttgtaccaaggattgagcacagccactaaagatacctatgatgcgctccacatgcaggccctgccgccaagacgcgccaagagaagcggatctggcgtgaagcagaccctgaatttcgacctgctgaagctggctggcgacgtggaatccaacccaggccctggccatatgaccgagtacaagcccacggtgcgcctcgccacccgcgacgacgtccccagggccgtacgcaccctcgccgccgcgttcgccgactaccccgccacgcgccacaccgtcgatccggaccgccacatcgagcgggtcaccgagctgcaagaactcttcctcacgcgcgtcgggctcgacatcggcaaggtgtgggtcgcggacgacggcgccgcggtggcggtctggaccacgccggagagcgtcgaagcgggggcggtgttcgccgagatcggcccgcgcatggccgagttgagcggttcccggctggccgcgcagcaacagatggaaggcctcctggcgccgcaccggcccaaggagcccgcgtggttcctggccaccgtcggcgtctcgcccgaccaccagggcaagggtctgggcagcgccgtcgtgctccccggagtggaggcggccgagcgcgccggggtgcccgccttcctggagacctccgcgccccgcaacctccccttctacgagcggctcggcttcaccgtcaccgccgacgtcgaggtgcccgaaggaccgcgcacctggtgcatgacccgcaagcccggtgcctga

SEQ ID NO: 2130 - DNA, 2970 bp, Artificial Sequence
  Synthetic Polynucleotide
atggccttaccagtgaccgccttgctcctgccgctggccttgctgctccacgccgccaggccggcatgcgaagtgcagctgcttgaaagtggcggcggactgattcagcctggcggatctctgagactgagctgtgccgccagcggcttcaccttttctagccacgccatgacctgggtccgacaggcacctggaaaagggcttgaatgggtgtccgccatcagcggctctggcgattacacacactacgccgacagcgtgaagggcagattcaccatcagcagagacaacagcaagaacaccgtgtacctccagatgaacagcctgagagccgaggacagcgccgtgtattattgcgccaaggatgaggatggcggcagcctgcttggacacagaggacaaggcaccctggtcaccgtttcttccggtaccggcggaggcggatctggcggcggaggtagcggtggcggaggatctgaattcggatctctcgagcaggctcagagcgattgcagctgtagcacagtgtctccaggcgtgctggccggaattgtgatgggcgatctggtgctgacagtgctgattgccctggccgtgtacttcctgggtagactggtgcctagaggaagaggcgctgccgaagccgccacaagaaagcagagaatcaccgagacagagagcccctaccaagagctgcaaggccagagaagcgacgtgtacagcgacctgaatacccagcggccttactacaaaagcactagtagagtgaagttcagcagaagcgccgacgcccctgcctaccagcagggacagaaccaactgtacaacgagctgaacctgggcagacgggaagagtacgacgtgctggacaagcggagaggcagggaccctgagatgggcggaaagccccagcggagaaagaacccccaggaaggactgtataacgaactccagaaagacaagatggccgaagcctacagcgagatcggcatgaagggcgagcggagaagaggcaagggccacgatggcctgtaccagggcctgagcaccgccaccaaggacacctatgacgccctgcacatgcaggccctgcctccaagaagggccaagcgatctggatctggagcaacaaacttctcactactcaaacaagcaggtgacgtggaggagaatcccgggcctatggactggatttggcgcatccttttccttgtcggcgctgctaccggcgcgcattccgggcccgaagtgcagctggttgaatctggcggaggactggttcaggctggcggatctctgagactgtcttgtgccgccagcggcagaacctttagcatgggctggtttagacaggcccctggcaaagagagagagttcgtcgccgccatcacatactctggcggcagcccttactacgccgactctgtgaagggcagattcaccatcagccgggacaacgccaagaacaccgtgtacctccagatgaacagcctgaagcctgaggacaccgccgtgtactactgcgccgccaatccaacatacggcagcgactggaacgccgagaattggggccagggaacccaagtgacagtgtctagcggatccggcggcggaggatctggcggaggcggatctgggggcggaggctctttcgaaggcagcacgcgtcaggcacagtctgactgtagctgctccacagttagccctggcgttctggctggcatcgttatgggcgacctcgtcctgactgtcctgatcgctctggcagtgtattttctcggacggctggtcccaagaggaaggggagcagctgaagctgctacccggaagcagcggatcacagagactgagtctccataccaagaactccagggacagagatccgatgtgtactccgacctgaacacacagaggccctattataagagctctagacgggttaagttttccagatccgcagacgcacccgcttaccaacaagggcagaaccaactctacaatgaacttaatttggggcggagggaagagtacgacgttctggacaaaaggaggggacgagatcccgagatgggcggaaagcctcagcgaaggaagaatccgcaagaggggctttataacgaactccagaaagataaaatggcagaagcctatagtgagattgggatgaagggagaaaggaggaggggtaaaggtcacgatgggttgtaccaaggattgagcacagccactaaagatacctatgatgcgctccacatgcaggccctgccgccaagacgcgccaagagaagcggatctggcgtgaagcagaccctgaatttcgacctgctgaagctggctggcgacgtggaatccaacccaggccctggccatatgaccgagtacaagcccacggtgcgcctcgccacccgcgacgacgtccccagggccgtacgcaccctcgccgccgcgttcgccgactaccccgccacgcgccacaccgtcgatccggaccgccacatcgagcgggtcaccgagctgcaagaactcttcctcacgcgcgtcgggctcgacatcggcaaggtgtgggtcgcggacgacggcgccgcggtggcggtctggaccacgccggagagcgtcgaagcgggggcggtgttcgccgagatcggcccgcgcatggccgagttgagcggttcccggctggccgcgcagcaacagatggaaggcctcctggcgccgcaccggcccaaggagcccgcgtggttcctggccaccgtcggcgtctcgcccgaccaccagggcaagggtctgggcagcgccgtcgtgctccccggagtggaggcggccgagcgcgccggggtgcccgccttcctggagacctccgcgccccgcaacctccccttctacgagcggctcggcttcaccgtcaccgccgacgtcgaggtgcccgaaggaccgcgcacctggtgcatgacccgcaagcccggtgcctga

SEQ ID NO: 2131 - DNA, 3417 bp, Artificial Sequence
  Synthetic Polynucleotide
atggccttaccagtgaccgccttgctcctgccgctggccttgctgctccacgccgccaggccggacatccagatgacacagagccctagcagcctgtctgccagcgtgggagacagagtgaccatcacatgcaaggccagcgaccacatcaacaactggctggcctggtatcagcagaagcctggacaggcccctaagctgctgatctacggcgctaccacactggaaacaggcgtgcccagcagattttctggcagcggctctggcaccgactacaccctgacaatatccagcctccagcctgaggacttcgccacctactactgtcagcagagctggaacaccccttggacattcggccagggcaccaagctggaaatcaagagactcgagggacagcctaaggccaatcctaccgtgacactgttccctccaagcagcgaagaactccaggccaacaaggccacacttgtgtgcctgatctccgacttctaccctggggctgtgacagtggcttggaaggccgatggatctcctgtgaaagccggcgtggaaaccaccaagccatccaagcagagcaacaacaaatacgccgccagctcctacctgagcctgacacctgagcagtggaagtcccacagatcctacagctgccaagtgacccacgaaggcagcaccgtggaaaagacagtggcccctacagagtgcagcggatcccaggctcagagcgattgcagctgtagcacagtgtctccaggcgtgctggccggaattgtgatgggcgatctggtgctgacagtgctgattgccctggccgtgtacttcctgggtagactggtgcctagaggaagaggcgctgccgaagccgccacaagaaagcagagaatcaccgagacagagagcccctaccaagagctgcaaggccagagaagcgacgtgtacagcgacctgaatacccagcggccttactacaaaagcactagtagagtgaagttcagcagaagcgccgacgcccctgcctaccagcagggacagaaccaactgtacaacgagctgaacctgggcagacgggaagagtacgacgtgctggacaagcggagaggcagggaccctgagatgggcggaaagccccagcggagaaagaacccccaggaaggactgtataacgaactccagaaagacaagatggccgaagcctacagcgagatcggcatgaagggcgagcggagaagaggcaagggccacgatggcctgtaccagggcctgagcaccgccaccaaggacacctatgacgccctgcacatgcaggccctgcctccaagaagggccaagcgatctggatctggagcaacaaacttctcactactcaaacaagcaggtgacgtggaggagaatcccgggcctatggactggatttggcgcatccttttccttgtcggcgctgctaccggcgcgcattccttcgaacaagttcagcttcaacagcctggcgctgagctggtcaaacctggcgcttctgtgaagatgagctgcaaagccagcggctacgccttcagcagctactggatcaactggatgaagcagaaacccggccagggactcgaatggatcggccaaatctatcccggcgacggcgacaccaactacaacggcaagttcaagggcagagccacactgaccgccgatacctctagcagcacagcctacatgcagctgagcagcctgaccagcgaagatagcgccgtgtacttctgtgcccggtccatcacaacagtcgtgggctgcgctatggactattggggccagggaacaagcgtgaccgtgtctagtacgcgtgcctctacaaagggaccctccgtgtttcctctggctcccagcagcaagtctacaagcggaggaacagccgctctgggctgcctggtcaaggattactttcccgagcctgtgaccgtgtcctggaatagcggagcactgacaagcggcgtgcacacctttccagccgtgctgcaaagcagcggcctgtactctctgagcagcgtggtcacagtgcctagctctagcctgggcacccagacctacatctgcaatgtgaaccacaagcctagcaacaccaaggtggacaagagagtggaacccaagagctgtggtacccaggcacagtctgactgtagctgctccacagttagccctggcgttctggctggcatcgttatgggcgacctcgtcctgactgtcctgatcgctctggcagtgtattttctcggacggctggtcccaagaggaaggggagcagctgaagctgctacccggaagcagcggatcacagagactgagtctccataccaagaactccagggacagagatccgatgtgtactccgacctgaacacacagaggccctattataagagctctagacgggttaagttttccagatccgcagacgcacccgcttaccaacaagggcagaaccaactctacaatgaacttaatttggggcggagggaagagtacgacgttctggacaaaaggaggggacgagatcccgagatgggcggaaagcctcagcgaaggaagaatccgcaagaggggctttataacgaactccagaaagataaaatggcagaagcctatagtgagattgggatgaagggagaaaggaggaggggtaaaggtcacgatgggttgtaccaaggattgagcacagccactaaagatacctatgatgcgctccacatgcaggccctgccgccaagacgcgccaagagaagcggatctggcgtgaagcagaccctgaatttcgacctgctgaagctggctggcgacgtggaatccaacccaggccctggccatatggctacctacgaggtgctgtgcgaggtggcaagaaagctgggcaccgacgacagagaagtggtgctgttcctgctgaacgtgttcatccctcagcctacactggcccagctgatcggtgcactgagagccctgaaagaggaaggccggctgacctttcctctgctggccgaatgcctgttcagagccggaagaagggatctgctgcgggacctgctgcatctggaccccagatttctggaaagacacctggccggcaccatgagctacttcagcccttaccagctgaccgtgctgcacgttgacggcgaactgtgcgccagagatattcggagcctgatcttcctgagcaaggacaccatcggcagccggtctacccctcagacatttctgcactgggtgtactgcatggaaaacctggacctgctcggccccacagatgtggatgccctgatgtccatgctgagaagcctgagcagagtggacctccagagacaggtgcagacactgatgggactgcacctgagcggacctagccacagccagcactacagacacacccct

SEQ ID NO: 2132 - DNA, 3576 bp, Artificial Sequence
  Synthetic Polynucleotide
atggccttaccagtgaccgccttgctcctgccgctggccttgctgctccacgccgccaggccggacatccagatgacacagagccctagcagcctgtctgccagcgtgggagacagagtgaccatcacatgcaaggccagcgaccacatcaacaactggctggcctggtatcagcagaagcctggacaggcccctaagctgctgatctacggcgctaccacactggaaacaggcgtgcccagcagattttctggcagcggctctggcaccgactacaccctgacaatatccagcctccagcctgaggacttcgccacctactactgtcagcagagctggaacaccccttggacattcggccagggcaccaagctggaaatcaagagactcgagggacagcctaaggccaatcctaccgtgacactgttccctccaagcagcgaagaactccaggccaacaaggccacacttgtgtgcctgatctccgacttctaccctggggctgtgacagtggcttggaaggccgatggatctcctgtgaaagccggcgtggaaaccaccaagccatccaagcagagcaacaacaaatacgccgccagctcctacctgagcctgacacctgagcagtggaagtcccacagatcctacagctgccaagtgacccacgaaggcagcaccgtggaaaagacagtggcccctacagagtgcagcggatcccaggctcagagcgattgcagctgtagcacagtgtctccaggcgtgctggccggaattgtgatgggcgatctggtgctgacagtgctgattgccctggccgtgtacttcctgggtagactggtgcctagaggaagaggcgctgccgaagccgccacaagaaagcagagaatcaccgagacagagagcccctaccaagagctgcaaggccagagaagcgacgtgtacagcgacctgaatacccagcggccttactacaaaagcactagtagagtgaagttcagcagaagcgccgacgcccctgcctaccagcagggacagaaccaactgtacaacgagctgaacctgggcagacgggaagagtacgacgtgctggacaagcggagaggcagggaccctgagatgggcggaaagccccagcggagaaagaacccccaggaaggactgtataacgaactccagaaagacaagatggccgaagcctacagcgagatcggcatgaagggcgagcggagaagaggcaagggccacgatggcctgtaccagggcctgagcaccgccaccaaggacacctatgacgccctgcacatgcaggccctgcctccaagaagggccaagcgatctggatctggagcaacaaacttctcactactcaaacaagcaggtgacgtggaggagaatcccgggcctatggactggatttggcgcatccttttccttgtcggcgctgctaccggcgcgcattccttcgaacaagttcagcttcaacagcctggcgctgagctggtcaaacctggcgcttctgtgaagatgagctgcaaagccagcggctacgccttcagcagctactggatcaactggatgaagcagaaacccggccagggactcgaatggatcggccaaatctatcccggcgacggcgacaccaactacaacggcaagttcaagggcagagccacactgaccgccgatacctctagcagcacagcctacatgcagctgagcagcctgaccagcgaagatagcgccgtgtacttctgtgcccggtccatcacaacagtcgtgggctgcgctatggactattggggccagggaacaagcgtgaccgtgtctagtacgcgtgcctctacaaagggaccctccgtgtttcctctggctcccagcagcaagtctacaagcggaggaacagccgctctgggctgcctggtcaaggattactttcccgagcctgtgaccgtgtcctggaatagcggagcactgacaagcggcgtgcacacctttccagccgtgctgcaaagcagcggcctgtactctctgagcagcgtggtcacagtgcctagctctagcctgggcacccagacctacatctgcaatgtgaaccacaagcctagcaacaccaaggtggacaagagagtggaacccaagagctgtggtacccaggcacagtctgactgtagctgctccacagttagccctggcgttctggctggcatcgttatgggcgacctcgtcctgactgtcctgatcgctctggcagtgtattttctcggacggctggtcccaagaggaaggggagcagctgaagctgctacccggaagcagcggatcacagagactgagtctccataccaagaactccagggacagagatccgatgtgtactccgacctgaacacacagaggccctattataagagctctagacgggttaagttttccagatccgcagacgcacccgcttaccaacaagggcagaaccaactctacaatgaacttaatttggggcggagggaagagtacgacgttctggacaaaaggaggggacgagatcccgagatgggcggaaagcctcagcgaaggaagaatccgcaagaggggctttataacgaactccagaaagataaaatggcagaagcctatagtgagattgggatgaagggagaaaggaggaggggtaaaggtcacgatgggttgtaccaaggattgagcacagccactaaagatacctatgatgcgctccacatgcaggccctgccgccaagacgcgccaagagaagcggatctggcgtgaagcagaccctgaatttcgacctgctgaagctggctggcgacgtggaatccaacccaggccctggccatatgtccgactccaaggaggtccctagccttccatttttgcgacacttgctcgaagagttggacagccatgaggacagcttgctgctgtttctgtgtcacgacgcggccccgggctgcacgacggtcacgcaagctttgtgctcgcttagccaacagcgcaagctgaccctcgcggctctggtcgagatgctctacgtgctgcagcgtatggatcttctcaagagccgcttcgggctcagcaaggagggggccgagcaattgctgggcacaagctttctcacgcgctaccgcaagctcatggtttgcgtgggtgaggagctcgactcgagcgagctacgcgctctacgcttgttcgcgtgcaacctgaatccgagcctgagcacggcgctttctgagagcagccgctttgtcgagcttgtactcgcgcttgaaaacgtaggactcgtctcgccatcgagtgtttccgtgcttgcggacatgttgcgcactcttcggcgcctcgatttgtgccagcagcttgttgagtacgaacaacaagagcaagccaggtaccgttactgttacgcggcctcgccctcattgccagttcgtacgttacgtcgggggcacggcgcgagtgaacacgagcagctgtgcatgcccgtgcaagaatcctctgacagccccgagctgctgcgcacgcccgtacaagaatcctccagcgacagccccgagcaaacgact

SEQ ID NO: 2133 - DNA, 3453 bp, Artificial Sequence
  Synthetic Polynucleotide
atggccttaccagtgaccgccttgctcctgccgctggccttgctgctccacgccgccaggccggacatccagatgacacagagccctagcagcctgtctgccagcgtgggagacagagtgaccatcacatgcaaggccagcgaccacatcaacaactggctggcctggtatcagcagaagcctggacaggcccctaagctgctgatctacggcgctaccacactggaaacaggcgtgcccagcagattttctggcagcggctctggcaccgactacaccctgacaatatccagcctccagcctgaggacttcgccacctactactgtcagcagagctggaacaccccttggacattcggccagggcaccaagctggaaatcaagagactcgagggacagcctaaggccaatcctaccgtgacactgttccctccaagcagcgaagaactccaggccaacaaggccacacttgtgtgcctgatctccgacttctaccctggggctgtgacagtggcttggaaggccgatggatctcctgtgaaagccggcgtggaaaccaccaagccatccaagcagagcaacaacaaatacgccgccagctcctacctgagcctgacacctgagcagtggaagtcccacagatcctacagctgccaagtgacccacgaaggcagcaccgtggaaaagacagtggcccctacagagtgcagcggatcccaggctcagagcgattgcagctgtagcacagtgtctccaggcgtgctggccggaattgtgatgggcgatctggtgctgacagtgctgattgccctggccgtgtacttcctgggtagactggtgcctagaggaagaggcgctgccgaagccgccacaagaaagcagagaatcaccgagacagagagcccctaccaagagctgcaaggccagagaagcgacgtgtacagcgacctgaatacccagcggccttactacaaaagcactagtagagtgaagttcagcagaagcgccgacgcccctgcctaccagcagggacagaaccaactgtacaacgagctgaacctgggcagacgggaagagtacgacgtgctggacaagcggagaggcagggaccctgagatgggcggaaagccccagcggagaaagaacccccaggaaggactgtataacgaactccagaaagacaagatggccgaagcctacagcgagatcggcatgaagggcgagcggagaagaggcaagggccacgatggcctgtaccagggcctgagcaccgccaccaaggacacctatgacgccctgcacatgcaggccctgcctccaagaagggccaagcgatctggatctggagcaacaaacttctcactactcaaacaagcaggtgacgtggaggagaatcccgggcctatggactggatttggcgcatccttttccttgtcggcgctgctaccggcgcgcattccttcgaacaagttcagcttcaacagcctggcgctgagctggtcaaacctggcgcttctgtgaagatgagctgcaaagccagcggctacgccttcagcagctactggatcaactggatgaagcagaaacccggccagggactcgaatggatcggccaaatctatcccggcgacggcgacaccaactacaacggcaagttcaagggcagagccacactgaccgccgatacctctagcagcacagcctacatgcagctgagcagcctgaccagcgaagatagcgccgtgtacttctgtgcccggtccatcacaacagtcgtgggctgcgctatggactattggggccagggaacaagcgtgaccgtgtctagtacgcgtgcctctacaaagggaccctccgtgtttcctctggctcccagcagcaagtctacaagcggaggaacagccgctctgggctgcctggtcaaggattactttcccgagcctgtgaccgtgtcctggaatagcggagcactgacaagcggcgtgcacacctttccagccgtgctgcaaagcagcggcctgtactctctgagcagcgtggtcacagtgcctagctctagcctgggcacccagacctacatctgcaatgtgaaccacaagcctagcaacaccaaggtggacaagagagtggaacccaagagctgtggtacccaggcacagtctgactgtagctgctccacagttagccctggcgttctggctggcatcgttatgggcgacctcgtcctgactgtcctgatcgctctggcagtgtattttctcggacggctggtcccaagaggaaggggagcagctgaagctgctacccggaagcagcggatcacagagactgagtctccataccaagaactccagggacagagatccgatgtgtactccgacctgaacacacagaggccctattataagagctctagacgggttaagttttccagatccgcagacgcacccgcttaccaacaagggcagaaccaactctacaatgaacttaatttggggcggagggaagagtacgacgttctggacaaaaggaggggacgagatcccgagatgggcggaaagcctcagcgaaggaagaatccgcaagaggggctttataacgaactccagaaagataaaatggcagaagcctatagtgagattgggatgaagggagaaaggaggaggggtaaaggtcacgatgggttgtaccaaggattgagcacagccactaaagatacctatgatgcgctccacatgcaggccctgccgccaagacgcgccaagagaagcggatctggcgtgaagcagaccctgaatttcgacctgctgaagctggctggcgacgtggaatccaacccaggccctggccatatgaccgagtacaagcccacggtgcgcctcgccacccgcgacgacgtccccagggccgtacgcaccctcgccgccgcgttcgccgactaccccgccacgcgccacaccgtcgatccggaccgccacatcgagcgggtcaccgagctgcaagaactcttcctcacgcgcgtcgggctcgacatcggcaaggtgtgggtcgcggacgacggcgccgcggtggcggtctggaccacgccggagagcgtcgaagcgggggcggtgttcgccgagatcggcccgcgcatggccgagttgagcggttcccggctggccgcgcagcaacagatggaaggcctcctggcgccgcaccggcccaaggagcccgcgtggttcctggccaccgtcggcgtctcgcccgaccaccagggcaagggtctgggcagcgccgtcgtgctccccggagtggaggcggccgagcgcgccggggtgcccgccttcctggagacctccgcgccccgcaacctccccttctacgagcggctcggcttcaccgtcaccgccgacgtcgaggtgcccgaaggaccgcgcacctggtgcatgacccgcaagcccggtgcctga

SEQ ID NO: 2134 - DNA, 3864 bp, Artificial Sequence
  Synthetic Polynucleotide
atggccttaccagtgaccgccttgctcctgccgctggccttgctgctccacgccgccaggccggaagtgcagctggttgaatctggcggaggactggttcaggctggcggatctctgagactgtcttgtgccgccagcggcagaacctttagcatgggctggtttagacaggcccctggcaaagagagagagttcgtcgccgccatcacatactctggcggcagcccttactacgccgactctgtgaagggcagattcaccatcagccgggacaacgccaagaacaccgtgtacctccagatgaacagcctgaagcctgaggacaccgccgtgtactactgcgccgccaatccaacatacggcagcgactggaacgccgagaattggggccagggaacccaagtgacagtgtctagcggtaccggcggaggcggatctggcggcggaggtagcggtggcggaggatctgaattcgacatccagatgacacagagccctagcagcctgtctgccagcgtgggagacagagtgaccatcacatgcaaggccagcgaccacatcaacaactggctggcctggtatcagcagaagcctggacaggcccctaagctgctgatctacggcgctaccacactggaaacaggcgtgcccagcagattttctggcagcggctctggcaccgactacaccctgacaatatccagcctccagcctgaggacttcgccacctactactgtcagcagagctggaacaccccttggacattcggccagggcaccaagctggaaatcaagagactcgagggacagcctaaggccaatcctaccgtgacactgttccctccaagcagcgaagaactccaggccaacaaggccacacttgtgtgcctgatctccgacttctaccctggggctgtgacagtggcttggaaggccgatggatctcctgtgaaagccggcgtggaaaccaccaagccatccaagcagagcaacaacaaatacgccgccagctcctacctgagcctgacacctgagcagtggaagtcccacagatcctacagctgccaagtgacccacgaaggcagcaccgtggaaaagacagtggcccctacagagtgcagcggatcccaggctcagagcgattgcagctgtagcacagtgtctccaggcgtgctggccggaattgtgatgggcgatctggtgctgacagtgctgattgccctggccgtgtacttcctgggtagactggtgcctagaggaagaggcgctgccgaagccgccacaagaaagcagagaatcaccgagacagagagcccctaccaagagctgcaaggccagagaagcgacgtgtacagcgacctgaatacccagcggccttactacaaaagcactagtagagtgaagttcagcagaagcgccgacgcccctgcctaccagcagggacagaaccaactgtacaacgagctgaacctgggcagacgggaagagtacgacgtgctggacaagcggagaggcagggaccctgagatgggcggaaagccccagcggagaaagaacccccaggaaggactgtataacgaactccagaaagacaagatggccgaagcctacagcgagatcggcatgaagggcgagcggagaagaggcaagggccacgatggcctgtaccagggcctgagcaccgccaccaaggacacctatgacgccctgcacatgcaggccctgcctccaagaagggccaagcgatctggatctggagcaacaaacttctcactactcaaacaagcaggtgacgtggaggagaatcccgggcctatggactggatttggcgcatccttttccttgtcggcgctgctaccggcgcgcattccttcgaacaagttcagcttcaacagcctggcgctgagctggtcaaacctggcgcttctgtgaagatgagctgcaaagccagcggctacgccttcagcagctactggatcaactggatgaagcagaaacccggccagggactcgaatggatcggccaaatctatcccggcgacggcgacaccaactacaacggcaagttcaagggcagagccacactgaccgccgatacctctagcagcacagcctacatgcagctgagcagcctgaccagcgaagatagcgccgtgtacttctgtgcccggtccatcacaacagtcgtgggctgcgctatggactattggggccagggaacaagcgtgaccgtgtctagtacgcgtgcctctacaaagggaccctccgtgtttcctctggctcccagcagcaagtctacaagcggaggaacagccgctctgggctgcctggtcaaggattactttcccgagcctgtgaccgtgtcctggaatagcggagcactgacaagcggcgtgcacacctttccagccgtgctgcaaagcagcggcctgtactctctgagcagcgtggtcacagtgcctagctctagcctgggcacccagacctacatctgcaatgtgaaccacaagcctagcaacaccaaggtggacaagagagtggaacccaagagctgtggtacccaggcacagtctgactgtagctgctccacagttagccctggcgttctggctggcatcgttatgggcgacctcgtcctgactgtcctgatcgctctggcagtgtattttctcggacggctggtcccaagaggaaggggagcagctgaagctgctacccggaagcagcggatcacagagactgagtctccataccaagaactccagggacagagatccgatgtgtactccgacctgaacacacagaggccctattataagagctctagacgggttaagttttccagatccgcagacgcacccgcttaccaacaagggcagaaccaactctacaatgaacttaatttggggcggagggaagagtacgacgttctggacaaaaggaggggacgagatcccgagatgggcggaaagcctcagcgaaggaagaatccgcaagaggggctttataacgaactccagaaagataaaatggcagaagcctatagtgagattgggatgaagggagaaaggaggaggggtaaaggtcacgatgggttgtaccaaggattgagcacagccactaaagatacctatgatgcgctccacatgcaggccctgccgccaagacgcgccaagagaagcggatctggcgtgaagcagaccctgaatttcgacctgctgaagctggctggcgacgtggaatccaacccaggccctggccatatgaccgagtacaagcccacggtgcgcctcgccacccgcgacgacgtccccagggccgtacgcaccctcgccgccgcgttcgccgactaccccgccacgcgccacaccgtcgatccggaccgccacatcgagcgggtcaccgagctgcaagaactcttcctcacgcgcgtcgggctcgacatcggcaaggtgtgggtcgcggacgacggcgccgcggtggcggtctggaccacgccggagagcgtcgaagcgggggcggtgttcgccgagatcggcccgcgcatggccgagttgagcggttcccggctggccgcgcagcaacagatggaaggcctcctggcgccgcaccggcccaaggagcccgcgtggttcctggccaccgtcggcgtctcgcccgaccaccagggcaagggtctgggcagcgccgtcgtgctccccggagtggaggcggccgagcgcgccggggtgcccgccttcctggagacctccgcgccccgcaacctccccttctacgagcggctcggcttcaccgtcaccgccgacgtcgaggtgcccgaaggaccgcgcacctggtgcatgacccgcaagcccggtgcctga

SEQ ID NO: 2135 - DNA, 4275 bp, Artificial Sequence
  Synthetic Polynucleotide
atggccttaccagtgaccgccttgctcctgccgctggccttgctgctccacgccgccaggccggaagtgcagctggttgaatctggcggaggactggttcaggctggcggatctctgagactgtcttgtgccgccagcggcagaacctttagcatgggctggtttagacaggcccctggcaaagagagagagttcgtcgccgccatcacatactctggcggcagcccttactacgccgactctgtgaagggcagattcaccatcagccgggacaacgccaagaacaccgtgtacctccagatgaacagcctgaagcctgaggacaccgccgtgtactactgcgccgccaatccaacatacggcagcgactggaacgccgagaattggggccagggaacccaagtgacagtgtctagcggtaccggcggaggcggatctggcggcggaggtagcggtggcggaggatctgaattcgacatccagatgacacagagccctagcagcctgtctgccagcgtgggagacagagtgaccatcacatgcaaggccagcgaccacatcaacaactggctggcctggtatcagcagaagcctggacaggcccctaagctgctgatctacggcgctaccacactggaaacaggcgtgcccagcagattttctggcagcggctctggcaccgactacaccctgacaatatccagcctccagcctgaggacttcgccacctactactgtcagcagagctggaacaccccttggacattcggccagggcaccaagctggaaatcaagagactcgagggacagcctaaggccaatcctaccgtgacactgttccctccaagcagcgaagaactccaggccaacaaggccacacttgtgtgcctgatctccgacttctaccctggggctgtgacagtggcttggaaggccgatggatctcctgtgaaagccggcgtggaaaccaccaagccatccaagcagagcaacaacaaatacgccgccagctcctacctgagcctgacacctgagcagtggaagtcccacagatcctacagctgccaagtgacccacgaaggcagcaccgtggaaaagacagtggcccctacagagtgcagcggatcccaggctcagagcgattgcagctgtagcacagtgtctccaggcgtgctggccggaattgtgatgggcgatctggtgctgacagtgctgattgccctggccgtgtacttcctgggtagactggtgcctagaggaagaggcgctgccgaagccgccacaagaaagcagagaatcaccgagacagagagcccctaccaagagctgcaaggccagagaagcgacgtgtacagcgacctgaatacccagcggccttactacaaaagcactagtagagtgaagttcagcagaagcgccgacgcccctgcctaccagcagggacagaaccaactgtacaacgagctgaacctgggcagacgggaagagtacgacgtgctggacaagcggagaggcagggaccctgagatgggcggaaagccccagcggagaaagaacccccaggaaggactgtataacgaactccagaaagacaagatggccgaagcctacagcgagatcggcatgaagggcgagcggagaagaggcaagggccacgatggcctgtaccagggcctgagcaccgccaccaaggacacctatgacgccctgcacatgcaggccctgcctccaagaagggccaagcgatctggatctggagcaacaaacttctcactactcaaacaagcaggtgacgtggaggagaatcccgggcctatggactggatttggcgcatccttttccttgtcggcgctgctaccggcgcgcattccgggcccgaagtgcaactggttgaatccggtggcggcctggtgcaagcaggcggatctctcagacttagctgtgccgcctccggcagaaccttcacaatgggatggtttaggcaggctccagggaaagagagagagttcgtcgccgccatctctctgtctcccacactggcctactacgccgactctgtgaaaggccggttcaccatctccagagataatgccaagaacaccgtggtgctgcaaatgaactctctgaaacccgaggatacagccctgtactattgtgccgctgaccggaagtccgtgatgagcatcagacccgattactggggacagggcacacaagtcacagtgtcctctggatccggcggcggaggatctggcggaggcggatctgggggcggaggctctttcgaacaagttcagcttcaacagcctggcgctgagctggtcaaacctggcgcttctgtgaagatgagctgcaaagccagcggctacgccttcagcagctactggatcaactggatgaagcagaaacccggccagggactcgaatggatcggccaaatctatcccggcgacggcgacaccaactacaacggcaagttcaagggcagagccacactgaccgccgatacctctagcagcacagcctacatgcagctgagcagcctgaccagcgaagatagcgccgtgtacttctgtgcccggtccatcacaacagtcgtgggctgcgctatggactattggggccagggaacaagcgtgaccgtgtctagtacgcgtgcctctacaaagggaccctccgtgtttcctctggctcccagcagcaagtctacaagcggaggaacagccgctctgggctgcctggtcaaggattactttcccgagcctgtgaccgtgtcctggaatagcggagcactgacaagcggcgtgcacacctttccagccgtgctgcaaagcagcggcctgtactctctgagcagcgtggtcacagtgcctagctctagcctgggcacccagacctacatctgcaatgtgaaccacaagcctagcaacaccaaggtggacaagagagtggaacccaagagctgtggtacccaggcacagtctgactgtagctgctccacagttagccctggcgttctggctggcatcgttatgggcgacctcgtcctgactgtcctgatcgctctggcagtgtattttctcggacggctggtcccaagaggaaggggagcagctgaagctgctacccggaagcagcggatcacagagactgagtctccataccaagaactccagggacagagatccgatgtgtactccgacctgaacacacagaggccctattataagagctctagacgggttaagttttccagatccgcagacgcacccgcttaccaacaagggcagaaccaactctacaatgaacttaatttggggcggagggaagagtacgacgttctggacaaaaggaggggacgagatcccgagatgggcggaaagcctcagcgaaggaagaatccgcaagaggggctttataacgaactccagaaagataaaatggcagaagcctatagtgagattgggatgaagggagaaaggaggaggggtaaaggtcacgatgggttgtaccaaggattgagcacagccactaaagatacctatgatgcgctccacatgcaggccctgccgccaagacgcgccaagagaagcggatctggcgtgaagcagaccctgaatttcgacctgctgaagctggctggcgacgtggaatccaacccaggccctggccatatgaccgagtacaagcccacggtgcgcctcgccacccgcgacgacgtccccagggccgtacgcaccctcgccgccgcgttcgccgactaccccgccacgcgccacaccgtcgatccggaccgccacatcgagcgggtcaccgagctgcaagaactcttcctcacgcgcgtcgggctcgacatcggcaaggtgtgggtcgcggacgacggcgccgcggtggcggtctggaccacgccggagagcgtcgaagcgggggcggtgttcgccgagatcggcccgcgcatggccgagttgagcggttcccggctggccgcgcagcaacagatggaaggcctcctggcgccgcaccggcccaaggagcccgcgtggttcctggccaccgtcggcgtctcgcccgaccaccagggcaagggtctgggcagcgccgtcgtgctccccggagtggaggcggccgagcgcgccggggtgcccgccttcctggagacctccgcgccccgcaacctccccttctacgagcggctcggcttcaccgtcaccgccgacgtcgaggtgcccgaaggaccgcgcacctggtgcatgacccgcaagcccggtgcctga

SEQ ID NO: 2136 - DNA, 3474 bp, Artificial Sequence
  Synthetic Polynucleotide
atggccttaccagtgaccgccttgctcctgccgctggccttgctgctccacgccgccaggccggaagtgcagctggttgaatctggcggaggactggttcaggctggcggatctctgagactgtcttgtgccgccagcggcagaacctttagcatgggctggtttagacaggcccctggcaaagagagagagttcgtcgccgccatcacatactctggcggcagcccttactacgccgactctgtgaagggcagattcaccatcagccgggacaacgccaagaacaccgtgtacctccagatgaacagcctgaagcctgaggacaccgccgtgtactactgcgccgccaatccaacatacggcagcgactggaacgccgagaattggggccagggaacccaagtgacagtgtctagcctcgagggacagcctaaggccaatcctaccgtgacactgttccctccaagcagcgaagaactccaggccaacaaggccacacttgtgtgcctgatctccgacttctaccctggggctgtgacagtggcttggaaggccgatggatctcctgtgaaagccggcgtggaaaccaccaagccatccaagcagagcaacaacaaatacgccgccagctcctacctgagcctgacacctgagcagtggaagtcccacagatcctacagctgccaagtgacccacgaaggcagcaccgtggaaaagacagtggcccctacagagtgcagcggatcccaggctcagagcgattgcagctgtagcacagtgtctccaggcgtgctggccggaattgtgatgggcgatctggtgctgacagtgctgattgccctggccgtgtacttcctgggtagactggtgcctagaggaagaggcgctgccgaagccgccacaagaaagcagagaatcaccgagacagagagcccctaccaagagctgcaaggccagagaagcgacgtgtacagcgacctgaatacccagcggccttactacaaaagcactagtagagtgaagttcagcagaagcgccgacgcccctgcctaccagcagggacagaaccaactgtacaacgagctgaacctgggcagacgggaagagtacgacgtgctggacaagcggagaggcagggaccctgagatgggcggaaagccccagcggagaaagaacccccaggaaggactgtataacgaactccagaaagacaagatggccgaagcctacagcgagatcggcatgaagggcgagcggagaagaggcaagggccacgatggcctgtaccagggcctgagcaccgccaccaaggacacctatgacgccctgcacatgcaggccctgcctccaagaagggccaagcgatctggatctggagcaacaaacttctcactactcaaacaagcaggtgacgtggaggagaatcccgggcctatggactggatttggcgcatccttttccttgtcggcgctgctaccggcgcgcattccgggcccgaagtgcaactggttgaatccggtggcggcctggtgcaagcaggcggatctctcagacttagctgtgccgcctccggcagaaccttcacaatgggatggtttaggcaggctccagggaaagagagagagttcgtcgccgccatctctctgtctcccacactggcctactacgccgactctgtgaaaggccggttcaccatctccagagataatgccaagaacaccgtggtgctgcaaatgaactctctgaaacccgaggatacagccctgtactattgtgccgctgaccggaagtccgtgatgagcatcagacccgattactggggacagggcacacaagtcacagtgtcctctacgcgtgcctctacaaagggaccctccgtgtttcctctggctcccagcagcaagtctacaagcggaggaacagccgctctgggctgcctggtcaaggattactttcccgagcctgtgaccgtgtcctggaatagcggagcactgacaagcggcgtgcacacctttccagccgtgctgcaaagcagcggcctgtactctctgagcagcgtggtcacagtgcctagctctagcctgggcacccagacctacatctgcaatgtgaaccacaagcctagcaacaccaaggtggacaagagagtggaacccaagagctgtggtacccaggcacagtctgactgtagctgctccacagttagccctggcgttctggctggcatcgttatgggcgacctcgtcctgactgtcctgatcgctctggcagtgtattttctcggacggctggtcccaagaggaaggggagcagctgaagctgctacccggaagcagcggatcacagagactgagtctccataccaagaactccagggacagagatccgatgtgtactccgacctgaacacacagaggccctattataagagctctagacgggttaagttttccagatccgcagacgcacccgcttaccaacaagggcagaaccaactctacaatgaacttaatttggggcggagggaagagtacgacgttctggacaaaaggaggggacgagatcccgagatgggcggaaagcctcagcgaaggaagaatccgcaagaggggctttataacgaactccagaaagataaaatggcagaagcctatagtgagattgggatgaagggagaaaggaggaggggtaaaggtcacgatgggttgtaccaaggattgagcacagccactaaagatacctatgatgcgctccacatgcaggccctgccgccaagacgcgccaagagaagcggatctggcgtgaagcagaccctgaatttcgacctgctgaagctggctggcgacgtggaatccaacccaggccctggccatatgaccgagtacaagcccacggtgcgcctcgccacccgcgacgacgtccccagggccgtacgcaccctcgccgccgcgttcgccgactaccccgccacgcgccacaccgtcgatccggaccgccacatcgagcgggtcaccgagctgcaagaactcttcctcacgcgcgtcgggctcgacatcggcaaggtgtgggtcgcggacgacggcgccgcggtggcggtctggaccacgccggagagcgtcgaagcgggggcggtgttcgccgagatcggcccgcgcatggccgagttgagcggttcccggctggccgcgcagcaacagatggaaggcctcctggcgccgcaccggcccaaggagcccgcgtggttcctggccaccgtcggcgtctcgcccgaccaccagggcaagggtctgggcagcgccgtcgtgctccccggagtggaggcggccgagcgcgccggggtgcccgccttcctggagacctccgcgccccgcaacctccccttctacgagcggctcggcttcaccgtcaccgccgacgtcgaggtgcccgaaggaccgcgcacctggtgcatgacccgcaagcccggtgcctga

SEQ ID NO: 2137 - DNA, 3498 bp, Artificial Sequence
  Synthetic Polynucleotide
atggccttaccagtgaccgccttgctcctgccgctggccttgctgctccacgccgccaggccggacatccagatgacacagagccctagcagcctgtctgccagcgtgggagacagagtgaccatcacatgcaaggccagcgaccacatcaacaactggctggcctggtatcagcagaagcctggacaggcccctaagctgctgatctacggcgctaccacactggaaacaggcgtgcccagcagattttctggcagcggctctggcaccgactacaccctgacaatatccagcctccagcctgaggacttcgccacctactactgtcagcagagctggaacaccccttggacattcggccagggcaccaagctggaaatcaagagactcgaggacctgaagaacgtgttcccacctgaggtggccgtgttcgagcctagcgaggccgagatcagccacacccagaaagccaccctcgtgtgcctggctaccggcttctaccccgaccatgtggaactgtcttggtgggtcaacggcaaagaggtgcacagcggcgtgtctaccgacccccagccactgaaagaacagcccgccctgaacgacagccggtactgcctgagcagcagactgagagtgtccgccaccttctggcagaacccccggaaccacttcagatgccaggtgcagttctacggcctgagcgagaacgacgagtggacccaggacagagccaagcccgtgacccagatcgtgtctgccgaagcctggggcagagccgattgcggatcccaggctcagagcgattgcagctgtagcacagtgtctccaggcgtgctggccggaattgtgatgggcgatctggtgctgacagtgctgattgccctggccgtgtacttcctgggtagactggtgcctagaggaagaggcgctgccgaagccgccacaagaaagcagagaatcaccgagacagagagcccctaccaagagctgcaaggccagagaagcgacgtgtacagcgacctgaatacccagcggccttactacaaaagcactagtagagtgaagttcagcagaagcgccgacgcccctgcctaccagcagggacagaaccaactgtacaacgagctgaacctgggcagacgggaagagtacgacgtgctggacaagcggagaggcagggaccctgagatgggcggaaagccccagcggagaaagaacccccaggaaggactgtataacgaactccagaaagacaagatggccgaagcctacagcgagatcggcatgaagggcgagcggagaagaggcaagggccacgatggcctgtaccagggcctgagcaccgccaccaaggacacctatgacgccctgcacatgcaggccctgcctccaagaagggccaagcgatctggatctggagcaacaaacttctcactactcaaacaagcaggtgacgtggaggagaatcccgggcctatggactggatttggcgcatccttttccttgtcggcgctgctaccggcgcgcattccttcgaacaagttcagcttcaacagcctggcgctgagctggtcaaacctggcgcttctgtgaagatgagctgcaaagccagcggctacgccttcagcagctactggatcaactggatgaagcagaaacccggccagggactcgaatggatcggccaaatctatcccggcgacggcgacaccaactacaacggcaagttcaagggcagagccacactgaccgccgatacctctagcagcacagcctacatgcagctgagcagcctgaccagcgaagatagcgccgtgtacttctgtgcccggtccatcacaacagtcgtgggctgcgctatggactattggggccagggaacaagcgtgaccgtgtctagtacgcgtatccagaaccctgatcctgccgtgtaccagctgcgggatagcaagagcagcgacaagagcgtgtgtctgttcaccgacttcgacagccagaccaacgtgtcccagagcaaggactccgacgtgtacatcaccgataagaccgtgctggacatgcggagcatggacttcaagagcaactccgccgtggcctggtccaacaagtccgatttcgcctgcgccaacgccttcaacaacagcattatccccgaggacacattcttcccaagccccgagagcagctgcggtacccaggcacagtctgactgtagctgctccacagttagccctggcgttctggctggcatcgttatgggcgacctcgtcctgactgtcctgatcgctctggcagtgtattttctcggacggctggtcccaagaggaaggggagcagctgaagctgctacccggaagcagcggatcacagagactgagtctccataccaagaactccagggacagagatccgatgtgtactccgacctgaacacacagaggccctattataagagctctagacgggttaagttttccagatccgcagacgcacccgcttaccaacaagggcagaaccaactctacaatgaacttaatttggggcggagggaagagtacgacgttctggacaaaaggaggggacgagatcccgagatgggcggaaagcctcagcgaaggaagaatccgcaagaggggctttataacgaactccagaaagataaaatggcagaagcctatagtgagattgggatgaagggagaaaggaggaggggtaaaggtcacgatgggttgtaccaaggattgagcacagccactaaagatacctatgatgcgctccacatgcaggccctgccgccaagacgcgccaagagaagcggatctggcgtgaagcagaccctgaatttcgacctgctgaagctggctggcgacgtggaatccaacccaggccctggccatatgaccgagtacaagcccacggtgcgcctcgccacccgcgacgacgtccccagggccgtacgcaccctcgccgccgcgttcgccgactaccccgccacgcgccacaccgtcgatccggaccgccacatcgagcgggtcaccgagctgcaagaactcttcctcacgcgcgtcgggctcgacatcggcaaggtgtgggtcgcggacgacggcgccgcggtggcggtctggaccacgccggagagcgtcgaagcgggggcggtgttcgccgagatcggcccgcgcatggccgagttgagcggttcccggctggccgcgcagcaacagatggaaggcctcctggcgccgcaccggcccaaggagcccgcgtggttcctggccaccgtcggcgtctcgcccgaccaccagggcaagggtctgggcagcgccgtcgtgctccccggagtggaggcggccgagcgcgccggggtgcccgccttcctggagacctccgcgccccgcaacctccccttctacgagcggctcggcttcaccgtcaccgccgacgtcgaggtgcccgaaggaccgcgcacctggtgcatgacccgcaagcccggtgcctga

SEQ ID NO: 2138 - DNA, 3909 bp, Artificial Sequence
  Synthetic Polynucleotide
atggccttaccagtgaccgccttgctcctgccgctggccttgctgctccacgccgccaggccggaagtgcagctggttgaatctggcggaggactggttcaggctggcggatctctgagactgtcttgtgccgccagcggcagaacctttagcatgggctggtttagacaggcccctggcaaagagagagagttcgtcgccgccatcacatactctggcggcagcccttactacgccgactctgtgaagggcagattcaccatcagccgggacaacgccaagaacaccgtgtacctccagatgaacagcctgaagcctgaggacaccgccgtgtactactgcgccgccaatccaacatacggcagcgactggaacgccgagaattggggccagggaacccaagtgacagtgtctagcggtaccggcggaggcggatctggcggcggaggtagcggtggcggaggatctgaattcgacatccagatgacacagagccctagcagcctgtctgccagcgtgggagacagagtgaccatcacatgcaaggccagcgaccacatcaacaactggctggcctggtatcagcagaagcctggacaggcccctaagctgctgatctacggcgctaccacactggaaacaggcgtgcccagcagattttctggcagcggctctggcaccgactacaccctgacaatatccagcctccagcctgaggacttcgccacctactactgtcagcagagctggaacaccccttggacattcggccagggcaccaagctggaaatcaagagactcgaggacctgaagaacgtgttcccacctgaggtggccgtgttcgagcctagcgaggccgagatcagccacacccagaaagccaccctcgtgtgcctggctaccggcttctaccccgaccatgtggaactgtcttggtgggtcaacggcaaagaggtgcacagcggcgtgtctaccgacccccagccactgaaagaacagcccgccctgaacgacagccggtactgcctgagcagcagactgagagtgtccgccaccttctggcagaacccccggaaccacttcagatgccaggtgcagttctacggcctgagcgagaacgacgagtggacccaggacagagccaagcccgtgacccagatcgtgtctgccgaagcctggggcagagccgattgcggatcccaggctcagagcgattgcagctgtagcacagtgtctccaggcgtgctggccggaattgtgatgggcgatctggtgctgacagtgctgattgccctggccgtgtacttcctgggtagactggtgcctagaggaagaggcgctgccgaagccgccacaagaaagcagagaatcaccgagacagagagcccctaccaagagctgcaaggccagagaagcgacgtgtacagcgacctgaatacccagcggccttactacaaaagcactagtagagtgaagttcagcagaagcgccgacgcccctgcctaccagcagggacagaaccaactgtacaacgagctgaacctgggcagacgggaagagtacgacgtgctggacaagcggagaggcagggaccctgagatgggcggaaagccccagcggagaaagaacccccaggaaggactgtataacgaactccagaaagacaagatggccgaagcctacagcgagatcggcatgaagggcgagcggagaagaggcaagggccacgatggcctgtaccagggcctgagcaccgccaccaaggacacctatgacgccctgcacatgcaggccctgcctccaagaagggccaagcgatctggatctggagcaacaaacttctcactactcaaacaagcaggtgacgtggaggagaatcccgggcctatggactggatttggcgcatccttttccttgtcggcgctgctaccggcgcgcattccttcgaacaagttcagcttcaacagcctggcgctgagctggtcaaacctggcgcttctgtgaagatgagctgcaaagccagcggctacgccttcagcagctactggatcaactggatgaagcagaaacccggccagggactcgaatggatcggccaaatctatcccggcgacggcgacaccaactacaacggcaagttcaagggcagagccacactgaccgccgatacctctagcagcacagcctacatgcagctgagcagcctgaccagcgaagatagcgccgtgtacttctgtgcccggtccatcacaacagtcgtgggctgcgctatggactattggggccagggaacaagcgtgaccgtgtctagtacgcgtatccagaaccctgatcctgccgtgtaccagctgcgggatagcaagagcagcgacaagagcgtgtgtctgttcaccgacttcgacagccagaccaacgtgtcccagagcaaggactccgacgtgtacatcaccgataagaccgtgctggacatgcggagcatggacttcaagagcaactccgccgtggcctggtccaacaagtccgatttcgcctgcgccaacgccttcaacaacagcattatccccgaggacacattcttcccaagccccgagagcagctgcggtacccaggcacagtctgactgtagctgctccacagttagccctggcgttctggctggcatcgttatgggcgacctcgtcctgactgtcctgatcgctctggcagtgtattttctcggacggctggtcccaagaggaaggggagcagctgaagctgctacccggaagcagcggatcacagagactgagtctccataccaagaactccagggacagagatccgatgtgtactccgacctgaacacacagaggccctattataagagctctagacgggttaagttttccagatccgcagacgcacccgcttaccaacaagggcagaaccaactctacaatgaacttaatttggggcggagggaagagtacgacgttctggacaaaaggaggggacgagatcccgagatgggcggaaagcctcagcgaaggaagaatccgcaagaggggctttataacgaactccagaaagataaaatggcagaagcctatagtgagattgggatgaagggagaaaggaggaggggtaaaggtcacgatgggttgtaccaaggattgagcacagccactaaagatacctatgatgcgctccacatgcaggccctgccgccaagacgcgccaagagaagcggatctggcgtgaagcagaccctgaatttcgacctgctgaagctggctggcgacgtggaatccaacccaggccctggccatatgaccgagtacaagcccacggtgcgcctcgccacccgcgacgacgtccccagggccgtacgcaccctcgccgccgcgttcgccgactaccccgccacgcgccacaccgtcgatccggaccgccacatcgagcgggtcaccgagctgcaagaactcttcctcacgcgcgtcgggctcgacatcggcaaggtgtgggtcgcggacgacggcgccgcggtggcggtctggaccacgccggagagcgtcgaagcgggggcggtgttcgccgagatcggcccgcgcatggccgagttgagcggttcccggctggccgcgcagcaacagatggaaggcctcctggcgccgcaccggcccaaggagcccgcgtggttcctggccaccgtcggcgtctcgcccgaccaccagggcaagggtctgggcagcgccgtcgtgctccccggagtggaggcggccgagcgcgccggggtgcccgccttcctggagacctccgcgccccgcaacctccccttctacgagcggctcggcttcaccgtcaccgccgacgtcgaggtgcccgaaggaccgcgcacctggtgcatgacccgcaagcccggtgcctga

SEQ ID NO: 2139 - DNA, 4320 bp, Artificial Sequence
  Synthetic Polynucleotide
atggccttaccagtgaccgccttgctcctgccgctggccttgctgctccacgccgccaggccggaagtgcagctggttgaatctggcggaggactggttcaggctggcggatctctgagactgtcttgtgccgccagcggcagaacctttagcatgggctggtttagacaggcccctggcaaagagagagagttcgtcgccgccatcacatactctggcggcagcccttactacgccgactctgtgaagggcagattcaccatcagccgggacaacgccaagaacaccgtgtacctccagatgaacagcctgaagcctgaggacaccgccgtgtactactgcgccgccaatccaacatacggcagcgactggaacgccgagaattggggccagggaacccaagtgacagtgtctagcggtaccggcggaggcggatctggcggcggaggtagcggtggcggaggatctgaattcgacatccagatgacacagagccctagcagcctgtctgccagcgtgggagacagagtgaccatcacatgcaaggccagcgaccacatcaacaactggctggcctggtatcagcagaagcctggacaggcccctaagctgctgatctacggcgctaccacactggaaacaggcgtgcccagcagattttctggcagcggctctggcaccgactacaccctgacaatatccagcctccagcctgaggacttcgccacctactactgtcagcagagctggaacaccccttggacattcggccagggcaccaagctggaaatcaagagactcgaggacctgaagaacgtgttcccacctgaggtggccgtgttcgagcctagcgaggccgagatcagccacacccagaaagccaccctcgtgtgcctggctaccggcttctaccccgaccatgtggaactgtcttggtgggtcaacggcaaagaggtgcacagcggcgtgtctaccgacccccagccactgaaagaacagcccgccctgaacgacagccggtactgcctgagcagcagactgagagtgtccgccaccttctggcagaacccccggaaccacttcagatgccaggtgcagttctacggcctgagcgagaacgacgagtggacccaggacagagccaagcccgtgacccagatcgtgtctgccgaagcctggggcagagccgattgcggatcccaggctcagagcgattgcagctgtagcacagtgtctccaggcgtgctggccggaattgtgatgggcgatctggtgctgacagtgctgattgccctggccgtgtacttcctgggtagactggtgcctagaggaagaggcgctgccgaagccgccacaagaaagcagagaatcaccgagacagagagcccctaccaagagctgcaaggccagagaagcgacgtgtacagcgacctgaatacccagcggccttactacaaaagcactagtagagtgaagttcagcagaagcgccgacgcccctgcctaccagcagggacagaaccaactgtacaacgagctgaacctgggcagacgggaagagtacgacgtgctggacaagcggagaggcagggaccctgagatgggcggaaagccccagcggagaaagaacccccaggaaggactgtataacgaactccagaaagacaagatggccgaagcctacagcgagatcggcatgaagggcgagcggagaagaggcaagggccacgatggcctgtaccagggcctgagcaccgccaccaaggacacctatgacgccctgcacatgcaggccctgcctccaagaagggccaagcgatctggatctggagcaacaaacttctcactactcaaacaagcaggtgacgtggaggagaatcccgggcctatggactggatttggcgcatccttttccttgtcggcgctgctaccggcgcgcattccgggcccgaagtgcaactggttgaatccggtggcggcctggtgcaagcaggcggatctctcagacttagctgtgccgcctccggcagaaccttcacaatgggatggtttaggcaggctccagggaaagagagagagttcgtcgccgccatctctctgtctcccacactggcctactacgccgactctgtgaaaggccggttcaccatctccagagataatgccaagaacaccgtggtgctgcaaatgaactctctgaaacccgaggatacagccctgtactattgtgccgctgaccggaagtccgtgatgagcatcagacccgattactggggacagggcacacaagtcacagtgtcctctggatccggcggcggaggatctggcggaggcggatctgggggcggaggctctttcgaacaagttcagcttcaacagcctggcgctgagctggtcaaacctggcgcttctgtgaagatgagctgcaaagccagcggctacgccttcagcagctactggatcaactggatgaagcagaaacccggccagggactcgaatggatcggccaaatctatcccggcgacggcgacaccaactacaacggcaagttcaagggcagagccacactgaccgccgatacctctagcagcacagcctacatgcagctgagcagcctgaccagcgaagatagcgccgtgtacttctgtgcccggtccatcacaacagtcgtgggctgcgctatggactattggggccagggaacaagcgtgaccgtgtctagtacgcgtatccagaaccctgatcctgccgtgtaccagctgcgggatagcaagagcagcgacaagagcgtgtgtctgttcaccgacttcgacagccagaccaacgtgtcccagagcaaggactccgacgtgtacatcaccgataagaccgtgctggacatgcggagcatggacttcaagagcaactccgccgtggcctggtccaacaagtccgatttcgcctgcgccaacgccttcaacaacagcattatccccgaggacacattcttcccaagccccgagagcagctgcggtacccaggcacagtctgactgtagctgctccacagttagccctggcgttctggctggcatcgttatgggcgacctcgtcctgactgtcctgatcgctctggcagtgtattttctcggacggctggtcccaagaggaaggggagcagctgaagctgctacccggaagcagcggatcacagagactgagtctccataccaagaactccagggacagagatccgatgtgtactccgacctgaacacacagaggccctattataagagctctagacgggttaagttttccagatccgcagacgcacccgcttaccaacaagggcagaaccaactctacaatgaacttaatttggggcggagggaagagtacgacgttctggacaaaaggaggggacgagatcccgagatgggcggaaagcctcagcgaaggaagaatccgcaagaggggctttataacgaactccagaaagataaaatggcagaagcctatagtgagattgggatgaagggagaaaggaggaggggtaaaggtcacgatgggttgtaccaaggattgagcacagccactaaagatacctatgatgcgctccacatgcaggccctgccgccaagacgcgccaagagaagcggatctggcgtgaagcagaccctgaatttcgacctgctgaagctggctggcgacgtggaatccaacccaggccctggccatatgaccgagtacaagcccacggtgcgcctcgccacccgcgacgacgtccccagggccgtacgcaccctcgccgccgcgttcgccgactaccccgccacgcgccacaccgtcgatccggaccgccacatcgagcgggtcaccgagctgcaagaactcttcctcacgcgcgtcgggctcgacatcggcaaggtgtgggtcgcggacgacggcgccgcggtggcggtctggaccacgccggagagcgtcgaagcgggggcggtgttcgccgagatcggcccgcgcatggccgagttgagcggttcccggctggccgcgcagcaacagatggaaggcctcctggcgccgcaccggcccaaggagcccgcgtggttcctggccaccgtcggcgtctcgcccgaccaccagggcaagggtctgggcagcgccgtcgtgctccccggagtggaggcggccgagcgcgccggggtgcccgccttcctggagacctccgcgccccgcaacctccccttctacgagcggctcggcttcaccgtcaccgccgacgtcgaggtgcccgaaggaccgcgcacctggtgcatgacccgcaagcccggtgcctga

SEQ ID NO: 2140 - DNA, 3519 bp, Artificial Sequence
  Synthetic Polynucleotide
atggccttaccagtgaccgccttgctcctgccgctggccttgctgctccacgccgccaggccggaagtgcagctggttgaatctggcggaggactggttcaggctggcggatctctgagactgtcttgtgccgccagcggcagaacctttagcatgggctggtttagacaggcccctggcaaagagagagagttcgtcgccgccatcacatactctggcggcagcccttactacgccgactctgtgaagggcagattcaccatcagccgggacaacgccaagaacaccgtgtacctccagatgaacagcctgaagcctgaggacaccgccgtgtactactgcgccgccaatccaacatacggcagcgactggaacgccgagaattggggccagggaacccaagtgacagtgtctagcctcgaggacctgaagaacgtgttcccacctgaggtggccgtgttcgagcctagcgaggccgagatcagccacacccagaaagccaccctcgtgtgcctggctaccggcttctaccccgaccatgtggaactgtcttggtgggtcaacggcaaagaggtgcacagcggcgtgtctaccgacccccagccactgaaagaacagcccgccctgaacgacagccggtactgcctgagcagcagactgagagtgtccgccaccttctggcagaacccccggaaccacttcagatgccaggtgcagttctacggcctgagcgagaacgacgagtggacccaggacagagccaagcccgtgacccagatcgtgtctgccgaagcctggggcagagccgattgcggatcccaggctcagagcgattgcagctgtagcacagtgtctccaggcgtgctggccggaattgtgatgggcgatctggtgctgacagtgctgattgccctggccgtgtacttcctgggtagactggtgcctagaggaagaggcgctgccgaagccgccacaagaaagcagagaatcaccgagacagagagcccctaccaagagctgcaaggccagagaagcgacgtgtacagcgacctgaatacccagcggccttactacaaaagcactagtagagtgaagttcagcagaagcgccgacgcccctgcctaccagcagggacagaaccaactgtacaacgagctgaacctgggcagacgggaagagtacgacgtgctggacaagcggagaggcagggaccctgagatgggcggaaagccccagcggagaaagaacccccaggaaggactgtataacgaactccagaaagacaagatggccgaagcctacagcgagatcggcatgaagggcgagcggagaagaggcaagggccacgatggcctgtaccagggcctgagcaccgccaccaaggacacctatgacgccctgcacatgcaggccctgcctccaagaagggccaagcgatctggatctggagcaacaaacttctcactactcaaacaagcaggtgacgtggaggagaatcccgggcctatggactggatttggcgcatccttttccttgtcggcgctgctaccggcgcgcattccgggcccgaagtgcaactggttgaatccggtggcggcctggtgcaagcaggcggatctctcagacttagctgtgccgcctccggcagaaccttcacaatgggatggtttaggcaggctccagggaaagagagagagttcgtcgccgccatctctctgtctcccacactggcctactacgccgactctgtgaaaggccggttcaccatctccagagataatgccaagaacaccgtggtgctgcaaatgaactctctgaaacccgaggatacagccctgtactattgtgccgctgaccggaagtccgtgatgagcatcagacccgattactggggacagggcacacaagtcacagtgtcctctacgcgtatccagaaccctgatcctgccgtgtaccagctgcgggatagcaagagcagcgacaagagcgtgtgtctgttcaccgacttcgacagccagaccaacgtgtcccagagcaaggactccgacgtgtacatcaccgataagaccgtgctggacatgcggagcatggacttcaagagcaactccgccgtggcctggtccaacaagtccgatttcgcctgcgccaacgccttcaacaacagcattatccccgaggacacattcttcccaagccccgagagcagctgcggtacccaggcacagtctgactgtagctgctccacagttagccctggcgttctggctggcatcgttatgggcgacctcgtcctgactgtcctgatcgctctggcagtgtattttctcggacggctggtcccaagaggaaggggagcagctgaagctgctacccggaagcagcggatcacagagactgagtctccataccaagaactccagggacagagatccgatgtgtactccgacctgaacacacagaggccctattataagagctctagacgggttaagttttccagatccgcagacgcacccgcttaccaacaagggcagaaccaactctacaatgaacttaatttggggcggagggaagagtacgacgttctggacaaaaggaggggacgagatcccgagatgggcggaaagcctcagcgaaggaagaatccgcaagaggggctttataacgaactccagaaagataaaatggcagaagcctatagtgagattgggatgaagggagaaaggaggaggggtaaaggtcacgatgggttgtaccaaggattgagcacagccactaaagatacctatgatgcgctccacatgcaggccctgccgccaagacgcgccaagagaagcggatctggcgtgaagcagaccctgaatttcgacctgctgaagctggctggcgacgtggaatccaacccaggccctggccatatgaccgagtacaagcccacggtgcgcctcgccacccgcgacgacgtccccagggccgtacgcaccctcgccgccgcgttcgccgactaccccgccacgcgccacaccgtcgatccggaccgccacatcgagcgggtcaccgagctgcaagaactcttcctcacgcgcgtcgggctcgacatcggcaaggtgtgggtcgcggacgacggcgccgcggtggcggtctggaccacgccggagagcgtcgaagcgggggcggtgttcgccgagatcggcccgcgcatggccgagttgagcggttcccggctggccgcgcagcaacagatggaaggcctcctggcgccgcaccggcccaaggagcccgcgtggttcctggccaccgtcggcgtctcgcccgaccaccagggcaagggtctgggcagcgccgtcgtgctccccggagtggaggcggccgagcgcgccggggtgcccgccttcctggagacctccgcgccccgcaacctccccttctacgagcggctcggcttcaccgtcaccgccgacgtcgaggtgcccgaaggaccgcgcacctggtgcatgacccgcaagcccggtgcctga

SEQ ID NO: 2141 - DNA, 1794 bp, Artificial Sequence
  Synthetic Polynucleotide
atggccttaccagtgaccgccttgctcctgccgctggccttgctgctccacgccgccaggccggcatgcgaagtgcagctgcttgaaagtggcggcggactgattcagcctggcggatctctgagactgagctgtgccgccagcggcttcaccttttctagccacgccatgacctgggtccgacaggcacctggaaaagggcttgaatgggtgtccgccatcagcggctctggcgattacacacactacgccgacagcgtgaagggcagattcaccatcagcagagacaacagcaagaacaccgtgtacctccagatgaacagcctgagagccgaggacagcgccgtgtattattgcgccaaggatgaggatggcggcagcctgcttggacacagaggacaaggcaccctggtcaccgtttcttccggtaccggcggaggcggatctggcggcggaggtagcggtggcggaggatctgaattcggatctctcgagcaggctcagagcgattgcagctgtagcacagtgtctccaggcgtgctggccggaattgtgatgggcgatctggtgctgacagtgctgattgccctggccgtgtacttcctgggtagactggtgcctagaggaagaggcgctgccgaagccgccacaagaaagcagagaatcaccgagacagagagcccctaccaagagctgcaaggccagagaagcgacgtgtacagcgacctgaatacccagcggccttactacaaaagcactagtagagtgaagttcagcagaagcgccgacgcccctgcctaccagcagggacagaaccaactgtacaacgagctgaacctgggcagacgggaagagtacgacgtgctggacaagcggagaggcagggaccctgagatgggcggaaagccccagcggagaaagaacccccaggaaggactgtataacgaactccagaaagacaagatggccgaagcctacagcgagatcggcatgaagggcgagcggagaagaggcaagggccacgatggcctgtaccagggcctgagcaccgccaccaaggacacctatgacgccctgcacatgcaggccctgcctccaagaagggccaagcgatctggatctggagcaacaaacttctcactactcaaacaagcaggtgacgtggaggagaatcccgggcctactagaggccatatgaccgagtacaagcccacggtgcgcctcgccacccgcgacgacgtccccagggccgtacgcaccctcgccgccgcgttcgccgactaccccgccacgcgccacaccgtcgatccggaccgccacatcgagcgggtcaccgagctgcaagaactcttcctcacgcgcgtcgggctcgacatcggcaaggtgtgggtcgcggacgacggcgccgcggtggcggtctggaccacgccggagagcgtcgaagcgggggcggtgttcgccgagatcggcccgcgcatggccgagttgagcggttcccggctggccgcgcagcaacagatggaaggcctcctggcgccgcaccggcccaaggagcccgcgtggttcctggccaccgtcggcgtctcgcccgaccaccagggcaagggtctgggcagcgccgtcgtgctccccggagtggaggcggccgagcgcgccggggtgcccgccttcctggagacctccgcgccccgcaacctccccttctacgagcggctcggcttcaccgtcaccgccgacgtcgaggtgcccgaaggaccgcgcacctggtgcatgacccgcaagcccggtgcctga

SEQ ID NO: 2142 - DNA, 2778 bp, Artificial Sequence
  Synthetic Polynucleotide
atggccttaccagtgaccgccttgctcctgccgctggccttgctgctccacgccgccaggccggacatccagatgacacagagccctagcagcctgtctgccagcgtgggagacagagtgaccatcacatgcaaggccagcgaccacatcaacaactggctggcctggtatcagcagaagcctggacaggcccctaagctgctgatctacggcgctaccacactggaaacaggcgtgcccagcagattttctggcagcggctctggcaccgactacaccctgacaatatccagcctccagcctgaggacttcgccacctactactgtcagcagagctggaacaccccttggacattcggccagggcaccaagctggaaatcaagagactcgagacaacacctggcgagagaagtagcctgcctgccttctatcctggcaccagcggctcttgttctggctgtggatctctgagcctgcctctgctggctggactggttgctgctgatgctgtggcctctctgctgattgtgggagccgtgttcctgtgcgccagacctagaagaagccccgctcaagaggacggcaaggtgtacatcaacatgcccggcagaggaagcactagtagagtgaagttcagcagaagcgccgacgcccctgcctaccagcagggacagaaccaactgtacaacgagctgaacctgggcagacgggaagagtacgacgtgctggacaagcggagaggcagggaccctgagatgggcggaaagccccagcggagaaagaacccccaggaaggactgtataacgaactccagaaagacaagatggccgaagcctacagcgagatcggcatgaagggcgagcggagaagaggcaagggccacgatggcctgtaccagggcctgagcaccgccaccaaggacacctatgacgccctgcacatgcaggccctgcctccaagaagggccaagcgatctggatctggagcaacaaacttctcactactcaaacaagcaggtgacgtggaggagaatcccgggcctatggactggatttggcgcatccttttccttgtcggcgctgctaccggcgcgcattccttcgaacaagttcagcttcaacagcctggcgctgagctggtcaaacctggcgcttctgtgaagatgagctgcaaagccagcggctacgccttcagcagctactggatcaactggatgaagcagaaacccggccagggactcgaatggatcggccaaatctatcccggcgacggcgacaccaactacaacggcaagttcaagggcagagccacactgaccgccgatacctctagcagcacagcctacatgcagctgagcagcctgaccagcgaagatagcgccgtgtacttctgtgcccggtccatcacaacagtcgtgggctgcgctatggactattggggccagggaacaagcgtgaccgtgtctagtacgcgtcaggcacagtctgactgtagcagctccacagttagccctggcgttctggctggcatcgttatgggcgacctcgtcctgactgtcctgatcgctctggcagtgtattttctcggacggctggtcccaagaggaaggggagcagctgaagctgctacccggaagcagcggatcacagagactgagtctccataccaagaactccagggacagagatccgatgtgtactccgacctgaacacacagaggccctattataagagctctagacgggttaagttttccagatccgcagacgcacccgcttaccaacaagggcagaaccaactctacaatgaacttaatttggggcggagggaagagtacgacgttctggacaaaaggaggggacgagatcccgagatgggcggaaagcctcagcgaaggaagaatccgcaagaggggctttataacgaactccagaaagataaaatggcagaagcctatagtgagattgggatgaagggagaaaggaggaggggtaaaggtcacgatgggttgtaccaaggattgagcacagccactaaagatacctatgatgcgctccacatgcaggccctgccgccaagacgcgccaagagaagcggatctggcgtgaagcagaccctgaatttcgacctgctgaagctggctggcgacgtggaatccaacccaggccctggccatatgaccgagtacaagcccacggtgcgcctcgccacccgcgacgacgtccccagggccgtacgcaccctcgccgccgcgttcgccgactaccccgccacgcgccacaccgtcgatccggaccgccacatcgagcgggtcaccgagctgcaagaactcttcctcacgcgcgtcgggctcgacatcggcaaggtgtgggtcgcggacgacggcgccgcggtggcggtctggaccacgccggagagcgtcgaagcgggggcggtgttcgccgagatcggcccgcgcatggccgagttgagcggttcccggctggccgcgcagcaacagatggaaggcctcctggcgccgcaccggcccaaggagcccgcgtggttcctggccaccgtcggcgtctcgcccgaccaccagggcaagggtctgggcagcgccgtcgtgctccccggagtggaggcggccgagcgcgccggggtgcccgccttcctggagacctccgcgccccgcaacctccccttctacgagcggctcggcttcaccgtcaccgccgacgtcgaggtgcccgaaggaccgcgcacctggtgcatgacccgcaagcccggtgcctga

SEQ ID NO: 2143 - DNA, 2934 bp, Artificial Sequence
  Synthetic Polynucleotide
atggccttaccagtgaccgccttgctcctgccgctggccttgctgctccacgccgccaggccggcatgcgaagtgcagctgcttgaaagtggcggcggactgattcagcctggcggatctctgagactgagctgtgccgccagcggcttcaccttttctagccacgccatgacctgggtccgacaggcacctggaaaagggcttgaatgggtgtccgccatcagcggctctggcgattacacacactacgccgacagcgtgaagggcagattcaccatcagcagagacaacagcaagaacaccgtgtacctccagatgaacagcctgagagccgaggacagcgccgtgtattattgcgccaaggatgaggatggcggcagcctgcttggacacagaggacaaggcaccctggtcaccgtttcttccggtaccggcggaggcggatctggcggcggaggtagcggtggcggaggatctgaattcggatctctcgagacaacacctggcgagagaagtagcctgcctgccttctatcctggcaccagcggctcttgttctggctgtggatctctgagcctgcctctgctggctggactggttgctgctgatgctgtggcctctctgctgattgtgggagccgtgttcctgtgcgccagacctagaagaagccccgctcaagaggacggcaaggtgtacatcaacatgcccggcagaggaagcactagtagagtgaagttcagcagaagcgccgacgcccctgcctaccagcagggacagaaccaactgtacaacgagctgaacctgggcagacgggaagagtacgacgtgctggacaagcggagaggcagggaccctgagatgggcggaaagccccagcggagaaagaacccccaggaaggactgtataacgaactccagaaagacaagatggccgaagcctacagcgagatcggcatgaagggcgagcggagaagaggcaagggccacgatggcctgtaccagggcctgagcaccgccaccaaggacacctatgacgccctgcacatgcaggccctgcctccaagaagggccaagcgatctggatctggagcaacaaacttctcactactcaaacaagcaggtgacgtggaggagaatcccgggcctatggactggatttggcgcatccttttccttgtcggcgctgctaccggcgcgcattccgggcccgaagtgcagctggttgaatctggcggaggactggttcaggctggcggatctctgagactgtcttgtgccgccagcggcagaacctttagcatgggctggtttagacaggcccctggcaaagagagagagttcgtcgccgccatcacatactctggcggcagcccttactacgccgactctgtgaagggcagattcaccatcagccgggacaacgccaagaacaccgtgtacctccagatgaacagcctgaagcctgaggacaccgccgtgtactactgcgccgccaatccaacatacggcagcgactggaacgccgagaattggggccagggaacccaagtgacagtgtctagcggatccggcggcggaggatctggcggaggcggatctgggggcggaggctctttcgaaggcagcacgcgtcaggcacagtctgactgtagcagctccacagttagccctggcgttctggctggcatcgttatgggcgacctcgtcctgactgtcctgatcgctctggcagtgtattttctcggacggctggtcccaagaggaaggggagcagctgaagctgctacccggaagcagcggatcacagagactgagtctccataccaagaactccagggacagagatccgatgtgtactccgacctgaacacacagaggccctattataagagctctagacgggttaagttttccagatccgcagacgcacccgcttaccaacaagggcagaaccaactctacaatgaacttaatttggggcggagggaagagtacgacgttctggacaaaaggaggggacgagatcccgagatgggcggaaagcctcagcgaaggaagaatccgcaagaggggctttataacgaactccagaaagataaaatggcagaagcctatagtgagattgggatgaagggagaaaggaggaggggtaaaggtcacgatgggttgtaccaaggattgagcacagccactaaagatacctatgatgcgctccacatgcaggccctgccgccaagacgcgccaagagaagcggatctggcgtgaagcagaccctgaatttcgacctgctgaagctggctggcgacgtggaatccaacccaggccctggccatatgaccgagtacaagcccacggtgcgcctcgccacccgcgacgacgtccccagggccgtacgcaccctcgccgccgcgttcgccgactaccccgccacgcgccacaccgtcgatccggaccgccacatcgagcgggtcaccgagctgcaagaactcttcctcacgcgcgtcgggctcgacatcggcaaggtgtgggtcgcggacgacggcgccgcggtggcggtctggaccacgccggagagcgtcgaagcgggggcggtgttcgccgagatcggcccgcgcatggccgagttgagcggttcccggctggccgcgcagcaacagatggaaggcctcctggcgccgcaccggcccaaggagcccgcgtggttcctggccaccgtcggcgtctcgcccgaccaccagggcaagggtctgggcagcgccgtcgtgctccccggagtggaggcggccgagcgcgccggggtgcccgccttcctggagacctccgcgccccgcaacctccccttctacgagcggctcggcttcaccgtcaccgccgacgtcgaggtgcccgaaggaccgcgcacctggtgcatgacccgcaagcccggtgcctga

SEQ ID NO: 2144 - DNA, 3381 bp, Artificial Sequence
  Synthetic Polynucleotide
atggccttaccagtgaccgccttgctcctgccgctggccttgctgctccacgccgccaggccggacatccagatgacacagagccctagcagcctgtctgccagcgtgggagacagagtgaccatcacatgcaaggccagcgaccacatcaacaactggctggcctggtatcagcagaagcctggacaggcccctaagctgctgatctacggcgctaccacactggaaacaggcgtgcccagcagattttctggcagcggctctggcaccgactacaccctgacaatatccagcctccagcctgaggacttcgccacctactactgtcagcagagctggaacaccccttggacattcggccagggcaccaagctggaaatcaagagactcgagggacagcctaaggccaatcctaccgtgacactgttccctccaagcagcgaagaactccaggccaacaaggccacacttgtgtgcctgatctccgacttctaccctggggctgtgacagtggcttggaaggccgatggatctcctgtgaaagccggcgtggaaaccaccaagccatccaagcagagcaacaacaaatacgccgccagctcctacctgagcctgacacctgagcagtggaagtcccacagatcctacagctgccaagtgacccacgaaggcagcaccgtggaaaagacagtggcccctacagagtgcagcggatccacaacacctggcgagagaagtagcctgcctgccttctatcctggcaccagcggctcttgttctggctgtggatctctgagcctgcctctgctggctggactggttgctgctgatgctgtggcctctctgctgattgtgggagccgtgttcctgtgcgccagacctagaagaagccccgctcaagaggacggcaaggtgtacatcaacatgcccggcagaggaagcactagtagagtgaagttcagcagaagcgccgacgcccctgcctaccagcagggacagaaccaactgtacaacgagctgaacctgggcagacgggaagagtacgacgtgctggacaagcggagaggcagggaccctgagatgggcggaaagccccagcggagaaagaacccccaggaaggactgtataacgaactccagaaagacaagatggccgaagcctacagcgagatcggcatgaagggcgagcggagaagaggcaagggccacgatggcctgtaccagggcctgagcaccgccaccaaggacacctatgacgccctgcacatgcaggccctgcctccaagaagggccaagcgatctggatctggagcaacaaacttctcactactcaaacaagcaggtgacgtggaggagaatcccgggcctatggactggatttggcgcatccttttccttgtcggcgctgctaccggcgcgcattccttcgaacaagttcagcttcaacagcctggcgctgagctggtcaaacctggcgcttctgtgaagatgagctgcaaagccagcggctacgccttcagcagctactggatcaactggatgaagcagaaacccggccagggactcgaatggatcggccaaatctatcccggcgacggcgacaccaactacaacggcaagttcaagggcagagccacactgaccgccgatacctctagcagcacagcctacatgcagctgagcagcctgaccagcgaagatagcgccgtgtacttctgtgcccggtccatcacaacagtcgtgggctgcgctatggactattggggccagggaacaagcgtgaccgtgtctagtacgcgtgcctctacaaagggaccctccgtgtttcctctggctcccagcagcaagtctacaagcggaggaacagccgctctgggctgcctggtcaaggattactttcccgagcctgtgaccgtgtcctggaatagcggagcactgacaagcggcgtgcacacctttccagccgtgctgcaaagcagcggcctgtactctctgagcagcgtggtcacagtgcctagctctagcctgggcacccagacctacatctgcaatgtgaaccacaagcctagcaacaccaaggtggacaagagagtggaacccaagagctgtggtacccaggcacagtctgactgtagcagctccacagttagccctggcgttctggctggcatcgttatgggcgacctcgtcctgactgtcctgatcgctctggcagtgtattttctcggacggctggtcccaagaggaaggggagcagctgaagctgctacccggaagcagcggatcacagagactgagtctccataccaagaactccagggacagagatccgatgtgtactccgacctgaacacacagaggccctattataagagctctagacgggttaagttttccagatccgcagacgcacccgcttaccaacaagggcagaaccaactctacaatgaacttaatttggggcggagggaagagtacgacgttctggacaaaaggaggggacgagatcccgagatgggcggaaagcctcagcgaaggaagaatccgcaagaggggctttataacgaactccagaaagataaaatggcagaagcctatagtgagattgggatgaagggagaaaggaggaggggtaaaggtcacgatgggttgtaccaaggattgagcacagccactaaagatacctatgatgcgctccacatgcaggccctgccgccaagacgcgccaagagaagcggatctggcgtgaagcagaccctgaatttcgacctgctgaagctggctggcgacgtggaatccaacccaggccctggccatatggctacctacgaggtgctgtgcgaggtggcaagaaagctgggcaccgacgacagagaagtggtgctgttcctgctgaacgtgttcatccctcagcctacactggcccagctgatcggtgcactgagagccctgaaagaggaaggccggctgacctttcctctgctggccgaatgcctgttcagagccggaagaagggatctgctgcgggacctgctgcatctggaccccagatttctggaaagacacctggccggcaccatgagctacttcagcccttaccagctgaccgtgctgcacgttgacggcgaactgtgcgccagagatattcggagcctgatcttcctgagcaaggacaccatcggcagccggtctacccctcagacatttctgcactgggtgtactgcatggaaaacctggacctgctcggccccacagatgtggatgccctgatgtccatgctgagaagcctgagcagagtggacctccagagacaggtgcagacactgatgggactgcacctgagcggacctagccacagccagcactacagacacacccct

SEQ ID NO: 2145 - DNA, 3540 bp, Artificial Sequence
  Synthetic Polynucleotide
atggccttaccagtgaccgccttgctcctgccgctggccttgctgctccacgccgccaggccggacatccagatgacacagagccctagcagcctgtctgccagcgtgggagacagagtgaccatcacatgcaaggccagcgaccacatcaacaactggctggcctggtatcagcagaagcctggacaggcccctaagctgctgatctacggcgctaccacactggaaacaggcgtgcccagcagattttctggcagcggctctggcaccgactacaccctgacaatatccagcctccagcctgaggacttcgccacctactactgtcagcagagctggaacaccccttggacattcggccagggcaccaagctggaaatcaagagactcgagggacagcctaaggccaatcctaccgtgacactgttccctccaagcagcgaagaactccaggccaacaaggccacacttgtgtgcctgatctccgacttctaccctggggctgtgacagtggcttggaaggccgatggatctcctgtgaaagccggcgtggaaaccaccaagccatccaagcagagcaacaacaaatacgccgccagctcctacctgagcctgacacctgagcagtggaagtcccacagatcctacagctgccaagtgacccacgaaggcagcaccgtggaaaagacagtggcccctacagagtgcagcggatccacaacacctggcgagagaagtagcctgcctgccttctatcctggcaccagcggctcttgttctggctgtggatctctgagcctgcctctgctggctggactggttgctgctgatgctgtggcctctctgctgattgtgggagccgtgttcctgtgcgccagacctagaagaagccccgctcaagaggacggcaaggtgtacatcaacatgcccggcagaggaagcactagtagagtgaagttcagcagaagcgccgacgcccctgcctaccagcagggacagaaccaactgtacaacgagctgaacctgggcagacgggaagagtacgacgtgctggacaagcggagaggcagggaccctgagatgggcggaaagccccagcggagaaagaacccccaggaaggactgtataacgaactccagaaagacaagatggccgaagcctacagcgagatcggcatgaagggcgagcggagaagaggcaagggccacgatggcctgtaccagggcctgagcaccgccaccaaggacacctatgacgccctgcacatgcaggccctgcctccaagaagggccaagcgatctggatctggagcaacaaacttctcactactcaaacaagcaggtgacgtggaggagaatcccgggcctatggactggatttggcgcatccttttccttgtcggcgctgctaccggcgcgcattccttcgaacaagttcagcttcaacagcctggcgctgagctggtcaaacctggcgcttctgtgaagatgagctgcaaagccagcggctacgccttcagcagctactggatcaactggatgaagcagaaacccggccagggactcgaatggatcggccaaatctatcccggcgacggcgacaccaactacaacggcaagttcaagggcagagccacactgaccgccgatacctctagcagcacagcctacatgcagctgagcagcctgaccagcgaagatagcgccgtgtacttctgtgcccggtccatcacaacagtcgtgggctgcgctatggactattggggccagggaacaagcgtgaccgtgtctagtacgcgtgcctctacaaagggaccctccgtgtttcctctggctcccagcagcaagtctacaagcggaggaacagccgctctgggctgcctggtcaaggattactttcccgagcctgtgaccgtgtcctggaatagcggagcactgacaagcggcgtgcacacctttccagccgtgctgcaaagcagcggcctgtactctctgagcagcgtggtcacagtgcctagctctagcctgggcacccagacctacatctgcaatgtgaaccacaagcctagcaacaccaaggtggacaagagagtggaacccaagagctgtggtacccaggcacagtctgactgtagcagctccacagttagccctggcgttctggctggcatcgttatgggcgacctcgtcctgactgtcctgatcgctctggcagtgtattttctcggacggctggtcccaagaggaaggggagcagctgaagctgctacccggaagcagcggatcacagagactgagtctccataccaagaactccagggacagagatccgatgtgtactccgacctgaacacacagaggccctattataagagctctagacgggttaagttttccagatccgcagacgcacccgcttaccaacaagggcagaaccaactctacaatgaacttaatttggggcggagggaagagtacgacgttctggacaaaaggaggggacgagatcccgagatgggcggaaagcctcagcgaaggaagaatccgcaagaggggctttataacgaactccagaaagataaaatggcagaagcctatagtgagattgggatgaagggagaaaggaggaggggtaaaggtcacgatgggttgtaccaaggattgagcacagccactaaagatacctatgatgcgctccacatgcaggccctgccgccaagacgcgccaagagaagcggatctggcgtgaagcagaccctgaatttcgacctgctgaagctggctggcgacgtggaatccaacccaggccctggccatatgtccgactccaaggaggtccctagccttccatttttgcgacacttgctcgaagagttggacagccatgaggacagcttgctgctgtttctgtgtcacgacgcggccccgggctgcacgacggtcacgcaagctttgtgctcgcttagccaacagcgcaagctgaccctcgcggctctggtcgagatgctctacgtgctgcagcgtatggatcttctcaagagccgcttcgggctcagcaaggagggggccgagcaattgctgggcacaagctttctcacgcgctaccgcaagctcatggtttgcgtgggtgaggagctcgactcgagcgagctacgcgctctacgcttgttcgcgtgcaacctgaatccgagcctgagcacggcgctttctgagagcagccgctttgtcgagcttgtactcgcgcttgaaaacgtaggactcgtctcgccatcgagtgtttccgtgcttgcggacatgttgcgcactcttcggcgcctcgatttgtgccagcagcttgttgagtacgaacaacaagagcaagccaggtaccgttactgttacgcggcctcgccctcattgccagttcgtacgttacgtcgggggcacggcgcgagtgaacacgagcagctgtgcatgcccgtgcaagaatcctctgacagccccgagctgctgcgcacgcccgtacaagaatcctccagcgacagccccgagcaaacgact

SEQ ID NO: 2146 - DNA, 3417 bp, Artificial Sequence
  Synthetic Polynucleotide
atggccttaccagtgaccgccttgctcctgccgctggccttgctgctccacgccgccaggccggacatccagatgacacagagccctagcagcctgtctgccagcgtgggagacagagtgaccatcacatgcaaggccagcgaccacatcaacaactggctggcctggtatcagcagaagcctggacaggcccctaagctgctgatctacggcgctaccacactggaaacaggcgtgcccagcagattttctggcagcggctctggcaccgactacaccctgacaatatccagcctccagcctgaggacttcgccacctactactgtcagcagagctggaacaccccttggacattcggccagggcaccaagctggaaatcaagagactcgagggacagcctaaggccaatcctaccgtgacactgttccctccaagcagcgaagaactccaggccaacaaggccacacttgtgtgcctgatctccgacttctaccctggggctgtgacagtggcttggaaggccgatggatctcctgtgaaagccggcgtggaaaccaccaagccatccaagcagagcaacaacaaatacgccgccagctcctacctgagcctgacacctgagcagtggaagtcccacagatcctacagctgccaagtgacccacgaaggcagcaccgtggaaaagacagtggcccctacagagtgcagcggatccacaacacctggcgagagaagtagcctgcctgccttctatcctggcaccagcggctcttgttctggctgtggatctctgagcctgcctctgctggctggactggttgctgctgatgctgtggcctctctgctgattgtgggagccgtgttcctgtgcgccagacctagaagaagccccgctcaagaggacggcaaggtgtacatcaacatgcccggcagaggaagcactagtagagtgaagttcagcagaagcgccgacgcccctgcctaccagcagggacagaaccaactgtacaacgagctgaacctgggcagacgggaagagtacgacgtgctggacaagcggagaggcagggaccctgagatgggcggaaagccccagcggagaaagaacccccaggaaggactgtataacgaactccagaaagacaagatggccgaagcctacagcgagatcggcatgaagggcgagcggagaagaggcaagggccacgatggcctgtaccagggcctgagcaccgccaccaaggacacctatgacgccctgcacatgcaggccctgcctccaagaagggccaagcgatctggatctggagcaacaaacttctcactactcaaacaagcaggtgacgtggaggagaatcccgggcctatggactggatttggcgcatccttttccttgtcggcgctgctaccggcgcgcattccttcgaacaagttcagcttcaacagcctggcgctgagctggtcaaacctggcgcttctgtgaagatgagctgcaaagccagcggctacgccttcagcagctactggatcaactggatgaagcagaaacccggccagggactcgaatggatcggccaaatctatcccggcgacggcgacaccaactacaacggcaagttcaagggcagagccacactgaccgccgatacctctagcagcacagcctacatgcagctgagcagcctgaccagcgaagatagcgccgtgtacttctgtgcccggtccatcacaacagtcgtgggctgcgctatggactattggggccagggaacaagcgtgaccgtgtctagtacgcgtgcctctacaaagggaccctccgtgtttcctctggctcccagcagcaagtctacaagcggaggaacagccgctctgggctgcctggtcaaggattactttcccgagcctgtgaccgtgtcctggaatagcggagcactgacaagcggcgtgcacacctttccagccgtgctgcaaagcagcggcctgtactctctgagcagcgtggtcacagtgcctagctctagcctgggcacccagacctacatctgcaatgtgaaccacaagcctagcaacaccaaggtggacaagagagtggaacccaagagctgtggtacccaggcacagtctgactgtagcagctccacagttagccctggcgttctggctggcatcgttatgggcgacctcgtcctgactgtcctgatcgctctggcagtgtattttctcggacggctggtcccaagaggaaggggagcagctgaagctgctacccggaagcagcggatcacagagactgagtctccataccaagaactccagggacagagatccgatgtgtactccgacctgaacacacagaggccctattataagagctctagacgggttaagttttccagatccgcagacgcacccgcttaccaacaagggcagaaccaactctacaatgaacttaatttggggcggagggaagagtacgacgttctggacaaaaggaggggacgagatcccgagatgggcggaaagcctcagcgaaggaagaatccgcaagaggggctttataacgaactccagaaagataaaatggcagaagcctatagtgagattgggatgaagggagaaaggaggaggggtaaaggtcacgatgggttgtaccaaggattgagcacagccactaaagatacctatgatgcgctccacatgcaggccctgccgccaagacgcgccaagagaagcggatctggcgtgaagcagaccctgaatttcgacctgctgaagctggctggcgacgtggaatccaacccaggccctggccatatgaccgagtacaagcccacggtgcgcctcgccacccgcgacgacgtccccagggccgtacgcaccctcgccgccgcgttcgccgactaccccgccacgcgccacaccgtcgatccggaccgccacatcgagcgggtcaccgagctgcaagaactcttcctcacgcgcgtcgggctcgacatcggcaaggtgtgggtcgcggacgacggcgccgcggtggcggtctggaccacgccggagagcgtcgaagcgggggcggtgttcgccgagatcggcccgcgcatggccgagttgagcggttcccggctggccgcgcagcaacagatggaaggcctcctggcgccgcaccggcccaaggagcccgcgtggttcctggccaccgtcggcgtctcgcccgaccaccagggcaagggtctgggcagcgccgtcgtgctccccggagtggaggcggccgagcgcgccggggtgcccgccttcctggagacctccgcgccccgcaacctccccttctacgagcggctcggcttcaccgtcaccgccgacgtcgaggtgcccgaaggaccgcgcacctggtgcatgacccgcaagcccggtgcctga

SEQ ID NO: 2147 - DNA, 3828 bp, Artificial Sequence
  Synthetic Polynucleotide
atggccttaccagtgaccgccttgctcctgccgctggccttgctgctccacgccgccaggccggaagtgcagctggttgaatctggcggaggactggttcaggctggcggatctctgagactgtcttgtgccgccagcggcagaacctttagcatgggctggtttagacaggcccctggcaaagagagagagttcgtcgccgccatcacatactctggcggcagcccttactacgccgactctgtgaagggcagattcaccatcagccgggacaacgccaagaacaccgtgtacctccagatgaacagcctgaagcctgaggacaccgccgtgtactactgcgccgccaatccaacatacggcagcgactggaacgccgagaattggggccagggaacccaagtgacagtgtctagcggtaccggcggaggcggatctggcggcggaggtagcggtggcggaggatctgaattcgacatccagatgacacagagccctagcagcctgtctgccagcgtgggagacagagtgaccatcacatgcaaggccagcgaccacatcaacaactggctggcctggtatcagcagaagcctggacaggcccctaagctgctgatctacggcgctaccacactggaaacaggcgtgcccagcagattttctggcagcggctctggcaccgactacaccctgacaatatccagcctccagcctgaggacttcgccacctactactgtcagcagagctggaacaccccttggacattcggccagggcaccaagctggaaatcaagagactcgagggacagcctaaggccaatcctaccgtgacactgttccctccaagcagcgaagaactccaggccaacaaggccacacttgtgtgcctgatctccgacttctaccctggggctgtgacagtggcttggaaggccgatggatctcctgtgaaagccggcgtggaaaccaccaagccatccaagcagagcaacaacaaatacgccgccagctcctacctgagcctgacacctgagcagtggaagtcccacagatcctacagctgccaagtgacccacgaaggcagcaccgtggaaaagacagtggcccctacagagtgcagcggatccacaacacctggcgagagaagtagcctgcctgccttctatcctggcaccagcggctcttgttctggctgtggatctctgagcctgcctctgctggctggactggttgctgctgatgctgtggcctctctgctgattgtgggagccgtgttcctgtgcgccagacctagaagaagccccgctcaagaggacggcaaggtgtacatcaacatgcccggcagaggaagcactagtagagtgaagttcagcagaagcgccgacgcccctgcctaccagcagggacagaaccaactgtacaacgagctgaacctgggcagacgggaagagtacgacgtgctggacaagcggagaggcagggaccctgagatgggcggaaagccccagcggagaaagaacccccaggaaggactgtataacgaactccagaaagacaagatggccgaagcctacagcgagatcggcatgaagggcgagcggagaagaggcaagggccacgatggcctgtaccagggcctgagcaccgccaccaaggacacctatgacgccctgcacatgcaggccctgcctccaagaagggccaagcgatctggatctggagcaacaaacttctcactactcaaacaagcaggtgacgtggaggagaatcccgggcctatggactggatttggcgcatccttttccttgtcggcgctgctaccggcgcgcattccttcgaacaagttcagcttcaacagcctggcgctgagctggtcaaacctggcgcttctgtgaagatgagctgcaaagccagcggctacgccttcagcagctactggatcaactggatgaagcagaaacccggccagggactcgaatggatcggccaaatctatcccggcgacggcgacaccaactacaacggcaagttcaagggcagagccacactgaccgccgatacctctagcagcacagcctacatgcagctgagcagcctgaccagcgaagatagcgccgtgtacttctgtgcccggtccatcacaacagtcgtgggctgcgctatggactattggggccagggaacaagcgtgaccgtgtctagtacgcgtgcctctacaaagggaccctccgtgtttcctctggctcccagcagcaagtctacaagcggaggaacagccgctctgggctgcctggtcaaggattactttcccgagcctgtgaccgtgtcctggaatagcggagcactgacaagcggcgtgcacacctttccagccgtgctgcaaagcagcggcctgtactctctgagcagcgtggtcacagtgcctagctctagcctgggcacccagacctacatctgcaatgtgaaccacaagcctagcaacaccaaggtggacaagagagtggaacccaagagctgtggtacccaggcacagtctgactgtagcagctccacagttagccctggcgttctggctggcatcgttatgggcgacctcgtcctgactgtcctgatcgctctggcagtgtattttctcggacggctggtcccaagaggaaggggagcagctgaagctgctacccggaagcagcggatcacagagactgagtctccataccaagaactccagggacagagatccgatgtgtactccgacctgaacacacagaggccctattataagagctctagacgggttaagttttccagatccgcagacgcacccgcttaccaacaagggcagaaccaactctacaatgaacttaatttggggcggagggaagagtacgacgttctggacaaaaggaggggacgagatcccgagatgggcggaaagcctcagcgaaggaagaatccgcaagaggggctttataacgaactccagaaagataaaatggcagaagcctatagtgagattgggatgaagggagaaaggaggaggggtaaaggtcacgatgggttgtaccaaggattgagcacagccactaaagatacctatgatgcgctccacatgcaggccctgccgccaagacgcgccaagagaagcggatctggcgtgaagcagaccctgaatttcgacctgctgaagctggctggcgacgtggaatccaacccaggccctggccatatgaccgagtacaagcccacggtgcgcctcgccacccgcgacgacgtccccagggccgtacgcaccctcgccgccgcgttcgccgactaccccgccacgcgccacaccgtcgatccggaccgccacatcgagcgggtcaccgagctgcaagaactcttcctcacgcgcgtcgggctcgacatcggcaaggtgtgggtcgcggacgacggcgccgcggtggcggtctggaccacgccggagagcgtcgaagcgggggcggtgttcgccgagatcggcccgcgcatggccgagttgagcggttcccggctggccgcgcagcaacagatggaaggcctcctggcgccgcaccggcccaaggagcccgcgtggttcctggccaccgtcggcgtctcgcccgaccaccagggcaagggtctgggcagcgccgtcgtgctccccggagtggaggcggccgagcgcgccggggtgcccgccttcctggagacctccgcgccccgcaacctccccttctacgagcggctcggcttcaccgtcaccgccgacgtcgaggtgcccgaaggaccgcgcacctggtgcatgacccgcaagcccggtgcctga

SEQ ID NO: 2148 - DNA, 4239 bp, Artificial Sequence
  Synthetic Polynucleotide
atggccttaccagtgaccgccttgctcctgccgctggccttgctgctccacgccgccaggccggaagtgcagctggttgaatctggcggaggactggttcaggctggcggatctctgagactgtcttgtgccgccagcggcagaacctttagcatgggctggtttagacaggcccctggcaaagagagagagttcgtcgccgccatcacatactctggcggcagcccttactacgccgactctgtgaagggcagattcaccatcagccgggacaacgccaagaacaccgtgtacctccagatgaacagcctgaagcctgaggacaccgccgtgtactactgcgccgccaatccaacatacggcagcgactggaacgccgagaattggggccagggaacccaagtgacagtgtctagcggtaccggcggaggcggatctggcggcggaggtagcggtggcggaggatctgaattcgacatccagatgacacagagccctagcagcctgtctgccagcgtgggagacagagtgaccatcacatgcaaggccagcgaccacatcaacaactggctggcctggtatcagcagaagcctggacaggcccctaagctgctgatctacggcgctaccacactggaaacaggcgtgcccagcagattttctggcagcggctctggcaccgactacaccctgacaatatccagcctccagcctgaggacttcgccacctactactgtcagcagagctggaacaccccttggacattcggccagggcaccaagctggaaatcaagagactcgagggacagcctaaggccaatcctaccgtgacactgttccctccaagcagcgaagaactccaggccaacaaggccacacttgtgtgcctgatctccgacttctaccctggggctgtgacagtggcttggaaggccgatggatctcctgtgaaagccggcgtggaaaccaccaagccatccaagcagagcaacaacaaatacgccgccagctcctacctgagcctgacacctgagcagtggaagtcccacagatcctacagctgccaagtgacccacgaaggcagcaccgtggaaaagacagtggcccctacagagtgcagcggatccacaacacctggcgagagaagtagcctgcctgccttctatcctggcaccagcggctcttgttctggctgtggatctctgagcctgcctctgctggctggactggttgctgctgatgctgtggcctctctgctgattgtgggagccgtgttcctgtgcgccagacctagaagaagccccgctcaagaggacggcaaggtgtacatcaacatgcccggcagaggaagcactagtagagtgaagttcagcagaagcgccgacgcccctgcctaccagcagggacagaaccaactgtacaacgagctgaacctgggcagacgggaagagtacgacgtgctggacaagcggagaggcagggaccctgagatgggcggaaagccccagcggagaaagaacccccaggaaggactgtataacgaactccagaaagacaagatggccgaagcctacagcgagatcggcatgaagggcgagcggagaagaggcaagggccacgatggcctgtaccagggcctgagcaccgccaccaaggacacctatgacgccctgcacatgcaggccctgcctccaagaagggccaagcgatctggatctggagcaacaaacttctcactactcaaacaagcaggtgacgtggaggagaatcccgggcctatggactggatttggcgcatccttttccttgtcggcgctgctaccggcgcgcattccgggcccgaagtgcaactggttgaatccggtggcggcctggtgcaagcaggcggatctctcagacttagctgtgccgcctccggcagaaccttcacaatgggatggtttaggcaggctccagggaaagagagagagttcgtcgccgccatctctctgtctcccacactggcctactacgccgactctgtgaaaggccggttcaccatctccagagataatgccaagaacaccgtggtgctgcaaatgaactctctgaaacccgaggatacagccctgtactattgtgccgctgaccggaagtccgtgatgagcatcagacccgattactggggacagggcacacaagtcacagtgtcctctggatccggcggcggaggatctggcggaggcggatctgggggcggaggctctttcgaacaagttcagcttcaacagcctggcgctgagctggtcaaacctggcgcttctgtgaagatgagctgcaaagccagcggctacgccttcagcagctactggatcaactggatgaagcagaaacccggccagggactcgaatggatcggccaaatctatcccggcgacggcgacaccaactacaacggcaagttcaagggcagagccacactgaccgccgatacctctagcagcacagcctacatgcagctgagcagcctgaccagcgaagatagcgccgtgtacttctgtgcccggtccatcacaacagtcgtgggctgcgctatggactattggggccagggaacaagcgtgaccgtgtctagtacgcgtgcctctacaaagggaccctccgtgtttcctctggctcccagcagcaagtctacaagcggaggaacagccgctctgggctgcctggtcaaggattactttcccgagcctgtgaccgtgtcctggaatagcggagcactgacaagcggcgtgcacacctttccagccgtgctgcaaagcagcggcctgtactctctgagcagcgtggtcacagtgcctagctctagcctgggcacccagacctacatctgcaatgtgaaccacaagcctagcaacaccaaggtggacaagagagtggaacccaagagctgtggtacccaggcacagtctgactgtagcagctccacagttagccctggcgttctggctggcatcgttatgggcgacctcgtcctgactgtcctgatcgctctggcagtgtattttctcggacggctggtcccaagaggaaggggagcagctgaagctgctacccggaagcagcggatcacagagactgagtctccataccaagaactccagggacagagatccgatgtgtactccgacctgaacacacagaggccctattataagagctctagacgggttaagttttccagatccgcagacgcacccgcttaccaacaagggcagaaccaactctacaatgaacttaatttggggcggagggaagagtacgacgttctggacaaaaggaggggacgagatcccgagatgggcggaaagcctcagcgaaggaagaatccgcaagaggggctttataacgaactccagaaagataaaatggcagaagcctatagtgagattgggatgaagggagaaaggaggaggggtaaaggtcacgatgggttgtaccaaggattgagcacagccactaaagatacctatgatgcgctccacatgcaggccctgccgccaagacgcgccaagagaagcggatctggcgtgaagcagaccctgaatttcgacctgctgaagctggctggcgacgtggaatccaacccaggccctggccatatgaccgagtacaagcccacggtgcgcctcgccacccgcgacgacgtccccagggccgtacgcaccctcgccgccgcgttcgccgactaccccgccacgcgccacaccgtcgatccggaccgccacatcgagcgggtcaccgagctgcaagaactcttcctcacgcgcgtcgggctcgacatcggcaaggtgtgggtcgcggacgacggcgccgcggtggcggtctggaccacgccggagagcgtcgaagcgggggcggtgttcgccgagatcggcccgcgcatggccgagttgagcggttcccggctggccgcgcagcaacagatggaaggcctcctggcgccgcaccggcccaaggagcccgcgtggttcctggccaccgtcggcgtctcgcccgaccaccagggcaagggtctgggcagcgccgtcgtgctccccggagtggaggcggccgagcgcgccggggtgcccgccttcctggagacctccgcgccccgcaacctccccttctacgagcggctcggcttcaccgtcaccgccgacgtcgaggtgcccgaaggaccgcgcacctggtgcatgacccgcaagcccggtgcctga

SEQ ID NO: 2149 - DNA, 3438 bp, Artificial Sequence
  Synthetic Polynucleotide
atggccttaccagtgaccgccttgctcctgccgctggccttgctgctccacgccgccaggccggaagtgcagctggttgaatctggcggaggactggttcaggctggcggatctctgagactgtcttgtgccgccagcggcagaacctttagcatgggctggtttagacaggcccctggcaaagagagagagttcgtcgccgccatcacatactctggcggcagcccttactacgccgactctgtgaagggcagattcaccatcagccgggacaacgccaagaacaccgtgtacctccagatgaacagcctgaagcctgaggacaccgccgtgtactactgcgccgccaatccaacatacggcagcgactggaacgccgagaattggggccagggaacccaagtgacagtgtctagcctcgagggacagcctaaggccaatcctaccgtgacactgttccctccaagcagcgaagaactccaggccaacaaggccacacttgtgtgcctgatctccgacttctaccctggggctgtgacagtggcttggaaggccgatggatctcctgtgaaagccggcgtggaaaccaccaagccatccaagcagagcaacaacaaatacgccgccagctcctacctgagcctgacacctgagcagtggaagtcccacagatcctacagctgccaagtgacccacgaaggcagcaccgtggaaaagacagtggcccctacagagtgcagcggatccacaacacctggcgagagaagtagcctgcctgccttctatcctggcaccagcggctcttgttctggctgtggatctctgagcctgcctctgctggctggactggttgctgctgatgctgtggcctctctgctgattgtgggagccgtgttcctgtgcgccagacctagaagaagccccgctcaagaggacggcaaggtgtacatcaacatgcccggcagaggaagcactagtagagtgaagttcagcagaagcgccgacgcccctgcctaccagcagggacagaaccaactgtacaacgagctgaacctgggcagacgggaagagtacgacgtgctggacaagcggagaggcagggaccctgagatgggcggaaagccccagcggagaaagaacccccaggaaggactgtataacgaactccagaaagacaagatggccgaagcctacagcgagatcggcatgaagggcgagcggagaagaggcaagggccacgatggcctgtaccagggcctgagcaccgccaccaaggacacctatgacgccctgcacatgcaggccctgcctccaagaagggccaagcgatctggatctggagcaacaaacttctcactactcaaacaagcaggtgacgtggaggagaatcccgggcctatggactggatttggcgcatccttttccttgtcggcgctgctaccggcgcgcattccgggcccgaagtgcaactggttgaatccggtggcggcctggtgcaagcaggcggatctctcagacttagctgtgccgcctccggcagaaccttcacaatgggatggtttaggcaggctccagggaaagagagagagttcgtcgccgccatctctctgtctcccacactggcctactacgccgactctgtgaaaggccggttcaccatctccagagataatgccaagaacaccgtggtgctgcaaatgaactctctgaaacccgaggatacagccctgtactattgtgccgctgaccggaagtccgtgatgagcatcagacccgattactggggacagggcacacaagtcacagtgtcctctacgcgtgcctctacaaagggaccctccgtgtttcctctggctcccagcagcaagtctacaagcggaggaacagccgctctgggctgcctggtcaaggattactttcccgagcctgtgaccgtgtcctggaatagcggagcactgacaagcggcgtgcacacctttccagccgtgctgcaaagcagcggcctgtactctctgagcagcgtggtcacagtgcctagctctagcctgggcacccagacctacatctgcaatgtgaaccacaagcctagcaacaccaaggtggacaagagagtggaacccaagagctgtggtacccaggcacagtctgactgtagcagctccacagttagccctggcgttctggctggcatcgttatgggcgacctcgtcctgactgtcctgatcgctctggcagtgtattttctcggacggctggtcccaagaggaaggggagcagctgaagctgctacccggaagcagcggatcacagagactgagtctccataccaagaactccagggacagagatccgatgtgtactccgacctgaacacacagaggccctattataagagctctagacgggttaagttttccagatccgcagacgcacccgcttaccaacaagggcagaaccaactctacaatgaacttaatttggggcggagggaagagtacgacgttctggacaaaaggaggggacgagatcccgagatgggcggaaagcctcagcgaaggaagaatccgcaagaggggctttataacgaactccagaaagataaaatggcagaagcctatagtgagattgggatgaagggagaaaggaggaggggtaaaggtcacgatgggttgtaccaaggattgagcacagccactaaagatacctatgatgcgctccacatgcaggccctgccgccaagacgcgccaagagaagcggatctggcgtgaagcagaccctgaatttcgacctgctgaagctggctggcgacgtggaatccaacccaggccctggccatatgaccgagtacaagcccacggtgcgcctcgccacccgcgacgacgtccccagggccgtacgcaccctcgccgccgcgttcgccgactaccccgccacgcgccacaccgtcgatccggaccgccacatcgagcgggtcaccgagctgcaagaactcttcctcacgcgcgtcgggctcgacatcggcaaggtgtgggtcgcggacgacggcgccgcggtggcggtctggaccacgccggagagcgtcgaagcgggggcggtgttcgccgagatcggcccgcgcatggccgagttgagcggttcccggctggccgcgcagcaacagatggaaggcctcctggcgccgcaccggcccaaggagcccgcgtggttcctggccaccgtcggcgtctcgcccgaccaccagggcaagggtctgggcagcgccgtcgtgctccccggagtggaggcggccgagcgcgccggggtgcccgccttcctggagacctccgcgccccgcaacctccccttctacgagcggctcggcttcaccgtcaccgccgacgtcgaggtgcccgaaggaccgcgcacctggtgcatgacccgcaagcccggtgcctga

SEQ ID NO: 2150 - DNA, 3462 bp, Artificial Sequence
  Synthetic Polynucleotide
atggccttaccagtgaccgccttgctcctgccgctggccttgctgctccacgccgccaggccggacatccagatgacacagagccctagcagcctgtctgccagcgtgggagacagagtgaccatcacatgcaaggccagcgaccacatcaacaactggctggcctggtatcagcagaagcctggacaggcccctaagctgctgatctacggcgctaccacactggaaacaggcgtgcccagcagattttctggcagcggctctggcaccgactacaccctgacaatatccagcctccagcctgaggacttcgccacctactactgtcagcagagctggaacaccccttggacattcggccagggcaccaagctggaaatcaagagactcgaggacctgaagaacgtgttcccacctgaggtggccgtgttcgagcctagcgaggccgagatcagccacacccagaaagccaccctcgtgtgcctggctaccggcttctaccccgaccatgtggaactgtcttggtgggtcaacggcaaagaggtgcacagcggcgtgtctaccgacccccagccactgaaagaacagcccgccctgaacgacagccggtactgcctgagcagcagactgagagtgtccgccaccttctggcagaacccccggaaccacttcagatgccaggtgcagttctacggcctgagcgagaacgacgagtggacccaggacagagccaagcccgtgacccagatcgtgtctgccgaagcctggggcagagccgattgcggatccacaacacctggcgagagaagtagcctgcctgccttctatcctggcaccagcggctcttgttctggctgtggatctctgagcctgcctctgctggctggactggttgctgctgatgctgtggcctctctgctgattgtgggagccgtgttcctgtgcgccagacctagaagaagccccgctcaagaggacggcaaggtgtacatcaacatgcccggcagaggaagcactagtagagtgaagttcagcagaagcgccgacgcccctgcctaccagcagggacagaaccaactgtacaacgagctgaacctgggcagacgggaagagtacgacgtgctggacaagcggagaggcagggaccctgagatgggcggaaagccccagcggagaaagaacccccaggaaggactgtataacgaactccagaaagacaagatggccgaagcctacagcgagatcggcatgaagggcgagcggagaagaggcaagggccacgatggcctgtaccagggcctgagcaccgccaccaaggacacctatgacgccctgcacatgcaggccctgcctccaagaagggccaagcgatctggatctggagcaacaaacttctcactactcaaacaagcaggtgacgtggaggagaatcccgggcctatggactggatttggcgcatccttttccttgtcggcgctgctaccggcgcgcattccttcgaacaagttcagcttcaacagcctggcgctgagctggtcaaacctggcgcttctgtgaagatgagctgcaaagccagcggctacgccttcagcagctactggatcaactggatgaagcagaaacccggccagggactcgaatggatcggccaaatctatcccggcgacggcgacaccaactacaacggcaagttcaagggcagagccacactgaccgccgatacctctagcagcacagcctacatgcagctgagcagcctgaccagcgaagatagcgccgtgtacttctgtgcccggtccatcacaacagtcgtgggctgcgctatggactattggggccagggaacaagcgtgaccgtgtctagtacgcgtatccagaaccctgatcctgccgtgtaccagctgcgggatagcaagagcagcgacaagagcgtgtgtctgttcaccgacttcgacagccagaccaacgtgtcccagagcaaggactccgacgtgtacatcaccgataagaccgtgctggacatgcggagcatggacttcaagagcaactccgccgtggcctggtccaacaagtccgatttcgcctgcgccaacgccttcaacaacagcattatccccgaggacacattcttcccaagccccgagagcagctgcggtacccaggcacagtctgactgtagcagctccacagttagccctggcgttctggctggcatcgttatgggcgacctcgtcctgactgtcctgatcgctctggcagtgtattttctcggacggctggtcccaagaggaaggggagcagctgaagctgctacccggaagcagcggatcacagagactgagtctccataccaagaactccagggacagagatccgatgtgtactccgacctgaacacacagaggccctattataagagctctagacgggttaagttttccagatccgcagacgcacccgcttaccaacaagggcagaaccaactctacaatgaacttaatttggggcggagggaagagtacgacgttctggacaaaaggaggggacgagatcccgagatgggcggaaagcctcagcgaaggaagaatccgcaagaggggctttataacgaactccagaaagataaaatggcagaagcctatagtgagattgggatgaagggagaaaggaggaggggtaaaggtcacgatgggttgtaccaaggattgagcacagccactaaagatacctatgatgcgctccacatgcaggccctgccgccaagacgcgccaagagaagcggatctggcgtgaagcagaccctgaatttcgacctgctgaagctggctggcgacgtggaatccaacccaggccctggccatatgaccgagtacaagcccacggtgcgcctcgccacccgcgacgacgtccccagggccgtacgcaccctcgccgccgcgttcgccgactaccccgccacgcgccacaccgtcgatccggaccgccacatcgagcgggtcaccgagctgcaagaactcttcctcacgcgcgtcgggctcgacatcggcaaggtgtgggtcgcggacgacggcgccgcggtggcggtctggaccacgccggagagcgtcgaagcgggggcggtgttcgccgagatcggcccgcgcatggccgagttgagcggttcccggctggccgcgcagcaacagatggaaggcctcctggcgccgcaccggcccaaggagcccgcgtggttcctggccaccgtcggcgtctcgcccgaccaccagggcaagggtctgggcagcgccgtcgtgctccccggagtggaggcggccgagcgcgccggggtgcccgccttcctggagacctccgcgccccgcaacctccccttctacgagcggctcggcttcaccgtcaccgccgacgtcgaggtgcccgaaggaccgcgcacctggtgcatgacccgcaagcccggtgcctga

SEQ ID NO: 2151 - DNA, 3873 bp, Artificial Sequence
  Synthetic Polynucleotide
atggccttaccagtgaccgccttgctcctgccgctggccttgctgctccacgccgccaggccggaagtgcagctggttgaatctggcggaggactggttcaggctggcggatctctgagactgtcttgtgccgccagcggcagaacctttagcatgggctggtttagacaggcccctggcaaagagagagagttcgtcgccgccatcacatactctggcggcagcccttactacgccgactctgtgaagggcagattcaccatcagccgggacaacgccaagaacaccgtgtacctccagatgaacagcctgaagcctgaggacaccgccgtgtactactgcgccgccaatccaacatacggcagcgactggaacgccgagaattggggccagggaacccaagtgacagtgtctagcggtaccggcggaggcggatctggcggcggaggtagcggtggcggaggatctgaattcgacatccagatgacacagagccctagcagcctgtctgccagcgtgggagacagagtgaccatcacatgcaaggccagcgaccacatcaacaactggctggcctggtatcagcagaagcctggacaggcccctaagctgctgatctacggcgctaccacactggaaacaggcgtgcccagcagattttctggcagcggctctggcaccgactacaccctgacaatatccagcctccagcctgaggacttcgccacctactactgtcagcagagctggaacaccccttggacattcggccagggcaccaagctggaaatcaagagactcgaggacctgaagaacgtgttcccacctgaggtggccgtgttcgagcctagcgaggccgagatcagccacacccagaaagccaccctcgtgtgcctggctaccggcttctaccccgaccatgtggaactgtcttggtgggtcaacggcaaagaggtgcacagcggcgtgtctaccgacccccagccactgaaagaacagcccgccctgaacgacagccggtactgcctgagcagcagactgagagtgtccgccaccttctggcagaacccccggaaccacttcagatgccaggtgcagttctacggcctgagcgagaacgacgagtggacccaggacagagccaagcccgtgacccagatcgtgtctgccgaagcctggggcagagccgattgcggatccacaacacctggcgagagaagtagcctgcctgccttctatcctggcaccagcggctcttgttctggctgtggatctctgagcctgcctctgctggctggactggttgctgctgatgctgtggcctctctgctgattgtgggagccgtgttcctgtgcgccagacctagaagaagccccgctcaagaggacggcaaggtgtacatcaacatgcccggcagaggaagcactagtagagtgaagttcagcagaagcgccgacgcccctgcctaccagcagggacagaaccaactgtacaacgagctgaacctgggcagacgggaagagtacgacgtgctggacaagcggagaggcagggaccctgagatgggcggaaagccccagcggagaaagaacccccaggaaggactgtataacgaactccagaaagacaagatggccgaagcctacagcgagatcggcatgaagggcgagcggagaagaggcaagggccacgatggcctgtaccagggcctgagcaccgccaccaaggacacctatgacgccctgcacatgcaggccctgcctccaagaagggccaagcgatctggatctggagcaacaaacttctcactactcaaacaagcaggtgacgtggaggagaatcccgggcctatggactggatttggcgcatccttttccttgtcggcgctgctaccggcgcgcattccttcgaacaagttcagcttcaacagcctggcgctgagctggtcaaacctggcgcttctgtgaagatgagctgcaaagccagcggctacgccttcagcagctactggatcaactggatgaagcagaaacccggccagggactcgaatggatcggccaaatctatcccggcgacggcgacaccaactacaacggcaagttcaagggcagagccacactgaccgccgatacctctagcagcacagcctacatgcagctgagcagcctgaccagcgaagatagcgccgtgtacttctgtgcccggtccatcacaacagtcgtgggctgcgctatggactattggggccagggaacaagcgtgaccgtgtctagtacgcgtatccagaaccctgatcctgccgtgtaccagctgcgggatagcaagagcagcgacaagagcgtgtgtctgttcaccgacttcgacagccagaccaacgtgtcccagagcaaggactccgacgtgtacatcaccgataagaccgtgctggacatgcggagcatggacttcaagagcaactccgccgtggcctggtccaacaagtccgatttcgcctgcgccaacgccttcaacaacagcattatccccgaggacacattcttcccaagccccgagagcagctgcggtacccaggcacagtctgactgtagcagctccacagttagccctggcgttctggctggcatcgttatgggcgacctcgtcctgactgtcctgatcgctctggcagtgtattttctcggacggctggtcccaagaggaaggggagcagctgaagctgctacccggaagcagcggatcacagagactgagtctccataccaagaactccagggacagagatccgatgtgtactccgacctgaacacacagaggccctattataagagctctagacgggttaagttttccagatccgcagacgcacccgcttaccaacaagggcagaaccaactctacaatgaacttaatttggggcggagggaagagtacgacgttctggacaaaaggaggggacgagatcccgagatgggcggaaagcctcagcgaaggaagaatccgcaagaggggctttataacgaactccagaaagataaaatggcagaagcctatagtgagattgggatgaagggagaaaggaggaggggtaaaggtcacgatgggttgtaccaaggattgagcacagccactaaagatacctatgatgcgctccacatgcaggccctgccgccaagacgcgccaagagaagcggatctggcgtgaagcagaccctgaatttcgacctgctgaagctggctggcgacgtggaatccaacccaggccctggccatatgaccgagtacaagcccacggtgcgcctcgccacccgcgacgacgtccccagggccgtacgcaccctcgccgccgcgttcgccgactaccccgccacgcgccacaccgtcgatccggaccgccacatcgagcgggtcaccgagctgcaagaactcttcctcacgcgcgtcgggctcgacatcggcaaggtgtgggtcgcggacgacggcgccgcggtggcggtctggaccacgccggagagcgtcgaagcgggggcggtgttcgccgagatcggcccgcgcatggccgagttgagcggttcccggctggccgcgcagcaacagatggaaggcctcctggcgccgcaccggcccaaggagcccgcgtggttcctggccaccgtcggcgtctcgcccgaccaccagggcaagggtctgggcagcgccgtcgtgctccccggagtggaggcggccgagcgcgccggggtgcccgccttcctggagacctccgcgccccgcaacctccccttctacgagcggctcggcttcaccgtcaccgccgacgtcgaggtgcccgaaggaccgcgcacctggtgcatgacccgcaagcccggtgcctga

SEQ ID NO: 2152 - DNA, 4284 bp, Artificial Sequence
  Synthetic Polynucleotide
atggccttaccagtgaccgccttgctcctgccgctggccttgctgctccacgccgccaggccggaagtgcagctggttgaatctggcggaggactggttcaggctggcggatctctgagactgtcttgtgccgccagcggcagaacctttagcatgggctggtttagacaggcccctggcaaagagagagagttcgtcgccgccatcacatactctggcggcagcccttactacgccgactctgtgaagggcagattcaccatcagccgggacaacgccaagaacaccgtgtacctccagatgaacagcctgaagcctgaggacaccgccgtgtactactgcgccgccaatccaacatacggcagcgactggaacgccgagaattggggccagggaacccaagtgacagtgtctagcggtaccggcggaggcggatctggcggcggaggtagcggtggcggaggatctgaattcgacatccagatgacacagagccctagcagcctgtctgccagcgtgggagacagagtgaccatcacatgcaaggccagcgaccacatcaacaactggctggcctggtatcagcagaagcctggacaggcccctaagctgctgatctacggcgctaccacactggaaacaggcgtgcccagcagattttctggcagcggctctggcaccgactacaccctgacaatatccagcctccagcctgaggacttcgccacctactactgtcagcagagctggaacaccccttggacattcggccagggcaccaagctggaaatcaagagactcgaggacctgaagaacgtgttcccacctgaggtggccgtgttcgagcctagcgaggccgagatcagccacacccagaaagccaccctcgtgtgcctggctaccggcttctaccccgaccatgtggaactgtcttggtgggtcaacggcaaagaggtgcacagcggcgtgtctaccgacccccagccactgaaagaacagcccgccctgaacgacagccggtactgcctgagcagcagactgagagtgtccgccaccttctggcagaacccccggaaccacttcagatgccaggtgcagttctacggcctgagcgagaacgacgagtggacccaggacagagccaagcccgtgacccagatcgtgtctgccgaagcctggggcagagccgattgcggatccacaacacctggcgagagaagtagcctgcctgccttctatcctggcaccagcggctcttgttctggctgtggatctctgagcctgcctctgctggctggactggttgctgctgatgctgtggcctctctgctgattgtgggagccgtgttcctgtgcgccagacctagaagaagccccgctcaagaggacggcaaggtgtacatcaacatgcccggcagaggaagcactagtagagtgaagttcagcagaagcgccgacgcccctgcctaccagcagggacagaaccaactgtacaacgagctgaacctgggcagacgggaagagtacgacgtgctggacaagcggagaggcagggaccctgagatgggcggaaagccccagcggagaaagaacccccaggaaggactgtataacgaactccagaaagacaagatggccgaagcctacagcgagatcggcatgaagggcgagcggagaagaggcaagggccacgatggcctgtaccagggcctgagcaccgccaccaaggacacctatgacgccctgcacatgcaggccctgcctccaagaagggccaagcgatctggatctggagcaacaaacttctcactactcaaacaagcaggtgacgtggaggagaatcccgggcctatggactggatttggcgcatccttttccttgtcggcgctgctaccggcgcgcattccgggcccgaagtgcaactggttgaatccggtggcggcctggtgcaagcaggcggatctctcagacttagctgtgccgcctccggcagaaccttcacaatgggatggtttaggcaggctccagggaaagagagagagttcgtcgccgccatctctctgtctcccacactggcctactacgccgactctgtgaaaggccggttcaccatctccagagataatgccaagaacaccgtggtgctgcaaatgaactctctgaaacccgaggatacagccctgtactattgtgccgctgaccggaagtccgtgatgagcatcagacccgattactggggacagggcacacaagtcacagtgtcctctggatccggcggcggaggatctggcggaggcggatctgggggcggaggctctttcgaacaagttcagcttcaacagcctggcgctgagctggtcaaacctggcgcttctgtgaagatgagctgcaaagccagcggctacgccttcagcagctactggatcaactggatgaagcagaaacccggccagggactcgaatggatcggccaaatctatcccggcgacggcgacaccaactacaacggcaagttcaagggcagagccacactgaccgccgatacctctagcagcacagcctacatgcagctgagcagcctgaccagcgaagatagcgccgtgtacttctgtgcccggtccatcacaacagtcgtgggctgcgctatggactattggggccagggaacaagcgtgaccgtgtctagtacgcgtatccagaaccctgatcctgccgtgtaccagctgcgggatagcaagagcagcgacaagagcgtgtgtctgttcaccgacttcgacagccagaccaacgtgtcccagagcaaggactccgacgtgtacatcaccgataagaccgtgctggacatgcggagcatggacttcaagagcaactccgccgtggcctggtccaacaagtccgatttcgcctgcgccaacgccttcaacaacagcattatccccgaggacacattcttcccaagccccgagagcagctgcggtacccaggcacagtctgactgtagcagctccacagttagccctggcgttctggctggcatcgttatgggcgacctcgtcctgactgtcctgatcgctctggcagtgtattttctcggacggctggtcccaagaggaaggggagcagctgaagctgctacccggaagcagcggatcacagagactgagtctccataccaagaactccagggacagagatccgatgtgtactccgacctgaacacacagaggccctattataagagctctagacgggttaagttttccagatccgcagacgcacccgcttaccaacaagggcagaaccaactctacaatgaacttaatttggggcggagggaagagtacgacgttctggacaaaaggaggggacgagatcccgagatgggcggaaagcctcagcgaaggaagaatccgcaagaggggctttataacgaactccagaaagataaaatggcagaagcctatagtgagattgggatgaagggagaaaggaggaggggtaaaggtcacgatgggttgtaccaaggattgagcacagccactaaagatacctatgatgcgctccacatgcaggccctgccgccaagacgcgccaagagaagcggatctggcgtgaagcagaccctgaatttcgacctgctgaagctggctggcgacgtggaatccaacccaggccctggccatatgaccgagtacaagcccacggtgcgcctcgccacccgcgacgacgtccccagggccgtacgcaccctcgccgccgcgttcgccgactaccccgccacgcgccacaccgtcgatccggaccgccacatcgagcgggtcaccgagctgcaagaactcttcctcacgcgcgtcgggctcgacatcggcaaggtgtgggtcgcggacgacggcgccgcggtggcggtctggaccacgccggagagcgtcgaagcgggggcggtgttcgccgagatcggcccgcgcatggccgagttgagcggttcccggctggccgcgcagcaacagatggaaggcctcctggcgccgcaccggcccaaggagcccgcgtggttcctggccaccgtcggcgtctcgcccgaccaccagggcaagggtctgggcagcgccgtcgtgctccccggagtggaggcggccgagcgcgccggggtgcccgccttcctggagacctccgcgccccgcaacctccccttctacgagcggctcggcttcaccgtcaccgccgacgtcgaggtgcccgaaggaccgcgcacctggtgcatgacccgcaagcccggtgcctga

SEQ ID NO: 2153 - DNA, 3483 bp, Artificial Sequence
  Synthetic Polynucleotide
atggccttaccagtgaccgccttgctcctgccgctggccttgctgctccacgccgccaggccggaagtgcagctggttgaatctggcggaggactggttcaggctggcggatctctgagactgtcttgtgccgccagcggcagaacctttagcatgggctggtttagacaggcccctggcaaagagagagagttcgtcgccgccatcacatactctggcggcagcccttactacgccgactctgtgaagggcagattcaccatcagccgggacaacgccaagaacaccgtgtacctccagatgaacagcctgaagcctgaggacaccgccgtgtactactgcgccgccaatccaacatacggcagcgactggaacgccgagaattggggccagggaacccaagtgacagtgtctagcctcgaggacctgaagaacgtgttcccacctgaggtggccgtgttcgagcctagcgaggccgagatcagccacacccagaaagccaccctcgtgtgcctggctaccggcttctaccccgaccatgtggaactgtcttggtgggtcaacggcaaagaggtgcacagcggcgtgtctaccgacccccagccactgaaagaacagcccgccctgaacgacagccggtactgcctgagcagcagactgagagtgtccgccaccttctggcagaacccccggaaccacttcagatgccaggtgcagttctacggcctgagcgagaacgacgagtggacccaggacagagccaagcccgtgacccagatcgtgtctgccgaagcctggggcagagccgattgcggatccacaacacctggcgagagaagtagcctgcctgccttctatcctggcaccagcggctcttgttctggctgtggatctctgagcctgcctctgctggctggactggttgctgctgatgctgtggcctctctgctgattgtgggagccgtgttcctgtgcgccagacctagaagaagccccgctcaagaggacggcaaggtgtacatcaacatgcccggcagaggaagcactagtagagtgaagttcagcagaagcgccgacgcccctgcctaccagcagggacagaaccaactgtacaacgagctgaacctgggcagacgggaagagtacgacgtgctggacaagcggagaggcagggaccctgagatgggcggaaagccccagcggagaaagaacccccaggaaggactgtataacgaactccagaaagacaagatggccgaagcctacagcgagatcggcatgaagggcgagcggagaagaggcaagggccacgatggcctgtaccagggcctgagcaccgccaccaaggacacctatgacgccctgcacatgcaggccctgcctccaagaagggccaagcgatctggatctggagcaacaaacttctcactactcaaacaagcaggtgacgtggaggagaatcccgggcctatggactggatttggcgcatccttttccttgtcggcgctgctaccggcgcgcattccgggcccgaagtgcaactggttgaatccggtggcggcctggtgcaagcaggcggatctctcagacttagctgtgccgcctccggcagaaccttcacaatgggatggtttaggcaggctccagggaaagagagagagttcgtcgccgccatctctctgtctcccacactggcctactacgccgactctgtgaaaggccggttcaccatctccagagataatgccaagaacaccgtggtgctgcaaatgaactctctgaaacccgaggatacagccctgtactattgtgccgctgaccggaagtccgtgatgagcatcagacccgattactggggacagggcacacaagtcacagtgtcctctacgcgtatccagaaccctgatcctgccgtgtaccagctgcgggatagcaagagcagcgacaagagcgtgtgtctgttcaccgacttcgacagccagaccaacgtgtcccagagcaaggactccgacgtgtacatcaccgataagaccgtgctggacatgcggagcatggacttcaagagcaactccgccgtggcctggtccaacaagtccgatttcgcctgcgccaacgccttcaacaacagcattatccccgaggacacattcttcccaagccccgagagcagctgcggtacccaggcacagtctgactgtagcagctccacagttagccctggcgttctggctggcatcgttatgggcgacctcgtcctgactgtcctgatcgctctggcagtgtattttctcggacggctggtcccaagaggaaggggagcagctgaagctgctacccggaagcagcggatcacagagactgagtctccataccaagaactccagggacagagatccgatgtgtactccgacctgaacacacagaggccctattataagagctctagacgggttaagttttccagatccgcagacgcacccgcttaccaacaagggcagaaccaactctacaatgaacttaatttggggcggagggaagagtacgacgttctggacaaaaggaggggacgagatcccgagatgggcggaaagcctcagcgaaggaagaatccgcaagaggggctttataacgaactccagaaagataaaatggcagaagcctatagtgagattgggatgaagggagaaaggaggaggggtaaaggtcacgatgggttgtaccaaggattgagcacagccactaaagatacctatgatgcgctccacatgcaggccctgccgccaagacgcgccaagagaagcggatctggcgtgaagcagaccctgaatttcgacctgctgaagctggctggcgacgtggaatccaacccaggccctggccatatgaccgagtacaagcccacggtgcgcctcgccacccgcgacgacgtccccagggccgtacgcaccctcgccgccgcgttcgccgactaccccgccacgcgccacaccgtcgatccggaccgccacatcgagcgggtcaccgagctgcaagaactcttcctcacgcgcgtcgggctcgacatcggcaaggtgtgggtcgcggacgacggcgccgcggtggcggtctggaccacgccggagagcgtcgaagcgggggcggtgttcgccgagatcggcccgcgcatggccgagttgagcggttcccggctggccgcgcagcaacagatggaaggcctcctggcgccgcaccggcccaaggagcccgcgtggttcctggccaccgtcggcgtctcgcccgaccaccagggcaagggtctgggcagcgccgtcgtgctccccggagtggaggcggccgagcgcgccggggtgcccgccttcctggagacctccgcgccccgcaacctccccttctacgagcggctcggcttcaccgtcaccgccgacgtcgaggtgcccgaaggaccgcgcacctggtgcatgacccgcaagcccggtgcctga

SEQ ID NO: 2154 - DNA, 1758 bp, Artificial Sequence; identical to SEQ ID NO: 2037
  Synthetic Polynucleotide

SEQ ID NO: 2155 - DNA, 2814 bp, Artificial Sequence
  Synthetic Polynucleotide
atggccttaccagtgaccgccttgctcctgccgctggccttgctgctccacgccgccaggccggacatccagatgacacagagccctagcagcctgtctgccagcgtgggagacagagtgaccatcacatgcaaggccagcgaccacatcaacaactggctggcctggtatcagcagaagcctggacaggcccctaagctgctgatctacggcgctaccacactggaaacaggcgtgcccagcagattttctggcagcggctctggcaccgactacaccctgacaatatccagcctccagcctgaggacttcgccacctactactgtcagcagagctggaacaccccttggacattcggccagggcaccaagctggaaatcaagagactcgagcaggctcagagcgattgcagctctagcacagtgtctccaggcgtgctggccggaattgtgatgggcgatctggtgctgacagtgctgattgccctggccgtgtacttcctgggtagactggtgcctagaggaagaggcgctgccgaagccgccacaagaaagcagagaatcaccgagacagagagcccctaccaagagctgcaaggccagagaagcgacgtgtacagcgacctgaatacccagcggccttactacaaaagcactagtagagtgaagttcagcagaagcgccgacgcccctgcctaccagcagggacagaaccaactgtacaacgagctgaacctgggcagacgggaagagtacgacgtgctggacaagcggagaggcagggaccctgagatgggcggaaagccccagcggagaaagaacccccaggaaggactgtataacgaactccagaaagacaagatggccgaagcctacagcgagatcggcatgaagggcgagcggagaagaggcaagggccacgatggcctgtaccagggcctgagcaccgccaccaaggacacctatgacgccctgcacatgcaggccctgcctccaagaagggccaagcgatctggatctggagcaacaaacttctcactactcaaacaagcaggtgacgtggaggagaatcccgggcctatggactggatttggcgcatccttttccttgtcggcgctgctaccggcgcgcattccttcgaacaagttcagcttcaacagcctggcgctgagctggtcaaacctggcgcttctgtgaagatgagctgcaaagccagcggctacgccttcagcagctactggatcaactggatgaagcagaaacccggccagggactcgaatggatcggccaaatctatcccggcgacggcgacaccaactacaacggcaagttcaagggcagagccacactgaccgccgatacctctagcagcacagcctacatgcagctgagcagcctgaccagcgaagatagcgccgtgtacttctgtgcccggtccatcacaacagtcgtgggctgcgctatggactattggggccagggaacaagcgtgaccgtgtctagtacgcgtcaggcacagtctgactgtagcagctccacagttagccctggcgttctggctggcatcgttatgggcgacctcgtcctgactgtcctgatcgctctggcagtgtattttctcggacggctggtcccaagaggaaggggagcagctgaagctgctacccggaagcagcggatcacagagactgagtctccataccaagaactccagggacagagatccgatgtgtactccgacctgaacacacagaggccctattataagagctctagacgggttaagttttccagatccgcagacgcacccgcttaccaacaagggcagaaccaactctacaatgaacttaatttggggcggagggaagagtacgacgttctggacaaaaggaggggacgagatcccgagatgggcggaaagcctcagcgaaggaagaatccgcaagaggggctttataacgaactccagaaagataaaatggcagaagcctatagtgagattgggatgaagggagaaaggaggaggggtaaaggtcacgatgggttgtaccaaggattgagcacagccactaaagatacctatgatgcgctccacatgcaggccctgccgccaagacgcgccaagagaagcggatctggcgtgaagcagaccctgaatttcgacctgctgaagctggctggcgacgtggaatccaacccaggccctggccatatgaccgagtacaagcccacggtgcgcctcgccacccgcgacgacgtccccagggccgtacgcaccctcgccgccgcgttcgccgactaccccgccacgcgccacaccgtcgatccggaccgccacatcgagcgggtcaccgagctgcaagaactcttcctcacgcgcgtcgggctcgacatcggcaaggtgtgggtcgcggacgacggcgccgcggtggcggtctggaccacgccggagagcgtcgaagcgggggcggtgttcgccgagatcggcccgcgcatggccgagttgagcggttcccggctggccgcgcagcaacagatggaaggcctcctggcgccgcaccggcccaaggagcccgcgtggttcctggccaccgtcggcgtctcgcccgaccaccagggcaagggtctgggcagcgccgtcgtgctccccggagtggaggcggccgagcgcgccggggtgcccgccttcctggagacctccgcgccccgcaacctccccttctacgagcggctcggcttcaccgtcaccgccgacgtcgaggtgcccgaaggaccgcgcacctggtgcatgacccgcaagcccggtgcctga

SEQ ID NO: 2156 - DNA, 2970 bp, Artificial Sequence
  Synthetic Polynucleotide
atggccttaccagtgaccgccttgctcctgccgctggccttgctgctccacgccgccaggccggcatgcgaagtgcagctgcttgaaagtggcggcggactgattcagcctggcggatctctgagactgagctgtgccgccagcggcttcaccttttctagccacgccatgacctgggtccgacaggcacctggaaaagggcttgaatgggtgtccgccatcagcggctctggcgattacacacactacgccgacagcgtgaagggcagattcaccatcagcagagacaacagcaagaacaccgtgtacctccagatgaacagcctgagagccgaggacagcgccgtgtattattgcgccaaggatgaggatggcggcagcctgcttggacacagaggacaaggcaccctggtcaccgtttcttccggtaccggcggaggcggatctggcggcggaggtagcggtggcggaggatctgaattcggatctctcgagcaggctcagagcgattgcagctctagcacagtgtctccaggcgtgctggccggaattgtgatgggcgatctggtgctgacagtgctgattgccctggccgtgtacttcctgggtagactggtgcctagaggaagaggcgctgccgaagccgccacaagaaagcagagaatcaccgagacagagagcccctaccaagagctgcaaggccagagaagcgacgtgtacagcgacctgaatacccagcggccttactacaaaagcactagtagagtgaagttcagcagaagcgccgacgcccctgcctaccagcagggacagaaccaactgtacaacgagctgaacctgggcagacgggaagagtacgacgtgctggacaagcggagaggcagggaccctgagatgggcggaaagccccagcggagaaagaacccccaggaaggactgtataacgaactccagaaagacaagatggccgaagcctacagcgagatcggcatgaagggcgagcggagaagaggcaagggccacgatggcctgtaccagggcctgagcaccgccaccaaggacacctatgacgccctgcacatgcaggccctgcctccaagaagggccaagcgatctggatctggagcaacaaacttctcactactcaaacaagcaggtgacgtggaggagaatcccgggcctatggactggatttggcgcatccttttccttgtcggcgctgctaccggcgcgcattccgggcccgaagtgcagctggttgaatctggcggaggactggttcaggctggcggatctctgagactgtcttgtgccgccagcggcagaacctttagcatgggctggtttagacaggcccctggcaaagagagagagttcgtcgccgccatcacatactctggcggcagcccttactacgccgactctgtgaagggcagattcaccatcagccgggacaacgccaagaacaccgtgtacctccagatgaacagcctgaagcctgaggacaccgccgtgtactactgcgccgccaatccaacatacggcagcgactggaacgccgagaattggggccagggaacccaagtgacagtgtctagcggatccggcggcggaggatctggcggaggcggatctgggggcggaggctctttcgaaggcagcacgcgtcaggcacagtctgactgtagcagctccacagttagccctggcgttctggctggcatcgttatgggcgacctcgtcctgactgtcctgatcgctctggcagtgtattttctcggacggctggtcccaagaggaaggggagcagctgaagctgctacccggaagcagcggatcacagagactgagtctccataccaagaactccagggacagagatccgatgtgtactccgacctgaacacacagaggccctattataagagctctagacgggttaagttttccagatccgcagacgcacccgcttaccaacaagggcagaaccaactctacaatgaacttaatttggggcggagggaagagtacgacgttctggacaaaaggaggggacgagatcccgagatgggcggaaagcctcagcgaaggaagaatccgcaagaggggctttataacgaactccagaaagataaaatggcagaagcctatagtgagattgggatgaagggagaaaggaggaggggtaaaggtcacgatgggttgtaccaaggattgagcacagccactaaagatacctatgatgcgctccacatgcaggccctgccgccaagacgcgccaagagaagcggatctggcgtgaagcagaccctgaatttcgacctgctgaagctggctggcgacgtggaatccaacccaggccctggccatatgaccgagtacaagcccacggtgcgcctcgccacccgcgacgacgtccccagggccgtacgcaccctcgccgccgcgttcgccgactaccccgccacgcgccacaccgtcgatccggaccgccacatcgagcgggtcaccgagctgcaagaactcttcctcacgcgcgtcgggctcgacatcggcaaggtgtgggtcgcggacgacggcgccgcggtggcggtctggaccacgccggagagcgtcgaagcgggggcggtgttcgccgagatcggcccgcgcatggccgagttgagcggttcccggctggccgcgcagcaacagatggaaggcctcctggcgccgcaccggcccaaggagcccgcgtggttcctggccaccgtcggcgtctcgcccgaccaccagggcaagggtctgggcagcgccgtcgtgctccccggagtggaggcggccgagcgcgccggggtgcccgccttcctggagacctccgcgccccgcaacctccccttctacgagcggctcggcttcaccgtcaccgccgacgtcgaggtgcccgaaggaccgcgcacctggtgcatgacccgcaagcccggtgcctga

SEQ ID NO: 2157 - DNA, 3417 bp, Artificial Sequence
  Synthetic Polynucleotide
atggccttaccagtgaccgccttgctcctgccgctggccttgctgctccacgccgccaggccggacatccagatgacacagagccctagcagcctgtctgccagcgtgggagacagagtgaccatcacatgcaaggccagcgaccacatcaacaactggctggcctggtatcagcagaagcctggacaggcccctaagctgctgatctacggcgctaccacactggaaacaggcgtgcccagcagattttctggcagcggctctggcaccgactacaccctgacaatatccagcctccagcctgaggacttcgccacctactactgtcagcagagctggaacaccccttggacattcggccagggcaccaagctggaaatcaagagactcgagggacagcctaaggccaatcctaccgtgacactgttccctccaagcagcgaagaactccaggccaacaaggccacacttgtgtgcctgatctccgacttctaccctggggctgtgacagtggcttggaaggccgatggatctcctgtgaaagccggcgtggaaaccaccaagccatccaagcagagcaacaacaaatacgccgccagctcctacctgagcctgacacctgagcagtggaagtcccacagatcctacagctgccaagtgacccacgaaggcagcaccgtggaaaagacagtggcccctacagagtgcagcggatcccaggctcagagcgattgcagctctagcacagtgtctccaggcgtgctggccggaattgtgatgggcgatctggtgctgacagtgctgattgccctggccgtgtacttcctgggtagactggtgcctagaggaagaggcgctgccgaagccgccacaagaaagcagagaatcaccgagacagagagcccctaccaagagctgcaaggccagagaagcgacgtgtacagcgacctgaatacccagcggccttactacaaaagcactagtagagtgaagttcagcagaagcgccgacgcccctgcctaccagcagggacagaaccaactgtacaacgagctgaacctgggcagacgggaagagtacgacgtgctggacaagcggagaggcagggaccctgagatgggcggaaagccccagcggagaaagaacccccaggaaggactgtataacgaactccagaaagacaagatggccgaagcctacagcgagatcggcatgaagggcgagcggagaagaggcaagggccacgatggcctgtaccagggcctgagcaccgccaccaaggacacctatgacgccctgcacatgcaggccctgcctccaagaagggccaagcgatctggatctggagcaacaaacttctcactactcaaacaagcaggtgacgtggaggagaatcccgggcctatggactggatttggcgcatccttttccttgtcggcgctgctaccggcgcgcattccttcgaacaagttcagcttcaacagcctggcgctgagctggtcaaacctggcgcttctgtgaagatgagctgcaaagccagcggctacgccttcagcagctactggatcaactggatgaagcagaaacccggccagggactcgaatggatcggccaaatctatcccggcgacggcgacaccaactacaacggcaagttcaagggcagagccacactgaccgccgatacctctagcagcacagcctacatgcagctgagcagcctgaccagcgaagatagcgccgtgtacttctgtgcccggtccatcacaacagtcgtgggctgcgctatggactattggggccagggaacaagcgtgaccgtgtctagtacgcgtgcctctacaaagggaccctccgtgtttcctctggctcccagcagcaagtctacaagcggaggaacagccgctctgggctgcctggtcaaggattactttcccgagcctgtgaccgtgtcctggaatagcggagcactgacaagcggcgtgcacacctttccagccgtgctgcaaagcagcggcctgtactctctgagcagcgtggtcacagtgcctagctctagcctgggcacccagacctacatctgcaatgtgaaccacaagcctagcaacaccaaggtggacaagagagtggaacccaagagctgtggtacccaggcacagtctgactgtagcagctccacagttagccctggcgttctggctggcatcgttatgggcgacctcgtcctgactgtcctgatcgctctggcagtgtattttctcggacggctggtcccaagaggaaggggagcagctgaagctgctacccggaagcagcggatcacagagactgagtctccataccaagaactccagggacagagatccgatgtgtactccgacctgaacacacagaggccctattataagagctctagacgggttaagttttccagatccgcagacgcacccgcttaccaacaagggcagaaccaactctacaatgaacttaatttggggcggagggaagagtacgacgttctggacaaaaggaggggacgagatcccgagatgggcggaaagcctcagcgaaggaagaatccgcaagaggggctttataacgaactccagaaagataaaatggcagaagcctatagtgagattgggatgaagggagaaaggaggaggggtaaaggtcacgatgggttgtaccaaggattgagcacagccactaaagatacctatgatgcgctccacatgcaggccctgccgccaagacgcgccaagagaagcggatctggcgtgaagcagaccctgaatttcgacctgctgaagctggctggcgacgtggaatccaacccaggccctggccatatggctacctacgaggtgctgtgcgaggtggcaagaaagctgggcaccgacgacagagaagtggtgctgttcctgctgaacgtgttcatccctcagcctacactggcccagctgatcggtgcactgagagccctgaaagaggaaggccggctgacctttcctctgctggccgaatgcctgttcagagccggaagaagggatctgctgcgggacctgctgcatctggaccccagatttctggaaagacacctggccggcaccatgagctacttcagcccttaccagctgaccgtgctgcacgttgacggcgaactgtgcgccagagatattcggagcctgatcttcctgagcaaggacaccatcggcagccggtctacccctcagacatttctgcactgggtgtactgcatggaaaacctggacctgctcggccccacagatgtggatgccctgatgtccatgctgagaagcctgagcagagtggacctccagagacaggtgcagacactgatgggactgcacctgagcggacctagccacagccagcactacagacacacccct

SEQ ID NO: 2158 - DNA, 3576 bp, Artificial Sequence
  Synthetic Polynucleotide
atggccttaccagtgaccgccttgctcctgccgctggccttgctgctccacgccgccaggccggacatccagatgacacagagccctagcagcctgtctgccagcgtgggagacagagtgaccatcacatgcaaggccagcgaccacatcaacaactggctggcctggtatcagcagaagcctggacaggcccctaagctgctgatctacggcgctaccacactggaaacaggcgtgcccagcagattttctggcagcggctctggcaccgactacaccctgacaatatccagcctccagcctgaggacttcgccacctactactgtcagcagagctggaacaccccttggacattcggccagggcaccaagctggaaatcaagagactcgagggacagcctaaggccaatcctaccgtgacactgttccctccaagcagcgaagaactccaggccaacaaggccacacttgtgtgcctgatctccgacttctaccctggggctgtgacagtggcttggaaggccgatggatctcctgtgaaagccggcgtggaaaccaccaagccatccaagcagagcaacaacaaatacgccgccagctcctacctgagcctgacacctgagcagtggaagtcccacagatcctacagctgccaagtgacccacgaaggcagcaccgtggaaaagacagtggcccctacagagtgcagcggatcccaggctcagagcgattgcagctctagcacagtgtctccaggcgtgctggccggaattgtgatgggcgatctggtgctgacagtgctgattgccctggccgtgtacttcctgggtagactggtgcctagaggaagaggcgctgccgaagccgccacaagaaagcagagaatcaccgagacagagagcccctaccaagagctgcaaggccagagaagcgacgtgtacagcgacctgaatacccagcggccttactacaaaagcactagtagagtgaagttcagcagaagcgccgacgcccctgcctaccagcagggacagaaccaactgtacaacgagctgaacctgggcagacgggaagagtacgacgtgctggacaagcggagaggcagggaccctgagatgggcggaaagccccagcggagaaagaacccccaggaaggactgtataacgaactccagaaagacaagatggccgaagcctacagcgagatcggcatgaagggcgagcggagaagaggcaagggccacgatggcctgtaccagggcctgagcaccgccaccaaggacacctatgacgccctgcacatgcaggccctgcctccaagaagggccaagcgatctggatctggagcaacaaacttctcactactcaaacaagcaggtgacgtggaggagaatcccgggcctatggactggatttggcgcatccttttccttgtcggcgctgctaccggcgcgcattccttcgaacaagttcagcttcaacagcctggcgctgagctggtcaaacctggcgcttctgtgaagatgagctgcaaagccagcggctacgccttcagcagctactggatcaactggatgaagcagaaacccggccagggactcgaatggatcggccaaatctatcccggcgacggcgacaccaactacaacggcaagttcaagggcagagccacactgaccgccgatacctctagcagcacagcctacatgcagctgagcagcctgaccagcgaagatagcgccgtgtacttctgtgcccggtccatcacaacagtcgtgggctgcgctatggactattggggccagggaacaagcgtgaccgtgtctagtacgcgtgcctctacaaagggaccctccgtgtttcctctggctcccagcagcaagtctacaagcggaggaacagccgctctgggctgcctggtcaaggattactttcccgagcctgtgaccgtgtcctggaatagcggagcactgacaagcggcgtgcacacctttccagccgtgctgcaaagcagcggcctgtactctctgagcagcgtggtcacagtgcctagctctagcctgggcacccagacctacatctgcaatgtgaaccacaagcctagcaacaccaaggtggacaagagagtggaacccaagagctgtggtacccaggcacagtctgactgtagcagctccacagttagccctggcgttctggctggcatcgttatgggcgacctcgtcctgactgtcctgatcgctctggcagtgtattttctcggacggctggtcccaagaggaaggggagcagctgaagctgctacccggaagcagcggatcacagagactgagtctccataccaagaactccagggacagagatccgatgtgtactccgacctgaacacacagaggccctattataagagctctagacgggttaagttttccagatccgcagacgcacccgcttaccaacaagggcagaaccaactctacaatgaacttaatttggggcggagggaagagtacgacgttctggacaaaaggaggggacgagatcccgagatgggcggaaagcctcagcgaaggaagaatccgcaagaggggctttataacgaactccagaaagataaaatggcagaagcctatagtgagattgggatgaagggagaaaggaggaggggtaaaggtcacgatgggttgtaccaaggattgagcacagccactaaagatacctatgatgcgctccacatgcaggccctgccgccaagacgcgccaagagaagcggatctggcgtgaagcagaccctgaatttcgacctgctgaagctggctggcgacgtggaatccaacccaggccctggccatatgtccgactccaaggaggtccctagccttccatttttgcgacacttgctcgaagagttggacagccatgaggacagcttgctgctgtttctgtgtcacgacgcggccccgggctgcacgacggtcacgcaagctttgtgctcgcttagccaacagcgcaagctgaccctcgcggctctggtcgagatgctctacgtgctgcagcgtatggatcttctcaagagccgcttcgggctcagcaaggagggggccgagcaattgctgggcacaagctttctcacgcgctaccgcaagctcatggtttgcgtgggtgaggagctcgactcgagcgagctacgcgctctacgcttgttcgcgtgcaacctgaatccgagcctgagcacggcgctttctgagagcagccgctttgtcgagcttgtactcgcgcttgaaaacgtaggactcgtctcgccatcgagtgtttccgtgcttgcggacatgttgcgcactcttcggcgcctcgatttgtgccagcagcttgttgagtacgaacaacaagagcaagccaggtaccgttactgttacgcggcctcgccctcattgccagttcgtacgttacgtcgggggcacggcgcgagtgaacacgagcagctgtgcatgcccgtgcaagaatcctctgacagccccgagctgctgcgcacgcccgtacaagaatcctccagcgacagccccgagcaaacgact

SEQ ID NO: 2159 - DNA, 3453 bp, Artificial Sequence
  Synthetic Polynucleotide
atggccttaccagtgaccgccttgctcctgccgctggccttgctgctccacgccgccaggccggacatccagatgacacagagccctagcagcctgtctgccagcgtgggagacagagtgaccatcacatgcaaggccagcgaccacatcaacaactggctggcctggtatcagcagaagcctggacaggcccctaagctgctgatctacggcgctaccacactggaaacaggcgtgcccagcagattttctggcagcggctctggcaccgactacaccctgacaatatccagcctccagcctgaggacttcgccacctactactgtcagcagagctggaacaccccttggacattcggccagggcaccaagctggaaatcaagagactcgagggacagcctaaggccaatcctaccgtgacactgttccctccaagcagcgaagaactccaggccaacaaggccacacttgtgtgcctgatctccgacttctaccctggggctgtgacagtggcttggaaggccgatggatctcctgtgaaagccggcgtggaaaccaccaagccatccaagcagagcaacaacaaatacgccgccagctcctacctgagcctgacacctgagcagtggaagtcccacagatcctacagctgccaagtgacccacgaaggcagcaccgtggaaaagacagtggcccctacagagtgcagcggatcccaggctcagagcgattgcagctctagcacagtgtctccaggcgtgctggccggaattgtgatgggcgatctggtgctgacagtgctgattgccctggccgtgtacttcctgggtagactggtgcctagaggaagaggcgctgccgaagccgccacaagaaagcagagaatcaccgagacagagagcccctaccaagagctgcaaggccagagaagcgacgtgtacagcgacctgaatacccagcggccttactacaaaagcactagtagagtgaagttcagcagaagcgccgacgcccctgcctaccagcagggacagaaccaactgtacaacgagctgaacctgggcagacgggaagagtacgacgtgctggacaagcggagaggcagggaccctgagatgggcggaaagccccagcggagaaagaacccccaggaaggactgtataacgaactccagaaagacaagatggccgaagcctacagcgagatcggcatgaagggcgagcggagaagaggcaagggccacgatggcctgtaccagggcctgagcaccgccaccaaggacacctatgacgccctgcacatgcaggccctgcctccaagaagggccaagcgatctggatctggagcaacaaacttctcactactcaaacaagcaggtgacgtggaggagaatcccgggcctatggactggatttggcgcatccttttccttgtcggcgctgctaccggcgcgcattccttcgaacaagttcagcttcaacagcctggcgctgagctggtcaaacctggcgcttctgtgaagatgagctgcaaagccagcggctacgccttcagcagctactggatcaactggatgaagcagaaacccggccagggactcgaatggatcggccaaatctatcccggcgacggcgacaccaactacaacggcaagttcaagggcagagccacactgaccgccgatacctctagcagcacagcctacatgcagctgagcagcctgaccagcgaagatagcgccgtgtacttctgtgcccggtccatcacaacagtcgtgggctgcgctatggactattggggccagggaacaagcgtgaccgtgtctagtacgcgtgcctctacaaagggaccctccgtgtttcctctggctcccagcagcaagtctacaagcggaggaacagccgctctgggctgcctggtcaaggattactttcccgagcctgtgaccgtgtcctggaatagcggagcactgacaagcggcgtgcacacctttccagccgtgctgcaaagcagcggcctgtactctctgagcagcgtggtcacagtgcctagctctagcctgggcacccagacctacatctgcaatgtgaaccacaagcctagcaacaccaaggtggacaagagagtggaacccaagagctgtggtacccaggcacagtctgactgtagcagctccacagttagccctggcgttctggctggcatcgttatgggcgacctcgtcctgactgtcctgatcgctctggcagtgtattttctcggacggctggtcccaagaggaaggggagcagctgaagctgctacccggaagcagcggatcacagagactgagtctccataccaagaactccagggacagagatccgatgtgtactccgacctgaacacacagaggccctattataagagctctagacgggttaagttttccagatccgcagacgcacccgcttaccaacaagggcagaaccaactctacaatgaacttaatttggggcggagggaagagtacgacgttctggacaaaaggaggggacgagatcccgagatgggcggaaagcctcagcgaaggaagaatccgcaagaggggctttataacgaactccagaaagataaaatggcagaagcctatagtgagattgggatgaagggagaaaggaggaggggtaaaggtcacgatgggttgtaccaaggattgagcacagccactaaagatacctatgatgcgctccacatgcaggccctgccgccaagacgcgccaagagaagcggatctggcgtgaagcagaccctgaatttcgacctgctgaagctggctggcgacgtggaatccaacccaggccctggccatatgaccgagtacaagcccacggtgcgcctcgccacccgcgacgacgtccccagggccgtacgcaccctcgccgccgcgttcgccgactaccccgccacgcgccacaccgtcgatccggaccgccacatcgagcgggtcaccgagctgcaagaactcttcctcacgcgcgtcgggctcgacatcggcaaggtgtgggtcgcggacgacggcgccgcggtggcggtctggaccacgccggagagcgtcgaagcgggggcggtgttcgccgagatcggcccgcgcatggccgagttgagcggttcccggctggccgcgcagcaacagatggaaggcctcctggcgccgcaccggcccaaggagcccgcgtggttcctggccaccgtcggcgtctcgcccgaccaccagggcaagggtctgggcagcgccgtcgtgctccccggagtggaggcggccgagcgcgccggggtgcccgccttcctggagacctccgcgccccgcaacctccccttctacgagcggctcggcttcaccgtcaccgccgacgtcgaggtgcccgaaggaccgcgcacctggtgcatgacccgcaagcccggtgcctga

SEQ ID NO: 2160 - DNA, 3864 bp, Artificial Sequence
  Synthetic Polynucleotide
atggccttaccagtgaccgccttgctcctgccgctggccttgctgctccacgccgccaggccggaagtgcagctggttgaatctggcggaggactggttcaggctggcggatctctgagactgtcttgtgccgccagcggcagaacctttagcatgggctggtttagacaggcccctggcaaagagagagagttcgtcgccgccatcacatactctggcggcagcccttactacgccgactctgtgaagggcagattcaccatcagccgggacaacgccaagaacaccgtgtacctccagatgaacagcctgaagcctgaggacaccgccgtgtactactgcgccgccaatccaacatacggcagcgactggaacgccgagaattggggccagggaacccaagtgacagtgtctagcggtaccggcggaggcggatctggcggcggaggtagcggtggcggaggatctgaattcgacatccagatgacacagagccctagcagcctgtctgccagcgtgggagacagagtgaccatcacatgcaaggccagcgaccacatcaacaactggctggcctggtatcagcagaagcctggacaggcccctaagctgctgatctacggcgctaccacactggaaacaggcgtgcccagcagattttctggcagcggctctggcaccgactacaccctgacaatatccagcctccagcctgaggacttcgccacctactactgtcagcagagctggaacaccccttggacattcggccagggcaccaagctggaaatcaagagactcgagggacagcctaaggccaatcctaccgtgacactgttccctccaagcagcgaagaactccaggccaacaaggccacacttgtgtgcctgatctccgacttctaccctggggctgtgacagtggcttggaaggccgatggatctcctgtgaaagccggcgtggaaaccaccaagccatccaagcagagcaacaacaaatacgccgccagctcctacctgagcctgacacctgagcagtggaagtcccacagatcctacagctgccaagtgacccacgaaggcagcaccgtggaaaagacagtggcccctacagagtgcagcggatcccaggctcagagcgattgcagctctagcacagtgtctccaggcgtgctggccggaattgtgatgggcgatctggtgctgacagtgctgattgccctggccgtgtacttcctgggtagactggtgcctagaggaagaggcgctgccgaagccgccacaagaaagcagagaatcaccgagacagagagcccctaccaagagctgcaaggccagagaagcgacgtgtacagcgacctgaatacccagcggccttactacaaaagcactagtagagtgaagttcagcagaagcgccgacgcccctgcctaccagcagggacagaaccaactgtacaacgagctgaacctgggcagacgggaagagtacgacgtgctggacaagcggagaggcagggaccctgagatgggcggaaagccccagcggagaaagaacccccaggaaggactgtataacgaactccagaaagacaagatggccgaagcctacagcgagatcggcatgaagggcgagcggagaagaggcaagggccacgatggcctgtaccagggcctgagcaccgccaccaaggacacctatgacgccctgcacatgcaggccctgcctccaagaagggccaagcgatctggatctggagcaacaaacttctcactactcaaacaagcaggtgacgtggaggagaatcccgggcctatggactggatttggcgcatccttttccttgtcggcgctgctaccggcgcgcattccttcgaacaagttcagcttcaacagcctggcgctgagctggtcaaacctggcgcttctgtgaagatgagctgcaaagccagcggctacgccttcagcagctactggatcaactggatgaagcagaaacccggccagggactcgaatggatcggccaaatctatcccggcgacggcgacaccaactacaacggcaagttcaagggcagagccacactgaccgccgatacctctagcagcacagcctacatgcagctgagcagcctgaccagcgaagatagcgccgtgtacttctgtgcccggtccatcacaacagtcgtgggctgcgctatggactattggggccagggaacaagcgtgaccgtgtctagtacgcgtgcctctacaaagggaccctccgtgtttcctctggctcccagcagcaagtctacaagcggaggaacagccgctctgggctgcctggtcaaggattactttcccgagcctgtgaccgtgtcctggaatagcggagcactgacaagcggcgtgcacacctttccagccgtgctgcaaagcagcggcctgtactctctgagcagcgtggtcacagtgcctagctctagcctgggcacccagacctacatctgcaatgtgaaccacaagcctagcaacaccaaggtggacaagagagtggaacccaagagctgtggtacccaggcacagtctgactgtagcagctccacagttagccctggcgttctggctggcatcgttatgggcgacctcgtcctgactgtcctgatcgctctggcagtgtattttctcggacggctggtcccaagaggaaggggagcagctgaagctgctacccggaagcagcggatcacagagactgagtctccataccaagaactccagggacagagatccgatgtgtactccgacctgaacacacagaggccctattataagagctctagacgggttaagttttccagatccgcagacgcacccgcttaccaacaagggcagaaccaactctacaatgaacttaatttggggcggagggaagagtacgacgttctggacaaaaggaggggacgagatcccgagatgggcggaaagcctcagcgaaggaagaatccgcaagaggggctttataacgaactccagaaagataaaatggcagaagcctatagtgagattgggatgaagggagaaaggaggaggggtaaaggtcacgatgggttgtaccaaggattgagcacagccactaaagatacctatgatgcgctccacatgcaggccctgccgccaagacgcgccaagagaagcggatctggcgtgaagcagaccctgaatttcgacctgctgaagctggctggcgacgtggaatccaacccaggccctggccatatgaccgagtacaagcccacggtgcgcctcgccacccgcgacgacgtccccagggccgtacgcaccctcgccgccgcgttcgccgactaccccgccacgcgccacaccgtcgatccggaccgccacatcgagcgggtcaccgagctgcaagaactcttcctcacgcgcgtcgggctcgacatcggcaaggtgtgggtcgcggacgacggcgccgcggtggcggtctggaccacgccggagagcgtcgaagcgggggcggtgttcgccgagatcggcccgcgcatggccgagttgagcggttcccggctggccgcgcagcaacagatggaaggcctcctggcgccgcaccggcccaaggagcccgcgtggttcctggccaccgtcggcgtctcgcccgaccaccagggcaagggtctgggcagcgccgtcgtgctccccggagtggaggcggccgagcgcgccggggtgcccgccttcctggagacctccgcgccccgcaacctccccttctacgagcggctcggcttcaccgtcaccgccgacgtcgaggtgcccgaaggaccgcgcacctggtgcatgacccgcaagcccggtgcctga

SEQ ID NO: 2161 - DNA, 4275 bp, Artificial Sequence
  Synthetic Polynucleotide
atggccttaccagtgaccgccttgctcctgccgctggccttgctgctccacgccgccaggccggaagtgcagctggttgaatctggcggaggactggttcaggctggcggatctctgagactgtcttgtgccgccagcggcagaacctttagcatgggctggtttagacaggcccctggcaaagagagagagttcgtcgccgccatcacatactctggcggcagcccttactacgccgactctgtgaagggcagattcaccatcagccgggacaacgccaagaacaccgtgtacctccagatgaacagcctgaagcctgaggacaccgccgtgtactactgcgccgccaatccaacatacggcagcgactggaacgccgagaattggggccagggaacccaagtgacagtgtctagcggtaccggcggaggcggatctggcggcggaggtagcggtggcggaggatctgaattcgacatccagatgacacagagccctagcagcctgtctgccagcgtgggagacagagtgaccatcacatgcaaggccagcgaccacatcaacaactggctggcctggtatcagcagaagcctggacaggcccctaagctgctgatctacggcgctaccacactggaaacaggcgtgcccagcagattttctggcagcggctctggcaccgactacaccctgacaatatccagcctccagcctgaggacttcgccacctactactgtcagcagagctggaacaccccttggacattcggccagggcaccaagctggaaatcaagagactcgagggacagcctaaggccaatcctaccgtgacactgttccctccaagcagcgaagaactccaggccaacaaggccacacttgtgtgcctgatctccgacttctaccctggggctgtgacagtggcttggaaggccgatggatctcctgtgaaagccggcgtggaaaccaccaagccatccaagcagagcaacaacaaatacgccgccagctcctacctgagcctgacacctgagcagtggaagtcccacagatcctacagctgccaagtgacccacgaaggcagcaccgtggaaaagacagtggcccctacagagtgcagcggatcccaggctcagagcgattgcagctctagcacagtgtctccaggcgtgctggccggaattgtgatgggcgatctggtgctgacagtgctgattgccctggccgtgtacttcctgggtagactggtgcctagaggaagaggcgctgccgaagccgccacaagaaagcagagaatcaccgagacagagagcccctaccaagagctgcaaggccagagaagcgacgtgtacagcgacctgaatacccagcggccttactacaaaagcactagtagagtgaagttcagcagaagcgccgacgcccctgcctaccagcagggacagaaccaactgtacaacgagctgaacctgggcagacgggaagagtacgacgtgctggacaagcggagaggcagggaccctgagatgggcggaaagccccagcggagaaagaacccccaggaaggactgtataacgaactccagaaagacaagatggccgaagcctacagcgagatcggcatgaagggcgagcggagaagaggcaagggccacgatggcctgtaccagggcctgagcaccgccaccaaggacacctatgacgccctgcacatgcaggccctgcctccaagaagggccaagcgatctggatctggagcaacaaacttctcactactcaaacaagcaggtgacgtggaggagaatcccgggcctatggactggatttggcgcatccttttccttgtcggcgctgctaccggcgcgcattccgggcccgaagtgcaactggttgaatccggtggcggcctggtgcaagcaggcggatctctcagacttagctgtgccgcctccggcagaaccttcacaatgggatggtttaggcaggctccagggaaagagagagagttcgtcgccgccatctctctgtctcccacactggcctactacgccgactctgtgaaaggccggttcaccatctccagagataatgccaagaacaccgtggtgctgcaaatgaactctctgaaacccgaggatacagccctgtactattgtgccgctgaccggaagtccgtgatgagcatcagacccgattactggggacagggcacacaagtcacagtgtcctctggatccggcggcggaggatctggcggaggcggatctgggggcggaggctctttcgaacaagttcagcttcaacagcctggcgctgagctggtcaaacctggcgcttctgtgaagatgagctgcaaagccagcggctacgccttcagcagctactggatcaactggatgaagcagaaacccggccagggactcgaatggatcggccaaatctatcccggcgacggcgacaccaactacaacggcaagttcaagggcagagccacactgaccgccgatacctctagcagcacagcctacatgcagctgagcagcctgaccagcgaagatagcgccgtgtacttctgtgcccggtccatcacaacagtcgtgggctgcgctatggactattggggccagggaacaagcgtgaccgtgtctagtacgcgtgcctctacaaagggaccctccgtgtttcctctggctcccagcagcaagtctacaagcggaggaacagccgctctgggctgcctggtcaaggattactttcccgagcctgtgaccgtgtcctggaatagcggagcactgacaagcggcgtgcacacctttccagccgtgctgcaaagcagcggcctgtactctctgagcagcgtggtcacagtgcctagctctagcctgggcacccagacctacatctgcaatgtgaaccacaagcctagcaacaccaaggtggacaagagagtggaacccaagagctgtggtacccaggcacagtctgactgtagcagctccacagttagccctggcgttctggctggcatcgttatgggcgacctcgtcctgactgtcctgatcgctctggcagtgtattttctcggacggctggtcccaagaggaaggggagcagctgaagctgctacccggaagcagcggatcacagagactgagtctccataccaagaactccagggacagagatccgatgtgtactccgacctgaacacacagaggccctattataagagctctagacgggttaagttttccagatccgcagacgcacccgcttaccaacaagggcagaaccaactctacaatgaacttaatttggggcggagggaagagtacgacgttctggacaaaaggaggggacgagatcccgagatgggcggaaagcctcagcgaaggaagaatccgcaagaggggctttataacgaactccagaaagataaaatggcagaagcctatagtgagattgggatgaagggagaaaggaggaggggtaaaggtcacgatgggttgtaccaaggattgagcacagccactaaagatacctatgatgcgctccacatgcaggccctgccgccaagacgcgccaagagaagcggatctggcgtgaagcagaccctgaatttcgacctgctgaagctggctggcgacgtggaatccaacccaggccctggccatatgaccgagtacaagcccacggtgcgcctcgccacccgcgacgacgtccccagggccgtacgcaccctcgccgccgcgttcgccgactaccccgccacgcgccacaccgtcgatccggaccgccacatcgagcgggtcaccgagctgcaagaactcttcctcacgcgcgtcgggctcgacatcggcaaggtgtgggtcgcggacgacggcgccgcggtggcggtctggaccacgccggagagcgtcgaagcgggggcggtgttcgccgagatcggcccgcgcatggccgagttgagcggttcccggctggccgcgcagcaacagatggaaggcctcctggcgccgcaccggcccaaggagcccgcgtggttcctggccaccgtcggcgtctcgcccgaccaccagggcaagggtctgggcagcgccgtcgtgctccccggagtggaggcggccgagcgcgccggggtgcccgccttcctggagacctccgcgccccgcaacctccccttctacgagcggctcggcttcaccgtcaccgccgacgtcgaggtgcccgaaggaccgcgcacctggtgcatgacccgcaagcccggtgcctga

SEQ ID NO: 2162 - DNA, 3474 bp, Artificial Sequence
  Synthetic Polynucleotide
atggccttaccagtgaccgccttgctcctgccgctggccttgctgctccacgccgccaggccggaagtgcagctggttgaatctggcggaggactggttcaggctggcggatctctgagactgtcttgtgccgccagcggcagaacctttagcatgggctggtttagacaggcccctggcaaagagagagagttcgtcgccgccatcacatactctggcggcagcccttactacgccgactctgtgaagggcagattcaccatcagccgggacaacgccaagaacaccgtgtacctccagatgaacagcctgaagcctgaggacaccgccgtgtactactgcgccgccaatccaacatacggcagcgactggaacgccgagaattggggccagggaacccaagtgacagtgtctagcctcgagggacagcctaaggccaatcctaccgtgacactgttccctccaagcagcgaagaactccaggccaacaaggccacacttgtgtgcctgatctccgacttctaccctggggctgtgacagtggcttggaaggccgatggatctcctgtgaaagccggcgtggaaaccaccaagccatccaagcagagcaacaacaaatacgccgccagctcctacctgagcctgacacctgagcagtggaagtcccacagatcctacagctgccaagtgacccacgaaggcagcaccgtggaaaagacagtggcccctacagagtgcagcggatcccaggctcagagcgattgcagctctagcacagtgtctccaggcgtgctggccggaattgtgatgggcgatctggtgctgacagtgctgattgccctggccgtgtacttcctgggtagactggtgcctagaggaagaggcgctgccgaagccgccacaagaaagcagagaatcaccgagacagagagcccctaccaagagctgcaaggccagagaagcgacgtgtacagcgacctgaatacccagcggccttactacaaaagcactagtagagtgaagttcagcagaagcgccgacgcccctgcctaccagcagggacagaaccaactgtacaacgagctgaacctgggcagacgggaagagtacgacgtgctggacaagcggagaggcagggaccctgagatgggcggaaagccccagcggagaaagaacccccaggaaggactgtataacgaactccagaaagacaagatggccgaagcctacagcgagatcggcatgaagggcgagcggagaagaggcaagggccacgatggcctgtaccagggcctgagcaccgccaccaaggacacctatgacgccctgcacatgcaggccctgcctccaagaagggccaagcgatctggatctggagcaacaaacttctcactactcaaacaagcaggtgacgtggaggagaatcccgggcctatggactggatttggcgcatccttttccttgtcggcgctgctaccggcgcgcattccgggcccgaagtgcaactggttgaatccggtggcggcctggtgcaagcaggcggatctctcagacttagctgtgccgcctccggcagaaccttcacaatgggatggtttaggcaggctccagggaaagagagagagttcgtcgccgccatctctctgtctcccacactggcctactacgccgactctgtgaaaggccggttcaccatctccagagataatgccaagaacaccgtggtgctgcaaatgaactctctgaaacccgaggatacagccctgtactattgtgccgctgaccggaagtccgtgatgagcatcagacccgattactggggacagggcacacaagtcacagtgtcctctacgcgtgcctctacaaagggaccctccgtgtttcctctggctcccagcagcaagtctacaagcggaggaacagccgctctgggctgcctggtcaaggattactttcccgagcctgtgaccgtgtcctggaatagcggagcactgacaagcggcgtgcacacctttccagccgtgctgcaaagcagcggcctgtactctctgagcagcgtggtcacagtgcctagctctagcctgggcacccagacctacatctgcaatgtgaaccacaagcctagcaacaccaaggtggacaagagagtggaacccaagagctgtggtacccaggcacagtctgactgtagcagctccacagttagccctggcgttctggctggcatcgttatgggcgacctcgtcctgactgtcctgatcgctctggcagtgtattttctcggacggctggtcccaagaggaaggggagcagctgaagctgctacccggaagcagcggatcacagagactgagtctccataccaagaactccagggacagagatccgatgtgtactccgacctgaacacacagaggccctattataagagctctagacgggttaagttttccagatccgcagacgcacccgcttaccaacaagggcagaaccaactctacaatgaacttaatttggggcggagggaagagtacgacgttctggacaaaaggaggggacgagatcccgagatgggcggaaagcctcagcgaaggaagaatccgcaagaggggctttataacgaactccagaaagataaaatggcagaagcctatagtgagattgggatgaagggagaaaggaggaggggtaaaggtcacgatgggttgtaccaaggattgagcacagccactaaagatacctatgatgcgctccacatgcaggccctgccgccaagacgcgccaagagaagcggatctggcgtgaagcagaccctgaatttcgacctgctgaagctggctggcgacgtggaatccaacccaggccctggccatatgaccgagtacaagcccacggtgcgcctcgccacccgcgacgacgtccccagggccgtacgcaccctcgccgccgcgttcgccgactaccccgccacgcgccacaccgtcgatccggaccgccacatcgagcgggtcaccgagctgcaagaactcttcctcacgcgcgtcgggctcgacatcggcaaggtgtgggtcgcggacgacggcgccgcggtggcggtctggaccacgccggagagcgtcgaagcgggggcggtgttcgccgagatcggcccgcgcatggccgagttgagcggttcccggctggccgcgcagcaacagatggaaggcctcctggcgccgcaccggcccaaggagcccgcgtggttcctggccaccgtcggcgtctcgcccgaccaccagggcaagggtctgggcagcgccgtcgtgctccccggagtggaggcggccgagcgcgccggggtgcccgccttcctggagacctccgcgccccgcaacctccccttctacgagcggctcggcttcaccgtcaccgccgacgtcgaggtgcccgaaggaccgcgcacctggtgcatgacccgcaagcccggtgcctga

SEQ ID NO: 2163 - DNA, 3498 bp, Artificial Sequence
  Synthetic Polynucleotide
atggccttaccagtgaccgccttgctcctgccgctggccttgctgctccacgccgccaggccggacatccagatgacacagagccctagcagcctgtctgccagcgtgggagacagagtgaccatcacatgcaaggccagcgaccacatcaacaactggctggcctggtatcagcagaagcctggacaggcccctaagctgctgatctacggcgctaccacactggaaacaggcgtgcccagcagattttctggcagcggctctggcaccgactacaccctgacaatatccagcctccagcctgaggacttcgccacctactactgtcagcagagctggaacaccccttggacattcggccagggcaccaagctggaaatcaagagactcgaggacctgaagaacgtgttcccacctgaggtggccgtgttcgagcctagcgaggccgagatcagccacacccagaaagccaccctcgtgtgcctggctaccggcttctaccccgaccatgtggaactgtcttggtgggtcaacggcaaagaggtgcacagcggcgtgtctaccgacccccagccactgaaagaacagcccgccctgaacgacagccggtactgcctgagcagcagactgagagtgtccgccaccttctggcagaacccccggaaccacttcagatgccaggtgcagttctacggcctgagcgagaacgacgagtggacccaggacagagccaagcccgtgacccagatcgtgtctgccgaagcctggggcagagccgattgcggatcccaggctcagagcgattgcagctctagcacagtgtctccaggcgtgctggccggaattgtgatgggcgatctggtgctgacagtgctgattgccctggccgtgtacttcctgggtagactggtgcctagaggaagaggcgctgccgaagccgccacaagaaagcagagaatcaccgagacagagagcccctaccaagagctgcaaggccagagaagcgacgtgtacagcgacctgaatacccagcggccttactacaaaagcactagtagagtgaagttcagcagaagcgccgacgcccctgcctaccagcagggacagaaccaactgtacaacgagctgaacctgggcagacgggaagagtacgacgtgctggacaagcggagaggcagggaccctgagatgggcggaaagccccagcggagaaagaacccccaggaaggactgtataacgaactccagaaagacaagatggccgaagcctacagcgagatcggcatgaagggcgagcggagaagaggcaagggccacgatggcctgtaccagggcctgagcaccgccaccaaggacacctatgacgccctgcacatgcaggccctgcctccaagaagggccaagcgatctggatctggagcaacaaacttctcactactcaaacaagcaggtgacgtggaggagaatcccgggcctatggactggatttggcgcatccttttccttgtcggcgctgctaccggcgcgcattccttcgaacaagttcagcttcaacagcctggcgctgagctggtcaaacctggcgcttctgtgaagatgagctgcaaagccagcggctacgccttcagcagctactggatcaactggatgaagcagaaacccggccagggactcgaatggatcggccaaatctatcccggcgacggcgacaccaactacaacggcaagttcaagggcagagccacactgaccgccgatacctctagcagcacagcctacatgcagctgagcagcctgaccagcgaagatagcgccgtgtacttctgtgcccggtccatcacaacagtcgtgggctgcgctatggactattggggccagggaacaagcgtgaccgtgtctagtacgcgtatccagaaccctgatcctgccgtgtaccagctgcgggatagcaagagcagcgacaagagcgtgtgtctgttcaccgacttcgacagccagaccaacgtgtcccagagcaaggactccgacgtgtacatcaccgataagaccgtgctggacatgcggagcatggacttcaagagcaactccgccgtggcctggtccaacaagtccgatttcgcctgcgccaacgccttcaacaacagcattatccccgaggacacattcttcccaagccccgagagcagctgcggtacccaggcacagtctgactgtagcagctccacagttagccctggcgttctggctggcatcgttatgggcgacctcgtcctgactgtcctgatcgctctggcagtgtattttctcggacggctggtcccaagaggaaggggagcagctgaagctgctacccggaagcagcggatcacagagactgagtctccataccaagaactccagggacagagatccgatgtgtactccgacctgaacacacagaggccctattataagagctctagacgggttaagttttccagatccgcagacgcacccgcttaccaacaagggcagaaccaactctacaatgaacttaatttggggcggagggaagagtacgacgttctggacaaaaggaggggacgagatcccgagatgggcggaaagcctcagcgaaggaagaatccgcaagaggggctttataacgaactccagaaagataaaatggcagaagcctatagtgagattgggatgaagggagaaaggaggaggggtaaaggtcacgatgggttgtaccaaggattgagcacagccactaaagatacctatgatgcgctccacatgcaggccctgccgccaagacgcgccaagagaagcggatctggcgtgaagcagaccctgaatttcgacctgctgaagctggctggcgacgtggaatccaacccaggccctggccatatgaccgagtacaagcccacggtgcgcctcgccacccgcgacgacgtccccagggccgtacgcaccctcgccgccgcgttcgccgactaccccgccacgcgccacaccgtcgatccggaccgccacatcgagcgggtcaccgagctgcaagaactcttcctcacgcgcgtcgggctcgacatcggcaaggtgtgggtcgcggacgacggcgccgcggtggcggtctggaccacgccggagagcgtcgaagcgggggcggtgttcgccgagatcggcccgcgcatggccgagttgagcggttcccggctggccgcgcagcaacagatggaaggcctcctggcgccgcaccggcccaaggagcccgcgtggttcctggccaccgtcggcgtctcgcccgaccaccagggcaagggtctgggcagcgccgtcgtgctccccggagtggaggcggccgagcgcgccggggtgcccgccttcctggagacctccgcgccccgcaacctccccttctacgagcggctcggcttcaccgtcaccgccgacgtcgaggtgcccgaaggaccgcgcacctggtgcatgacccgcaagcccggtgcctga

SEQ ID NO: 2164 - DNA, 3909 bp, Artificial Sequence
  Synthetic Polynucleotide
atggccttaccagtgaccgccttgctcctgccgctggccttgctgctccacgccgccaggccggaagtgcagctggttgaatctggcggaggactggttcaggctggcggatctctgagactgtcttgtgccgccagcggcagaacctttagcatgggctggtttagacaggcccctggcaaagagagagagttcgtcgccgccatcacatactctggcggcagcccttactacgccgactctgtgaagggcagattcaccatcagccgggacaacgccaagaacaccgtgtacctccagatgaacagcctgaagcctgaggacaccgccgtgtactactgcgccgccaatccaacatacggcagcgactggaacgccgagaattggggccagggaacccaagtgacagtgtctagcggtaccggcggaggcggatctggcggcggaggtagcggtggcggaggatctgaattcgacatccagatgacacagagccctagcagcctgtctgccagcgtgggagacagagtgaccatcacatgcaaggccagcgaccacatcaacaactggctggcctggtatcagcagaagcctggacaggcccctaagctgctgatctacggcgctaccacactggaaacaggcgtgcccagcagattttctggcagcggctctggcaccgactacaccctgacaatatccagcctccagcctgaggacttcgccacctactactgtcagcagagctggaacaccccttggacattcggccagggcaccaagctggaaatcaagagactcgaggacctgaagaacgtgttcccacctgaggtggccgtgttcgagcctagcgaggccgagatcagccacacccagaaagccaccctcgtgtgcctggctaccggcttctaccccgaccatgtggaactgtcttggtgggtcaacggcaaagaggtgcacagcggcgtgtctaccgacccccagccactgaaagaacagcccgccctgaacgacagccggtactgcctgagcagcagactgagagtgtccgccaccttctggcagaacccccggaaccacttcagatgccaggtgcagttctacggcctgagcgagaacgacgagtggacccaggacagagccaagcccgtgacccagatcgtgtctgccgaagcctggggcagagccgattgcggatcccaggctcagagcgattgcagctctagcacagtgtctccaggcgtgctggccggaattgtgatgggcgatctggtgctgacagtgctgattgccctggccgtgtacttcctgggtagactggtgcctagaggaagaggcgctgccgaagccgccacaagaaagcagagaatcaccgagacagagagcccctaccaagagctgcaaggccagagaagcgacgtgtacagcgacctgaatacccagcggccttactacaaaagcactagtagagtgaagttcagcagaagcgccgacgcccctgcctaccagcagggacagaaccaactgtacaacgagctgaacctgggcagacgggaagagtacgacgtgctggacaagcggagaggcagggaccctgagatgggcggaaagccccagcggagaaagaacccccaggaaggactgtataacgaactccagaaagacaagatggccgaagcctacagcgagatcggcatgaagggcgagcggagaagaggcaagggccacgatggcctgtaccagggcctgagcaccgccaccaaggacacctatgacgccctgcacatgcaggccctgcctccaagaagggccaagcgatctggatctggagcaacaaacttctcactactcaaacaagcaggtgacgtggaggagaatcccgggcctatggactggatttggcgcatccttttccttgtcggcgctgctaccggcgcgcattccttcgaacaagttcagcttcaacagcctggcgctgagctggtcaaacctggcgcttctgtgaagatgagctgcaaagccagcggctacgccttcagcagctactggatcaactggatgaagcagaaacccggccagggactcgaatggatcggccaaatctatcccggcgacggcgacaccaactacaacggcaagttcaagggcagagccacactgaccgccgatacctctagcagcacagcctacatgcagctgagcagcctgaccagcgaagatagcgccgtgtacttctgtgcccggtccatcacaacagtcgtgggctgcgctatggactattggggccagggaacaagcgtgaccgtgtctagtacgcgtatccagaaccctgatcctgccgtgtaccagctgcgggatagcaagagcagcgacaagagcgtgtgtctgttcaccgacttcgacagccagaccaacgtgtcccagagcaaggactccgacgtgtacatcaccgataagaccgtgctggacatgcggagcatggacttcaagagcaactccgccgtggcctggtccaacaagtccgatttcgcctgcgccaacgccttcaacaacagcattatccccgaggacacattcttcccaagccccgagagcagctgcggtacccaggcacagtctgactgtagcagctccacagttagccctggcgttctggctggcatcgttatgggcgacctcgtcctgactgtcctgatcgctctggcagtgtattttctcggacggctggtcccaagaggaaggggagcagctgaagctgctacccggaagcagcggatcacagagactgagtctccataccaagaactccagggacagagatccgatgtgtactccgacctgaacacacagaggccctattataagagctctagacgggttaagttttccagatccgcagacgcacccgcttaccaacaagggcagaaccaactctacaatgaacttaatttggggcggagggaagagtacgacgttctggacaaaaggaggggacgagatcccgagatgggcggaaagcctcagcgaaggaagaatccgcaagaggggctttataacgaactccagaaagataaaatggcagaagcctatagtgagattgggatgaagggagaaaggaggaggggtaaaggtcacgatgggttgtaccaaggattgagcacagccactaaagatacctatgatgcgctccacatgcaggccctgccgccaagacgcgccaagagaagcggatctggcgtgaagcagaccctgaatttcgacctgctgaagctggctggcgacgtggaatccaacccaggccctggccatatgaccgagtacaagcccacggtgcgcctcgccacccgcgacgacgtccccagggccgtacgcaccctcgccgccgcgttcgccgactaccccgccacgcgccacaccgtcgatccggaccgccacatcgagcgggtcaccgagctgcaagaactcttcctcacgcgcgtcgggctcgacatcggcaaggtgtgggtcgcggacgacggcgccgcggtggcggtctggaccacgccggagagcgtcgaagcgggggcggtgttcgccgagatcggcccgcgcatggccgagttgagcggttcccggctggccgcgcagcaacagatggaaggcctcctggcgccgcaccggcccaaggagcccgcgtggttcctggccaccgtcggcgtctcgcccgaccaccagggcaagggtctgggcagcgccgtcgtgctccccggagtggaggcggccgagcgcgccggggtgcccgccttcctggagacctccgcgccccgcaacctccccttctacgagcggctcggcttcaccgtcaccgccgacgtcgaggtgcccgaaggaccgcgcacctggtgcatgacccgcaagcccggtgcctga

SEQ ID NO: 2165 - DNA, 4320 bp, Artificial Sequence
  Synthetic Polynucleotide
atggccttaccagtgaccgccttgctcctgccgctggccttgctgctccacgccgccaggccggaagtgcagctggttgaatctggcggaggactggttcaggctggcggatctctgagactgtcttgtgccgccagcggcagaacctttagcatgggctggtttagacaggcccctggcaaagagagagagttcgtcgccgccatcacatactctggcggcagcccttactacgccgactctgtgaagggcagattcaccatcagccgggacaacgccaagaacaccgtgtacctccagatgaacagcctgaagcctgaggacaccgccgtgtactactgcgccgccaatccaacatacggcagcgactggaacgccgagaattggggccagggaacccaagtgacagtgtctagcggtaccggcggaggcggatctggcggcggaggtagcggtggcggaggatctgaattcgacatccagatgacacagagccctagcagcctgtctgccagcgtgggagacagagtgaccatcacatgcaaggccagcgaccacatcaacaactggctggcctggtatcagcagaagcctggacaggcccctaagctgctgatctacggcgctaccacactggaaacaggcgtgcccagcagattttctggcagcggctctggcaccgactacaccctgacaatatccagcctccagcctgaggacttcgccacctactactgtcagcagagctggaacaccccttggacattcggccagggcaccaagctggaaatcaagagactcgaggacctgaagaacgtgttcccacctgaggtggccgtgttcgagcctagcgaggccgagatcagccacacccagaaagccaccctcgtgtgcctggctaccggcttctaccccgaccatgtggaactgtcttggtgggtcaacggcaaagaggtgcacagcggcgtgtctaccgacccccagccactgaaagaacagcccgccctgaacgacagccggtactgcctgagcagcagactgagagtgtccgccaccttctggcagaacccccggaaccacttcagatgccaggtgcagttctacggcctgagcgagaacgacgagtggacccaggacagagccaagcccgtgacccagatcgtgtctgccgaagcctggggcagagccgattgcggatcccaggctcagagcgattgcagctctagcacagtgtctccaggcgtgctggccggaattgtgatgggcgatctggtgctgacagtgctgattgccctggccgtgtacttcctgggtagactggtgcctagaggaagaggcgctgccgaagccgccacaagaaagcagagaatcaccgagacagagagcccctaccaagagctgcaaggccagagaagcgacgtgtacagcgacctgaatacccagcggccttactacaaaagcactagtagagtgaagttcagcagaagcgccgacgcccctgcctaccagcagggacagaaccaactgtacaacgagctgaacctgggcagacgggaagagtacgacgtgctggacaagcggagaggcagggaccctgagatgggcggaaagccccagcggagaaagaacccccaggaaggactgtataacgaactccagaaagacaagatggccgaagcctacagcgagatcggcatgaagggcgagcggagaagaggcaagggccacgatggcctgtaccagggcctgagcaccgccaccaaggacacctatgacgccctgcacatgcaggccctgcctccaagaagggccaagcgatctggatctggagcaacaaacttctcactactcaaacaagcaggtgacgtggaggagaatcccgggcctatggactggatttggcgcatccttttccttgtcggcgctgctaccggcgcgcattccgggcccgaagtgcaactggttgaatccggtggcggcctggtgcaagcaggcggatctctcagacttagctgtgccgcctccggcagaaccttcacaatgggatggtttaggcaggctccagggaaagagagagagttcgtcgccgccatctctctgtctcccacactggcctactacgccgactctgtgaaaggccggttcaccatctccagagataatgccaagaacaccgtggtgctgcaaatgaactctctgaaacccgaggatacagccctgtactattgtgccgctgaccggaagtccgtgatgagcatcagacccgattactggggacagggcacacaagtcacagtgtcctctggatccggcggcggaggatctggcggaggcggatctgggggcggaggctctttcgaacaagttcagcttcaacagcctggcgctgagctggtcaaacctggcgcttctgtgaagatgagctgcaaagccagcggctacgccttcagcagctactggatcaactggatgaagcagaaacccggccagggactcgaatggatcggccaaatctatcccggcgacggcgacaccaactacaacggcaagttcaagggcagagccacactgaccgccgatacctctagcagcacagcctacatgcagctgagcagcctgaccagcgaagatagcgccgtgtacttctgtgcccggtccatcacaacagtcgtgggctgcgctatggactattggggccagggaacaagcgtgaccgtgtctagtacgcgtatccagaaccctgatcctgccgtgtaccagctgcgggatagcaagagcagcgacaagagcgtgtgtctgttcaccgacttcgacagccagaccaacgtgtcccagagcaaggactccgacgtgtacatcaccgataagaccgtgctggacatgcggagcatggacttcaagagcaactccgccgtggcctggtccaacaagtccgatttcgcctgcgccaacgccttcaacaacagcattatccccgaggacacattcttcccaagccccgagagcagctgcggtacccaggcacagtctgactgtagcagctccacagttagccctggcgttctggctggcatcgttatgggcgacctcgtcctgactgtcctgatcgctctggcagtgtattttctcggacggctggtcccaagaggaaggggagcagctgaagctgctacccggaagcagcggatcacagagactgagtctccataccaagaactccagggacagagatccgatgtgtactccgacctgaacacacagaggccctattataagagctctagacgggttaagttttccagatccgcagacgcacccgcttaccaacaagggcagaaccaactctacaatgaacttaatttggggcggagggaagagtacgacgttctggacaaaaggaggggacgagatcccgagatgggcggaaagcctcagcgaaggaagaatccgcaagaggggctttataacgaactccagaaagataaaatggcagaagcctatagtgagattgggatgaagggagaaaggaggaggggtaaaggtcacgatgggttgtaccaaggattgagcacagccactaaagatacctatgatgcgctccacatgcaggccctgccgccaagacgcgccaagagaagcggatctggcgtgaagcagaccctgaatttcgacctgctgaagctggctggcgacgtggaatccaacccaggccctggccatatgaccgagtacaagcccacggtgcgcctcgccacccgcgacgacgtccccagggccgtacgcaccctcgccgccgcgttcgccgactaccccgccacgcgccacaccgtcgatccggaccgccacatcgagcgggtcaccgagctgcaagaactcttcctcacgcgcgtcgggctcgacatcggcaaggtgtgggtcgcggacgacggcgccgcggtggcggtctggaccacgccggagagcgtcgaagcgggggcggtgttcgccgagatcggcccgcgcatggccgagttgagcggttcccggctggccgcgcagcaacagatggaaggcctcctggcgccgcaccggcccaaggagcccgcgtggttcctggccaccgtcggcgtctcgcccgaccaccagggcaagggtctgggcagcgccgtcgtgctccccggagtggaggcggccgagcgcgccggggtgcccgccttcctggagacctccgcgccccgcaacctccccttctacgagcggctcggcttcaccgtcaccgccgacgtcgaggtgcccgaaggaccgcgcacctggtgcatgacccgcaagcccggtgcctga

SEQ ID NO: 2166 - DNA, 3519 bp, Artificial Sequence
  Synthetic Polynucleotide
atggccttaccagtgaccgccttgctcctgccgctggccttgctgctccacgccgccaggccggaagtgcagctggttgaatctggcggaggactggttcaggctggcggatctctgagactgtcttgtgccgccagcggcagaacctttagcatgggctggtttagacaggcccctggcaaagagagagagttcgtcgccgccatcacatactctggcggcagcccttactacgccgactctgtgaagggcagattcaccatcagccgggacaacgccaagaacaccgtgtacctccagatgaacagcctgaagcctgaggacaccgccgtgtactactgcgccgccaatccaacatacggcagcgactggaacgccgagaattggggccagggaacccaagtgacagtgtctagcctcgaggacctgaagaacgtgttcccacctgaggtggccgtgttcgagcctagcgaggccgagatcagccacacccagaaagccaccctcgtgtgcctggctaccggcttctaccccgaccatgtggaactgtcttggtgggtcaacggcaaagaggtgcacagcggcgtgtctaccgacccccagccactgaaagaacagcccgccctgaacgacagccggtactgcctgagcagcagactgagagtgtccgccaccttctggcagaacccccggaaccacttcagatgccaggtgcagttctacggcctgagcgagaacgacgagtggacccaggacagagccaagcccgtgacccagatcgtgtctgccgaagcctggggcagagccgattgcggatcccaggctcagagcgattgcagctctagcacagtgtctccaggcgtgctggccggaattgtgatgggcgatctggtgctgacagtgctgattgccctggccgtgtacttcctgggtagactggtgcctagaggaagaggcgctgccgaagccgccacaagaaagcagagaatcaccgagacagagagcccctaccaagagctgcaaggccagagaagcgacgtgtacagcgacctgaatacccagcggccttactacaaaagcactagtagagtgaagttcagcagaagcgccgacgcccctgcctaccagcagggacagaaccaactgtacaacgagctgaacctgggcagacgggaagagtacgacgtgctggacaagcggagaggcagggaccctgagatgggcggaaagccccagcggagaaagaacccccaggaaggactgtataacgaactccagaaagacaagatggccgaagcctacagcgagatcggcatgaagggcgagcggagaagaggcaagggccacgatggcctgtaccagggcctgagcaccgccaccaaggacacctatgacgccctgcacatgcaggccctgcctccaagaagggccaagcgatctggatctggagcaacaaacttctcactactcaaacaagcaggtgacgtggaggagaatcccgggcctatggactggatttggcgcatccttttccttgtcggcgctgctaccggcgcgcattccgggcccgaagtgcaactggttgaatccggtggcggcctggtgcaagcaggcggatctctcagacttagctgtgccgcctccggcagaaccttcacaatgggatggtttaggcaggctccagggaaagagagagagttcgtcgccgccatctctctgtctcccacactggcctactacgccgactctgtgaaaggccggttcaccatctccagagataatgccaagaacaccgtggtgctgcaaatgaactctctgaaacccgaggatacagccctgtactattgtgccgctgaccggaagtccgtgatgagcatcagacccgattactggggacagggcacacaagtcacagtgtcctctacgcgtatccagaaccctgatcctgccgtgtaccagctgcgggatagcaagagcagcgacaagagcgtgtgtctgttcaccgacttcgacagccagaccaacgtgtcccagagcaaggactccgacgtgtacatcaccgataagaccgtgctggacatgcggagcatggacttcaagagcaactccgccgtggcctggtccaacaagtccgatttcgcctgcgccaacgccttcaacaacagcattatccccgaggacacattcttcccaagccccgagagcagctgcggtacccaggcacagtctgactgtagcagctccacagttagccctggcgttctggctggcatcgttatgggcgacctcgtcctgactgtcctgatcgctctggcagtgtattttctcggacggctggtcccaagaggaaggggagcagctgaagctgctacccggaagcagcggatcacagagactgagtctccataccaagaactccagggacagagatccgatgtgtactccgacctgaacacacagaggccctattataagagctctagacgggttaagttttccagatccgcagacgcacccgcttaccaacaagggcagaaccaactctacaatgaacttaatttggggcggagggaagagtacgacgttctggacaaaaggaggggacgagatcccgagatgggcggaaagcctcagcgaaggaagaatccgcaagaggggctttataacgaactccagaaagataaaatggcagaagcctatagtgagattgggatgaagggagaaaggaggaggggtaaaggtcacgatgggttgtaccaaggattgagcacagccactaaagatacctatgatgcgctccacatgcaggccctgccgccaagacgcgccaagagaagcggatctggcgtgaagcagaccctgaatttcgacctgctgaagctggctggcgacgtggaatccaacccaggccctggccatatgaccgagtacaagcccacggtgcgcctcgccacccgcgacgacgtccccagggccgtacgcaccctcgccgccgcgttcgccgactaccccgccacgcgccacaccgtcgatccggaccgccacatcgagcgggtcaccgagctgcaagaactcttcctcacgcgcgtcgggctcgacatcggcaaggtgtgggtcgcggacgacggcgccgcggtggcggtctggaccacgccggagagcgtcgaagcgggggcggtgttcgccgagatcggcccgcgcatggccgagttgagcggttcccggctggccgcgcagcaacagatggaaggcctcctggcgccgcaccggcccaaggagcccgcgtggttcctggccaccgtcggcgtctcgcccgaccaccagggcaagggtctgggcagcgccgtcgtgctccccggagtggaggcggccgagcgcgccggggtgcccgccttcctggagacctccgcgccccgcaacctccccttctacgagcggctcggcttcaccgtcaccgccgacgtcgaggtgcccgaaggaccgcgcacctggtgcatgacccgcaagcccggtgcctga

SEQ ID NO: 2167 - DNA, 1794 bp, Artificial Sequence
  Synthetic Polynucleotide
atggccttaccagtgaccgccttgctcctgccgctggccttgctgctccacgccgccaggccggcatgcgaagtgcagctgcttgaaagtggcggcggactgattcagcctggcggatctctgagactgagctgtgccgccagcggcttcaccttttctagccacgccatgacctgggtccgacaggcacctggaaaagggcttgaatgggtgtccgccatcagcggctctggcgattacacacactacgccgacagcgtgaagggcagattcaccatcagcagagacaacagcaagaacaccgtgtacctccagatgaacagcctgagagccgaggacagcgccgtgtattattgcgccaaggatgaggatggcggcagcctgcttggacacagaggacaaggcaccctggtcaccgtttcttccggtaccggcggaggcggatctggcggcggaggtagcggtggcggaggatctgaattcggatctctcgagcaggctcagagcgattgcagctctagcacagtgtctccaggcgtgctggccggaattgtgatgggcgatctggtgctgacagtgctgattgccctggccgtgtacttcctgggtagactggtgcctagaggaagaggcgctgccgaagccgccacaagaaagcagagaatcaccgagacagagagcccctaccaagagctgcaaggccagagaagcgacgtgtacagcgacctgaatacccagcggccttactacaaaagcactagtagagtgaagttcagcagaagcgccgacgcccctgcctaccagcagggacagaaccaactgtacaacgagctgaacctgggcagacgggaagagtacgacgtgctggacaagcggagaggcagggaccctgagatgggcggaaagccccagcggagaaagaacccccaggaaggactgtataacgaactccagaaagacaagatggccgaagcctacagcgagatcggcatgaagggcgagcggagaagaggcaagggccacgatggcctgtaccagggcctgagcaccgccaccaaggacacctatgacgccctgcacatgcaggccctgcctccaagaagggccaagcgatctggatctggagcaacaaacttctcactactcaaacaagcaggtgacgtggaggagaatcccgggcctactagaggccatatgaccgagtacaagcccacggtgcgcctcgccacccgcgacgacgtccccagggccgtacgcaccctcgccgccgcgttcgccgactaccccgccacgcgccacaccgtcgatccggaccgccacatcgagcgggtcaccgagctgcaagaactcttcctcacgcgcgtcgggctcgacatcggcaaggtgtgggtcgcggacgacggcgccgcggtggcggtctggaccacgccggagagcgtcgaagcgggggcggtgttcgccgagatcggcccgcgcatggccgagttgagcggttcccggctggccgcgcagcaacagatggaaggcctcctggcgccgcaccggcccaaggagcccgcgtggttcctggccaccgtcggcgtctcgcccgaccaccagggcaagggtctgggcagcgccgtcgtgctccccggagtggaggcggccgagcgcgccggggtgcccgccttcctggagacctccgcgccccgcaacctccccttctacgagcggctcggcttcaccgtcaccgccgacgtcgaggtgcccgaaggaccgcgcacctggtgcatgacccgcaagcccggtgcctga

SEQ ID NO: 2168 - DNA, 2976 bp, Artificial Sequence
  Synthetic Polynucleotide
atggccttaccagtgaccgccttgctcctgccgctggccttgctgctccacgccgccaggccggacatccagatgacacagagccctagcagcctgtctgccagcgtgggagacagagtgaccatcacatgcaaggccagcgaccacatcaacaactggctggcctggtatcagcagaagcctggacaggcccctaagctgctgatctacggcgctaccacactggaaacaggcgtgcccagcagattttctggcagcggctctggcaccgactacaccctgacaatatccagcctccagcctgaggacttcgccacctactactgtcagcagagctggaacaccccttggacattcggccagggcaccaagctggaaatcaagagactcgagacaacacctggcgagagaagtagcctgcctgccttctatcctggcaccagcggctcttgttctggctgtggatctctgagcctgcctctgctggctggactggttgctgctgatgctgtggcctctctgctgattgtgggagccgtgttcctgtgcgccagacctagaagaagccccgctcaagaggacggcaaggtgtacatcaacatgcccggcagaggaagcactagtagagtgaagttcagcagaagcgccgacgcccctgcctaccagcagggacagaaccaactgtacaacgagctgaacctgggcagacgggaagagtacgacgtgctggacaagcggagaggcagggaccctgagatgggcggaaagccccagcggagaaagaacccccaggaaggactgtataacgaactccagaaagacaagatggccgaagcctacagcgagatcggcatgaagggcgagcggagaagaggcaagggccacgatggcctgtaccagggcctgagcaccgccaccaaggacacctatgacgccctgcacatgcaggccctgcctccaagaagggccaagcgatctggatctggagcaacaaacttctcactactcaaacaagcaggtgacgtggaggagaatcccgggcctatggactggatttggcgcatccttttccttgtcggcgctgctaccggcgcgcattccttcgaacaagttcagcttcaacagcctggcgctgagctggtcaaacctggcgcttctgtgaagatgagctgcaaagccagcggctacgccttcagcagctactggatcaactggatgaagcagaaacccggccagggactcgaatggatcggccaaatctatcccggcgacggcgacaccaactacaacggcaagttcaagggcagagccacactgaccgccgatacctctagcagcacagcctacatgcagctgagcagcctgaccagcgaagatagcgccgtgtacttctgtgcccggtccatcacaacagtcgtgggctgcgctatggactattggggccagggaacaagcgtgaccgtgtctagtacgcgtcagagttttgggttgttggaccctaaattgagctatctgttggacggaatcctgttcatttacggagtgatcctgaccgcattgttcctgtggcgacgcaagcgcaaagaaaagcaaagcgagacaagcccaaaagaatttctcactatatacgaggacgtgaaagatttgaagacgaggcggaatcatgagcaagagcagacatttcctggcgggggctctactatctactcaatgattcaatcccaaagctccgctccgacttcccaagagcccgcttacactctctactcactgatacagccttcaagaaaatcaggctctcggaaacggaatcattccccatccttcaatagtaccatctatgaagtaatcggtaagagtcaacctaaagctcaaaaccccgctcgcttgagccgcaaggagctggaaaacttcgatgtatatagctctagaagctctagacgggttaagttttccagatccgcagacgcacccgcttaccaacaagggcagaaccaactctacaatgaacttaatttggggcggagggaagagtacgacgttctggacaaaaggaggggacgagatcccgagatgggcggaaagcctcagcgaaggaagaatccgcaagaggggctttataacgaactccagaaagataaaatggcagaagcctatagtgagattgggatgaagggagaaaggaggaggggtaaaggtcacgatgggttgtaccaaggattgagcacagccactaaagatacctatgatgcgctccacatgcaggccctgccgccaagacgcgccaagagaagcggatctggcgtgaagcagaccctgaatttcgacctgctgaagctggctggcgacgtggaatccaacccaggccctggccatatgaccgagtacaagcccacggtgcgcctcgccacccgcgacgacgtccccagggccgtacgcaccctcgccgccgcgttcgccgactaccccgccacgcgccacaccgtcgatccggaccgccacatcgagcgggtcaccgagctgcaagaactcttcctcacgcgcgtcgggctcgacatcggcaaggtgtgggtcgcggacgacggcgccgcggtggcggtctggaccacgccggagagcgtcgaagcgggggcggtgttcgccgagatcggcccgcgcatggccgagttgagcggttcccggctggccgcgcagcaacagatggaaggcctcctggcgccgcaccggcccaaggagcccgcgtggttcctggccaccgtcggcgtctcgcccgaccaccagggcaagggtctgggcagcgccgtcgtgctccccggagtggaggcggccgagcgcgccggggtgcccgccttcctggagacctccgcgccccgcaacctccccttctacgagcggctcggcttcaccgtcaccgccgacgtcgaggtgcccgaaggaccgcgcacctggtgcatgacccgcaagcccggtgcctga

SEQ ID NO: 2169 - DNA, 3132 bp, Artificial Sequence
  Synthetic Polynucleotide
atggccttaccagtgaccgccttgctcctgccgctggccttgctgctccacgccgccaggccggcatgcgaagtgcagctgcttgaaagtggcggcggactgattcagcctggcggatctctgagactgagctgtgccgccagcggcttcaccttttctagccacgccatgacctgggtccgacaggcacctggaaaagggcttgaatgggtgtccgccatcagcggctctggcgattacacacactacgccgacagcgtgaagggcagattcaccatcagcagagacaacagcaagaacaccgtgtacctccagatgaacagcctgagagccgaggacagcgccgtgtattattgcgccaaggatgaggatggcggcagcctgcttggacacagaggacaaggcaccctggtcaccgtttcttccggtaccggcggaggcggatctggcggcggaggtagcggtggcggaggatctgaattcggatctctcgagacaacacctggcgagagaagtagcctgcctgccttctatcctggcaccagcggctcttgttctggctgtggatctctgagcctgcctctgctggctggactggttgctgctgatgctgtggcctctctgctgattgtgggagccgtgttcctgtgcgccagacctagaagaagccccgctcaagaggacggcaaggtgtacatcaacatgcccggcagaggaagcactagtagagtgaagttcagcagaagcgccgacgcccctgcctaccagcagggacagaaccaactgtacaacgagctgaacctgggcagacgggaagagtacgacgtgctggacaagcggagaggcagggaccctgagatgggcggaaagccccagcggagaaagaacccccaggaaggactgtataacgaactccagaaagacaagatggccgaagcctacagcgagatcggcatgaagggcgagcggagaagaggcaagggccacgatggcctgtaccagggcctgagcaccgccaccaaggacacctatgacgccctgcacatgcaggccctgcctccaagaagggccaagcgatctggatctggagcaacaaacttctcactactcaaacaagcaggtgacgtggaggagaatcccgggcctatggactggatttggcgcatccttttccttgtcggcgctgctaccggcgcgcattccgggcccgaagtgcagctggttgaatctggcggaggactggttcaggctggcggatctctgagactgtcttgtgccgccagcggcagaacctttagcatgggctggtttagacaggcccctggcaaagagagagagttcgtcgccgccatcacatactctggcggcagcccttactacgccgactctgtgaagggcagattcaccatcagccgggacaacgccaagaacaccgtgtacctccagatgaacagcctgaagcctgaggacaccgccgtgtactactgcgccgccaatccaacatacggcagcgactggaacgccgagaattggggccagggaacccaagtgacagtgtctagcggatccggcggcggaggatctggcggaggcggatctgggggcggaggctctttcgaaggcagcacgcgtcagagttttgggttgttggaccctaaattgagctatctgttggacggaatcctgttcatttacggagtgatcctgaccgcattgttcctgtggcgacgcaagcgcaaagaaaagcaaagcgagacaagcccaaaagaatttctcactatatacgaggacgtgaaagatttgaagacgaggcggaatcatgagcaagagcagacatttcctggcgggggctctactatctactcaatgattcaatcccaaagctccgctccgacttcccaagagcccgcttacactctctactcactgatacagccttcaagaaaatcaggctctcggaaacggaatcattccccatccttcaatagtaccatctatgaagtaatcggtaagagtcaacctaaagctcaaaaccccgctcgcttgagccgcaaggagctggaaaacttcgatgtatatagctctagaagctctagacgggttaagttttccagatccgcagacgcacccgcttaccaacaagggcagaaccaactctacaatgaacttaatttggggcggagggaagagtacgacgttctggacaaaaggaggggacgagatcccgagatgggcggaaagcctcagcgaaggaagaatccgcaagaggggctttataacgaactccagaaagataaaatggcagaagcctatagtgagattgggatgaagggagaaaggaggaggggtaaaggtcacgatgggttgtaccaaggattgagcacagccactaaagatacctatgatgcgctccacatgcaggccctgccgccaagacgcgccaagagaagcggatctggcgtgaagcagaccctgaatttcgacctgctgaagctggctggcgacgtggaatccaacccaggccctggccatatgaccgagtacaagcccacggtgcgcctcgccacccgcgacgacgtccccagggccgtacgcaccctcgccgccgcgttcgccgactaccccgccacgcgccacaccgtcgatccggaccgccacatcgagcgggtcaccgagctgcaagaactcttcctcacgcgcgtcgggctcgacatcggcaaggtgtgggtcgcggacgacggcgccgcggtggcggtctggaccacgccggagagcgtcgaagcgggggcggtgttcgccgagatcggcccgcgcatggccgagttgagcggttcccggctggccgcgcagcaacagatggaaggcctcctggcgccgcaccggcccaaggagcccgcgtggttcctggccaccgtcggcgtctcgcccgaccaccagggcaagggtctgggcagcgccgtcgtgctccccggagtggaggcggccgagcgcgccggggtgcccgccttcctggagacctccgcgccccgcaacctccccttctacgagcggctcggcttcaccgtcaccgccgacgtcgaggtgcccgaaggaccgcgcacctggtgcatgacccgcaagcccggtgcctga

SEQ ID NO: 2170 - DNA, 3579 bp, Artificial Sequence
  Synthetic Polynucleotide
atggccttaccagtgaccgccttgctcctgccgctggccttgctgctccacgccgccaggccggacatccagatgacacagagccctagcagcctgtctgccagcgtgggagacagagtgaccatcacatgcaaggccagcgaccacatcaacaactggctggcctggtatcagcagaagcctggacaggcccctaagctgctgatctacggcgctaccacactggaaacaggcgtgcccagcagattttctggcagcggctctggcaccgactacaccctgacaatatccagcctccagcctgaggacttcgccacctactactgtcagcagagctggaacaccccttggacattcggccagggcaccaagctggaaatcaagagactcgagggacagcctaaggccaatcctaccgtgacactgttccctccaagcagcgaagaactccaggccaacaaggccacacttgtgtgcctgatctccgacttctaccctggggctgtgacagtggcttggaaggccgatggatctcctgtgaaagccggcgtggaaaccaccaagccatccaagcagagcaacaacaaatacgccgccagctcctacctgagcctgacacctgagcagtggaagtcccacagatcctacagctgccaagtgacccacgaaggcagcaccgtggaaaagacagtggcccctacagagtgcagcggatccacaacacctggcgagagaagtagcctgcctgccttctatcctggcaccagcggctcttgttctggctgtggatctctgagcctgcctctgctggctggactggttgctgctgatgctgtggcctctctgctgattgtgggagccgtgttcctgtgcgccagacctagaagaagccccgctcaagaggacggcaaggtgtacatcaacatgcccggcagaggaagcactagtagagtgaagttcagcagaagcgccgacgcccctgcctaccagcagggacagaaccaactgtacaacgagctgaacctgggcagacgggaagagtacgacgtgctggacaagcggagaggcagggaccctgagatgggcggaaagccccagcggagaaagaacccccaggaaggactgtataacgaactccagaaagacaagatggccgaagcctacagcgagatcggcatgaagggcgagcggagaagaggcaagggccacgatggcctgtaccagggcctgagcaccgccaccaaggacacctatgacgccctgcacatgcaggccctgcctccaagaagggccaagcgatctggatctggagcaacaaacttctcactactcaaacaagcaggtgacgtggaggagaatcccgggcctatggactggatttggcgcatccttttccttgtcggcgctgctaccggcgcgcattccttcgaacaagttcagcttcaacagcctggcgctgagctggtcaaacctggcgcttctgtgaagatgagctgcaaagccagcggctacgccttcagcagctactggatcaactggatgaagcagaaacccggccagggactcgaatggatcggccaaatctatcccggcgacggcgacaccaactacaacggcaagttcaagggcagagccacactgaccgccgatacctctagcagcacagcctacatgcagctgagcagcctgaccagcgaagatagcgccgtgtacttctgtgcccggtccatcacaacagtcgtgggctgcgctatggactattggggccagggaacaagcgtgaccgtgtctagtacgcgtgcctctacaaagggaccctccgtgtttcctctggctcccagcagcaagtctacaagcggaggaacagccgctctgggctgcctggtcaaggattactttcccgagcctgtgaccgtgtcctggaatagcggagcactgacaagcggcgtgcacacctttccagccgtgctgcaaagcagcggcctgtactctctgagcagcgtggtcacagtgcctagctctagcctgggcacccagacctacatctgcaatgtgaaccacaagcctagcaacaccaaggtggacaagagagtggaacccaagagctgtggtacccagagttttgggttgttggaccctaaattgagctatctgttggacggaatcctgttcatttacggagtgatcctgaccgcattgttcctgtggcgacgcaagcgcaaagaaaagcaaagcgagacaagcccaaaagaatttctcactatatacgaggacgtgaaagatttgaagacgaggcggaatcatgagcaagagcagacatttcctggcgggggctctactatctactcaatgattcaatcccaaagctccgctccgacttcccaagagcccgcttacactctctactcactgatacagccttcaagaaaatcaggctctcggaaacggaatcattccccatccttcaatagtaccatctatgaagtaatcggtaagagtcaacctaaagctcaaaaccccgctcgcttgagccgcaaggagctggaaaacttcgatgtatatagctctagaagctctagacgggttaagttttccagatccgcagacgcacccgcttaccaacaagggcagaaccaactctacaatgaacttaatttggggcggagggaagagtacgacgttctggacaaaaggaggggacgagatcccgagatgggcggaaagcctcagcgaaggaagaatccgcaagaggggctttataacgaactccagaaagataaaatggcagaagcctatagtgagattgggatgaagggagaaaggaggaggggtaaaggtcacgatgggttgtaccaaggattgagcacagccactaaagatacctatgatgcgctccacatgcaggccctgccgccaagacgcgccaagagaagcggatctggcgtgaagcagaccctgaatttcgacctgctgaagctggctggcgacgtggaatccaacccaggccctggccatatggctacctacgaggtgctgtgcgaggtggcaagaaagctgggcaccgacgacagagaagtggtgctgttcctgctgaacgtgttcatccctcagcctacactggcccagctgatcggtgcactgagagccctgaaagaggaaggccggctgacctttcctctgctggccgaatgcctgttcagagccggaagaagggatctgctgcgggacctgctgcatctggaccccagatttctggaaagacacctggccggcaccatgagctacttcagcccttaccagctgaccgtgctgcacgttgacggcgaactgtgcgccagagatattcggagcctgatcttcctgagcaaggacaccatcggcagccggtctacccctcagacatttctgcactgggtgtactgcatggaaaacctggacctgctcggccccacagatgtggatgccctgatgtccatgctgagaagcctgagcagagtggacctccagagacaggtgcagacactgatgggactgcacctgagcggacctagccacagccagcactacagacacacccct

SEQ ID NO: 2171 - DNA, 3738 bp, Artificial Sequence
  Synthetic Polynucleotide
atggccttaccagtgaccgccttgctcctgccgctggccttgctgctccacgccgccaggccggacatccagatgacacagagccctagcagcctgtctgccagcgtgggagacagagtgaccatcacatgcaaggccagcgaccacatcaacaactggctggcctggtatcagcagaagcctggacaggcccctaagctgctgatctacggcgctaccacactggaaacaggcgtgcccagcagattttctggcagcggctctggcaccgactacaccctgacaatatccagcctccagcctgaggacttcgccacctactactgtcagcagagctggaacaccccttggacattcggccagggcaccaagctggaaatcaagagactcgagggacagcctaaggccaatcctaccgtgacactgttccctccaagcagcgaagaactccaggccaacaaggccacacttgtgtgcctgatctccgacttctaccctggggctgtgacagtggcttggaaggccgatggatctcctgtgaaagccggcgtggaaaccaccaagccatccaagcagagcaacaacaaatacgccgccagctcctacctgagcctgacacctgagcagtggaagtcccacagatcctacagctgccaagtgacccacgaaggcagcaccgtggaaaagacagtggcccctacagagtgcagcggatccacaacacctggcgagagaagtagcctgcctgccttctatcctggcaccagcggctcttgttctggctgtggatctctgagcctgcctctgctggctggactggttgctgctgatgctgtggcctctctgctgattgtgggagccgtgttcctgtgcgccagacctagaagaagccccgctcaagaggacggcaaggtgtacatcaacatgcccggcagaggaagcactagtagagtgaagttcagcagaagcgccgacgcccctgcctaccagcagggacagaaccaactgtacaacgagctgaacctgggcagacgggaagagtacgacgtgctggacaagcggagaggcagggaccctgagatgggcggaaagccccagcggagaaagaacccccaggaaggactgtataacgaactccagaaagacaagatggccgaagcctacagcgagatcggcatgaagggcgagcggagaagaggcaagggccacgatggcctgtaccagggcctgagcaccgccaccaaggacacctatgacgccctgcacatgcaggccctgcctccaagaagggccaagcgatctggatctggagcaacaaacttctcactactcaaacaagcaggtgacgtggaggagaatcccgggcctatggactggatttggcgcatccttttccttgtcggcgctgctaccggcgcgcattccttcgaacaagttcagcttcaacagcctggcgctgagctggtcaaacctggcgcttctgtgaagatgagctgcaaagccagcggctacgccttcagcagctactggatcaactggatgaagcagaaacccggccagggactcgaatggatcggccaaatctatcccggcgacggcgacaccaactacaacggcaagttcaagggcagagccacactgaccgccgatacctctagcagcacagcctacatgcagctgagcagcctgaccagcgaagatagcgccgtgtacttctgtgcccggtccatcacaacagtcgtgggctgcgctatggactattggggccagggaacaagcgtgaccgtgtctagtacgcgtgcctctacaaagggaccctccgtgtttcctctggctcccagcagcaagtctacaagcggaggaacagccgctctgggctgcctggtcaaggattactttcccgagcctgtgaccgtgtcctggaatagcggagcactgacaagcggcgtgcacacctttccagccgtgctgcaaagcagcggcctgtactctctgagcagcgtggtcacagtgcctagctctagcctgggcacccagacctacatctgcaatgtgaaccacaagcctagcaacaccaaggtggacaagagagtggaacccaagagctgtggtacccagagttttgggttgttggaccctaaattgagctatctgttggacggaatcctgttcatttacggagtgatcctgaccgcattgttcctgtggcgacgcaagcgcaaagaaaagcaaagcgagacaagcccaaaagaatttctcactatatacgaggacgtgaaagatttgaagacgaggcggaatcatgagcaagagcagacatttcctggcgggggctctactatctactcaatgattcaatcccaaagctccgctccgacttcccaagagcccgcttacactctctactcactgatacagccttcaagaaaatcaggctctcggaaacggaatcattccccatccttcaatagtaccatctatgaagtaatcggtaagagtcaacctaaagctcaaaaccccgctcgcttgagccgcaaggagctggaaaacttcgatgtatatagctctagaagctctagacgggttaagttttccagatccgcagacgcacccgcttaccaacaagggcagaaccaactctacaatgaacttaatttggggcggagggaagagtacgacgttctggacaaaaggaggggacgagatcccgagatgggcggaaagcctcagcgaaggaagaatccgcaagaggggctttataacgaactccagaaagataaaatggcagaagcctatagtgagattgggatgaagggagaaaggaggaggggtaaaggtcacgatgggttgtaccaaggattgagcacagccactaaagatacctatgatgcgctccacatgcaggccctgccgccaagacgcgccaagagaagcggatctggcgtgaagcagaccctgaatttcgacctgctgaagctggctggcgacgtggaatccaacccaggccctggccatatgtccgactccaaggaggtccctagccttccatttttgcgacacttgctcgaagagttggacagccatgaggacagcttgctgctgtttctgtgtcacgacgcggccccgggctgcacgacggtcacgcaagctttgtgctcgcttagccaacagcgcaagctgaccctcgcggctctggtcgagatgctctacgtgctgcagcgtatggatcttctcaagagccgcttcgggctcagcaaggagggggccgagcaattgctgggcacaagctttctcacgcgctaccgcaagctcatggtttgcgtgggtgaggagctcgactcgagcgagctacgcgctctacgcttgttcgcgtgcaacctgaatccgagcctgagcacggcgctttctgagagcagccgctttgtcgagcttgtactcgcgcttgaaaacgtaggactcgtctcgccatcgagtgtttccgtgcttgcggacatgttgcgcactcttcggcgcctcgatttgtgccagcagcttgttgagtacgaacaacaagagcaagccaggtaccgttactgttacgcggcctcgccctcattgccagttcgtacgttacgtcgggggcacggcgcgagtgaacacgagcagctgtgcatgcccgtgcaagaatcctctgacagccccgagctgctgcgcacgcccgtacaagaatcctccagcgacagccccgagcaaacgact

SEQ ID NO: 2172 - DNA, 3615 bp, Artificial Sequence
  Synthetic Polynucleotide
atggccttaccagtgaccgccttgctcctgccgctggccttgctgctccacgccgccaggccggacatccagatgacacagagccctagcagcctgtctgccagcgtgggagacagagtgaccatcacatgcaaggccagcgaccacatcaacaactggctggcctggtatcagcagaagcctggacaggcccctaagctgctgatctacggcgctaccacactggaaacaggcgtgcccagcagattttctggcagcggctctggcaccgactacaccctgacaatatccagcctccagcctgaggacttcgccacctactactgtcagcagagctggaacaccccttggacattcggccagggcaccaagctggaaatcaagagactcgagggacagcctaaggccaatcctaccgtgacactgttccctccaagcagcgaagaactccaggccaacaaggccacacttgtgtgcctgatctccgacttctaccctggggctgtgacagtggcttggaaggccgatggatctcctgtgaaagccggcgtggaaaccaccaagccatccaagcagagcaacaacaaatacgccgccagctcctacctgagcctgacacctgagcagtggaagtcccacagatcctacagctgccaagtgacccacgaaggcagcaccgtggaaaagacagtggcccctacagagtgcagcggatccacaacacctggcgagagaagtagcctgcctgccttctatcctggcaccagcggctcttgttctggctgtggatctctgagcctgcctctgctggctggactggttgctgctgatgctgtggcctctctgctgattgtgggagccgtgttcctgtgcgccagacctagaagaagccccgctcaagaggacggcaaggtgtacatcaacatgcccggcagaggaagcactagtagagtgaagttcagcagaagcgccgacgcccctgcctaccagcagggacagaaccaactgtacaacgagctgaacctgggcagacgggaagagtacgacgtgctggacaagcggagaggcagggaccctgagatgggcggaaagccccagcggagaaagaacccccaggaaggactgtataacgaactccagaaagacaagatggccgaagcctacagcgagatcggcatgaagggcgagcggagaagaggcaagggccacgatggcctgtaccagggcctgagcaccgccaccaaggacacctatgacgccctgcacatgcaggccctgcctccaagaagggccaagcgatctggatctggagcaacaaacttctcactactcaaacaagcaggtgacgtggaggagaatcccgggcctatggactggatttggcgcatccttttccttgtcggcgctgctaccggcgcgcattccttcgaacaagttcagcttcaacagcctggcgctgagctggtcaaacctggcgcttctgtgaagatgagctgcaaagccagcggctacgccttcagcagctactggatcaactggatgaagcagaaacccggccagggactcgaatggatcggccaaatctatcccggcgacggcgacaccaactacaacggcaagttcaagggcagagccacactgaccgccgatacctctagcagcacagcctacatgcagctgagcagcctgaccagcgaagatagcgccgtgtacttctgtgcccggtccatcacaacagtcgtgggctgcgctatggactattggggccagggaacaagcgtgaccgtgtctagtacgcgtgcctctacaaagggaccctccgtgtttcctctggctcccagcagcaagtctacaagcggaggaacagccgctctgggctgcctggtcaaggattactttcccgagcctgtgaccgtgtcctggaatagcggagcactgacaagcggcgtgcacacctttccagccgtgctgcaaagcagcggcctgtactctctgagcagcgtggtcacagtgcctagctctagcctgggcacccagacctacatctgcaatgtgaaccacaagcctagcaacaccaaggtggacaagagagtggaacccaagagctgtggtacccagagttttgggttgttggaccctaaattgagctatctgttggacggaatcctgttcatttacggagtgatcctgaccgcattgttcctgtggcgacgcaagcgcaaagaaaagcaaagcgagacaagcccaaaagaatttctcactatatacgaggacgtgaaagatttgaagacgaggcggaatcatgagcaagagcagacatttcctggcgggggctctactatctactcaatgattcaatcccaaagctccgctccgacttcccaagagcccgcttacactctctactcactgatacagccttcaagaaaatcaggctctcggaaacggaatcattccccatccttcaatagtaccatctatgaagtaatcggtaagagtcaacctaaagctcaaaaccccgctcgcttgagccgcaaggagctggaaaacttcgatgtatatagctctagaagctctagacgggttaagttttccagatccgcagacgcacccgcttaccaacaagggcagaaccaactctacaatgaacttaatttggggcggagggaagagtacgacgttctggacaaaaggaggggacgagatcccgagatgggcggaaagcctcagcgaaggaagaatccgcaagaggggctttataacgaactccagaaagataaaatggcagaagcctatagtgagattgggatgaagggagaaaggaggaggggtaaaggtcacgatgggttgtaccaaggattgagcacagccactaaagatacctatgatgcgctccacatgcaggccctgccgccaagacgcgccaagagaagcggatctggcgtgaagcagaccctgaatttcgacctgctgaagctggctggcgacgtggaatccaacccaggccctggccatatgaccgagtacaagcccacggtgcgcctcgccacccgcgacgacgtccccagggccgtacgcaccctcgccgccgcgttcgccgactaccccgccacgcgccacaccgtcgatccggaccgccacatcgagcgggtcaccgagctgcaagaactcttcctcacgcgcgtcgggctcgacatcggcaaggtgtgggtcgcggacgacggcgccgcggtggcggtctggaccacgccggagagcgtcgaagcgggggcggtgttcgccgagatcggcccgcgcatggccgagttgagcggttcccggctggccgcgcagcaacagatggaaggcctcctggcgccgcaccggcccaaggagcccgcgtggttcctggccaccgtcggcgtctcgcccgaccaccagggcaagggtctgggcagcgccgtcgtgctccccggagtggaggcggccgagcgcgccggggtgcccgccttcctggagacctccgcgccccgcaacctccccttctacgagcggctcggcttcaccgtcaccgccgacgtcgaggtgcccgaaggaccgcgcacctggtgcatgacccgcaagcccggtgcctga

SEQ ID NO: 2173 - DNA, 4026 bp, Artificial Sequence
  Synthetic Polynucleotide
atggccttaccagtgaccgccttgctcctgccgctggccttgctgctccacgccgccaggccggaagtgcagctggttgaatctggcggaggactggttcaggctggcggatctctgagactgtcttgtgccgccagcggcagaacctttagcatgggctggtttagacaggcccctggcaaagagagagagttcgtcgccgccatcacatactctggcggcagcccttactacgccgactctgtgaagggcagattcaccatcagccgggacaacgccaagaacaccgtgtacctccagatgaacagcctgaagcctgaggacaccgccgtgtactactgcgccgccaatccaacatacggcagcgactggaacgccgagaattggggccagggaacccaagtgacagtgtctagcggtaccggcggaggcggatctggcggcggaggtagcggtggcggaggatctgaattcgacatccagatgacacagagccctagcagcctgtctgccagcgtgggagacagagtgaccatcacatgcaaggccagcgaccacatcaacaactggctggcctggtatcagcagaagcctggacaggcccctaagctgctgatctacggcgctaccacactggaaacaggcgtgcccagcagattttctggcagcggctctggcaccgactacaccctgacaatatccagcctccagcctgaggacttcgccacctactactgtcagcagagctggaacaccccttggacattcggccagggcaccaagctggaaatcaagagactcgagggacagcctaaggccaatcctaccgtgacactgttccctccaagcagcgaagaactccaggccaacaaggccacacttgtgtgcctgatctccgacttctaccctggggctgtgacagtggcttggaaggccgatggatctcctgtgaaagccggcgtggaaaccaccaagccatccaagcagagcaacaacaaatacgccgccagctcctacctgagcctgacacctgagcagtggaagtcccacagatcctacagctgccaagtgacccacgaaggcagcaccgtggaaaagacagtggcccctacagagtgcagcggatccacaacacctggcgagagaagtagcctgcctgccttctatcctggcaccagcggctcttgttctggctgtggatctctgagcctgcctctgctggctggactggttgctgctgatgctgtggcctctctgctgattgtgggagccgtgttcctgtgcgccagacctagaagaagccccgctcaagaggacggcaaggtgtacatcaacatgcccggcagaggaagcactagtagagtgaagttcagcagaagcgccgacgcccctgcctaccagcagggacagaaccaactgtacaacgagctgaacctgggcagacgggaagagtacgacgtgctggacaagcggagaggcagggaccctgagatgggcggaaagccccagcggagaaagaacccccaggaaggactgtataacgaactccagaaagacaagatggccgaagcctacagcgagatcggcatgaagggcgagcggagaagaggcaagggccacgatggcctgtaccagggcctgagcaccgccaccaaggacacctatgacgccctgcacatgcaggccctgcctccaagaagggccaagcgatctggatctggagcaacaaacttctcactactcaaacaagcaggtgacgtggaggagaatcccgggcctatggactggatttggcgcatccttttccttgtcggcgctgctaccggcgcgcattccttcgaacaagttcagcttcaacagcctggcgctgagctggtcaaacctggcgcttctgtgaagatgagctgcaaagccagcggctacgccttcagcagctactggatcaactggatgaagcagaaacccggccagggactcgaatggatcggccaaatctatcccggcgacggcgacaccaactacaacggcaagttcaagggcagagccacactgaccgccgatacctctagcagcacagcctacatgcagctgagcagcctgaccagcgaagatagcgccgtgtacttctgtgcccggtccatcacaacagtcgtgggctgcgctatggactattggggccagggaacaagcgtgaccgtgtctagtacgcgtgcctctacaaagggaccctccgtgtttcctctggctcccagcagcaagtctacaagcggaggaacagccgctctgggctgcctggtcaaggattactttcccgagcctgtgaccgtgtcctggaatagcggagcactgacaagcggcgtgcacacctttccagccgtgctgcaaagcagcggcctgtactctctgagcagcgtggtcacagtgcctagctctagcctgggcacccagacctacatctgcaatgtgaaccacaagcctagcaacaccaaggtggacaagagagtggaacccaagagctgtggtacccagagttttgggttgttggaccctaaattgagctatctgttggacggaatcctgttcatttacggagtgatcctgaccgcattgttcctgtggcgacgcaagcgcaaagaaaagcaaagcgagacaagcccaaaagaatttctcactatatacgaggacgtgaaagatttgaagacgaggcggaatcatgagcaagagcagacatttcctggcgggggctctactatctactcaatgattcaatcccaaagctccgctccgacttcccaagagcccgcttacactctctactcactgatacagccttcaagaaaatcaggctctcggaaacggaatcattccccatccttcaatagtaccatctatgaagtaatcggtaagagtcaacctaaagctcaaaaccccgctcgcttgagccgcaaggagctggaaaacttcgatgtatatagctctagaagctctagacgggttaagttttccagatccgcagacgcacccgcttaccaacaagggcagaaccaactctacaatgaacttaatttggggcggagggaagagtacgacgttctggacaaaaggaggggacgagatcccgagatgggcggaaagcctcagcgaaggaagaatccgcaagaggggctttataacgaactccagaaagataaaatggcagaagcctatagtgagattgggatgaagggagaaaggaggaggggtaaaggtcacgatgggttgtaccaaggattgagcacagccactaaagatacctatgatgcgctccacatgcaggccctgccgccaagacgcgccaagagaagcggatctggcgtgaagcagaccctgaatttcgacctgctgaagctggctggcgacgtggaatccaacccaggccctggccatatgaccgagtacaagcccacggtgcgcctcgccacccgcgacgacgtccccagggccgtacgcaccctcgccgccgcgttcgccgactaccccgccacgcgccacaccgtcgatccggaccgccacatcgagcgggtcaccgagctgcaagaactcttcctcacgcgcgtcgggctcgacatcggcaaggtgtgggtcgcggacgacggcgccgcggtggcggtctggaccacgccggagagcgtcgaagcgggggcggtgttcgccgagatcggcccgcgcatggccgagttgagcggttcccggctggccgcgcagcaacagatggaaggcctcctggcgccgcaccggcccaaggagcccgcgtggttcctggccaccgtcggcgtctcgcccgaccaccagggcaagggtctgggcagcgccgtcgtgctccccggagtggaggcggccgagcgcgccggggtgcccgccttcctggagacctccgcgccccgcaacctccccttctacgagcggctcggcttcaccgtcaccgccgacgtcgaggtgcccgaaggaccgcgcacctggtgcatgacccgcaagcccggtgcctga

SEQ ID NO: 2174 - DNA, 4437 bp, Artificial Sequence
  Synthetic Polynucleotide
atggccttaccagtgaccgccttgctcctgccgctggccttgctgctccacgccgccaggccggaagtgcagctggttgaatctggcggaggactggttcaggctggcggatctctgagactgtcttgtgccgccagcggcagaacctttagcatgggctggtttagacaggcccctggcaaagagagagagttcgtcgccgccatcacatactctggcggcagcccttactacgccgactctgtgaagggcagattcaccatcagccgggacaacgccaagaacaccgtgtacctccagatgaacagcctgaagcctgaggacaccgccgtgtactactgcgccgccaatccaacatacggcagcgactggaacgccgagaattggggccagggaacccaagtgacagtgtctagcggtaccggcggaggcggatctggcggcggaggtagcggtggcggaggatctgaattcgacatccagatgacacagagccctagcagcctgtctgccagcgtgggagacagagtgaccatcacatgcaaggccagcgaccacatcaacaactggctggcctggtatcagcagaagcctggacaggcccctaagctgctgatctacggcgctaccacactggaaacaggcgtgcccagcagattttctggcagcggctctggcaccgactacaccctgacaatatccagcctccagcctgaggacttcgccacctactactgtcagcagagctggaacaccccttggacattcggccagggcaccaagctggaaatcaagagactcgagggacagcctaaggccaatcctaccgtgacactgttccctccaagcagcgaagaactccaggccaacaaggccacacttgtgtgcctgatctccgacttctaccctggggctgtgacagtggcttggaaggccgatggatctcctgtgaaagccggcgtggaaaccaccaagccatccaagcagagcaacaacaaatacgccgccagctcctacctgagcctgacacctgagcagtggaagtcccacagatcctacagctgccaagtgacccacgaaggcagcaccgtggaaaagacagtggcccctacagagtgcagcggatccacaacacctggcgagagaagtagcctgcctgccttctatcctggcaccagcggctcttgttctggctgtggatctctgagcctgcctctgctggctggactggttgctgctgatgctgtggcctctctgctgattgtgggagccgtgttcctgtgcgccagacctagaagaagccccgctcaagaggacggcaaggtgtacatcaacatgcccggcagaggaagcactagtagagtgaagttcagcagaagcgccgacgcccctgcctaccagcagggacagaaccaactgtacaacgagctgaacctgggcagacgggaagagtacgacgtgctggacaagcggagaggcagggaccctgagatgggcggaaagccccagcggagaaagaacccccaggaaggactgtataacgaactccagaaagacaagatggccgaagcctacagcgagatcggcatgaagggcgagcggagaagaggcaagggccacgatggcctgtaccagggcctgagcaccgccaccaaggacacctatgacgccctgcacatgcaggccctgcctccaagaagggccaagcgatctggatctggagcaacaaacttctcactactcaaacaagcaggtgacgtggaggagaatcccgggcctatggactggatttggcgcatccttttccttgtcggcgctgctaccggcgcgcattccgggcccgaagtgcaactggttgaatccggtggcggcctggtgcaagcaggcggatctctcagacttagctgtgccgcctccggcagaaccttcacaatgggatggtttaggcaggctccagggaaagagagagagttcgtcgccgccatctctctgtctcccacactggcctactacgccgactctgtgaaaggccggttcaccatctccagagataatgccaagaacaccgtggtgctgcaaatgaactctctgaaacccgaggatacagccctgtactattgtgccgctgaccggaagtccgtgatgagcatcagacccgattactggggacagggcacacaagtcacagtgtcctctggatccggcggcggaggatctggcggaggcggatctgggggcggaggctctttcgaacaagttcagcttcaacagcctggcgctgagctggtcaaacctggcgcttctgtgaagatgagctgcaaagccagcggctacgccttcagcagctactggatcaactggatgaagcagaaacccggccagggactcgaatggatcggccaaatctatcccggcgacggcgacaccaactacaacggcaagttcaagggcagagccacactgaccgccgatacctctagcagcacagcctacatgcagctgagcagcctgaccagcgaagatagcgccgtgtacttctgtgcccggtccatcacaacagtcgtgggctgcgctatggactattggggccagggaacaagcgtgaccgtgtctagtacgcgtgcctctacaaagggaccctccgtgtttcctctggctcccagcagcaagtctacaagcggaggaacagccgctctgggctgcctggtcaaggattactttcccgagcctgtgaccgtgtcctggaatagcggagcactgacaagcggcgtgcacacctttccagccgtgctgcaaagcagcggcctgtactctctgagcagcgtggtcacagtgcctagctctagcctgggcacccagacctacatctgcaatgtgaaccacaagcctagcaacaccaaggtggacaagagagtggaacccaagagctgtggtacccagagttttgggttgttggaccctaaattgagctatctgttggacggaatcctgttcatttacggagtgatcctgaccgcattgttcctgtggcgacgcaagcgcaaagaaaagcaaagcgagacaagcccaaaagaatttctcactatatacgaggacgtgaaagatttgaagacgaggcggaatcatgagcaagagcagacatttcctggcgggggctctactatctactcaatgattcaatcccaaagctccgctccgacttcccaagagcccgcttacactctctactcactgatacagccttcaagaaaatcaggctctcggaaacggaatcattccccatccttcaatagtaccatctatgaagtaatcggtaagagtcaacctaaagctcaaaaccccgctcgcttgagccgcaaggagctggaaaacttcgatgtatatagctctagaagctctagacgggttaagttttccagatccgcagacgcacccgcttaccaacaagggcagaaccaactctacaatgaacttaatttggggcggagggaagagtacgacgttctggacaaaaggaggggacgagatcccgagatgggcggaaagcctcagcgaaggaagaatccgcaagaggggctttataacgaactccagaaagataaaatggcagaagcctatagtgagattgggatgaagggagaaaggaggaggggtaaaggtcacgatgggttgtaccaaggattgagcacagccactaaagatacctatgatgcgctccacatgcaggccctgccgccaagacgcgccaagagaagcggatctggcgtgaagcagaccctgaatttcgacctgctgaagctggctggcgacgtggaatccaacccaggccctggccatatgaccgagtacaagcccacggtgcgcctcgccacccgcgacgacgtccccagggccgtacgcaccctcgccgccgcgttcgccgactaccccgccacgcgccacaccgtcgatccggaccgccacatcgagcgggtcaccgagctgcaagaactcttcctcacgcgcgtcgggctcgacatcggcaaggtgtgggtcgcggacgacggcgccgcggtggcggtctggaccacgccggagagcgtcgaagcgggggcggtgttcgccgagatcggcccgcgcatggccgagttgagcggttcccggctggccgcgcagcaacagatggaaggcctcctggcgccgcaccggcccaaggagcccgcgtggttcctggccaccgtcggcgtctcgcccgaccaccagggcaagggtctgggcagcgccgtcgtgctccccggagtggaggcggccgagcgcgccggggtgcccgccttcctggagacctccgcgccccgcaacctccccttctacgagcggctcggcttcaccgtcaccgccgacgtcgaggtgcccgaaggaccgcgcacctggtgcatgacccgcaagcccggtgcctga

SEQ ID NO: 2175 - DNA, 3636 bp, Artificial Sequence
  Synthetic Polynucleotide
atggccttaccagtgaccgccttgctcctgccgctggccttgctgctccacgccgccaggccggaagtgcagctggttgaatctggcggaggactggttcaggctggcggatctctgagactgtcttgtgccgccagcggcagaacctttagcatgggctggtttagacaggcccctggcaaagagagagagttcgtcgccgccatcacatactctggcggcagcccttactacgccgactctgtgaagggcagattcaccatcagccgggacaacgccaagaacaccgtgtacctccagatgaacagcctgaagcctgaggacaccgccgtgtactactgcgccgccaatccaacatacggcagcgactggaacgccgagaattggggccagggaacccaagtgacagtgtctagcctcgagggacagcctaaggccaatcctaccgtgacactgttccctccaagcagcgaagaactccaggccaacaaggccacacttgtgtgcctgatctccgacttctaccctggggctgtgacagtggcttggaaggccgatggatctcctgtgaaagccggcgtggaaaccaccaagccatccaagcagagcaacaacaaatacgccgccagctcctacctgagcctgacacctgagcagtggaagtcccacagatcctacagctgccaagtgacccacgaaggcagcaccgtggaaaagacagtggcccctacagagtgcagcggatccacaacacctggcgagagaagtagcctgcctgccttctatcctggcaccagcggctcttgttctggctgtggatctctgagcctgcctctgctggctggactggttgctgctgatgctgtggcctctctgctgattgtgggagccgtgttcctgtgcgccagacctagaagaagccccgctcaagaggacggcaaggtgtacatcaacatgcccggcagaggaagcactagtagagtgaagttcagcagaagcgccgacgcccctgcctaccagcagggacagaaccaactgtacaacgagctgaacctgggcagacgggaagagtacgacgtgctggacaagcggagaggcagggaccctgagatgggcggaaagccccagcggagaaagaacccccaggaaggactgtataacgaactccagaaagacaagatggccgaagcctacagcgagatcggcatgaagggcgagcggagaagaggcaagggccacgatggcctgtaccagggcctgagcaccgccaccaaggacacctatgacgccctgcacatgcaggccctgcctccaagaagggccaagcgatctggatctggagcaacaaacttctcactactcaaacaagcaggtgacgtggaggagaatcccgggcctatggactggatttggcgcatccttttccttgtcggcgctgctaccggcgcgcattccgggcccgaagtgcaactggttgaatccggtggcggcctggtgcaagcaggcggatctctcagacttagctgtgccgcctccggcagaaccttcacaatgggatggtttaggcaggctccagggaaagagagagagttcgtcgccgccatctctctgtctcccacactggcctactacgccgactctgtgaaaggccggttcaccatctccagagataatgccaagaacaccgtggtgctgcaaatgaactctctgaaacccgaggatacagccctgtactattgtgccgctgaccggaagtccgtgatgagcatcagacccgattactggggacagggcacacaagtcacagtgtcctctacgcgtgcctctacaaagggaccctccgtgtttcctctggctcccagcagcaagtctacaagcggaggaacagccgctctgggctgcctggtcaaggattactttcccgagcctgtgaccgtgtcctggaatagcggagcactgacaagcggcgtgcacacctttccagccgtgctgcaaagcagcggcctgtactctctgagcagcgtggtcacagtgcctagctctagcctgggcacccagacctacatctgcaatgtgaaccacaagcctagcaacaccaaggtggacaagagagtggaacccaagagctgtggtacccagagttttgggttgttggaccctaaattgagctatctgttggacggaatcctgttcatttacggagtgatcctgaccgcattgttcctgtggcgacgcaagcgcaaagaaaagcaaagcgagacaagcccaaaagaatttctcactatatacgaggacgtgaaagatttgaagacgaggcggaatcatgagcaagagcagacatttcctggcgggggctctactatctactcaatgattcaatcccaaagctccgctccgacttcccaagagcccgcttacactctctactcactgatacagccttcaagaaaatcaggctctcggaaacggaatcattccccatccttcaatagtaccatctatgaagtaatcggtaagagtcaacctaaagctcaaaaccccgctcgcttgagccgcaaggagctggaaaacttcgatgtatatagctctagaagctctagacgggttaagttttccagatccgcagacgcacccgcttaccaacaagggcagaaccaactctacaatgaacttaatttggggcggagggaagagtacgacgttctggacaaaaggaggggacgagatcccgagatgggcggaaagcctcagcgaaggaagaatccgcaagaggggctttataacgaactccagaaagataaaatggcagaagcctatagtgagattgggatgaagggagaaaggaggaggggtaaaggtcacgatgggttgtaccaaggattgagcacagccactaaagatacctatgatgcgctccacatgcaggccctgccgccaagacgcgccaagagaagcggatctggcgtgaagcagaccctgaatttcgacctgctgaagctggctggcgacgtggaatccaacccaggccctggccatatgaccgagtacaagcccacggtgcgcctcgccacccgcgacgacgtccccagggccgtacgcaccctcgccgccgcgttcgccgactaccccgccacgcgccacaccgtcgatccggaccgccacatcgagcgggtcaccgagctgcaagaactcttcctcacgcgcgtcgggctcgacatcggcaaggtgtgggtcgcggacgacggcgccgcggtggcggtctggaccacgccggagagcgtcgaagcgggggcggtgttcgccgagatcggcccgcgcatggccgagttgagcggttcccggctggccgcgcagcaacagatggaaggcctcctggcgccgcaccggcccaaggagcccgcgtggttcctggccaccgtcggcgtctcgcccgaccaccagggcaagggtctgggcagcgccgtcgtgctccccggagtggaggcggccgagcgcgccggggtgcccgccttcctggagacctccgcgccccgcaacctccccttctacgagcggctcggcttcaccgtcaccgccgacgtcgaggtgcccgaaggaccgcgcacctggtgcatgacccgcaagcccggtgcctga

SEQ ID NO: 2176 - DNA, 3660 bp, Artificial Sequence
  Synthetic Polynucleotide
atggccttaccagtgaccgccttgctcctgccgctggccttgctgctccacgccgccaggccggacatccagatgacacagagccctagcagcctgtctgccagcgtgggagacagagtgaccatcacatgcaaggccagcgaccacatcaacaactggctggcctggtatcagcagaagcctggacaggcccctaagctgctgatctacggcgctaccacactggaaacaggcgtgcccagcagattttctggcagcggctctggcaccgactacaccctgacaatatccagcctccagcctgaggacttcgccacctactactgtcagcagagctggaacaccccttggacattcggccagggcaccaagctggaaatcaagagactcgaggacctgaagaacgtgttcccacctgaggtggccgtgttcgagcctagcgaggccgagatcagccacacccagaaagccaccctcgtgtgcctggctaccggcttctaccccgaccatgtggaactgtcttggtgggtcaacggcaaagaggtgcacagcggcgtgtctaccgacccccagccactgaaagaacagcccgccctgaacgacagccggtactgcctgagcagcagactgagagtgtccgccaccttctggcagaacccccggaaccacttcagatgccaggtgcagttctacggcctgagcgagaacgacgagtggacccaggacagagccaagcccgtgacccagatcgtgtctgccgaagcctggggcagagccgattgcggatccacaacacctggcgagagaagtagcctgcctgccttctatcctggcaccagcggctcttgttctggctgtggatctctgagcctgcctctgctggctggactggttgctgctgatgctgtggcctctctgctgattgtgggagccgtgttcctgtgcgccagacctagaagaagccccgctcaagaggacggcaaggtgtacatcaacatgcccggcagaggaagcactagtagagtgaagttcagcagaagcgccgacgcccctgcctaccagcagggacagaaccaactgtacaacgagctgaacctgggcagacgggaagagtacgacgtgctggacaagcggagaggcagggaccctgagatgggcggaaagccccagcggagaaagaacccccaggaaggactgtataacgaactccagaaagacaagatggccgaagcctacagcgagatcggcatgaagggcgagcggagaagaggcaagggccacgatggcctgtaccagggcctgagcaccgccaccaaggacacctatgacgccctgcacatgcaggccctgcctccaagaagggccaagcgatctggatctggagcaacaaacttctcactactcaaacaagcaggtgacgtggaggagaatcccgggcctatggactggatttggcgcatccttttccttgtcggcgctgctaccggcgcgcattccttcgaacaagttcagcttcaacagcctggcgctgagctggtcaaacctggcgcttctgtgaagatgagctgcaaagccagcggctacgccttcagcagctactggatcaactggatgaagcagaaacccggccagggactcgaatggatcggccaaatctatcccggcgacggcgacaccaactacaacggcaagttcaagggcagagccacactgaccgccgatacctctagcagcacagcctacatgcagctgagcagcctgaccagcgaagatagcgccgtgtacttctgtgcccggtccatcacaacagtcgtgggctgcgctatggactattggggccagggaacaagcgtgaccgtgtctagtacgcgtatccagaaccctgatcctgccgtgtaccagctgcgggatagcaagagcagcgacaagagcgtgtgtctgttcaccgacttcgacagccagaccaacgtgtcccagagcaaggactccgacgtgtacatcaccgataagaccgtgctggacatgcggagcatggacttcaagagcaactccgccgtggcctggtccaacaagtccgatttcgcctgcgccaacgccttcaacaacagcattatccccgaggacacattcttcccaagccccgagagcagctgcggtacccagagttttgggttgttggaccctaaattgagctatctgttggacggaatcctgttcatttacggagtgatcctgaccgcattgttcctgtggcgacgcaagcgcaaagaaaagcaaagcgagacaagcccaaaagaatttctcactatatacgaggacgtgaaagatttgaagacgaggcggaatcatgagcaagagcagacatttcctggcgggggctctactatctactcaatgattcaatcccaaagctccgctccgacttcccaagagcccgcttacactctctactcactgatacagccttcaagaaaatcaggctctcggaaacggaatcattccccatccttcaatagtaccatctatgaagtaatcggtaagagtcaacctaaagctcaaaaccccgctcgcttgagccgcaaggagctggaaaacttcgatgtatatagctctagaagctctagacgggttaagttttccagatccgcagacgcacccgcttaccaacaagggcagaaccaactctacaatgaacttaatttggggcggagggaagagtacgacgttctggacaaaaggaggggacgagatcccgagatgggcggaaagcctcagcgaaggaagaatccgcaagaggggctttataacgaactccagaaagataaaatggcagaagcctatagtgagattgggatgaagggagaaaggaggaggggtaaaggtcacgatgggttgtaccaaggattgagcacagccactaaagatacctatgatgcgctccacatgcaggccctgccgccaagacgcgccaagagaagcggatctggcgtgaagcagaccctgaatttcgacctgctgaagctggctggcgacgtggaatccaacccaggccctggccatatgaccgagtacaagcccacggtgcgcctcgccacccgcgacgacgtccccagggccgtacgcaccctcgccgccgcgttcgccgactaccccgccacgcgccacaccgtcgatccggaccgccacatcgagcgggtcaccgagctgcaagaactcttcctcacgcgcgtcgggctcgacatcggcaaggtgtgggtcgcggacgacggcgccgcggtggcggtctggaccacgccggagagcgtcgaagcgggggcggtgttcgccgagatcggcccgcgcatggccgagttgagcggttcccggctggccgcgcagcaacagatggaaggcctcctggcgccgcaccggcccaaggagcccgcgtggttcctggccaccgtcggcgtctcgcccgaccaccagggcaagggtctgggcagcgccgtcgtgctccccggagtggaggcggccgagcgcgccggggtgcccgccttcctggagacctccgcgccccgcaacctccccttctacgagcggctcggcttcaccgtcaccgccgacgtcgaggtgcccgaaggaccgcgcacctggtgcatgacccgcaagcccggtgcctga

SEQ ID NO: 2177 - DNA, 4071 bp, Artificial Sequence
  Synthetic Polynucleotide
atggccttaccagtgaccgccttgctcctgccgctggccttgctgctccacgccgccaggccggaagtgcagctggttgaatctggcggaggactggttcaggctggcggatctctgagactgtcttgtgccgccagcggcagaacctttagcatgggctggtttagacaggcccctggcaaagagagagagttcgtcgccgccatcacatactctggcggcagcccttactacgccgactctgtgaagggcagattcaccatcagccgggacaacgccaagaacaccgtgtacctccagatgaacagcctgaagcctgaggacaccgccgtgtactactgcgccgccaatccaacatacggcagcgactggaacgccgagaattggggccagggaacccaagtgacagtgtctagcggtaccggcggaggcggatctggcggcggaggtagcggtggcggaggatctgaattcgacatccagatgacacagagccctagcagcctgtctgccagcgtgggagacagagtgaccatcacatgcaaggccagcgaccacatcaacaactggctggcctggtatcagcagaagcctggacaggcccctaagctgctgatctacggcgctaccacactggaaacaggcgtgcccagcagattttctggcagcggctctggcaccgactacaccctgacaatatccagcctccagcctgaggacttcgccacctactactgtcagcagagctggaacaccccttggacattcggccagggcaccaagctggaaatcaagagactcgaggacctgaagaacgtgttcccacctgaggtggccgtgttcgagcctagcgaggccgagatcagccacacccagaaagccaccctcgtgtgcctggctaccggcttctaccccgaccatgtggaactgtcttggtgggtcaacggcaaagaggtgcacagcggcgtgtctaccgacccccagccactgaaagaacagcccgccctgaacgacagccggtactgcctgagcagcagactgagagtgtccgccaccttctggcagaacccccggaaccacttcagatgccaggtgcagttctacggcctgagcgagaacgacgagtggacccaggacagagccaagcccgtgacccagatcgtgtctgccgaagcctggggcagagccgattgcggatccacaacacctggcgagagaagtagcctgcctgccttctatcctggcaccagcggctcttgttctggctgtggatctctgagcctgcctctgctggctggactggttgctgctgatgctgtggcctctctgctgattgtgggagccgtgttcctgtgcgccagacctagaagaagccccgctcaagaggacggcaaggtgtacatcaacatgcccggcagaggaagcactagtagagtgaagttcagcagaagcgccgacgcccctgcctaccagcagggacagaaccaactgtacaacgagctgaacctgggcagacgggaagagtacgacgtgctggacaagcggagaggcagggaccctgagatgggcggaaagccccagcggagaaagaacccccaggaaggactgtataacgaactccagaaagacaagatggccgaagcctacagcgagatcggcatgaagggcgagcggagaagaggcaagggccacgatggcctgtaccagggcctgagcaccgccaccaaggacacctatgacgccctgcacatgcaggccctgcctccaagaagggccaagcgatctggatctggagcaacaaacttctcactactcaaacaagcaggtgacgtggaggagaatcccgggcctatggactggatttggcgcatccttttccttgtcggcgctgctaccggcgcgcattccttcgaacaagttcagcttcaacagcctggcgctgagctggtcaaacctggcgcttctgtgaagatgagctgcaaagccagcggctacgccttcagcagctactggatcaactggatgaagcagaaacccggccagggactcgaatggatcggccaaatctatcccggcgacggcgacaccaactacaacggcaagttcaagggcagagccacactgaccgccgatacctctagcagcacagcctacatgcagctgagcagcctgaccagcgaagatagcgccgtgtacttctgtgcccggtccatcacaacagtcgtgggctgcgctatggactattggggccagggaacaagcgtgaccgtgtctagtacgcgtatccagaaccctgatcctgccgtgtaccagctgcgggatagcaagagcagcgacaagagcgtgtgtctgttcaccgacttcgacagccagaccaacgtgtcccagagcaaggactccgacgtgtacatcaccgataagaccgtgctggacatgcggagcatggacttcaagagcaactccgccgtggcctggtccaacaagtccgatttcgcctgcgccaacgccttcaacaacagcattatccccgaggacacattcttcccaagccccgagagcagctgcggtacccagagttttgggttgttggaccctaaattgagctatctgttggacggaatcctgttcatttacggagtgatcctgaccgcattgttcctgtggcgacgcaagcgcaaagaaaagcaaagcgagacaagcccaaaagaatttctcactatatacgaggacgtgaaagatttgaagacgaggcggaatcatgagcaagagcagacatttcctggcgggggctctactatctactcaatgattcaatcccaaagctccgctccgacttcccaagagcccgcttacactctctactcactgatacagccttcaagaaaatcaggctctcggaaacggaatcattccccatccttcaatagtaccatctatgaagtaatcggtaagagtcaacctaaagctcaaaaccccgctcgcttgagccgcaaggagctggaaaacttcgatgtatatagctctagaagctctagacgggttaagttttccagatccgcagacgcacccgcttaccaacaagggcagaaccaactctacaatgaacttaatttggggcggagggaagagtacgacgttctggacaaaaggaggggacgagatcccgagatgggcggaaagcctcagcgaaggaagaatccgcaagaggggctttataacgaactccagaaagataaaatggcagaagcctatagtgagattgggatgaagggagaaaggaggaggggtaaaggtcacgatgggttgtaccaaggattgagcacagccactaaagatacctatgatgcgctccacatgcaggccctgccgccaagacgcgccaagagaagcggatctggcgtgaagcagaccctgaatttcgacctgctgaagctggctggcgacgtggaatccaacccaggccctggccatatgaccgagtacaagcccacggtgcgcctcgccacccgcgacgacgtccccagggccgtacgcaccctcgccgccgcgttcgccgactaccccgccacgcgccacaccgtcgatccggaccgccacatcgagcgggtcaccgagctgcaagaactcttcctcacgcgcgtcgggctcgacatcggcaaggtgtgggtcgcggacgacggcgccgcggtggcggtctggaccacgccggagagcgtcgaagcgggggcggtgttcgccgagatcggcccgcgcatggccgagttgagcggttcccggctggccgcgcagcaacagatggaaggcctcctggcgccgcaccggcccaaggagcccgcgtggttcctggccaccgtcggcgtctcgcccgaccaccagggcaagggtctgggcagcgccgtcgtgctccccggagtggaggcggccgagcgcgccggggtgcccgccttcctggagacctccgcgccccgcaacctccccttctacgagcggctcggcttcaccgtcaccgccgacgtcgaggtgcccgaaggaccgcgcacctggtgcatgacccgcaagcccggtgcctga

SEQ ID NO: 2178 - DNA, 4482 bp, Artificial Sequence
  Synthetic Polynucleotide
atggccttaccagtgaccgccttgctcctgccgctggccttgctgctccacgccgccaggccggaagtgcagctggttgaatctggcggaggactggttcaggctggcggatctctgagactgtcttgtgccgccagcggcagaacctttagcatgggctggtttagacaggcccctggcaaagagagagagttcgtcgccgccatcacatactctggcggcagcccttactacgccgactctgtgaagggcagattcaccatcagccgggacaacgccaagaacaccgtgtacctccagatgaacagcctgaagcctgaggacaccgccgtgtactactgcgccgccaatccaacatacggcagcgactggaacgccgagaattggggccagggaacccaagtgacagtgtctagcggtaccggcggaggcggatctggcggcggaggtagcggtggcggaggatctgaattcgacatccagatgacacagagccctagcagcctgtctgccagcgtgggagacagagtgaccatcacatgcaaggccagcgaccacatcaacaactggctggcctggtatcagcagaagcctggacaggcccctaagctgctgatctacggcgctaccacactggaaacaggcgtgcccagcagattttctggcagcggctctggcaccgactacaccctgacaatatccagcctccagcctgaggacttcgccacctactactgtcagcagagctggaacaccccttggacattcggccagggcaccaagctggaaatcaagagactcgaggacctgaagaacgtgttcccacctgaggtggccgtgttcgagcctagcgaggccgagatcagccacacccagaaagccaccctcgtgtgcctggctaccggcttctaccccgaccatgtggaactgtcttggtgggtcaacggcaaagaggtgcacagcggcgtgtctaccgacccccagccactgaaagaacagcccgccctgaacgacagccggtactgcctgagcagcagactgagagtgtccgccaccttctggcagaacccccggaaccacttcagatgccaggtgcagttctacggcctgagcgagaacgacgagtggacccaggacagagccaagcccgtgacccagatcgtgtctgccgaagcctggggcagagccgattgcggatccacaacacctggcgagagaagtagcctgcctgccttctatcctggcaccagcggctcttgttctggctgtggatctctgagcctgcctctgctggctggactggttgctgctgatgctgtggcctctctgctgattgtgggagccgtgttcctgtgcgccagacctagaagaagccccgctcaagaggacggcaaggtgtacatcaacatgcccggcagaggaagcactagtagagtgaagttcagcagaagcgccgacgcccctgcctaccagcagggacagaaccaactgtacaacgagctgaacctgggcagacgggaagagtacgacgtgctggacaagcggagaggcagggaccctgagatgggcggaaagccccagcggagaaagaacccccaggaaggactgtataacgaactccagaaagacaagatggccgaagcctacagcgagatcggcatgaagggcgagcggagaagaggcaagggccacgatggcctgtaccagggcctgagcaccgccaccaaggacacctatgacgccctgcacatgcaggccctgcctccaagaagggccaagcgatctggatctggagcaacaaacttctcactactcaaacaagcaggtgacgtggaggagaatcccgggcctatggactggatttggcgcatccttttccttgtcggcgctgctaccggcgcgcattccgggcccgaagtgcaactggttgaatccggtggcggcctggtgcaagcaggcggatctctcagacttagctgtgccgcctccggcagaaccttcacaatgggatggtttaggcaggctccagggaaagagagagagttcgtcgccgccatctctctgtctcccacactggcctactacgccgactctgtgaaaggccggttcaccatctccagagataatgccaagaacaccgtggtgctgcaaatgaactctctgaaacccgaggatacagccctgtactattgtgccgctgaccggaagtccgtgatgagcatcagacccgattactggggacagggcacacaagtcacagtgtcctctggatccggcggcggaggatctggcggaggcggatctgggggcggaggctctttcgaacaagttcagcttcaacagcctggcgctgagctggtcaaacctggcgcttctgtgaagatgagctgcaaagccagcggctacgccttcagcagctactggatcaactggatgaagcagaaacccggccagggactcgaatggatcggccaaatctatcccggcgacggcgacaccaactacaacggcaagttcaagggcagagccacactgaccgccgatacctctagcagcacagcctacatgcagctgagcagcctgaccagcgaagatagcgccgtgtacttctgtgcccggtccatcacaacagtcgtgggctgcgctatggactattggggccagggaacaagcgtgaccgtgtctagtacgcgtatccagaaccctgatcctgccgtgtaccagctgcgggatagcaagagcagcgacaagagcgtgtgtctgttcaccgacttcgacagccagaccaacgtgtcccagagcaaggactccgacgtgtacatcaccgataagaccgtgctggacatgcggagcatggacttcaagagcaactccgccgtggcctggtccaacaagtccgatttcgcctgcgccaacgccttcaacaacagcattatccccgaggacacattcttcccaagccccgagagcagctgcggtacccagagttttgggttgttggaccctaaattgagctatctgttggacggaatcctgttcatttacggagtgatcctgaccgcattgttcctgtggcgacgcaagcgcaaagaaaagcaaagcgagacaagcccaaaagaatttctcactatatacgaggacgtgaaagatttgaagacgaggcggaatcatgagcaagagcagacatttcctggcgggggctctactatctactcaatgattcaatcccaaagctccgctccgacttcccaagagcccgcttacactctctactcactgatacagccttcaagaaaatcaggctctcggaaacggaatcattccccatccttcaatagtaccatctatgaagtaatcggtaagagtcaacctaaagctcaaaaccccgctcgcttgagccgcaaggagctggaaaacttcgatgtatatagctctagaagctctagacgggttaagttttccagatccgcagacgcacccgcttaccaacaagggcagaaccaactctacaatgaacttaatttggggcggagggaagagtacgacgttctggacaaaaggaggggacgagatcccgagatgggcggaaagcctcagcgaaggaagaatccgcaagaggggctttataacgaactccagaaagataaaatggcagaagcctatagtgagattgggatgaagggagaaaggaggaggggtaaaggtcacgatgggttgtaccaaggattgagcacagccactaaagatacctatgatgcgctccacatgcaggccctgccgccaagacgcgccaagagaagcggatctggcgtgaagcagaccctgaatttcgacctgctgaagctggctggcgacgtggaatccaacccaggccctggccatatgaccgagtacaagcccacggtgcgcctcgccacccgcgacgacgtccccagggccgtacgcaccctcgccgccgcgttcgccgactaccccgccacgcgccacaccgtcgatccggaccgccacatcgagcgggtcaccgagctgcaagaactcttcctcacgcgcgtcgggctcgacatcggcaaggtgtgggtcgcggacgacggcgccgcggtggcggtctggaccacgccggagagcgtcgaagcgggggcggtgttcgccgagatcggcccgcgcatggccgagttgagcggttcccggctggccgcgcagcaacagatggaaggcctcctggcgccgcaccggcccaaggagcccgcgtggttcctggccaccgtcggcgtctcgcccgaccaccagggcaagggtctgggcagcgccgtcgtgctccccggagtggaggcggccgagcgcgccggggtgcccgccttcctggagacctccgcgccccgcaacctccccttctacgagcggctcggcttcaccgtcaccgccgacgtcgaggtgcccgaaggaccgcgcacctggtgcatgacccgcaagcccggtgcctga

SEQ ID NO: 2179 - DNA, 3681 bp, Artificial Sequence
  Synthetic Polynucleotide
atggccttaccagtgaccgccttgctcctgccgctggccttgctgctccacgccgccaggccggaagtgcagctggttgaatctggcggaggactggttcaggctggcggatctctgagactgtcttgtgccgccagcggcagaacctttagcatgggctggtttagacaggcccctggcaaagagagagagttcgtcgccgccatcacatactctggcggcagcccttactacgccgactctgtgaagggcagattcaccatcagccgggacaacgccaagaacaccgtgtacctccagatgaacagcctgaagcctgaggacaccgccgtgtactactgcgccgccaatccaacatacggcagcgactggaacgccgagaattggggccagggaacccaagtgacagtgtctagcctcgaggacctgaagaacgtgttcccacctgaggtggccgtgttcgagcctagcgaggccgagatcagccacacccagaaagccaccctcgtgtgcctggctaccggcttctaccccgaccatgtggaactgtcttggtgggtcaacggcaaagaggtgcacagcggcgtgtctaccgacccccagccactgaaagaacagcccgccctgaacgacagccggtactgcctgagcagcagactgagagtgtccgccaccttctggcagaacccccggaaccacttcagatgccaggtgcagttctacggcctgagcgagaacgacgagtggacccaggacagagccaagcccgtgacccagatcgtgtctgccgaagcctggggcagagccgattgcggatccacaacacctggcgagagaagtagcctgcctgccttctatcctggcaccagcggctcttgttctggctgtggatctctgagcctgcctctgctggctggactggttgctgctgatgctgtggcctctctgctgattgtgggagccgtgttcctgtgcgccagacctagaagaagccccgctcaagaggacggcaaggtgtacatcaacatgcccggcagaggaagcactagtagagtgaagttcagcagaagcgccgacgcccctgcctaccagcagggacagaaccaactgtacaacgagctgaacctgggcagacgggaagagtacgacgtgctggacaagcggagaggcagggaccctgagatgggcggaaagccccagcggagaaagaacccccaggaaggactgtataacgaactccagaaagacaagatggccgaagcctacagcgagatcggcatgaagggcgagcggagaagaggcaagggccacgatggcctgtaccagggcctgagcaccgccaccaaggacacctatgacgccctgcacatgcaggccctgcctccaagaagggccaagcgatctggatctggagcaacaaacttctcactactcaaacaagcaggtgacgtggaggagaatcccgggcctatggactggatttggcgcatccttttccttgtcggcgctgctaccggcgcgcattccgggcccgaagtgcaactggttgaatccggtggcggcctggtgcaagcaggcggatctctcagacttagctgtgccgcctccggcagaaccttcacaatgggatggtttaggcaggctccagggaaagagagagagttcgtcgccgccatctctctgtctcccacactggcctactacgccgactctgtgaaaggccggttcaccatctccagagataatgccaagaacaccgtggtgctgcaaatgaactctctgaaacccgaggatacagccctgtactattgtgccgctgaccggaagtccgtgatgagcatcagacccgattactggggacagggcacacaagtcacagtgtcctctacgcgtatccagaaccctgatcctgccgtgtaccagctgcgggatagcaagagcagcgacaagagcgtgtgtctgttcaccgacttcgacagccagaccaacgtgtcccagagcaaggactccgacgtgtacatcaccgataagaccgtgctggacatgcggagcatggacttcaagagcaactccgccgtggcctggtccaacaagtccgatttcgcctgcgccaacgccttcaacaacagcattatccccgaggacacattcttcccaagccccgagagcagctgcggtacccagagttttgggttgttggaccctaaattgagctatctgttggacggaatcctgttcatttacggagtgatcctgaccgcattgttcctgtggcgacgcaagcgcaaagaaaagcaaagcgagacaagcccaaaagaatttctcactatatacgaggacgtgaaagatttgaagacgaggcggaatcatgagcaagagcagacatttcctggcgggggctctactatctactcaatgattcaatcccaaagctccgctccgacttcccaagagcccgcttacactctctactcactgatacagccttcaagaaaatcaggctctcggaaacggaatcattccccatccttcaatagtaccatctatgaagtaatcggtaagagtcaacctaaagctcaaaaccccgctcgcttgagccgcaaggagctggaaaacttcgatgtatatagctctagaagctctagacgggttaagttttccagatccgcagacgcacccgcttaccaacaagggcagaaccaactctacaatgaacttaatttggggcggagggaagagtacgacgttctggacaaaaggaggggacgagatcccgagatgggcggaaagcctcagcgaaggaagaatccgcaagaggggctttataacgaactccagaaagataaaatggcagaagcctatagtgagattgggatgaagggagaaaggaggaggggtaaaggtcacgatgggttgtaccaaggattgagcacagccactaaagatacctatgatgcgctccacatgcaggccctgccgccaagacgcgccaagagaagcggatctggcgtgaagcagaccctgaatttcgacctgctgaagctggctggcgacgtggaatccaacccaggccctggccatatgaccgagtacaagcccacggtgcgcctcgccacccgcgacgacgtccccagggccgtacgcaccctcgccgccgcgttcgccgactaccccgccacgcgccacaccgtcgatccggaccgccacatcgagcgggtcaccgagctgcaagaactcttcctcacgcgcgtcgggctcgacatcggcaaggtgtgggtcgcggacgacggcgccgcggtggcggtctggaccacgccggagagcgtcgaagcgggggcggtgttcgccgagatcggcccgcgcatggccgagttgagcggttcccggctggccgcgcagcaacagatggaaggcctcctggcgccgcaccggcccaaggagcccgcgtggttcctggccaccgtcggcgtctcgcccgaccaccagggcaagggtctgggcagcgccgtcgtgctccccggagtggaggcggccgagcgcgccggggtgcccgccttcctggagacctccgcgccccgcaacctccccttctacgagcggctcggcttcaccgtcaccgccgacgtcgaggtgcccgaaggaccgcgcacctggtgcatgacccgcaagcccggtgcctga

SEQ ID NO: 2180 - DNA, 1758 bp, Artificial Sequence; identical to SEQ ID NO: 2037
  Synthetic Polynucleotide

SEQ ID NO: 2181 - DNA, 3204 bp, Artificial Sequence
  Synthetic Polynucleotide
atggccttaccagtgaccgccttgctcctgccgctggccttgctgctccacgccgccaggccggacatccagatgacacagagccctagcagcctgtctgccagcgtgggagacagagtgaccatcacatgcaaggccagcgaccacatcaacaactggctggcctggtatcagcagaagcctggacaggcccctaagctgctgatctacggcgctaccacactggaaacaggcgtgcccagcagattttctggcagcggctctggcaccgactacaccctgacaatatccagcctccagcctgaggacttcgccacctactactgtcagcagagctggaacaccccttggacattcggccagggcaccaagctggaaatcaagagactcgagcagagcttcggcctgctggaccccaagctgagctacctgctggatggcatcctgttcatctacggcgtgatcctgaccgccctgttcctgtggcggcggaagcggaaagagaagcagtctgagacaagccccaaagagttcctgaccatctacgaggacgtgaaggacctgaaaacccggcggaaccacgaacaagagcagacctttcctggcggaggcagcaccatctacagcatgatccagagccagagcagcgcccctacaagccaagagcctgcctacacactgtactccctgatccagcctagcagaaagagcggcagccggaagagaaatcacagccccagcttcaacagcacgatctacgaagtgatcggcaagagccagccaaaggctcagaaccctgccagactgagccggaaagagctggaaaacttcgacgtgtacagcagcactagtagagtgaagttcagcagaagcgccgacgcccctgcctaccagcagggacagaaccaactgtacaacgagctgaacctgggcagacgggaagagtacgacgtgctggacaagcggagaggcagggaccctgagatgggcggaaagccccagcggagaaagaacccccaggaaggactgtataacgaactccagaaagacaagatggccgaagcctacagcgagatcggcatgaagggcgagcggagaagaggcaagggccacgatggcctgtaccagggcctgagcaccgccaccaaggacacctatgacgccctgcacatgcaggccctgcctccaagaagggccaagcgatctggatctggagcaacaaacttctcactactcaaacaagcaggtgacgtggaggagaatcccgggcctatggactggatttggcgcatccttttccttgtcggcgctgctaccggcgcgcattccttcgaacaagttcagcttcaacagcctggcgctgagctggtcaaacctggcgcttctgtgaagatgagctgcaaagccagcggctacgccttcagcagctactggatcaactggatgaagcagaaacccggccagggactcgaatggatcggccaaatctatcccggcgacggcgacaccaactacaacggcaagttcaagggcagagccacactgaccgccgatacctctagcagcacagcctacatgcagctgagcagcctgaccagcgaagatagcgccgtgtacttctgtgcccggtccatcacaacagtcgtgggctgcgctatggactattggggccagggaacaagcgtgaccgtgtctagtacgcgtcagagttttgggttgttggaccctaaattgagctatctgttggacggaatcctgttcatttacggagtgatcctgaccgcattgttcctgtggcgacgcaagcgcaaagaaaagcaaagcgagacaagcccaaaagaatttctcactatatacgaggacgtgaaagatttgaagacgaggcggaatcatgagcaagagcagacatttcctggcgggggctctactatctactcaatgattcaatcccaaagctccgctccgacttcccaagagcccgcttacactctctactcactgatacagccttcaagaaaatcaggctctcggaaacggaatcattccccatccttcaatagtaccatctatgaagtaatcggtaagagtcaacctaaagctcaaaaccccgctcgcttgagccgcaaggagctggaaaacttcgatgtatatagctctagaagctctagacgggttaagttttccagatccgcagacgcacccgcttaccaacaagggcagaaccaactctacaatgaacttaatttggggcggagggaagagtacgacgttctggacaaaaggaggggacgagatcccgagatgggcggaaagcctcagcgaaggaagaatccgcaagaggggctttataacgaactccagaaagataaaatggcagaagcctatagtgagattgggatgaagggagaaaggaggaggggtaaaggtcacgatgggttgtaccaaggattgagcacagccactaaagatacctatgatgcgctccacatgcaggccctgccgccaagacgcgccaagagaagcggatctggcgtgaagcagaccctgaatttcgacctgctgaagctggctggcgacgtggaatccaacccaggccctggccatatgaccgagtacaagcccacggtgcgcctcgccacccgcgacgacgtccccagggccgtacgcaccctcgccgccgcgttcgccgactaccccgccacgcgccacaccgtcgatccggaccgccacatcgagcgggtcaccgagctgcaagaactcttcctcacgcgcgtcgggctcgacatcggcaaggtgtgggtcgcggacgacggcgccgcggtggcggtctggaccacgccggagagcgtcgaagcgggggcggtgttcgccgagatcggcccgcgcatggccgagttgagcggttcccggctggccgcgcagcaacagatggaaggcctcctggcgccgcaccggcccaaggagcccgcgtggttcctggccaccgtcggcgtctcgcccgaccaccagggcaagggtctgggcagcgccgtcgtgctccccggagtggaggcggccgagcgcgccggggtgcccgccttcctggagacctccgcgccccgcaacctccccttctacgagcggctcggcttcaccgtcaccgccgacgtcgaggtgcccgaaggaccgcgcacctggtgcatgacccgcaagcccggtgcctga

SEQ ID NO: 2182 - DNA, 3360 bp, Artificial Sequence
  Synthetic Polynucleotide
atggccttaccagtgaccgccttgctcctgccgctggccttgctgctccacgccgccaggccggcatgcgaagtgcagctgcttgaaagtggcggcggactgattcagcctggcggatctctgagactgagctgtgccgccagcggcttcaccttttctagccacgccatgacctgggtccgacaggcacctggaaaagggcttgaatgggtgtccgccatcagcggctctggcgattacacacactacgccgacagcgtgaagggcagattcaccatcagcagagacaacagcaagaacaccgtgtacctccagatgaacagcctgagagccgaggacagcgccgtgtattattgcgccaaggatgaggatggcggcagcctgcttggacacagaggacaaggcaccctggtcaccgtttcttccggtaccggcggaggcggatctggcggcggaggtagcggtggcggaggatctgaattcggatctctcgagcagagcttcggcctgctggaccccaagctgagctacctgctggatggcatcctgttcatctacggcgtgatcctgaccgccctgttcctgtggcggcggaagcggaaagagaagcagtctgagacaagccccaaagagttcctgaccatctacgaggacgtgaaggacctgaaaacccggcggaaccacgaacaagagcagacctttcctggcggaggcagcaccatctacagcatgatccagagccagagcagcgcccctacaagccaagagcctgcctacacactgtactccctgatccagcctagcagaaagagcggcagccggaagagaaatcacagccccagcttcaacagcacgatctacgaagtgatcggcaagagccagccaaaggctcagaaccctgccagactgagccggaaagagctggaaaacttcgacgtgtacagcagcactagtagagtgaagttcagcagaagcgccgacgcccctgcctaccagcagggacagaaccaactgtacaacgagctgaacctgggcagacgggaagagtacgacgtgctggacaagcggagaggcagggaccctgagatgggcggaaagccccagcggagaaagaacccccaggaaggactgtataacgaactccagaaagacaagatggccgaagcctacagcgagatcggcatgaagggcgagcggagaagaggcaagggccacgatggcctgtaccagggcctgagcaccgccaccaaggacacctatgacgccctgcacatgcaggccctgcctccaagaagggccaagcgatctggatctggagcaacaaacttctcactactcaaacaagcaggtgacgtggaggagaatcccgggcctatggactggatttggcgcatccttttccttgtcggcgctgctaccggcgcgcattccgggcccgaagtgcagctggttgaatctggcggaggactggttcaggctggcggatctctgagactgtcttgtgccgccagcggcagaacctttagcatgggctggtttagacaggcccctggcaaagagagagagttcgtcgccgccatcacatactctggcggcagcccttactacgccgactctgtgaagggcagattcaccatcagccgggacaacgccaagaacaccgtgtacctccagatgaacagcctgaagcctgaggacaccgccgtgtactactgcgccgccaatccaacatacggcagcgactggaacgccgagaattggggccagggaacccaagtgacagtgtctagcggatccggcggcggaggatctggcggaggcggatctgggggcggaggctctttcgaaggcagcacgcgtcagagttttgggttgttggaccctaaattgagctatctgttggacggaatcctgttcatttacggagtgatcctgaccgcattgttcctgtggcgacgcaagcgcaaagaaaagcaaagcgagacaagcccaaaagaatttctcactatatacgaggacgtgaaagatttgaagacgaggcggaatcatgagcaagagcagacatttcctggcgggggctctactatctactcaatgattcaatcccaaagctccgctccgacttcccaagagcccgcttacactctctactcactgatacagccttcaagaaaatcaggctctcggaaacggaatcattccccatccttcaatagtaccatctatgaagtaatcggtaagagtcaacctaaagctcaaaaccccgctcgcttgagccgcaaggagctggaaaacttcgatgtatatagctctagaagctctagacgggttaagttttccagatccgcagacgcacccgcttaccaacaagggcagaaccaactctacaatgaacttaatttggggcggagggaagagtacgacgttctggacaaaaggaggggacgagatcccgagatgggcggaaagcctcagcgaaggaagaatccgcaagaggggctttataacgaactccagaaagataaaatggcagaagcctatagtgagattgggatgaagggagaaaggaggaggggtaaaggtcacgatgggttgtaccaaggattgagcacagccactaaagatacctatgatgcgctccacatgcaggccctgccgccaagacgcgccaagagaagcggatctggcgtgaagcagaccctgaatttcgacctgctgaagctggctggcgacgtggaatccaacccaggccctggccatatgaccgagtacaagcccacggtgcgcctcgccacccgcgacgacgtccccagggccgtacgcaccctcgccgccgcgttcgccgactaccccgccacgcgccacaccgtcgatccggaccgccacatcgagcgggtcaccgagctgcaagaactcttcctcacgcgcgtcgggctcgacatcggcaaggtgtgggtcgcggacgacggcgccgcggtggcggtctggaccacgccggagagcgtcgaagcgggggcggtgttcgccgagatcggcccgcgcatggccgagttgagcggttcccggctggccgcgcagcaacagatggaaggcctcctggcgccgcaccggcccaaggagcccgcgtggttcctggccaccgtcggcgtctcgcccgaccaccagggcaagggtctgggcagcgccgtcgtgctccccggagtggaggcggccgagcgcgccggggtgcccgccttcctggagacctccgcgccccgcaacctccccttctacgagcggctcggcttcaccgtcaccgccgacgtcgaggtgcccgaaggaccgcgcacctggtgcatgacccgcaagcccggtgcctga

SEQ ID NO: 2183 - DNA, 3807 bp, Artificial Sequence
  Synthetic Polynucleotide
atggccttaccagtgaccgccttgctcctgccgctggccttgctgctccacgccgccaggccggacatccagatgacacagagccctagcagcctgtctgccagcgtgggagacagagtgaccatcacatgcaaggccagcgaccacatcaacaactggctggcctggtatcagcagaagcctggacaggcccctaagctgctgatctacggcgctaccacactggaaacaggcgtgcccagcagattttctggcagcggctctggcaccgactacaccctgacaatatccagcctccagcctgaggacttcgccacctactactgtcagcagagctggaacaccccttggacattcggccagggcaccaagctggaaatcaagagactcgagggacagcctaaggccaatcctaccgtgacactgttccctccaagcagcgaagaactccaggccaacaaggccacacttgtgtgcctgatctccgacttctaccctggggctgtgacagtggcttggaaggccgatggatctcctgtgaaagccggcgtggaaaccaccaagccatccaagcagagcaacaacaaatacgccgccagctcctacctgagcctgacacctgagcagtggaagtcccacagatcctacagctgccaagtgacccacgaaggcagcaccgtggaaaagacagtggcccctacagagtgcagcggatcccagagcttcggcctgctggaccccaagctgagctacctgctggatggcatcctgttcatctacggcgtgatcctgaccgccctgttcctgtggcggcggaagcggaaagagaagcagtctgagacaagccccaaagagttcctgaccatctacgaggacgtgaaggacctgaaaacccggcggaaccacgaacaagagcagacctttcctggcggaggcagcaccatctacagcatgatccagagccagagcagcgcccctacaagccaagagcctgcctacacactgtactccctgatccagcctagcagaaagagcggcagccggaagagaaatcacagccccagcttcaacagcacgatctacgaagtgatcggcaagagccagccaaaggctcagaaccctgccagactgagccggaaagagctggaaaacttcgacgtgtacagcagcactagtagagtgaagttcagcagaagcgccgacgcccctgcctaccagcagggacagaaccaactgtacaacgagctgaacctgggcagacgggaagagtacgacgtgctggacaagcggagaggcagggaccctgagatgggcggaaagccccagcggagaaagaacccccaggaaggactgtataacgaactccagaaagacaagatggccgaagcctacagcgagatcggcatgaagggcgagcggagaagaggcaagggccacgatggcctgtaccagggcctgagcaccgccaccaaggacacctatgacgccctgcacatgcaggccctgcctccaagaagggccaagcgatctggatctggagcaacaaacttctcactactcaaacaagcaggtgacgtggaggagaatcccgggcctatggactggatttggcgcatccttttccttgtcggcgctgctaccggcgcgcattccttcgaacaagttcagcttcaacagcctggcgctgagctggtcaaacctggcgcttctgtgaagatgagctgcaaagccagcggctacgccttcagcagctactggatcaactggatgaagcagaaacccggccagggactcgaatggatcggccaaatctatcccggcgacggcgacaccaactacaacggcaagttcaagggcagagccacactgaccgccgatacctctagcagcacagcctacatgcagctgagcagcctgaccagcgaagatagcgccgtgtacttctgtgcccggtccatcacaacagtcgtgggctgcgctatggactattggggccagggaacaagcgtgaccgtgtctagtacgcgtgcctctacaaagggaccctccgtgtttcctctggctcccagcagcaagtctacaagcggaggaacagccgctctgggctgcctggtcaaggattactttcccgagcctgtgaccgtgtcctggaatagcggagcactgacaagcggcgtgcacacctttccagccgtgctgcaaagcagcggcctgtactctctgagcagcgtggtcacagtgcctagctctagcctgggcacccagacctacatctgcaatgtgaaccacaagcctagcaacaccaaggtggacaagagagtggaacccaagagctgtggtacccagagttttgggttgttggaccctaaattgagctatctgttggacggaatcctgttcatttacggagtgatcctgaccgcattgttcctgtggcgacgcaagcgcaaagaaaagcaaagcgagacaagcccaaaagaatttctcactatatacgaggacgtgaaagatttgaagacgaggcggaatcatgagcaagagcagacatttcctggcgggggctctactatctactcaatgattcaatcccaaagctccgctccgacttcccaagagcccgcttacactctctactcactgatacagccttcaagaaaatcaggctctcggaaacggaatcattccccatccttcaatagtaccatctatgaagtaatcggtaagagtcaacctaaagctcaaaaccccgctcgcttgagccgcaaggagctggaaaacttcgatgtatatagctctagaagctctagacgggttaagttttccagatccgcagacgcacccgcttaccaacaagggcagaaccaactctacaatgaacttaatttggggcggagggaagagtacgacgttctggacaaaaggaggggacgagatcccgagatgggcggaaagcctcagcgaaggaagaatccgcaagaggggctttataacgaactccagaaagataaaatggcagaagcctatagtgagattgggatgaagggagaaaggaggaggggtaaaggtcacgatgggttgtaccaaggattgagcacagccactaaagatacctatgatgcgctccacatgcaggccctgccgccaagacgcgccaagagaagcggatctggcgtgaagcagaccctgaatttcgacctgctgaagctggctggcgacgtggaatccaacccaggccctggccatatggctacctacgaggtgctgtgcgaggtggcaagaaagctgggcaccgacgacagagaagtggtgctgttcctgctgaacgtgttcatccctcagcctacactggcccagctgatcggtgcactgagagccctgaaagaggaaggccggctgacctttcctctgctggccgaatgcctgttcagagccggaagaagggatctgctgcgggacctgctgcatctggaccccagatttctggaaagacacctggccggcaccatgagctacttcagcccttaccagctgaccgtgctgcacgttgacggcgaactgtgcgccagagatattcggagcctgatcttcctgagcaaggacaccatcggcagccggtctacccctcagacatttctgcactgggtgtactgcatggaaaacctggacctgctcggccccacagatgtggatgccctgatgtccatgctgagaagcctgagcagagtggacctccagagacaggtgcagacactgatgggactgcacctgagcggacctagccacagccagcactacagacacacccct

SEQ ID NO: 2184 - DNA, 3966 bp, Artificial Sequence
  Synthetic Polynucleotide
atggccttaccagtgaccgccttgctcctgccgctggccttgctgctccacgccgccaggccggacatccagatgacacagagccctagcagcctgtctgccagcgtgggagacagagtgaccatcacatgcaaggccagcgaccacatcaacaactggctggcctggtatcagcagaagcctggacaggcccctaagctgctgatctacggcgctaccacactggaaacaggcgtgcccagcagattttctggcagcggctctggcaccgactacaccctgacaatatccagcctccagcctgaggacttcgccacctactactgtcagcagagctggaacaccccttggacattcggccagggcaccaagctggaaatcaagagactcgagggacagcctaaggccaatcctaccgtgacactgttccctccaagcagcgaagaactccaggccaacaaggccacacttgtgtgcctgatctccgacttctaccctggggctgtgacagtggcttggaaggccgatggatctcctgtgaaagccggcgtggaaaccaccaagccatccaagcagagcaacaacaaatacgccgccagctcctacctgagcctgacacctgagcagtggaagtcccacagatcctacagctgccaagtgacccacgaaggcagcaccgtggaaaagacagtggcccctacagagtgcagcggatcccagagcttcggcctgctggaccccaagctgagctacctgctggatggcatcctgttcatctacggcgtgatcctgaccgccctgttcctgtggcggcggaagcggaaagagaagcagtctgagacaagccccaaagagttcctgaccatctacgaggacgtgaaggacctgaaaacccggcggaaccacgaacaagagcagacctttcctggcggaggcagcaccatctacagcatgatccagagccagagcagcgcccctacaagccaagagcctgcctacacactgtactccctgatccagcctagcagaaagagcggcagccggaagagaaatcacagccccagcttcaacagcacgatctacgaagtgatcggcaagagccagccaaaggctcagaaccctgccagactgagccggaaagagctggaaaacttcgacgtgtacagcagcactagtagagtgaagttcagcagaagcgccgacgcccctgcctaccagcagggacagaaccaactgtacaacgagctgaacctgggcagacgggaagagtacgacgtgctggacaagcggagaggcagggaccctgagatgggcggaaagccccagcggagaaagaacccccaggaaggactgtataacgaactccagaaagacaagatggccgaagcctacagcgagatcggcatgaagggcgagcggagaagaggcaagggccacgatggcctgtaccagggcctgagcaccgccaccaaggacacctatgacgccctgcacatgcaggccctgcctccaagaagggccaagcgatctggatctggagcaacaaacttctcactactcaaacaagcaggtgacgtggaggagaatcccgggcctatggactggatttggcgcatccttttccttgtcggcgctgctaccggcgcgcattccttcgaacaagttcagcttcaacagcctggcgctgagctggtcaaacctggcgcttctgtgaagatgagctgcaaagccagcggctacgccttcagcagctactggatcaactggatgaagcagaaacccggccagggactcgaatggatcggccaaatctatcccggcgacggcgacaccaactacaacggcaagttcaagggcagagccacactgaccgccgatacctctagcagcacagcctacatgcagctgagcagcctgaccagcgaagatagcgccgtgtacttctgtgcccggtccatcacaacagtcgtgggctgcgctatggactattggggccagggaacaagcgtgaccgtgtctagtacgcgtgcctctacaaagggaccctccgtgtttcctctggctcccagcagcaagtctacaagcggaggaacagccgctctgggctgcctggtcaaggattactttcccgagcctgtgaccgtgtcctggaatagcggagcactgacaagcggcgtgcacacctttccagccgtgctgcaaagcagcggcctgtactctctgagcagcgtggtcacagtgcctagctctagcctgggcacccagacctacatctgcaatgtgaaccacaagcctagcaacaccaaggtggacaagagagtggaacccaagagctgtggtacccagagttttgggttgttggaccctaaattgagctatctgttggacggaatcctgttcatttacggagtgatcctgaccgcattgttcctgtggcgacgcaagcgcaaagaaaagcaaagcgagacaagcccaaaagaatttctcactatatacgaggacgtgaaagatttgaagacgaggcggaatcatgagcaagagcagacatttcctggcgggggctctactatctactcaatgattcaatcccaaagctccgctccgacttcccaagagcccgcttacactctctactcactgatacagccttcaagaaaatcaggctctcggaaacggaatcattccccatccttcaatagtaccatctatgaagtaatcggtaagagtcaacctaaagctcaaaaccccgctcgcttgagccgcaaggagctggaaaacttcgatgtatatagctctagaagctctagacgggttaagttttccagatccgcagacgcacccgcttaccaacaagggcagaaccaactctacaatgaacttaatttggggcggagggaagagtacgacgttctggacaaaaggaggggacgagatcccgagatgggcggaaagcctcagcgaaggaagaatccgcaagaggggctttataacgaactccagaaagataaaatggcagaagcctatagtgagattgggatgaagggagaaaggaggaggggtaaaggtcacgatgggttgtaccaaggattgagcacagccactaaagatacctatgatgcgctccacatgcaggccctgccgccaagacgcgccaagagaagcggatctggcgtgaagcagaccctgaatttcgacctgctgaagctggctggcgacgtggaatccaacccaggccctggccatatgtccgactccaaggaggtccctagccttccatttttgcgacacttgctcgaagagttggacagccatgaggacagcttgctgctgtttctgtgtcacgacgcggccccgggctgcacgacggtcacgcaagctttgtgctcgcttagccaacagcgcaagctgaccctcgcggctctggtcgagatgctctacgtgctgcagcgtatggatcttctcaagagccgcttcgggctcagcaaggagggggccgagcaattgctgggcacaagctttctcacgcgctaccgcaagctcatggtttgcgtgggtgaggagctcgactcgagcgagctacgcgctctacgcttgttcgcgtgcaacctgaatccgagcctgagcacggcgctttctgagagcagccgctttgtcgagcttgtactcgcgcttgaaaacgtaggactcgtctcgccatcgagtgtttccgtgcttgcggacatgttgcgcactcttcggcgcctcgatttgtgccagcagcttgttgagtacgaacaacaagagcaagccaggtaccgttactgttacgcggcctcgccctcattgccagttcgtacgttacgtcgggggcacggcgcgagtgaacacgagcagctgtgcatgcccgtgcaagaatcctctgacagccccgagctgctgcgcacgcccgtacaagaatcctccagcgacagccccgagcaaacgact

SEQ ID NO: 2185 - DNA, 3843 bp, Artificial Sequence
  Synthetic Polynucleotide
atggccttaccagtgaccgccttgctcctgccgctggccttgctgctccacgccgccaggccggacatccagatgacacagagccctagcagcctgtctgccagcgtgggagacagagtgaccatcacatgcaaggccagcgaccacatcaacaactggctggcctggtatcagcagaagcctggacaggcccctaagctgctgatctacggcgctaccacactggaaacaggcgtgcccagcagattttctggcagcggctctggcaccgactacaccctgacaatatccagcctccagcctgaggacttcgccacctactactgtcagcagagctggaacaccccttggacattcggccagggcaccaagctggaaatcaagagactcgagggacagcctaaggccaatcctaccgtgacactgttccctccaagcagcgaagaactccaggccaacaaggccacacttgtgtgcctgatctccgacttctaccctggggctgtgacagtggcttggaaggccgatggatctcctgtgaaagccggcgtggaaaccaccaagccatccaagcagagcaacaacaaatacgccgccagctcctacctgagcctgacacctgagcagtggaagtcccacagatcctacagctgccaagtgacccacgaaggcagcaccgtggaaaagacagtggcccctacagagtgcagcggatcccagagcttcggcctgctggaccccaagctgagctacctgctggatggcatcctgttcatctacggcgtgatcctgaccgccctgttcctgtggcggcggaagcggaaagagaagcagtctgagacaagccccaaagagttcctgaccatctacgaggacgtgaaggacctgaaaacccggcggaaccacgaacaagagcagacctttcctggcggaggcagcaccatctacagcatgatccagagccagagcagcgcccctacaagccaagagcctgcctacacactgtactccctgatccagcctagcagaaagagcggcagccggaagagaaatcacagccccagcttcaacagcacgatctacgaagtgatcggcaagagccagccaaaggctcagaaccctgccagactgagccggaaagagctggaaaacttcgacgtgtacagcagcactagtagagtgaagttcagcagaagcgccgacgcccctgcctaccagcagggacagaaccaactgtacaacgagctgaacctgggcagacgggaagagtacgacgtgctggacaagcggagaggcagggaccctgagatgggcggaaagccccagcggagaaagaacccccaggaaggactgtataacgaactccagaaagacaagatggccgaagcctacagcgagatcggcatgaagggcgagcggagaagaggcaagggccacgatggcctgtaccagggcctgagcaccgccaccaaggacacctatgacgccctgcacatgcaggccctgcctccaagaagggccaagcgatctggatctggagcaacaaacttctcactactcaaacaagcaggtgacgtggaggagaatcccgggcctatggactggatttggcgcatccttttccttgtcggcgctgctaccggcgcgcattccttcgaacaagttcagcttcaacagcctggcgctgagctggtcaaacctggcgcttctgtgaagatgagctgcaaagccagcggctacgccttcagcagctactggatcaactggatgaagcagaaacccggccagggactcgaatggatcggccaaatctatcccggcgacggcgacaccaactacaacggcaagttcaagggcagagccacactgaccgccgatacctctagcagcacagcctacatgcagctgagcagcctgaccagcgaagatagcgccgtgtacttctgtgcccggtccatcacaacagtcgtgggctgcgctatggactattggggccagggaacaagcgtgaccgtgtctagtacgcgtgcctctacaaagggaccctccgtgtttcctctggctcccagcagcaagtctacaagcggaggaacagccgctctgggctgcctggtcaaggattactttcccgagcctgtgaccgtgtcctggaatagcggagcactgacaagcggcgtgcacacctttccagccgtgctgcaaagcagcggcctgtactctctgagcagcgtggtcacagtgcctagctctagcctgggcacccagacctacatctgcaatgtgaaccacaagcctagcaacaccaaggtggacaagagagtggaacccaagagctgtggtacccagagttttgggttgttggaccctaaattgagctatctgttggacggaatcctgttcatttacggagtgatcctgaccgcattgttcctgtggcgacgcaagcgcaaagaaaagcaaagcgagacaagcccaaaagaatttctcactatatacgaggacgtgaaagatttgaagacgaggcggaatcatgagcaagagcagacatttcctggcgggggctctactatctactcaatgattcaatcccaaagctccgctccgacttcccaagagcccgcttacactctctactcactgatacagccttcaagaaaatcaggctctcggaaacggaatcattccccatccttcaatagtaccatctatgaagtaatcggtaagagtcaacctaaagctcaaaaccccgctcgcttgagccgcaaggagctggaaaacttcgatgtatatagctctagaagctctagacgggttaagttttccagatccgcagacgcacccgcttaccaacaagggcagaaccaactctacaatgaacttaatttggggcggagggaagagtacgacgttctggacaaaaggaggggacgagatcccgagatgggcggaaagcctcagcgaaggaagaatccgcaagaggggctttataacgaactccagaaagataaaatggcagaagcctatagtgagattgggatgaagggagaaaggaggaggggtaaaggtcacgatgggttgtaccaaggattgagcacagccactaaagatacctatgatgcgctccacatgcaggccctgccgccaagacgcgccaagagaagcggatctggcgtgaagcagaccctgaatttcgacctgctgaagctggctggcgacgtggaatccaacccaggccctggccatatgaccgagtacaagcccacggtgcgcctcgccacccgcgacgacgtccccagggccgtacgcaccctcgccgccgcgttcgccgactaccccgccacgcgccacaccgtcgatccggaccgccacatcgagcgggtcaccgagctgcaagaactcttcctcacgcgcgtcgggctcgacatcggcaaggtgtgggtcgcggacgacggcgccgcggtggcggtctggaccacgccggagagcgtcgaagcgggggcggtgttcgccgagatcggcccgcgcatggccgagttgagcggttcccggctggccgcgcagcaacagatggaaggcctcctggcgccgcaccggcccaaggagcccgcgtggttcctggccaccgtcggcgtctcgcccgaccaccagggcaagggtctgggcagcgccgtcgtgctccccggagtggaggcggccgagcgcgccggggtgcccgccttcctggagacctccgcgccccgcaacctccccttctacgagcggctcggcttcaccgtcaccgccgacgtcgaggtgcccgaaggaccgcgcacctggtgcatgacccgcaagcccggtgcctga

SEQ ID NO: 2186 - DNA, 4254 bp, Artificial Sequence
  Synthetic Polynucleotide
atggccttaccagtgaccgccttgctcctgccgctggccttgctgctccacgccgccaggccggaagtgcagctggttgaatctggcggaggactggttcaggctggcggatctctgagactgtcttgtgccgccagcggcagaacctttagcatgggctggtttagacaggcccctggcaaagagagagagttcgtcgccgccatcacatactctggcggcagcccttactacgccgactctgtgaagggcagattcaccatcagccgggacaacgccaagaacaccgtgtacctccagatgaacagcctgaagcctgaggacaccgccgtgtactactgcgccgccaatccaacatacggcagcgactggaacgccgagaattggggccagggaacccaagtgacagtgtctagcggtaccggcggaggcggatctggcggcggaggtagcggtggcggaggatctgaattcgacatccagatgacacagagccctagcagcctgtctgccagcgtgggagacagagtgaccatcacatgcaaggccagcgaccacatcaacaactggctggcctggtatcagcagaagcctggacaggcccctaagctgctgatctacggcgctaccacactggaaacaggcgtgcccagcagattttctggcagcggctctggcaccgactacaccctgacaatatccagcctccagcctgaggacttcgccacctactactgtcagcagagctggaacaccccttggacattcggccagggcaccaagctggaaatcaagagactcgagggacagcctaaggccaatcctaccgtgacactgttccctccaagcagcgaagaactccaggccaacaaggccacacttgtgtgcctgatctccgacttctaccctggggctgtgacagtggcttggaaggccgatggatctcctgtgaaagccggcgtggaaaccaccaagccatccaagcagagcaacaacaaatacgccgccagctcctacctgagcctgacacctgagcagtggaagtcccacagatcctacagctgccaagtgacccacgaaggcagcaccgtggaaaagacagtggcccctacagagtgcagcggatcccagagcttcggcctgctggaccccaagctgagctacctgctggatggcatcctgttcatctacggcgtgatcctgaccgccctgttcctgtggcggcggaagcggaaagagaagcagtctgagacaagccccaaagagttcctgaccatctacgaggacgtgaaggacctgaaaacccggcggaaccacgaacaagagcagacctttcctggcggaggcagcaccatctacagcatgatccagagccagagcagcgcccctacaagccaagagcctgcctacacactgtactccctgatccagcctagcagaaagagcggcagccggaagagaaatcacagccccagcttcaacagcacgatctacgaagtgatcggcaagagccagccaaaggctcagaaccctgccagactgagccggaaagagctggaaaacttcgacgtgtacagcagcactagtagagtgaagttcagcagaagcgccgacgcccctgcctaccagcagggacagaaccaactgtacaacgagctgaacctgggcagacgggaagagtacgacgtgctggacaagcggagaggcagggaccctgagatgggcggaaagccccagcggagaaagaacccccaggaaggactgtataacgaactccagaaagacaagatggccgaagcctacagcgagatcggcatgaagggcgagcggagaagaggcaagggccacgatggcctgtaccagggcctgagcaccgccaccaaggacacctatgacgccctgcacatgcaggccctgcctccaagaagggccaagcgatctggatctggagcaacaaacttctcactactcaaacaagcaggtgacgtggaggagaatcccgggcctatggactggatttggcgcatccttttccttgtcggcgctgctaccggcgcgcattccttcgaacaagttcagcttcaacagcctggcgctgagctggtcaaacctggcgcttctgtgaagatgagctgcaaagccagcggctacgccttcagcagctactggatcaactggatgaagcagaaacccggccagggactcgaatggatcggccaaatctatcccggcgacggcgacaccaactacaacggcaagttcaagggcagagccacactgaccgccgatacctctagcagcacagcctacatgcagctgagcagcctgaccagcgaagatagcgccgtgtacttctgtgcccggtccatcacaacagtcgtgggctgcgctatggactattggggccagggaacaagcgtgaccgtgtctagtacgcgtgcctctacaaagggaccctccgtgtttcctctggctcccagcagcaagtctacaagcggaggaacagccgctctgggctgcctggtcaaggattactttcccgagcctgtgaccgtgtcctggaatagcggagcactgacaagcggcgtgcacacctttccagccgtgctgcaaagcagcggcctgtactctctgagcagcgtggtcacagtgcctagctctagcctgggcacccagacctacatctgcaatgtgaaccacaagcctagcaacaccaaggtggacaagagagtggaacccaagagctgtggtacccagagttttgggttgttggaccctaaattgagctatctgttggacggaatcctgttcatttacggagtgatcctgaccgcattgttcctgtggcgacgcaagcgcaaagaaaagcaaagcgagacaagcccaaaagaatttctcactatatacgaggacgtgaaagatttgaagacgaggcggaatcatgagcaagagcagacatttcctggcgggggctctactatctactcaatgattcaatcccaaagctccgctccgacttcccaagagcccgcttacactctctactcactgatacagccttcaagaaaatcaggctctcggaaacggaatcattccccatccttcaatagtaccatctatgaagtaatcggtaagagtcaacctaaagctcaaaaccccgctcgcttgagccgcaaggagctggaaaacttcgatgtatatagctctagaagctctagacgggttaagttttccagatccgcagacgcacccgcttaccaacaagggcagaaccaactctacaatgaacttaatttggggcggagggaagagtacgacgttctggacaaaaggaggggacgagatcccgagatgggcggaaagcctcagcgaaggaagaatccgcaagaggggctttataacgaactccagaaagataaaatggcagaagcctatagtgagattgggatgaagggagaaaggaggaggggtaaaggtcacgatgggttgtaccaaggattgagcacagccactaaagatacctatgatgcgctccacatgcaggccctgccgccaagacgcgccaagagaagcggatctggcgtgaagcagaccctgaatttcgacctgctgaagctggctggcgacgtggaatccaacccaggccctggccatatgaccgagtacaagcccacggtgcgcctcgccacccgcgacgacgtccccagggccgtacgcaccctcgccgccgcgttcgccgactaccccgccacgcgccacaccgtcgatccggaccgccacatcgagcgggtcaccgagctgcaagaactcttcctcacgcgcgtcgggctcgacatcggcaaggtgtgggtcgcggacgacggcgccgcggtggcggtctggaccacgccggagagcgtcgaagcgggggcggtgttcgccgagatcggcccgcgcatggccgagttgagcggttcccggctggccgcgcagcaacagatggaaggcctcctggcgccgcaccggcccaaggagcccgcgtggttcctggccaccgtcggcgtctcgcccgaccaccagggcaagggtctgggcagcgccgtcgtgctccccggagtggaggcggccgagcgcgccggggtgcccgccttcctggagacctccgcgccccgcaacctccccttctacgagcggctcggcttcaccgtcaccgccgacgtcgaggtgcccgaaggaccgcgcacctggtgcatgacccgcaagcccggtgcctga

SEQ ID NO: 2187 - DNA, 4665 bp, Artificial Sequence
  Synthetic Polynucleotide
atggccttaccagtgaccgccttgctcctgccgctggccttgctgctccacgccgccaggccggaagtgcagctggttgaatctggcggaggactggttcaggctggcggatctctgagactgtcttgtgccgccagcggcagaacctttagcatgggctggtttagacaggcccctggcaaagagagagagttcgtcgccgccatcacatactctggcggcagcccttactacgccgactctgtgaagggcagattcaccatcagccgggacaacgccaagaacaccgtgtacctccagatgaacagcctgaagcctgaggacaccgccgtgtactactgcgccgccaatccaacatacggcagcgactggaacgccgagaattggggccagggaacccaagtgacagtgtctagcggtaccggcggaggcggatctggcggcggaggtagcggtggcggaggatctgaattcgacatccagatgacacagagccctagcagcctgtctgccagcgtgggagacagagtgaccatcacatgcaaggccagcgaccacatcaacaactggctggcctggtatcagcagaagcctggacaggcccctaagctgctgatctacggcgctaccacactggaaacaggcgtgcccagcagattttctggcagcggctctggcaccgactacaccctgacaatatccagcctccagcctgaggacttcgccacctactactgtcagcagagctggaacaccccttggacattcggccagggcaccaagctggaaatcaagagactcgagggacagcctaaggccaatcctaccgtgacactgttccctccaagcagcgaagaactccaggccaacaaggccacacttgtgtgcctgatctccgacttctaccctggggctgtgacagtggcttggaaggccgatggatctcctgtgaaagccggcgtggaaaccaccaagccatccaagcagagcaacaacaaatacgccgccagctcctacctgagcctgacacctgagcagtggaagtcccacagatcctacagctgccaagtgacccacgaaggcagcaccgtggaaaagacagtggcccctacagagtgcagcggatcccagagcttcggcctgctggaccccaagctgagctacctgctggatggcatcctgttcatctacggcgtgatcctgaccgccctgttcctgtggcggcggaagcggaaagagaagcagtctgagacaagccccaaagagttcctgaccatctacgaggacgtgaaggacctgaaaacccggcggaaccacgaacaagagcagacctttcctggcggaggcagcaccatctacagcatgatccagagccagagcagcgcccctacaagccaagagcctgcctacacactgtactccctgatccagcctagcagaaagagcggcagccggaagagaaatcacagccccagcttcaacagcacgatctacgaagtgatcggcaagagccagccaaaggctcagaaccctgccagactgagccggaaagagctggaaaacttcgacgtgtacagcagcactagtagagtgaagttcagcagaagcgccgacgcccctgcctaccagcagggacagaaccaactgtacaacgagctgaacctgggcagacgggaagagtacgacgtgctggacaagcggagaggcagggaccctgagatgggcggaaagccccagcggagaaagaacccccaggaaggactgtataacgaactccagaaagacaagatggccgaagcctacagcgagatcggcatgaagggcgagcggagaagaggcaagggccacgatggcctgtaccagggcctgagcaccgccaccaaggacacctatgacgccctgcacatgcaggccctgcctccaagaagggccaagcgatctggatctggagcaacaaacttctcactactcaaacaagcaggtgacgtggaggagaatcccgggcctatggactggatttggcgcatccttttccttgtcggcgctgctaccggcgcgcattccgggcccgaagtgcaactggttgaatccggtggcggcctggtgcaagcaggcggatctctcagacttagctgtgccgcctccggcagaaccttcacaatgggatggtttaggcaggctccagggaaagagagagagttcgtcgccgccatctctctgtctcccacactggcctactacgccgactctgtgaaaggccggttcaccatctccagagataatgccaagaacaccgtggtgctgcaaatgaactctctgaaacccgaggatacagccctgtactattgtgccgctgaccggaagtccgtgatgagcatcagacccgattactggggacagggcacacaagtcacagtgtcctctggatccggcggcggaggatctggcggaggcggatctgggggcggaggctctttcgaacaagttcagcttcaacagcctggcgctgagctggtcaaacctggcgcttctgtgaagatgagctgcaaagccagcggctacgccttcagcagctactggatcaactggatgaagcagaaacccggccagggactcgaatggatcggccaaatctatcccggcgacggcgacaccaactacaacggcaagttcaagggcagagccacactgaccgccgatacctctagcagcacagcctacatgcagctgagcagcctgaccagcgaagatagcgccgtgtacttctgtgcccggtccatcacaacagtcgtgggctgcgctatggactattggggccagggaacaagcgtgaccgtgtctagtacgcgtgcctctacaaagggaccctccgtgtttcctctggctcccagcagcaagtctacaagcggaggaacagccgctctgggctgcctggtcaaggattactttcccgagcctgtgaccgtgtcctggaatagcggagcactgacaagcggcgtgcacacctttccagccgtgctgcaaagcagcggcctgtactctctgagcagcgtggtcacagtgcctagctctagcctgggcacccagacctacatctgcaatgtgaaccacaagcctagcaacaccaaggtggacaagagagtggaacccaagagctgtggtacccagagttttgggttgttggaccctaaattgagctatctgttggacggaatcctgttcatttacggagtgatcctgaccgcattgttcctgtggcgacgcaagcgcaaagaaaagcaaagcgagacaagcccaaaagaatttctcactatatacgaggacgtgaaagatttgaagacgaggcggaatcatgagcaagagcagacatttcctggcgggggctctactatctactcaatgattcaatcccaaagctccgctccgacttcccaagagcccgcttacactctctactcactgatacagccttcaagaaaatcaggctctcggaaacggaatcattccccatccttcaatagtaccatctatgaagtaatcggtaagagtcaacctaaagctcaaaaccccgctcgcttgagccgcaaggagctggaaaacttcgatgtatatagctctagaagctctagacgggttaagttttccagatccgcagacgcacccgcttaccaacaagggcagaaccaactctacaatgaacttaatttggggcggagggaagagtacgacgttctggacaaaaggaggggacgagatcccgagatgggcggaaagcctcagcgaaggaagaatccgcaagaggggctttataacgaactccagaaagataaaatggcagaagcctatagtgagattgggatgaagggagaaaggaggaggggtaaaggtcacgatgggttgtaccaaggattgagcacagccactaaagatacctatgatgcgctccacatgcaggccctgccgccaagacgcgccaagagaagcggatctggcgtgaagcagaccctgaatttcgacctgctgaagctggctggcgacgtggaatccaacccaggccctggccatatgaccgagtacaagcccacggtgcgcctcgccacccgcgacgacgtccccagggccgtacgcaccctcgccgccgcgttcgccgactaccccgccacgcgccacaccgtcgatccggaccgccacatcgagcgggtcaccgagctgcaagaactcttcctcacgcgcgtcgggctcgacatcggcaaggtgtgggtcgcggacgacggcgccgcggtggcggtctggaccacgccggagagcgtcgaagcgggggcggtgttcgccgagatcggcccgcgcatggccgagttgagcggttcccggctggccgcgcagcaacagatggaaggcctcctggcgccgcaccggcccaaggagcccgcgtggttcctggccaccgtcggcgtctcgcccgaccaccagggcaagggtctgggcagcgccgtcgtgctccccggagtggaggcggccgagcgcgccggggtgcccgccttcctggagacctccgcgccccgcaacctccccttctacgagcggctcggcttcaccgtcaccgccgacgtcgaggtgcccgaaggaccgcgcacctggtgcatgacccgcaagcccggtgcctga

SEQ ID NO: 2188 - DNA, 3864 bp, Artificial Sequence
  Synthetic Polynucleotide
atggccttaccagtgaccgccttgctcctgccgctggccttgctgctccacgccgccaggccggaagtgcagctggttgaatctggcggaggactggttcaggctggcggatctctgagactgtcttgtgccgccagcggcagaacctttagcatgggctggtttagacaggcccctggcaaagagagagagttcgtcgccgccatcacatactctggcggcagcccttactacgccgactctgtgaagggcagattcaccatcagccgggacaacgccaagaacaccgtgtacctccagatgaacagcctgaagcctgaggacaccgccgtgtactactgcgccgccaatccaacatacggcagcgactggaacgccgagaattggggccagggaacccaagtgacagtgtctagcctcgagggacagcctaaggccaatcctaccgtgacactgttccctccaagcagcgaagaactccaggccaacaaggccacacttgtgtgcctgatctccgacttctaccctggggctgtgacagtggcttggaaggccgatggatctcctgtgaaagccggcgtggaaaccaccaagccatccaagcagagcaacaacaaatacgccgccagctcctacctgagcctgacacctgagcagtggaagtcccacagatcctacagctgccaagtgacccacgaaggcagcaccgtggaaaagacagtggcccctacagagtgcagcggatcccagagcttcggcctgctggaccccaagctgagctacctgctggatggcatcctgttcatctacggcgtgatcctgaccgccctgttcctgtggcggcggaagcggaaagagaagcagtctgagacaagccccaaagagttcctgaccatctacgaggacgtgaaggacctgaaaacccggcggaaccacgaacaagagcagacctttcctggcggaggcagcaccatctacagcatgatccagagccagagcagcgcccctacaagccaagagcctgcctacacactgtactccctgatccagcctagcagaaagagcggcagccggaagagaaatcacagccccagcttcaacagcacgatctacgaagtgatcggcaagagccagccaaaggctcagaaccctgccagactgagccggaaagagctggaaaacttcgacgtgtacagcagcactagtagagtgaagttcagcagaagcgccgacgcccctgcctaccagcagggacagaaccaactgtacaacgagctgaacctgggcagacgggaagagtacgacgtgctggacaagcggagaggcagggaccctgagatgggcggaaagccccagcggagaaagaacccccaggaaggactgtataacgaactccagaaagacaagatggccgaagcctacagcgagatcggcatgaagggcgagcggagaagaggcaagggccacgatggcctgtaccagggcctgagcaccgccaccaaggacacctatgacgccctgcacatgcaggccctgcctccaagaagggccaagcgatctggatctggagcaacaaacttctcactactcaaacaagcaggtgacgtggaggagaatcccgggcctatggactggatttggcgcatccttttccttgtcggcgctgctaccggcgcgcattccgggcccgaagtgcaactggttgaatccggtggcggcctggtgcaagcaggcggatctctcagacttagctgtgccgcctccggcagaaccttcacaatgggatggtttaggcaggctccagggaaagagagagagttcgtcgccgccatctctctgtctcccacactggcctactacgccgactctgtgaaaggccggttcaccatctccagagataatgccaagaacaccgtggtgctgcaaatgaactctctgaaacccgaggatacagccctgtactattgtgccgctgaccggaagtccgtgatgagcatcagacccgattactggggacagggcacacaagtcacagtgtcctctacgcgtgcctctacaaagggaccctccgtgtttcctctggctcccagcagcaagtctacaagcggaggaacagccgctctgggctgcctggtcaaggattactttcccgagcctgtgaccgtgtcctggaatagcggagcactgacaagcggcgtgcacacctttccagccgtgctgcaaagcagcggcctgtactctctgagcagcgtggtcacagtgcctagctctagcctgggcacccagacctacatctgcaatgtgaaccacaagcctagcaacaccaaggtggacaagagagtggaacccaagagctgtggtacccagagttttgggttgttggaccctaaattgagctatctgttggacggaatcctgttcatttacggagtgatcctgaccgcattgttcctgtggcgacgcaagcgcaaagaaaagcaaagcgagacaagcccaaaagaatttctcactatatacgaggacgtgaaagatttgaagacgaggcggaatcatgagcaagagcagacatttcctggcgggggctctactatctactcaatgattcaatcccaaagctccgctccgacttcccaagagcccgcttacactctctactcactgatacagccttcaagaaaatcaggctctcggaaacggaatcattccccatccttcaatagtaccatctatgaagtaatcggtaagagtcaacctaaagctcaaaaccccgctcgcttgagccgcaaggagctggaaaacttcgatgtatatagctctagaagctctagacgggttaagttttccagatccgcagacgcacccgcttaccaacaagggcagaaccaactctacaatgaacttaatttggggcggagggaagagtacgacgttctggacaaaaggaggggacgagatcccgagatgggcggaaagcctcagcgaaggaagaatccgcaagaggggctttataacgaactccagaaagataaaatggcagaagcctatagtgagattgggatgaagggagaaaggaggaggggtaaaggtcacgatgggttgtaccaaggattgagcacagccactaaagatacctatgatgcgctccacatgcaggccctgccgccaagacgcgccaagagaagcggatctggcgtgaagcagaccctgaatttcgacctgctgaagctggctggcgacgtggaatccaacccaggccctggccatatgaccgagtacaagcccacggtgcgcctcgccacccgcgacgacgtccccagggccgtacgcaccctcgccgccgcgttcgccgactaccccgccacgcgccacaccgtcgatccggaccgccacatcgagcgggtcaccgagctgcaagaactcttcctcacgcgcgtcgggctcgacatcggcaaggtgtgggtcgcggacgacggcgccgcggtggcggtctggaccacgccggagagcgtcgaagcgggggcggtgttcgccgagatcggcccgcgcatggccgagttgagcggttcccggctggccgcgcagcaacagatggaaggcctcctggcgccgcaccggcccaaggagcccgcgtggttcctggccaccgtcggcgtctcgcccgaccaccagggcaagggtctgggcagcgccgtcgtgctccccggagtggaggcggccgagcgcgccggggtgcccgccttcctggagacctccgcgccccgcaacctccccttctacgagcggctcggcttcaccgtcaccgccgacgtcgaggtgcccgaaggaccgcgcacctggtgcatgacccgcaagcccggtgcctga

SEQ ID NO: 2189 - DNA, 3888 bp, Artificial Sequence
  Synthetic Polynucleotide
atggccttaccagtgaccgccttgctcctgccgctggccttgctgctccacgccgccaggccggacatccagatgacacagagccctagcagcctgtctgccagcgtgggagacagagtgaccatcacatgcaaggccagcgaccacatcaacaactggctggcctggtatcagcagaagcctggacaggcccctaagctgctgatctacggcgctaccacactggaaacaggcgtgcccagcagattttctggcagcggctctggcaccgactacaccctgacaatatccagcctccagcctgaggacttcgccacctactactgtcagcagagctggaacaccccttggacattcggccagggcaccaagctggaaatcaagagactcgaggacctgaagaacgtgttcccacctgaggtggccgtgttcgagcctagcgaggccgagatcagccacacccagaaagccaccctcgtgtgcctggctaccggcttctaccccgaccatgtggaactgtcttggtgggtcaacggcaaagaggtgcacagcggcgtgtctaccgacccccagccactgaaagaacagcccgccctgaacgacagccggtactgcctgagcagcagactgagagtgtccgccaccttctggcagaacccccggaaccacttcagatgccaggtgcagttctacggcctgagcgagaacgacgagtggacccaggacagagccaagcccgtgacccagatcgtgtctgccgaagcctggggcagagccgattgcggatcccagagcttcggcctgctggaccccaagctgagctacctgctggatggcatcctgttcatctacggcgtgatcctgaccgccctgttcctgtggcggcggaagcggaaagagaagcagtctgagacaagccccaaagagttcctgaccatctacgaggacgtgaaggacctgaaaacccggcggaaccacgaacaagagcagacctttcctggcggaggcagcaccatctacagcatgatccagagccagagcagcgcccctacaagccaagagcctgcctacacactgtactccctgatccagcctagcagaaagagcggcagccggaagagaaatcacagccccagcttcaacagcacgatctacgaagtgatcggcaagagccagccaaaggctcagaaccctgccagactgagccggaaagagctggaaaacttcgacgtgtacagcagcactagtagagtgaagttcagcagaagcgccgacgcccctgcctaccagcagggacagaaccaactgtacaacgagctgaacctgggcagacgggaagagtacgacgtgctggacaagcggagaggcagggaccctgagatgggcggaaagccccagcggagaaagaacccccaggaaggactgtataacgaactccagaaagacaagatggccgaagcctacagcgagatcggcatgaagggcgagcggagaagaggcaagggccacgatggcctgtaccagggcctgagcaccgccaccaaggacacctatgacgccctgcacatgcaggccctgcctccaagaagggccaagcgatctggatctggagcaacaaacttctcactactcaaacaagcaggtgacgtggaggagaatcccgggcctatggactggatttggcgcatccttttccttgtcggcgctgctaccggcgcgcattccttcgaacaagttcagcttcaacagcctggcgctgagctggtcaaacctggcgcttctgtgaagatgagctgcaaagccagcggctacgccttcagcagctactggatcaactggatgaagcagaaacccggccagggactcgaatggatcggccaaatctatcccggcgacggcgacaccaactacaacggcaagttcaagggcagagccacactgaccgccgatacctctagcagcacagcctacatgcagctgagcagcctgaccagcgaagatagcgccgtgtacttctgtgcccggtccatcacaacagtcgtgggctgcgctatggactattggggccagggaacaagcgtgaccgtgtctagtacgcgtatccagaaccctgatcctgccgtgtaccagctgcgggatagcaagagcagcgacaagagcgtgtgtctgttcaccgacttcgacagccagaccaacgtgtcccagagcaaggactccgacgtgtacatcaccgataagaccgtgctggacatgcggagcatggacttcaagagcaactccgccgtggcctggtccaacaagtccgatttcgcctgcgccaacgccttcaacaacagcattatccccgaggacacattcttcccaagccccgagagcagctgcggtacccagagttttgggttgttggaccctaaattgagctatctgttggacggaatcctgttcatttacggagtgatcctgaccgcattgttcctgtggcgacgcaagcgcaaagaaaagcaaagcgagacaagcccaaaagaatttctcactatatacgaggacgtgaaagatttgaagacgaggcggaatcatgagcaagagcagacatttcctggcgggggctctactatctactcaatgattcaatcccaaagctccgctccgacttcccaagagcccgcttacactctctactcactgatacagccttcaagaaaatcaggctctcggaaacggaatcattccccatccttcaatagtaccatctatgaagtaatcggtaagagtcaacctaaagctcaaaaccccgctcgcttgagccgcaaggagctggaaaacttcgatgtatatagctctagaagctctagacgggttaagttttccagatccgcagacgcacccgcttaccaacaagggcagaaccaactctacaatgaacttaatttggggcggagggaagagtacgacgttctggacaaaaggaggggacgagatcccgagatgggcggaaagcctcagcgaaggaagaatccgcaagaggggctttataacgaactccagaaagataaaatggcagaagcctatagtgagattgggatgaagggagaaaggaggaggggtaaaggtcacgatgggttgtaccaaggattgagcacagccactaaagatacctatgatgcgctccacatgcaggccctgccgccaagacgcgccaagagaagcggatctggcgtgaagcagaccctgaatttcgacctgctgaagctggctggcgacgtggaatccaacccaggccctggccatatgaccgagtacaagcccacggtgcgcctcgccacccgcgacgacgtccccagggccgtacgcaccctcgccgccgcgttcgccgactaccccgccacgcgccacaccgtcgatccggaccgccacatcgagcgggtcaccgagctgcaagaactcttcctcacgcgcgtcgggctcgacatcggcaaggtgtgggtcgcggacgacggcgccgcggtggcggtctggaccacgccggagagcgtcgaagcgggggcggtgttcgccgagatcggcccgcgcatggccgagttgagcggttcccggctggccgcgcagcaacagatggaaggcctcctggcgccgcaccggcccaaggagcccgcgtggttcctggccaccgtcggcgtctcgcccgaccaccagggcaagggtctgggcagcgccgtcgtgctccccggagtggaggcggccgagcgcgccggggtgcccgccttcctggagacctccgcgccccgcaacctccccttctacgagcggctcggcttcaccgtcaccgccgacgtcgaggtgcccgaaggaccgcgcacctggtgcatgacccgcaagcccggtgcctga

SEQ ID NO: 2190 - DNA, 4299 bp, Artificial Sequence
  Synthetic Polynucleotide
atggccttaccagtgaccgccttgctcctgccgctggccttgctgctccacgccgccaggccggaagtgcagctggttgaatctggcggaggactggttcaggctggcggatctctgagactgtcttgtgccgccagcggcagaacctttagcatgggctggtttagacaggcccctggcaaagagagagagttcgtcgccgccatcacatactctggcggcagcccttactacgccgactctgtgaagggcagattcaccatcagccgggacaacgccaagaacaccgtgtacctccagatgaacagcctgaagcctgaggacaccgccgtgtactactgcgccgccaatccaacatacggcagcgactggaacgccgagaattggggccagggaacccaagtgacagtgtctagcggtaccggcggaggcggatctggcggcggaggtagcggtggcggaggatctgaattcgacatccagatgacacagagccctagcagcctgtctgccagcgtgggagacagagtgaccatcacatgcaaggccagcgaccacatcaacaactggctggcctggtatcagcagaagcctggacaggcccctaagctgctgatctacggcgctaccacactggaaacaggcgtgcccagcagattttctggcagcggctctggcaccgactacaccctgacaatatccagcctccagcctgaggacttcgccacctactactgtcagcagagctggaacaccccttggacattcggccagggcaccaagctggaaatcaagagactcgaggacctgaagaacgtgttcccacctgaggtggccgtgttcgagcctagcgaggccgagatcagccacacccagaaagccaccctcgtgtgcctggctaccggcttctaccccgaccatgtggaactgtcttggtgggtcaacggcaaagaggtgcacagcggcgtgtctaccgacccccagccactgaaagaacagcccgccctgaacgacagccggtactgcctgagcagcagactgagagtgtccgccaccttctggcagaacccccggaaccacttcagatgccaggtgcagttctacggcctgagcgagaacgacgagtggacccaggacagagccaagcccgtgacccagatcgtgtctgccgaagcctggggcagagccgattgcggatcccagagcttcggcctgctggaccccaagctgagctacctgctggatggcatcctgttcatctacggcgtgatcctgaccgccctgttcctgtggcggcggaagcggaaagagaagcagtctgagacaagccccaaagagttcctgaccatctacgaggacgtgaaggacctgaaaacccggcggaaccacgaacaagagcagacctttcctggcggaggcagcaccatctacagcatgatccagagccagagcagcgcccctacaagccaagagcctgcctacacactgtactccctgatccagcctagcagaaagagcggcagccggaagagaaatcacagccccagcttcaacagcacgatctacgaagtgatcggcaagagccagccaaaggctcagaaccctgccagactgagccggaaagagctggaaaacttcgacgtgtacagcagcactagtagagtgaagttcagcagaagcgccgacgcccctgcctaccagcagggacagaaccaactgtacaacgagctgaacctgggcagacgggaagagtacgacgtgctggacaagcggagaggcagggaccctgagatgggcggaaagccccagcggagaaagaacccccaggaaggactgtataacgaactccagaaagacaagatggccgaagcctacagcgagatcggcatgaagggcgagcggagaagaggcaagggccacgatggcctgtaccagggcctgagcaccgccaccaaggacacctatgacgccctgcacatgcaggccctgcctccaagaagggccaagcgatctggatctggagcaacaaacttctcactactcaaacaagcaggtgacgtggaggagaatcccgggcctatggactggatttggcgcatccttttccttgtcggcgctgctaccggcgcgcattccttcgaacaagttcagcttcaacagcctggcgctgagctggtcaaacctggcgcttctgtgaagatgagctgcaaagccagcggctacgccttcagcagctactggatcaactggatgaagcagaaacccggccagggactcgaatggatcggccaaatctatcccggcgacggcgacaccaactacaacggcaagttcaagggcagagccacactgaccgccgatacctctagcagcacagcctacatgcagctgagcagcctgaccagcgaagatagcgccgtgtacttctgtgcccggtccatcacaacagtcgtgggctgcgctatggactattggggccagggaacaagcgtgaccgtgtctagtacgcgtatccagaaccctgatcctgccgtgtaccagctgcgggatagcaagagcagcgacaagagcgtgtgtctgttcaccgacttcgacagccagaccaacgtgtcccagagcaaggactccgacgtgtacatcaccgataagaccgtgctggacatgcggagcatggacttcaagagcaactccgccgtggcctggtccaacaagtccgatttcgcctgcgccaacgccttcaacaacagcattatccccgaggacacattcttcccaagccccgagagcagctgcggtacccagagttttgggttgttggaccctaaattgagctatctgttggacggaatcctgttcatttacggagtgatcctgaccgcattgttcctgtggcgacgcaagcgcaaagaaaagcaaagcgagacaagcccaaaagaatttctcactatatacgaggacgtgaaagatttgaagacgaggcggaatcatgagcaagagcagacatttcctggcgggggctctactatctactcaatgattcaatcccaaagctccgctccgacttcccaagagcccgcttacactctctactcactgatacagccttcaagaaaatcaggctctcggaaacggaatcattccccatccttcaatagtaccatctatgaagtaatcggtaagagtcaacctaaagctcaaaaccccgctcgcttgagccgcaaggagctggaaaacttcgatgtatatagctctagaagctctagacgggttaagttttccagatccgcagacgcacccgcttaccaacaagggcagaaccaactctacaatgaacttaatttggggcggagggaagagtacgacgttctggacaaaaggaggggacgagatcccgagatgggcggaaagcctcagcgaaggaagaatccgcaagaggggctttataacgaactccagaaagataaaatggcagaagcctatagtgagattgggatgaagggagaaaggaggaggggtaaaggtcacgatgggttgtaccaaggattgagcacagccactaaagatacctatgatgcgctccacatgcaggccctgccgccaagacgcgccaagagaagcggatctggcgtgaagcagaccctgaatttcgacctgctgaagctggctggcgacgtggaatccaacccaggccctggccatatgaccgagtacaagcccacggtgcgcctcgccacccgcgacgacgtccccagggccgtacgcaccctcgccgccgcgttcgccgactaccccgccacgcgccacaccgtcgatccggaccgccacatcgagcgggtcaccgagctgcaagaactcttcctcacgcgcgtcgggctcgacatcggcaaggtgtgggtcgcggacgacggcgccgcggtggcggtctggaccacgccggagagcgtcgaagcgggggcggtgttcgccgagatcggcccgcgcatggccgagttgagcggttcccggctggccgcgcagcaacagatggaaggcctcctggcgccgcaccggcccaaggagcccgcgtggttcctggccaccgtcggcgtctcgcccgaccaccagggcaagggtctgggcagcgccgtcgtgctccccggagtggaggcggccgagcgcgccggggtgcccgccttcctggagacctccgcgccccgcaacctccccttctacgagcggctcggcttcaccgtcaccgccgacgtcgaggtgcccgaaggaccgcgcacctggtgcatgacccgcaagcccggtgcctga

SEQ ID NO: 2191 - DNA, 4710 bp, Artificial Sequence
  Synthetic Polynucleotide
atggccttaccagtgaccgccttgctcctgccgctggccttgctgctccacgccgccaggccggaagtgcagctggttgaatctggcggaggactggttcaggctggcggatctctgagactgtcttgtgccgccagcggcagaacctttagcatgggctggtttagacaggcccctggcaaagagagagagttcgtcgccgccatcacatactctggcggcagcccttactacgccgactctgtgaagggcagattcaccatcagccgggacaacgccaagaacaccgtgtacctccagatgaacagcctgaagcctgaggacaccgccgtgtactactgcgccgccaatccaacatacggcagcgactggaacgccgagaattggggccagggaacccaagtgacagtgtctagcggtaccggcggaggcggatctggcggcggaggtagcggtggcggaggatctgaattcgacatccagatgacacagagccctagcagcctgtctgccagcgtgggagacagagtgaccatcacatgcaaggccagcgaccacatcaacaactggctggcctggtatcagcagaagcctggacaggcccctaagctgctgatctacggcgctaccacactggaaacaggcgtgcccagcagattttctggcagcggctctggcaccgactacaccctgacaatatccagcctccagcctgaggacttcgccacctactactgtcagcagagctggaacaccccttggacattcggccagggcaccaagctggaaatcaagagactcgaggacctgaagaacgtgttcccacctgaggtggccgtgttcgagcctagcgaggccgagatcagccacacccagaaagccaccctcgtgtgcctggctaccggcttctaccccgaccatgtggaactgtcttggtgggtcaacggcaaagaggtgcacagcggcgtgtctaccgacccccagccactgaaagaacagcccgccctgaacgacagccggtactgcctgagcagcagactgagagtgtccgccaccttctggcagaacccccggaaccacttcagatgccaggtgcagttctacggcctgagcgagaacgacgagtggacccaggacagagccaagcccgtgacccagatcgtgtctgccgaagcctggggcagagccgattgcggatcccagagcttcggcctgctggaccccaagctgagctacctgctggatggcatcctgttcatctacggcgtgatcctgaccgccctgttcctgtggcggcggaagcggaaagagaagcagtctgagacaagccccaaagagttcctgaccatctacgaggacgtgaaggacctgaaaacccggcggaaccacgaacaagagcagacctttcctggcggaggcagcaccatctacagcatgatccagagccagagcagcgcccctacaagccaagagcctgcctacacactgtactccctgatccagcctagcagaaagagcggcagccggaagagaaatcacagccccagcttcaacagcacgatctacgaagtgatcggcaagagccagccaaaggctcagaaccctgccagactgagccggaaagagctggaaaacttcgacgtgtacagcagcactagtagagtgaagttcagcagaagcgccgacgcccctgcctaccagcagggacagaaccaactgtacaacgagctgaacctgggcagacgggaagagtacgacgtgctggacaagcggagaggcagggaccctgagatgggcggaaagccccagcggagaaagaacccccaggaaggactgtataacgaactccagaaagacaagatggccgaagcctacagcgagatcggcatgaagggcgagcggagaagaggcaagggccacgatggcctgtaccagggcctgagcaccgccaccaaggacacctatgacgccctgcacatgcaggccctgcctccaagaagggccaagcgatctggatctggagcaacaaacttctcactactcaaacaagcaggtgacgtggaggagaatcccgggcctatggactggatttggcgcatccttttccttgtcggcgctgctaccggcgcgcattccgggcccgaagtgcaactggttgaatccggtggcggcctggtgcaagcaggcggatctctcagacttagctgtgccgcctccggcagaaccttcacaatgggatggtttaggcaggctccagggaaagagagagagttcgtcgccgccatctctctgtctcccacactggcctactacgccgactctgtgaaaggccggttcaccatctccagagataatgccaagaacaccgtggtgctgcaaatgaactctctgaaacccgaggatacagccctgtactattgtgccgctgaccggaagtccgtgatgagcatcagacccgattactggggacagggcacacaagtcacagtgtcctctggatccggcggcggaggatctggcggaggcggatctgggggcggaggctctttcgaacaagttcagcttcaacagcctggcgctgagctggtcaaacctggcgcttctgtgaagatgagctgcaaagccagcggctacgccttcagcagctactggatcaactggatgaagcagaaacccggccagggactcgaatggatcggccaaatctatcccggcgacggcgacaccaactacaacggcaagttcaagggcagagccacactgaccgccgatacctctagcagcacagcctacatgcagctgagcagcctgaccagcgaagatagcgccgtgtacttctgtgcccggtccatcacaacagtcgtgggctgcgctatggactattggggccagggaacaagcgtgaccgtgtctagtacgcgtatccagaaccctgatcctgccgtgtaccagctgcgggatagcaagagcagcgacaagagcgtgtgtctgttcaccgacttcgacagccagaccaacgtgtcccagagcaaggactccgacgtgtacatcaccgataagaccgtgctggacatgcggagcatggacttcaagagcaactccgccgtggcctggtccaacaagtccgatttcgcctgcgccaacgccttcaacaacagcattatccccgaggacacattcttcccaagccccgagagcagctgcggtacccagagttttgggttgttggaccctaaattgagctatctgttggacggaatcctgttcatttacggagtgatcctgaccgcattgttcctgtggcgacgcaagcgcaaagaaaagcaaagcgagacaagcccaaaagaatttctcactatatacgaggacgtgaaagatttgaagacgaggcggaatcatgagcaagagcagacatttcctggcgggggctctactatctactcaatgattcaatcccaaagctccgctccgacttcccaagagcccgcttacactctctactcactgatacagccttcaagaaaatcaggctctcggaaacggaatcattccccatccttcaatagtaccatctatgaagtaatcggtaagagtcaacctaaagctcaaaaccccgctcgcttgagccgcaaggagctggaaaacttcgatgtatatagctctagaagctctagacgggttaagttttccagatccgcagacgcacccgcttaccaacaagggcagaaccaactctacaatgaacttaatttggggcggagggaagagtacgacgttctggacaaaaggaggggacgagatcccgagatgggcggaaagcctcagcgaaggaagaatccgcaagaggggctttataacgaactccagaaagataaaatggcagaagcctatagtgagattgggatgaagggagaaaggaggaggggtaaaggtcacgatgggttgtaccaaggattgagcacagccactaaagatacctatgatgcgctccacatgcaggccctgccgccaagacgcgccaagagaagcggatctggcgtgaagcagaccctgaatttcgacctgctgaagctggctggcgacgtggaatccaacccaggccctggccatatgaccgagtacaagcccacggtgcgcctcgccacccgcgacgacgtccccagggccgtacgcaccctcgccgccgcgttcgccgactaccccgccacgcgccacaccgtcgatccggaccgccacatcgagcgggtcaccgagctgcaagaactcttcctcacgcgcgtcgggctcgacatcggcaaggtgtgggtcgcggacgacggcgccgcggtggcggtctggaccacgccggagagcgtcgaagcgggggcggtgttcgccgagatcggcccgcgcatggccgagttgagcggttcccggctggccgcgcagcaacagatggaaggcctcctggcgccgcaccggcccaaggagcccgcgtggttcctggccaccgtcggcgtctcgcccgaccaccagggcaagggtctgggcagcgccgtcgtgctccccggagtggaggcggccgagcgcgccggggtgcccgccttcctggagacctccgcgccccgcaacctccccttctacgagcggctcggcttcaccgtcaccgccgacgtcgaggtgcccgaaggaccgcgcacctggtgcatgacccgcaagcccggtgcctga

SEQ ID NO: 2192 - DNA, 3909 bp, Artificial Sequence
  Synthetic Polynucleotide
atggccttaccagtgaccgccttgctcctgccgctggccttgctgctccacgccgccaggccggaagtgcagctggttgaatctggcggaggactggttcaggctggcggatctctgagactgtcttgtgccgccagcggcagaacctttagcatgggctggtttagacaggcccctggcaaagagagagagttcgtcgccgccatcacatactctggcggcagcccttactacgccgactctgtgaagggcagattcaccatcagccgggacaacgccaagaacaccgtgtacctccagatgaacagcctgaagcctgaggacaccgccgtgtactactgcgccgccaatccaacatacggcagcgactggaacgccgagaattggggccagggaacccaagtgacagtgtctagcctcgaggacctgaagaacgtgttcccacctgaggtggccgtgttcgagcctagcgaggccgagatcagccacacccagaaagccaccctcgtgtgcctggctaccggcttctaccccgaccatgtggaactgtcttggtgggtcaacggcaaagaggtgcacagcggcgtgtctaccgacccccagccactgaaagaacagcccgccctgaacgacagccggtactgcctgagcagcagactgagagtgtccgccaccttctggcagaacccccggaaccacttcagatgccaggtgcagttctacggcctgagcgagaacgacgagtggacccaggacagagccaagcccgtgacccagatcgtgtctgccgaagcctggggcagagccgattgcggatcccagagcttcggcctgctggaccccaagctgagctacctgctggatggcatcctgttcatctacggcgtgatcctgaccgccctgttcctgtggcggcggaagcggaaagagaagcagtctgagacaagccccaaagagttcctgaccatctacgaggacgtgaaggacctgaaaacccggcggaaccacgaacaagagcagacctttcctggcggaggcagcaccatctacagcatgatccagagccagagcagcgcccctacaagccaagagcctgcctacacactgtactccctgatccagcctagcagaaagagcggcagccggaagagaaatcacagccccagcttcaacagcacgatctacgaagtgatcggcaagagccagccaaaggctcagaaccctgccagactgagccggaaagagctggaaaacttcgacgtgtacagcagcactagtagagtgaagttcagcagaagcgccgacgcccctgcctaccagcagggacagaaccaactgtacaacgagctgaacctgggcagacgggaagagtacgacgtgctggacaagcggagaggcagggaccctgagatgggcggaaagccccagcggagaaagaacccccaggaaggactgtataacgaactccagaaagacaagatggccgaagcctacagcgagatcggcatgaagggcgagcggagaagaggcaagggccacgatggcctgtaccagggcctgagcaccgccaccaaggacacctatgacgccctgcacatgcaggccctgcctccaagaagggccaagcgatctggatctggagcaacaaacttctcactactcaaacaagcaggtgacgtggaggagaatcccgggcctatggactggatttggcgcatccttttccttgtcggcgctgctaccggcgcgcattccgggcccgaagtgcaactggttgaatccggtggcggcctggtgcaagcaggcggatctctcagacttagctgtgccgcctccggcagaaccttcacaatgggatggtttaggcaggctccagggaaagagagagagttcgtcgccgccatctctctgtctcccacactggcctactacgccgactctgtgaaaggccggttcaccatctccagagataatgccaagaacaccgtggtgctgcaaatgaactctctgaaacccgaggatacagccctgtactattgtgccgctgaccggaagtccgtgatgagcatcagacccgattactggggacagggcacacaagtcacagtgtcctctacgcgtatccagaaccctgatcctgccgtgtaccagctgcgggatagcaagagcagcgacaagagcgtgtgtctgttcaccgacttcgacagccagaccaacgtgtcccagagcaaggactccgacgtgtacatcaccgataagaccgtgctggacatgcggagcatggacttcaagagcaactccgccgtggcctggtccaacaagtccgatttcgcctgcgccaacgccttcaacaacagcattatccccgaggacacattcttcccaagccccgagagcagctgcggtacccagagttttgggttgttggaccctaaattgagctatctgttggacggaatcctgttcatttacggagtgatcctgaccgcattgttcctgtggcgacgcaagcgcaaagaaaagcaaagcgagacaagcccaaaagaatttctcactatatacgaggacgtgaaagatttgaagacgaggcggaatcatgagcaagagcagacatttcctggcgggggctctactatctactcaatgattcaatcccaaagctccgctccgacttcccaagagcccgcttacactctctactcactgatacagccttcaagaaaatcaggctctcggaaacggaatcattccccatccttcaatagtaccatctatgaagtaatcggtaagagtcaacctaaagctcaaaaccccgctcgcttgagccgcaaggagctggaaaacttcgatgtatatagctctagaagctctagacgggttaagttttccagatccgcagacgcacccgcttaccaacaagggcagaaccaactctacaatgaacttaatttggggcggagggaagagtacgacgttctggacaaaaggaggggacgagatcccgagatgggcggaaagcctcagcgaaggaagaatccgcaagaggggctttataacgaactccagaaagataaaatggcagaagcctatagtgagattgggatgaagggagaaaggaggaggggtaaaggtcacgatgggttgtaccaaggattgagcacagccactaaagatacctatgatgcgctccacatgcaggccctgccgccaagacgcgccaagagaagcggatctggcgtgaagcagaccctgaatttcgacctgctgaagctggctggcgacgtggaatccaacccaggccctggccatatgaccgagtacaagcccacggtgcgcctcgccacccgcgacgacgtccccagggccgtacgcaccctcgccgccgcgttcgccgactaccccgccacgcgccacaccgtcgatccggaccgccacatcgagcgggtcaccgagctgcaagaactcttcctcacgcgcgtcgggctcgacatcggcaaggtgtgggtcgcggacgacggcgccgcggtggcggtctggaccacgccggagagcgtcgaagcgggggcggtgttcgccgagatcggcccgcgcatggccgagttgagcggttcccggctggccgcgcagcaacagatggaaggcctcctggcgccgcaccggcccaaggagcccgcgtggttcctggccaccgtcggcgtctcgcccgaccaccagggcaagggtctgggcagcgccgtcgtgctccccggagtggaggcggccgagcgcgccggggtgcccgccttcctggagacctccgcgccccgcaacctccccttctacgagcggctcggcttcaccgtcaccgccgacgtcgaggtgcccgaaggaccgcgcacctggtgcatgacccgcaagcccggtgcctga

SEQ ID NO: 2193 - DNA, 1986 bp, Artificial Sequence
  Synthetic Polynucleotide
atggccttaccagtgaccgccttgctcctgccgctggccttgctgctccacgccgccaggccggcatgcgaagtgcagctgcttgaaagtggcggcggactgattcagcctggcggatctctgagactgagctgtgccgccagcggcttcaccttttctagccacgccatgacctgggtccgacaggcacctggaaaagggcttgaatgggtgtccgccatcagcggctctggcgattacacacactacgccgacagcgtgaagggcagattcaccatcagcagagacaacagcaagaacaccgtgtacctccagatgaacagcctgagagccgaggacagcgccgtgtattattgcgccaaggatgaggatggcggcagcctgcttggacacagaggacaaggcaccctggtcaccgtttcttccggtaccggcggaggcggatctggcggcggaggtagcggtggcggaggatctgaattcggatctctcgagcagagcttcggcctgctggaccccaagctgagctacctgctggatggcatcctgttcatctacggcgtgatcctgaccgccctgttcctgtggcggcggaagcggaaagagaagcagtctgagacaagccccaaagagttcctgaccatctacgaggacgtgaaggacctgaaaacccggcggaaccacgaacaagagcagacctttcctggcggaggcagcaccatctacagcatgatccagagccagagcagcgcccctacaagccaagagcctgcctacacactgtactccctgatccagcctagcagaaagagcggcagccggaagagaaatcacagccccagcttcaacagcacgatctacgaagtgatcggcaagagccagccaaaggctcagaaccctgccagactgagccggaaagagctggaaaacttcgacgtgtacagcagcactagtagagtgaagttcagcagaagcgccgacgcccctgcctaccagcagggacagaaccaactgtacaacgagctgaacctgggcagacgggaagagtacgacgtgctggacaagcggagaggcagggaccctgagatgggcggaaagccccagcggagaaagaacccccaggaaggactgtataacgaactccagaaagacaagatggccgaagcctacagcgagatcggcatgaagggcgagcggagaagaggcaagggccacgatggcctgtaccagggcctgagcaccgccaccaaggacacctatgacgccctgcacatgcaggccctgcctccaagaagggccaagcgatctggatctggagcaacaaacttctcactactcaaacaagcaggtgacgtggaggagaatcccgggcctactagaggccatatgaccgagtacaagcccacggtgcgcctcgccacccgcgacgacgtccccagggccgtacgcaccctcgccgccgcgttcgccgactaccccgccacgcgccacaccgtcgatccggaccgccacatcgagcgggtcaccgagctgcaagaactcttcctcacgcgcgtcgggctcgacatcggcaaggtgtgggtcgcggacgacggcgccgcggtggcggtctggaccacgccggagagcgtcgaagcgggggcggtgttcgccgagatcggcccgcgcatggccgagttgagcggttcccggctggccgcgcagcaacagatggaaggcctcctggcgccgcaccggcccaaggagcccgcgtggttcctggccaccgtcggcgtctcgcccgaccaccagggcaagggtctgggcagcgccgtcgtgctccccggagtggaggcggccgagcgcgccggggtgcccgccttcctggagacctccgcgccccgcaacctccccttctacgagcggctcggcttcaccgtcaccgccgacgtcgaggtgcccgaaggaccgcgcacctggtgcatgacccgcaagcccggtgcctga

SEQ ID NO: 2194 - DNA, 3117 bp, Artificial Sequence
  Synthetic Polynucleotide
atggccttaccagtgaccgccttgctcctgccgctggccttgctgctccacgccgccaggccggacatccagatgacacagagccctagcagcctgtctgccagcgtgggagacagagtgaccatcacatgcaaggccagcgaccacatcaacaactggctggcctggtatcagcagaagcctggacaggcccctaagctgctgatctacggcgctaccacactggaaacaggcgtgcccagcagattttctggcagcggctctggcaccgactacaccctgacaatatccagcctccagcctgaggacttcgccacctactactgtcagcagagctggaacaccccttggacattcggccagggcaccaagctggaaatcaagagactcgagacaacacctggcgagagaagtagcctgcctgccttctatcctggcaccagcggctcttgttctggctgtggatctctgagcctgcctctgctggctggactggttgctgctgatgctgtggcctctctgctgattgtgggagccgtgttcctgtgcgccagacctagaagaagccccgctcaagaggacggcaaggtgtacatcaacatgcccggcagaggaagcactagtagagtgaagttcagcagaagcgccgacgcccctgcctaccagcagggacagaaccaactgtacaacgagctgaacctgggcagacgggaagagtacgacgtgctggacaagcggagaggcagggaccctgagatgggcggaaagccccagcggagaaagaacccccaggaaggactgtataacgaactccagaaagacaagatggccgaagcctacagcgagatcggcatgaagggcgagcggagaagaggcaagggccacgatggcctgtaccagggcctgagcaccgccaccaaggacacctatgacgccctgcacatgcaggccctgcctccaagaagggccaagcgatctggatctggagcaacaaacttctcactactcaaacaagcaggtgacgtggaggagaatcccgggcctatggactggatttggcgcatccttttccttgtcggcgctgctaccggcgcgcattccttcgaacaagttcagcttcaacagcctggcgctgagctggtcaaacctggcgcttctgtgaagatgagctgcaaagccagcggctacgccttcagcagctactggatcaactggatgaagcagaaacccggccagggactcgaatggatcggccaaatctatcccggcgacggcgacaccaactacaacggcaagttcaagggcagagccacactgaccgccgatacctctagcagcacagcctacatgcagctgagcagcctgaccagcgaagatagcgccgtgtacttctgtgcccggtccatcacaacagtcgtgggctgcgctatggactattggggccagggaacaagcgtgaccgtgtctagtacgcgtgctaagccaaccaccacgccagctcctagacctcctacaccagctcctacaatcgccagccagcctctgtctctcagacccgaagcctgcagacctgctgctggcggagctgtgcataccagaggactggatttcgcctgcgattccaatctgttcgtggcaagctggattgccgtcatgataattttccgcattggaatggctgtcgcaatcttttgttgtttcttctttccctcctggcgacgcaagcgcaaagaaaagcaaagcgagacaagcccaaaagaatttctcactatatacgaggacgtgaaagatttgaagacgaggcggaatcatgagcaagagcagacatttcctggcgggggctctactatctactcaatgattcaatcccaaagctccgctccgacttcccaagagcccgcttacactctctactcactgatacagccttcaagaaaatcaggctctcggaaacggaatcattccccatccttcaatagtaccatctatgaagtaatcggtaagagtcaacctaaagctcaaaaccccgctcgcttgagccgcaaggagctggaaaacttcgatgtatatagcagctctagacgggttaagttttccagatccgcagacgcacccgcttaccaacaagggcagaaccaactctacaatgaacttaatttggggcggagggaagagtacgacgttctggacaaaaggaggggacgagatcccgagatgggcggaaagcctcagcgaaggaagaatccgcaagaggggctttataacgaactccagaaagataaaatggcagaagcctatagtgagattgggatgaagggagaaaggaggaggggtaaaggtcacgatgggttgtaccaaggattgagcacagccactaaagatacctatgatgcgctccacatgcaggccctgccgccaagacgcgccaagagaagcggatctggcgtgaagcagaccctgaatttcgacctgctgaagctggctggcgacgtggaatccaacccaggccctggccatatgaccgagtacaagcccacggtgcgcctcgccacccgcgacgacgtccccagggccgtacgcaccctcgccgccgcgttcgccgactaccccgccacgcgccacaccgtcgatccggaccgccacatcgagcgggtcaccgagctgcaagaactcttcctcacgcgcgtcgggctcgacatcggcaaggtgtgggtcgcggacgacggcgccgcggtggcggtctggaccacgccggagagcgtcgaagcgggggcggtgttcgccgagatcggcccgcgcatggccgagttgagcggttcccggctggccgcgcagcaacagatggaaggcctcctggcgccgcaccggcccaaggagcccgcgtggttcctggccaccgtcggcgtctcgcccgaccaccagggcaagggtctgggcagcgccgtcgtgctccccggagtggaggcggccgagcgcgccggggtgcccgccttcctggagacctccgcgccccgcaacctccccttctacgagcggctcggcttcaccgtcaccgccgacgtcgaggtgcccgaaggaccgcgcacctggtgcatgacccgcaagcccggtgcctga

SEQ ID NO: 2195 - DNA, 3273 bp, Artificial Sequence
  Synthetic Polynucleotide
atggccttaccagtgaccgccttgctcctgccgctggccttgctgctccacgccgccaggccggcatgcgaagtgcagctgcttgaaagtggcggcggactgattcagcctggcggatctctgagactgagctgtgccgccagcggcttcaccttttctagccacgccatgacctgggtccgacaggcacctggaaaagggcttgaatgggtgtccgccatcagcggctctggcgattacacacactacgccgacagcgtgaagggcagattcaccatcagcagagacaacagcaagaacaccgtgtacctccagatgaacagcctgagagccgaggacagcgccgtgtattattgcgccaaggatgaggatggcggcagcctgcttggacacagaggacaaggcaccctggtcaccgtttcttccggtaccggcggaggcggatctggcggcggaggtagcggtggcggaggatctgaattcggatctctcgagacaacacctggcgagagaagtagcctgcctgccttctatcctggcaccagcggctcttgttctggctgtggatctctgagcctgcctctgctggctggactggttgctgctgatgctgtggcctctctgctgattgtgggagccgtgttcctgtgcgccagacctagaagaagccccgctcaagaggacggcaaggtgtacatcaacatgcccggcagaggaagcactagtagagtgaagttcagcagaagcgccgacgcccctgcctaccagcagggacagaaccaactgtacaacgagctgaacctgggcagacgggaagagtacgacgtgctggacaagcggagaggcagggaccctgagatgggcggaaagccccagcggagaaagaacccccaggaaggactgtataacgaactccagaaagacaagatggccgaagcctacagcgagatcggcatgaagggcgagcggagaagaggcaagggccacgatggcctgtaccagggcctgagcaccgccaccaaggacacctatgacgccctgcacatgcaggccctgcctccaagaagggccaagcgatctggatctggagcaacaaacttctcactactcaaacaagcaggtgacgtggaggagaatcccgggcctatggactggatttggcgcatccttttccttgtcggcgctgctaccggcgcgcattccgggcccgaagtgcagctggttgaatctggcggaggactggttcaggctggcggatctctgagactgtcttgtgccgccagcggcagaacctttagcatgggctggtttagacaggcccctggcaaagagagagagttcgtcgccgccatcacatactctggcggcagcccttactacgccgactctgtgaagggcagattcaccatcagccgggacaacgccaagaacaccgtgtacctccagatgaacagcctgaagcctgaggacaccgccgtgtactactgcgccgccaatccaacatacggcagcgactggaacgccgagaattggggccagggaacccaagtgacagtgtctagcggatccggcggcggaggatctggcggaggcggatctgggggcggaggctctttcgaaggcagcacgcgtgctaagccaaccaccacgccagctcctagacctcctacaccagctcctacaatcgccagccagcctctgtctctcagacccgaagcctgcagacctgctgctggcggagctgtgcataccagaggactggatttcgcctgcgattccaatctgttcgtggcaagctggattgccgtcatgataattttccgcattggaatggctgtcgcaatcttttgttgtttcttctttccctcctggcgacgcaagcgcaaagaaaagcaaagcgagacaagcccaaaagaatttctcactatatacgaggacgtgaaagatttgaagacgaggcggaatcatgagcaagagcagacatttcctggcgggggctctactatctactcaatgattcaatcccaaagctccgctccgacttcccaagagcccgcttacactctctactcactgatacagccttcaagaaaatcaggctctcggaaacggaatcattccccatccttcaatagtaccatctatgaagtaatcggtaagagtcaacctaaagctcaaaaccccgctcgcttgagccgcaaggagctggaaaacttcgatgtatatagcagctctagacgggttaagttttccagatccgcagacgcacccgcttaccaacaagggcagaaccaactctacaatgaacttaatttggggcggagggaagagtacgacgttctggacaaaaggaggggacgagatcccgagatgggcggaaagcctcagcgaaggaagaatccgcaagaggggctttataacgaactccagaaagataaaatggcagaagcctatagtgagattgggatgaagggagaaaggaggaggggtaaaggtcacgatgggttgtaccaaggattgagcacagccactaaagatacctatgatgcgctccacatgcaggccctgccgccaagacgcgccaagagaagcggatctggcgtgaagcagaccctgaatttcgacctgctgaagctggctggcgacgtggaatccaacccaggccctggccatatgaccgagtacaagcccacggtgcgcctcgccacccgcgacgacgtccccagggccgtacgcaccctcgccgccgcgttcgccgactaccccgccacgcgccacaccgtcgatccggaccgccacatcgagcgggtcaccgagctgcaagaactcttcctcacgcgcgtcgggctcgacatcggcaaggtgtgggtcgcggacgacggcgccgcggtggcggtctggaccacgccggagagcgtcgaagcgggggcggtgttcgccgagatcggcccgcgcatggccgagttgagcggttcccggctggccgcgcagcaacagatggaaggcctcctggcgccgcaccggcccaaggagcccgcgtggttcctggccaccgtcggcgtctcgcccgaccaccagggcaagggtctgggcagcgccgtcgtgctccccggagtggaggcggccgagcgcgccggggtgcccgccttcctggagacctccgcgccccgcaacctccccttctacgagcggctcggcttcaccgtcaccgccgacgtcgaggtgcccgaaggaccgcgcacctggtgcatgacccgcaagcccggtgcctga

SEQ ID NO: 2196 - DNA, 3720 bp, Artificial Sequence
  Synthetic Polynucleotide
atggccttaccagtgaccgccttgctcctgccgctggccttgctgctccacgccgccaggccggacatccagatgacacagagccctagcagcctgtctgccagcgtgggagacagagtgaccatcacatgcaaggccagcgaccacatcaacaactggctggcctggtatcagcagaagcctggacaggcccctaagctgctgatctacggcgctaccacactggaaacaggcgtgcccagcagattttctggcagcggctctggcaccgactacaccctgacaatatccagcctccagcctgaggacttcgccacctactactgtcagcagagctggaacaccccttggacattcggccagggcaccaagctggaaatcaagagactcgagggacagcctaaggccaatcctaccgtgacactgttccctccaagcagcgaagaactccaggccaacaaggccacacttgtgtgcctgatctccgacttctaccctggggctgtgacagtggcttggaaggccgatggatctcctgtgaaagccggcgtggaaaccaccaagccatccaagcagagcaacaacaaatacgccgccagctcctacctgagcctgacacctgagcagtggaagtcccacagatcctacagctgccaagtgacccacgaaggcagcaccgtggaaaagacagtggcccctacagagtgcagcggatccacaacacctggcgagagaagtagcctgcctgccttctatcctggcaccagcggctcttgttctggctgtggatctctgagcctgcctctgctggctggactggttgctgctgatgctgtggcctctctgctgattgtgggagccgtgttcctgtgcgccagacctagaagaagccccgctcaagaggacggcaaggtgtacatcaacatgcccggcagaggaagcactagtagagtgaagttcagcagaagcgccgacgcccctgcctaccagcagggacagaaccaactgtacaacgagctgaacctgggcagacgggaagagtacgacgtgctggacaagcggagaggcagggaccctgagatgggcggaaagccccagcggagaaagaacccccaggaaggactgtataacgaactccagaaagacaagatggccgaagcctacagcgagatcggcatgaagggcgagcggagaagaggcaagggccacgatggcctgtaccagggcctgagcaccgccaccaaggacacctatgacgccctgcacatgcaggccctgcctccaagaagggccaagcgatctggatctggagcaacaaacttctcactactcaaacaagcaggtgacgtggaggagaatcccgggcctatggactggatttggcgcatccttttccttgtcggcgctgctaccggcgcgcattccttcgaacaagttcagcttcaacagcctggcgctgagctggtcaaacctggcgcttctgtgaagatgagctgcaaagccagcggctacgccttcagcagctactggatcaactggatgaagcagaaacccggccagggactcgaatggatcggccaaatctatcccggcgacggcgacaccaactacaacggcaagttcaagggcagagccacactgaccgccgatacctctagcagcacagcctacatgcagctgagcagcctgaccagcgaagatagcgccgtgtacttctgtgcccggtccatcacaacagtcgtgggctgcgctatggactattggggccagggaacaagcgtgaccgtgtctagtacgcgtgcctctacaaagggaccctccgtgtttcctctggctcccagcagcaagtctacaagcggaggaacagccgctctgggctgcctggtcaaggattactttcccgagcctgtgaccgtgtcctggaatagcggagcactgacaagcggcgtgcacacctttccagccgtgctgcaaagcagcggcctgtactctctgagcagcgtggtcacagtgcctagctctagcctgggcacccagacctacatctgcaatgtgaaccacaagcctagcaacaccaaggtggacaagagagtggaacccaagagctgtggtaccgctaagccaaccaccacgccagctcctagacctcctacaccagctcctacaatcgccagccagcctctgtctctcagacccgaagcctgcagacctgctgctggcggagctgtgcataccagaggactggatttcgcctgcgattccaatctgttcgtggcaagctggattgccgtcatgataattttccgcattggaatggctgtcgcaatcttttgttgtttcttctttccctcctggcgacgcaagcgcaaagaaaagcaaagcgagacaagcccaaaagaatttctcactatatacgaggacgtgaaagatttgaagacgaggcggaatcatgagcaagagcagacatttcctggcgggggctctactatctactcaatgattcaatcccaaagctccgctccgacttcccaagagcccgcttacactctctactcactgatacagccttcaagaaaatcaggctctcggaaacggaatcattccccatccttcaatagtaccatctatgaagtaatcggtaagagtcaacctaaagctcaaaaccccgctcgcttgagccgcaaggagctggaaaacttcgatgtatatagcagctctagacgggttaagttttccagatccgcagacgcacccgcttaccaacaagggcagaaccaactctacaatgaacttaatttggggcggagggaagagtacgacgttctggacaaaaggaggggacgagatcccgagatgggcggaaagcctcagcgaaggaagaatccgcaagaggggctttataacgaactccagaaagataaaatggcagaagcctatagtgagattgggatgaagggagaaaggaggaggggtaaaggtcacgatgggttgtaccaaggattgagcacagccactaaagatacctatgatgcgctccacatgcaggccctgccgccaagacgcgccaagagaagcggatctggcgtgaagcagaccctgaatttcgacctgctgaagctggctggcgacgtggaatccaacccaggccctggccatatggctacctacgaggtgctgtgcgaggtggcaagaaagctgggcaccgacgacagagaagtggtgctgttcctgctgaacgtgttcatccctcagcctacactggcccagctgatcggtgcactgagagccctgaaagaggaaggccggctgacctttcctctgctggccgaatgcctgttcagagccggaagaagggatctgctgcgggacctgctgcatctggaccccagatttctggaaagacacctggccggcaccatgagctacttcagcccttaccagctgaccgtgctgcacgttgacggcgaactgtgcgccagagatattcggagcctgatcttcctgagcaaggacaccatcggcagccggtctacccctcagacatttctgcactgggtgtactgcatggaaaacctggacctgctcggccccacagatgtggatgccctgatgtccatgctgagaagcctgagcagagtggacctccagagacaggtgcagacactgatgggactgcacctgagcggacctagccacagccagcactacagacacacccct

SEQ ID NO: 2197 - DNA, 3879 bp, Artificial Sequence
  Synthetic Polynucleotide
atggccttaccagtgaccgccttgctcctgccgctggccttgctgctccacgccgccaggccggacatccagatgacacagagccctagcagcctgtctgccagcgtgggagacagagtgaccatcacatgcaaggccagcgaccacatcaacaactggctggcctggtatcagcagaagcctggacaggcccctaagctgctgatctacggcgctaccacactggaaacaggcgtgcccagcagattttctggcagcggctctggcaccgactacaccctgacaatatccagcctccagcctgaggacttcgccacctactactgtcagcagagctggaacaccccttggacattcggccagggcaccaagctggaaatcaagagactcgagggacagcctaaggccaatcctaccgtgacactgttccctccaagcagcgaagaactccaggccaacaaggccacacttgtgtgcctgatctccgacttctaccctggggctgtgacagtggcttggaaggccgatggatctcctgtgaaagccggcgtggaaaccaccaagccatccaagcagagcaacaacaaatacgccgccagctcctacctgagcctgacacctgagcagtggaagtcccacagatcctacagctgccaagtgacccacgaaggcagcaccgtggaaaagacagtggcccctacagagtgcagcggatccacaacacctggcgagagaagtagcctgcctgccttctatcctggcaccagcggctcttgttctggctgtggatctctgagcctgcctctgctggctggactggttgctgctgatgctgtggcctctctgctgattgtgggagccgtgttcctgtgcgccagacctagaagaagccccgctcaagaggacggcaaggtgtacatcaacatgcccggcagaggaagcactagtagagtgaagttcagcagaagcgccgacgcccctgcctaccagcagggacagaaccaactgtacaacgagctgaacctgggcagacgggaagagtacgacgtgctggacaagcggagaggcagggaccctgagatgggcggaaagccccagcggagaaagaacccccaggaaggactgtataacgaactccagaaagacaagatggccgaagcctacagcgagatcggcatgaagggcgagcggagaagaggcaagggccacgatggcctgtaccagggcctgagcaccgccaccaaggacacctatgacgccctgcacatgcaggccctgcctccaagaagggccaagcgatctggatctggagcaacaaacttctcactactcaaacaagcaggtgacgtggaggagaatcccgggcctatggactggatttggcgcatccttttccttgtcggcgctgctaccggcgcgcattccttcgaacaagttcagcttcaacagcctggcgctgagctggtcaaacctggcgcttctgtgaagatgagctgcaaagccagcggctacgccttcagcagctactggatcaactggatgaagcagaaacccggccagggactcgaatggatcggccaaatctatcccggcgacggcgacaccaactacaacggcaagttcaagggcagagccacactgaccgccgatacctctagcagcacagcctacatgcagctgagcagcctgaccagcgaagatagcgccgtgtacttctgtgcccggtccatcacaacagtcgtgggctgcgctatggactattggggccagggaacaagcgtgaccgtgtctagtacgcgtgcctctacaaagggaccctccgtgtttcctctggctcccagcagcaagtctacaagcggaggaacagccgctctgggctgcctggtcaaggattactttcccgagcctgtgaccgtgtcctggaatagcggagcactgacaagcggcgtgcacacctttccagccgtgctgcaaagcagcggcctgtactctctgagcagcgtggtcacagtgcctagctctagcctgggcacccagacctacatctgcaatgtgaaccacaagcctagcaacaccaaggtggacaagagagtggaacccaagagctgtggtaccgctaagccaaccaccacgccagctcctagacctcctacaccagctcctacaatcgccagccagcctctgtctctcagacccgaagcctgcagacctgctgctggcggagctgtgcataccagaggactggatttcgcctgcgattccaatctgttcgtggcaagctggattgccgtcatgataattttccgcattggaatggctgtcgcaatcttttgttgtttcttctttccctcctggcgacgcaagcgcaaagaaaagcaaagcgagacaagcccaaaagaatttctcactatatacgaggacgtgaaagatttgaagacgaggcggaatcatgagcaagagcagacatttcctggcgggggctctactatctactcaatgattcaatcccaaagctccgctccgacttcccaagagcccgcttacactctctactcactgatacagccttcaagaaaatcaggctctcggaaacggaatcattccccatccttcaatagtaccatctatgaagtaatcggtaagagtcaacctaaagctcaaaaccccgctcgcttgagccgcaaggagctggaaaacttcgatgtatatagcagctctagacgggttaagttttccagatccgcagacgcacccgcttaccaacaagggcagaaccaactctacaatgaacttaatttggggcggagggaagagtacgacgttctggacaaaaggaggggacgagatcccgagatgggcggaaagcctcagcgaaggaagaatccgcaagaggggctttataacgaactccagaaagataaaatggcagaagcctatagtgagattgggatgaagggagaaaggaggaggggtaaaggtcacgatgggttgtaccaaggattgagcacagccactaaagatacctatgatgcgctccacatgcaggccctgccgccaagacgcgccaagagaagcggatctggcgtgaagcagaccctgaatttcgacctgctgaagctggctggcgacgtggaatccaacccaggccctggccatatgtccgactccaaggaggtccctagccttccatttttgcgacacttgctcgaagagttggacagccatgaggacagcttgctgctgtttctgtgtcacgacgcggccccgggctgcacgacggtcacgcaagctttgtgctcgcttagccaacagcgcaagctgaccctcgcggctctggtcgagatgctctacgtgctgcagcgtatggatcttctcaagagccgcttcgggctcagcaaggagggggccgagcaattgctgggcacaagctttctcacgcgctaccgcaagctcatggtttgcgtgggtgaggagctcgactcgagcgagctacgcgctctacgcttgttcgcgtgcaacctgaatccgagcctgagcacggcgctttctgagagcagccgctttgtcgagcttgtactcgcgcttgaaaacgtaggactcgtctcgccatcgagtgtttccgtgcttgcggacatgttgcgcactcttcggcgcctcgatttgtgccagcagcttgttgagtacgaacaacaagagcaagccaggtaccgttactgttacgcggcctcgccctcattgccagttcgtacgttacgtcgggggcacggcgcgagtgaacacgagcagctgtgcatgcccgtgcaagaatcctctgacagccccgagctgctgcgcacgcccgtacaagaatcctccagcgacagccccgagcaaacgact

SEQ ID NO: 2198 - DNA, 3756 bp, Artificial Sequence
  Synthetic Polynucleotide
atggccttaccagtgaccgccttgctcctgccgctggccttgctgctccacgccgccaggccggacatccagatgacacagagccctagcagcctgtctgccagcgtgggagacagagtgaccatcacatgcaaggccagcgaccacatcaacaactggctggcctggtatcagcagaagcctggacaggcccctaagctgctgatctacggcgctaccacactggaaacaggcgtgcccagcagattttctggcagcggctctggcaccgactacaccctgacaatatccagcctccagcctgaggacttcgccacctactactgtcagcagagctggaacaccccttggacattcggccagggcaccaagctggaaatcaagagactcgagggacagcctaaggccaatcctaccgtgacactgttccctccaagcagcgaagaactccaggccaacaaggccacacttgtgtgcctgatctccgacttctaccctggggctgtgacagtggcttggaaggccgatggatctcctgtgaaagccggcgtggaaaccaccaagccatccaagcagagcaacaacaaatacgccgccagctcctacctgagcctgacacctgagcagtggaagtcccacagatcctacagctgccaagtgacccacgaaggcagcaccgtggaaaagacagtggcccctacagagtgcagcggatccacaacacctggcgagagaagtagcctgcctgccttctatcctggcaccagcggctcttgttctggctgtggatctctgagcctgcctctgctggctggactggttgctgctgatgctgtggcctctctgctgattgtgggagccgtgttcctgtgcgccagacctagaagaagccccgctcaagaggacggcaaggtgtacatcaacatgcccggcagaggaagcactagtagagtgaagttcagcagaagcgccgacgcccctgcctaccagcagggacagaaccaactgtacaacgagctgaacctgggcagacgggaagagtacgacgtgctggacaagcggagaggcagggaccctgagatgggcggaaagccccagcggagaaagaacccccaggaaggactgtataacgaactccagaaagacaagatggccgaagcctacagcgagatcggcatgaagggcgagcggagaagaggcaagggccacgatggcctgtaccagggcctgagcaccgccaccaaggacacctatgacgccctgcacatgcaggccctgcctccaagaagggccaagcgatctggatctggagcaacaaacttctcactactcaaacaagcaggtgacgtggaggagaatcccgggcctatggactggatttggcgcatccttttccttgtcggcgctgctaccggcgcgcattccttcgaacaagttcagcttcaacagcctggcgctgagctggtcaaacctggcgcttctgtgaagatgagctgcaaagccagcggctacgccttcagcagctactggatcaactggatgaagcagaaacccggccagggactcgaatggatcggccaaatctatcccggcgacggcgacaccaactacaacggcaagttcaagggcagagccacactgaccgccgatacctctagcagcacagcctacatgcagctgagcagcctgaccagcgaagatagcgccgtgtacttctgtgcccggtccatcacaacagtcgtgggctgcgctatggactattggggccagggaacaagcgtgaccgtgtctagtacgcgtgcctctacaaagggaccctccgtgtttcctctggctcccagcagcaagtctacaagcggaggaacagccgctctgggctgcctggtcaaggattactttcccgagcctgtgaccgtgtcctggaatagcggagcactgacaagcggcgtgcacacctttccagccgtgctgcaaagcagcggcctgtactctctgagcagcgtggtcacagtgcctagctctagcctgggcacccagacctacatctgcaatgtgaaccacaagcctagcaacaccaaggtggacaagagagtggaacccaagagctgtggtaccgctaagccaaccaccacgccagctcctagacctcctacaccagctcctacaatcgccagccagcctctgtctctcagacccgaagcctgcagacctgctgctggcggagctgtgcataccagaggactggatttcgcctgcgattccaatctgttcgtggcaagctggattgccgtcatgataattttccgcattggaatggctgtcgcaatcttttgttgtttcttctttccctcctggcgacgcaagcgcaaagaaaagcaaagcgagacaagcccaaaagaatttctcactatatacgaggacgtgaaagatttgaagacgaggcggaatcatgagcaagagcagacatttcctggcgggggctctactatctactcaatgattcaatcccaaagctccgctccgacttcccaagagcccgcttacactctctactcactgatacagccttcaagaaaatcaggctctcggaaacggaatcattccccatccttcaatagtaccatctatgaagtaatcggtaagagtcaacctaaagctcaaaaccccgctcgcttgagccgcaaggagctggaaaacttcgatgtatatagcagctctagacgggttaagttttccagatccgcagacgcacccgcttaccaacaagggcagaaccaactctacaatgaacttaatttggggcggagggaagagtacgacgttctggacaaaaggaggggacgagatcccgagatgggcggaaagcctcagcgaaggaagaatccgcaagaggggctttataacgaactccagaaagataaaatggcagaagcctatagtgagattgggatgaagggagaaaggaggaggggtaaaggtcacgatgggttgtaccaaggattgagcacagccactaaagatacctatgatgcgctccacatgcaggccctgccgccaagacgcgccaagagaagcggatctggcgtgaagcagaccctgaatttcgacctgctgaagctggctggcgacgtggaatccaacccaggccctggccatatgaccgagtacaagcccacggtgcgcctcgccacccgcgacgacgtccccagggccgtacgcaccctcgccgccgcgttcgccgactaccccgccacgcgccacaccgtcgatccggaccgccacatcgagcgggtcaccgagctgcaagaactcttcctcacgcgcgtcgggctcgacatcggcaaggtgtgggtcgcggacgacggcgccgcggtggcggtctggaccacgccggagagcgtcgaagcgggggcggtgttcgccgagatcggcccgcgcatggccgagttgagcggttcccggctggccgcgcagcaacagatggaaggcctcctggcgccgcaccggcccaaggagcccgcgtggttcctggccaccgtcggcgtctcgcccgaccaccagggcaagggtctgggcagcgccgtcgtgctccccggagtggaggcggccgagcgcgccggggtgcccgccttcctggagacctccgcgccccgcaacctccccttctacgagcggctcggcttcaccgtcaccgccgacgtcgaggtgcccgaaggaccgcgcacctggtgcatgacccgcaagcccggtgcctga

SEQ ID NO: 2199 - DNA, 4167 bp, Artificial Sequence
  Synthetic Polynucleotide
atggccttaccagtgaccgccttgctcctgccgctggccttgctgctccacgccgccaggccggaagtgcagctggttgaatctggcggaggactggttcaggctggcggatctctgagactgtcttgtgccgccagcggcagaacctttagcatgggctggtttagacaggcccctggcaaagagagagagttcgtcgccgccatcacatactctggcggcagcccttactacgccgactctgtgaagggcagattcaccatcagccgggacaacgccaagaacaccgtgtacctccagatgaacagcctgaagcctgaggacaccgccgtgtactactgcgccgccaatccaacatacggcagcgactggaacgccgagaattggggccagggaacccaagtgacagtgtctagcggtaccggcggaggcggatctggcggcggaggtagcggtggcggaggatctgaattcgacatccagatgacacagagccctagcagcctgtctgccagcgtgggagacagagtgaccatcacatgcaaggccagcgaccacatcaacaactggctggcctggtatcagcagaagcctggacaggcccctaagctgctgatctacggcgctaccacactggaaacaggcgtgcccagcagattttctggcagcggctctggcaccgactacaccctgacaatatccagcctccagcctgaggacttcgccacctactactgtcagcagagctggaacaccccttggacattcggccagggcaccaagctggaaatcaagagactcgagggacagcctaaggccaatcctaccgtgacactgttccctccaagcagcgaagaactccaggccaacaaggccacacttgtgtgcctgatctccgacttctaccctggggctgtgacagtggcttggaaggccgatggatctcctgtgaaagccggcgtggaaaccaccaagccatccaagcagagcaacaacaaatacgccgccagctcctacctgagcctgacacctgagcagtggaagtcccacagatcctacagctgccaagtgacccacgaaggcagcaccgtggaaaagacagtggcccctacagagtgcagcggatccacaacacctggcgagagaagtagcctgcctgccttctatcctggcaccagcggctcttgttctggctgtggatctctgagcctgcctctgctggctggactggttgctgctgatgctgtggcctctctgctgattgtgggagccgtgttcctgtgcgccagacctagaagaagccccgctcaagaggacggcaaggtgtacatcaacatgcccggcagaggaagcactagtagagtgaagttcagcagaagcgccgacgcccctgcctaccagcagggacagaaccaactgtacaacgagctgaacctgggcagacgggaagagtacgacgtgctggacaagcggagaggcagggaccctgagatgggcggaaagccccagcggagaaagaacccccaggaaggactgtataacgaactccagaaagacaagatggccgaagcctacagcgagatcggcatgaagggcgagcggagaagaggcaagggccacgatggcctgtaccagggcctgagcaccgccaccaaggacacctatgacgccctgcacatgcaggccctgcctccaagaagggccaagcgatctggatctggagcaacaaacttctcactactcaaacaagcaggtgacgtggaggagaatcccgggcctatggactggatttggcgcatccttttccttgtcggcgctgctaccggcgcgcattccttcgaacaagttcagcttcaacagcctggcgctgagctggtcaaacctggcgcttctgtgaagatgagctgcaaagccagcggctacgccttcagcagctactggatcaactggatgaagcagaaacccggccagggactcgaatggatcggccaaatctatcccggcgacggcgacaccaactacaacggcaagttcaagggcagagccacactgaccgccgatacctctagcagcacagcctacatgcagctgagcagcctgaccagcgaagatagcgccgtgtacttctgtgcccggtccatcacaacagtcgtgggctgcgctatggactattggggccagggaacaagcgtgaccgtgtctagtacgcgtgcctctacaaagggaccctccgtgtttcctctggctcccagcagcaagtctacaagcggaggaacagccgctctgggctgcctggtcaaggattactttcccgagcctgtgaccgtgtcctggaatagcggagcactgacaagcggcgtgcacacctttccagccgtgctgcaaagcagcggcctgtactctctgagcagcgtggtcacagtgcctagctctagcctgggcacccagacctacatctgcaatgtgaaccacaagcctagcaacaccaaggtggacaagagagtggaacccaagagctgtggtaccgctaagccaaccaccacgccagctcctagacctcctacaccagctcctacaatcgccagccagcctctgtctctcagacccgaagcctgcagacctgctgctggcggagctgtgcataccagaggactggatttcgcctgcgattccaatctgttcgtggcaagctggattgccgtcatgataattttccgcattggaatggctgtcgcaatcttttgttgtttcttctttccctcctggcgacgcaagcgcaaagaaaagcaaagcgagacaagcccaaaagaatttctcactatatacgaggacgtgaaagatttgaagacgaggcggaatcatgagcaagagcagacatttcctggcgggggctctactatctactcaatgattcaatcccaaagctccgctccgacttcccaagagcccgcttacactctctactcactgatacagccttcaagaaaatcaggctctcggaaacggaatcattccccatccttcaatagtaccatctatgaagtaatcggtaagagtcaacctaaagctcaaaaccccgctcgcttgagccgcaaggagctggaaaacttcgatgtatatagcagctctagacgggttaagttttccagatccgcagacgcacccgcttaccaacaagggcagaaccaactctacaatgaacttaatttggggcggagggaagagtacgacgttctggacaaaaggaggggacgagatcccgagatgggcggaaagcctcagcgaaggaagaatccgcaagaggggctttataacgaactccagaaagataaaatggcagaagcctatagtgagattgggatgaagggagaaaggaggaggggtaaaggtcacgatgggttgtaccaaggattgagcacagccactaaagatacctatgatgcgctccacatgcaggccctgccgccaagacgcgccaagagaagcggatctggcgtgaagcagaccctgaatttcgacctgctgaagctggctggcgacgtggaatccaacccaggccctggccatatgaccgagtacaagcccacggtgcgcctcgccacccgcgacgacgtccccagggccgtacgcaccctcgccgccgcgttcgccgactaccccgccacgcgccacaccgtcgatccggaccgccacatcgagcgggtcaccgagctgcaagaactcttcctcacgcgcgtcgggctcgacatcggcaaggtgtgggtcgcggacgacggcgccgcggtggcggtctggaccacgccggagagcgtcgaagcgggggcggtgttcgccgagatcggcccgcgcatggccgagttgagcggttcccggctggccgcgcagcaacagatggaaggcctcctggcgccgcaccggcccaaggagcccgcgtggttcctggccaccgtcggcgtctcgcccgaccaccagggcaagggtctgggcagcgccgtcgtgctccccggagtggaggcggccgagcgcgccggggtgcccgccttcctggagacctccgcgccccgcaacctccccttctacgagcggctcggcttcaccgtcaccgccgacgtcgaggtgcccgaaggaccgcgcacctggtgcatgacccgcaagcccggtgcctga

SEQ ID NO: 2200 - DNA, 4578 bp, Artificial Sequence
  Synthetic Polynucleotide
atggccttaccagtgaccgccttgctcctgccgctggccttgctgctccacgccgccaggccggaagtgcagctggttgaatctggcggaggactggttcaggctggcggatctctgagactgtcttgtgccgccagcggcagaacctttagcatgggctggtttagacaggcccctggcaaagagagagagttcgtcgccgccatcacatactctggcggcagcccttactacgccgactctgtgaagggcagattcaccatcagccgggacaacgccaagaacaccgtgtacctccagatgaacagcctgaagcctgaggacaccgccgtgtactactgcgccgccaatccaacatacggcagcgactggaacgccgagaattggggccagggaacccaagtgacagtgtctagcggtaccggcggaggcggatctggcggcggaggtagcggtggcggaggatctgaattcgacatccagatgacacagagccctagcagcctgtctgccagcgtgggagacagagtgaccatcacatgcaaggccagcgaccacatcaacaactggctggcctggtatcagcagaagcctggacaggcccctaagctgctgatctacggcgctaccacactggaaacaggcgtgcccagcagattttctggcagcggctctggcaccgactacaccctgacaatatccagcctccagcctgaggacttcgccacctactactgtcagcagagctggaacaccccttggacattcggccagggcaccaagctggaaatcaagagactcgagggacagcctaaggccaatcctaccgtgacactgttccctccaagcagcgaagaactccaggccaacaaggccacacttgtgtgcctgatctccgacttctaccctggggctgtgacagtggcttggaaggccgatggatctcctgtgaaagccggcgtggaaaccaccaagccatccaagcagagcaacaacaaatacgccgccagctcctacctgagcctgacacctgagcagtggaagtcccacagatcctacagctgccaagtgacccacgaaggcagcaccgtggaaaagacagtggcccctacagagtgcagcggatccacaacacctggcgagagaagtagcctgcctgccttctatcctggcaccagcggctcttgttctggctgtggatctctgagcctgcctctgctggctggactggttgctgctgatgctgtggcctctctgctgattgtgggagccgtgttcctgtgcgccagacctagaagaagccccgctcaagaggacggcaaggtgtacatcaacatgcccggcagaggaagcactagtagagtgaagttcagcagaagcgccgacgcccctgcctaccagcagggacagaaccaactgtacaacgagctgaacctgggcagacgggaagagtacgacgtgctggacaagcggagaggcagggaccctgagatgggcggaaagccccagcggagaaagaacccccaggaaggactgtataacgaactccagaaagacaagatggccgaagcctacagcgagatcggcatgaagggcgagcggagaagaggcaagggccacgatggcctgtaccagggcctgagcaccgccaccaaggacacctatgacgccctgcacatgcaggccctgcctccaagaagggccaagcgatctggatctggagcaacaaacttctcactactcaaacaagcaggtgacgtggaggagaatcccgggcctatggactggatttggcgcatccttttccttgtcggcgctgctaccggcgcgcattccgggcccgaagtgcaactggttgaatccggtggcggcctggtgcaagcaggcggatctctcagacttagctgtgccgcctccggcagaaccttcacaatgggatggtttaggcaggctccagggaaagagagagagttcgtcgccgccatctctctgtctcccacactggcctactacgccgactctgtgaaaggccggttcaccatctccagagataatgccaagaacaccgtggtgctgcaaatgaactctctgaaacccgaggatacagccctgtactattgtgccgctgaccggaagtccgtgatgagcatcagacccgattactggggacagggcacacaagtcacagtgtcctctggatccggcggcggaggatctggcggaggcggatctgggggcggaggctctttcgaacaagttcagcttcaacagcctggcgctgagctggtcaaacctggcgcttctgtgaagatgagctgcaaagccagcggctacgccttcagcagctactggatcaactggatgaagcagaaacccggccagggactcgaatggatcggccaaatctatcccggcgacggcgacaccaactacaacggcaagttcaagggcagagccacactgaccgccgatacctctagcagcacagcctacatgcagctgagcagcctgaccagcgaagatagcgccgtgtacttctgtgcccggtccatcacaacagtcgtgggctgcgctatggactattggggccagggaacaagcgtgaccgtgtctagtacgcgtgcctctacaaagggaccctccgtgtttcctctggctcccagcagcaagtctacaagcggaggaacagccgctctgggctgcctggtcaaggattactttcccgagcctgtgaccgtgtcctggaatagcggagcactgacaagcggcgtgcacacctttccagccgtgctgcaaagcagcggcctgtactctctgagcagcgtggtcacagtgcctagctctagcctgggcacccagacctacatctgcaatgtgaaccacaagcctagcaacaccaaggtggacaagagagtggaacccaagagctgtggtaccgctaagccaaccaccacgccagctcctagacctcctacaccagctcctacaatcgccagccagcctctgtctctcagacccgaagcctgcagacctgctgctggcggagctgtgcataccagaggactggatttcgcctgcgattccaatctgttcgtggcaagctggattgccgtcatgataattttccgcattggaatggctgtcgcaatcttttgttgtttcttctttccctcctggcgacgcaagcgcaaagaaaagcaaagcgagacaagcccaaaagaatttctcactatatacgaggacgtgaaagatttgaagacgaggcggaatcatgagcaagagcagacatttcctggcgggggctctactatctactcaatgattcaatcccaaagctccgctccgacttcccaagagcccgcttacactctctactcactgatacagccttcaagaaaatcaggctctcggaaacggaatcattccccatccttcaatagtaccatctatgaagtaatcggtaagagtcaacctaaagctcaaaaccccgctcgcttgagccgcaaggagctggaaaacttcgatgtatatagcagctctagacgggttaagttttccagatccgcagacgcacccgcttaccaacaagggcagaaccaactctacaatgaacttaatttggggcggagggaagagtacgacgttctggacaaaaggaggggacgagatcccgagatgggcggaaagcctcagcgaaggaagaatccgcaagaggggctttataacgaactccagaaagataaaatggcagaagcctatagtgagattgggatgaagggagaaaggaggaggggtaaaggtcacgatgggttgtaccaaggattgagcacagccactaaagatacctatgatgcgctccacatgcaggccctgccgccaagacgcgccaagagaagcggatctggcgtgaagcagaccctgaatttcgacctgctgaagctggctggcgacgtggaatccaacccaggccctggccatatgaccgagtacaagcccacggtgcgcctcgccacccgcgacgacgtccccagggccgtacgcaccctcgccgccgcgttcgccgactaccccgccacgcgccacaccgtcgatccggaccgccacatcgagcgggtcaccgagctgcaagaactcttcctcacgcgcgtcgggctcgacatcggcaaggtgtgggtcgcggacgacggcgccgcggtggcggtctggaccacgccggagagcgtcgaagcgggggcggtgttcgccgagatcggcccgcgcatggccgagttgagcggttcccggctggccgcgcagcaacagatggaaggcctcctggcgccgcaccggcccaaggagcccgcgtggttcctggccaccgtcggcgtctcgcccgaccaccagggcaagggtctgggcagcgccgtcgtgctccccggagtggaggcggccgagcgcgccggggtgcccgccttcctggagacctccgcgccccgcaacctccccttctacgagcggctcggcttcaccgtcaccgccgacgtcgaggtgcccgaaggaccgcgcacctggtgcatgacccgcaagcccggtgcctga

SEQ ID NO: 2201 - DNA, 3777 bp, Artificial Sequence
  Synthetic Polynucleotide
atggccttaccagtgaccgccttgctcctgccgctggccttgctgctccacgccgccaggccggaagtgcagctggttgaatctggcggaggactggttcaggctggcggatctctgagactgtcttgtgccgccagcggcagaacctttagcatgggctggtttagacaggcccctggcaaagagagagagttcgtcgccgccatcacatactctggcggcagcccttactacgccgactctgtgaagggcagattcaccatcagccgggacaacgccaagaacaccgtgtacctccagatgaacagcctgaagcctgaggacaccgccgtgtactactgcgccgccaatccaacatacggcagcgactggaacgccgagaattggggccagggaacccaagtgacagtgtctagcctcgagggacagcctaaggccaatcctaccgtgacactgttccctccaagcagcgaagaactccaggccaacaaggccacacttgtgtgcctgatctccgacttctaccctggggctgtgacagtggcttggaaggccgatggatctcctgtgaaagccggcgtggaaaccaccaagccatccaagcagagcaacaacaaatacgccgccagctcctacctgagcctgacacctgagcagtggaagtcccacagatcctacagctgccaagtgacccacgaaggcagcaccgtggaaaagacagtggcccctacagagtgcagcggatccacaacacctggcgagagaagtagcctgcctgccttctatcctggcaccagcggctcttgttctggctgtggatctctgagcctgcctctgctggctggactggttgctgctgatgctgtggcctctctgctgattgtgggagccgtgttcctgtgcgccagacctagaagaagccccgctcaagaggacggcaaggtgtacatcaacatgcccggcagaggaagcactagtagagtgaagttcagcagaagcgccgacgcccctgcctaccagcagggacagaaccaactgtacaacgagctgaacctgggcagacgggaagagtacgacgtgctggacaagcggagaggcagggaccctgagatgggcggaaagccccagcggagaaagaacccccaggaaggactgtataacgaactccagaaagacaagatggccgaagcctacagcgagatcggcatgaagggcgagcggagaagaggcaagggccacgatggcctgtaccagggcctgagcaccgccaccaaggacacctatgacgccctgcacatgcaggccctgcctccaagaagggccaagcgatctggatctggagcaacaaacttctcactactcaaacaagcaggtgacgtggaggagaatcccgggcctatggactggatttggcgcatccttttccttgtcggcgctgctaccggcgcgcattccgggcccgaagtgcaactggttgaatccggtggcggcctggtgcaagcaggcggatctctcagacttagctgtgccgcctccggcagaaccttcacaatgggatggtttaggcaggctccagggaaagagagagagttcgtcgccgccatctctctgtctcccacactggcctactacgccgactctgtgaaaggccggttcaccatctccagagataatgccaagaacaccgtggtgctgcaaatgaactctctgaaacccgaggatacagccctgtactattgtgccgctgaccggaagtccgtgatgagcatcagacccgattactggggacagggcacacaagtcacagtgtcctctacgcgtgcctctacaaagggaccctccgtgtttcctctggctcccagcagcaagtctacaagcggaggaacagccgctctgggctgcctggtcaaggattactttcccgagcctgtgaccgtgtcctggaatagcggagcactgacaagcggcgtgcacacctttccagccgtgctgcaaagcagcggcctgtactctctgagcagcgtggtcacagtgcctagctctagcctgggcacccagacctacatctgcaatgtgaaccacaagcctagcaacaccaaggtggacaagagagtggaacccaagagctgtggtaccgctaagccaaccaccacgccagctcctagacctcctacaccagctcctacaatcgccagccagcctctgtctctcagacccgaagcctgcagacctgctgctggcggagctgtgcataccagaggactggatttcgcctgcgattccaatctgttcgtggcaagctggattgccgtcatgataattttccgcattggaatggctgtcgcaatcttttgttgtttcttctttccctcctggcgacgcaagcgcaaagaaaagcaaagcgagacaagcccaaaagaatttctcactatatacgaggacgtgaaagatttgaagacgaggcggaatcatgagcaagagcagacatttcctggcgggggctctactatctactcaatgattcaatcccaaagctccgctccgacttcccaagagcccgcttacactctctactcactgatacagccttcaagaaaatcaggctctcggaaacggaatcattccccatccttcaatagtaccatctatgaagtaatcggtaagagtcaacctaaagctcaaaaccccgctcgcttgagccgcaaggagctggaaaacttcgatgtatatagcagctctagacgggttaagttttccagatccgcagacgcacccgcttaccaacaagggcagaaccaactctacaatgaacttaatttggggcggagggaagagtacgacgttctggacaaaaggaggggacgagatcccgagatgggcggaaagcctcagcgaaggaagaatccgcaagaggggctttataacgaactccagaaagataaaatggcagaagcctatagtgagattgggatgaagggagaaaggaggaggggtaaaggtcacgatgggttgtaccaaggattgagcacagccactaaagatacctatgatgcgctccacatgcaggccctgccgccaagacgcgccaagagaagcggatctggcgtgaagcagaccctgaatttcgacctgctgaagctggctggcgacgtggaatccaacccaggccctggccatatgaccgagtacaagcccacggtgcgcctcgccacccgcgacgacgtccccagggccgtacgcaccctcgccgccgcgttcgccgactaccccgccacgcgccacaccgtcgatccggaccgccacatcgagcgggtcaccgagctgcaagaactcttcctcacgcgcgtcgggctcgacatcggcaaggtgtgggtcgcggacgacggcgccgcggtggcggtctggaccacgccggagagcgtcgaagcgggggcggtgttcgccgagatcggcccgcgcatggccgagttgagcggttcccggctggccgcgcagcaacagatggaaggcctcctggcgccgcaccggcccaaggagcccgcgtggttcctggccaccgtcggcgtctcgcccgaccaccagggcaagggtctgggcagcgccgtcgtgctccccggagtggaggcggccgagcgcgccggggtgcccgccttcctggagacctccgcgccccgcaacctccccttctacgagcggctcggcttcaccgtcaccgccgacgtcgaggtgcccgaaggaccgcgcacctggtgcatgacccgcaagcccggtgcctga

SEQ ID NO: 2202 - DNA, 3801 bp, Artificial Sequence
  Synthetic Polynucleotide
atggccttaccagtgaccgccttgctcctgccgctggccttgctgctccacgccgccaggccggacatccagatgacacagagccctagcagcctgtctgccagcgtgggagacagagtgaccatcacatgcaaggccagcgaccacatcaacaactggctggcctggtatcagcagaagcctggacaggcccctaagctgctgatctacggcgctaccacactggaaacaggcgtgcccagcagattttctggcagcggctctggcaccgactacaccctgacaatatccagcctccagcctgaggacttcgccacctactactgtcagcagagctggaacaccccttggacattcggccagggcaccaagctggaaatcaagagactcgaggacctgaagaacgtgttcccacctgaggtggccgtgttcgagcctagcgaggccgagatcagccacacccagaaagccaccctcgtgtgcctggctaccggcttctaccccgaccatgtggaactgtcttggtgggtcaacggcaaagaggtgcacagcggcgtgtctaccgacccccagccactgaaagaacagcccgccctgaacgacagccggtactgcctgagcagcagactgagagtgtccgccaccttctggcagaacccccggaaccacttcagatgccaggtgcagttctacggcctgagcgagaacgacgagtggacccaggacagagccaagcccgtgacccagatcgtgtctgccgaagcctggggcagagccgattgcggatccacaacacctggcgagagaagtagcctgcctgccttctatcctggcaccagcggctcttgttctggctgtggatctctgagcctgcctctgctggctggactggttgctgctgatgctgtggcctctctgctgattgtgggagccgtgttcctgtgcgccagacctagaagaagccccgctcaagaggacggcaaggtgtacatcaacatgcccggcagaggaagcactagtagagtgaagttcagcagaagcgccgacgcccctgcctaccagcagggacagaaccaactgtacaacgagctgaacctgggcagacgggaagagtacgacgtgctggacaagcggagaggcagggaccctgagatgggcggaaagccccagcggagaaagaacccccaggaaggactgtataacgaactccagaaagacaagatggccgaagcctacagcgagatcggcatgaagggcgagcggagaagaggcaagggccacgatggcctgtaccagggcctgagcaccgccaccaaggacacctatgacgccctgcacatgcaggccctgcctccaagaagggccaagcgatctggatctggagcaacaaacttctcactactcaaacaagcaggtgacgtggaggagaatcccgggcctatggactggatttggcgcatccttttccttgtcggcgctgctaccggcgcgcattccttcgaacaagttcagcttcaacagcctggcgctgagctggtcaaacctggcgcttctgtgaagatgagctgcaaagccagcggctacgccttcagcagctactggatcaactggatgaagcagaaacccggccagggactcgaatggatcggccaaatctatcccggcgacggcgacaccaactacaacggcaagttcaagggcagagccacactgaccgccgatacctctagcagcacagcctacatgcagctgagcagcctgaccagcgaagatagcgccgtgtacttctgtgcccggtccatcacaacagtcgtgggctgcgctatggactattggggccagggaacaagcgtgaccgtgtctagtacgcgtatccagaaccctgatcctgccgtgtaccagctgcgggatagcaagagcagcgacaagagcgtgtgtctgttcaccgacttcgacagccagaccaacgtgtcccagagcaaggactccgacgtgtacatcaccgataagaccgtgctggacatgcggagcatggacttcaagagcaactccgccgtggcctggtccaacaagtccgatttcgcctgcgccaacgccttcaacaacagcattatccccgaggacacattcttcccaagccccgagagcagctgcggtaccgctaagccaaccaccacgccagctcctagacctcctacaccagctcctacaatcgccagccagcctctgtctctcagacccgaagcctgcagacctgctgctggcggagctgtgcataccagaggactggatttcgcctgcgattccaatctgttcgtggcaagctggattgccgtcatgataattttccgcattggaatggctgtcgcaatcttttgttgtttcttctttccctcctggcgacgcaagcgcaaagaaaagcaaagcgagacaagcccaaaagaatttctcactatatacgaggacgtgaaagatttgaagacgaggcggaatcatgagcaagagcagacatttcctggcgggggctctactatctactcaatgattcaatcccaaagctccgctccgacttcccaagagcccgcttacactctctactcactgatacagccttcaagaaaatcaggctctcggaaacggaatcattccccatccttcaatagtaccatctatgaagtaatcggtaagagtcaacctaaagctcaaaaccccgctcgcttgagccgcaaggagctggaaaacttcgatgtatatagcagctctagacgggttaagttttccagatccgcagacgcacccgcttaccaacaagggcagaaccaactctacaatgaacttaatttggggcggagggaagagtacgacgttctggacaaaaggaggggacgagatcccgagatgggcggaaagcctcagcgaaggaagaatccgcaagaggggctttataacgaactccagaaagataaaatggcagaagcctatagtgagattgggatgaagggagaaaggaggaggggtaaaggtcacgatgggttgtaccaaggattgagcacagccactaaagatacctatgatgcgctccacatgcaggccctgccgccaagacgcgccaagagaagcggatctggcgtgaagcagaccctgaatttcgacctgctgaagctggctggcgacgtggaatccaacccaggccctggccatatgaccgagtacaagcccacggtgcgcctcgccacccgcgacgacgtccccagggccgtacgcaccctcgccgccgcgttcgccgactaccccgccacgcgccacaccgtcgatccggaccgccacatcgagcgggtcaccgagctgcaagaactcttcctcacgcgcgtcgggctcgacatcggcaaggtgtgggtcgcggacgacggcgccgcggtggcggtctggaccacgccggagagcgtcgaagcgggggcggtgttcgccgagatcggcccgcgcatggccgagttgagcggttcccggctggccgcgcagcaacagatggaaggcctcctggcgccgcaccggcccaaggagcccgcgtggttcctggccaccgtcggcgtctcgcccgaccaccagggcaagggtctgggcagcgccgtcgtgctccccggagtggaggcggccgagcgcgccggggtgcccgccttcctggagacctccgcgccccgcaacctccccttctacgagcggctcggcttcaccgtcaccgccgacgtcgaggtgcccgaaggaccgcgcacctggtgcatgacccgcaagcccggtgcctga

SEQ ID NO: 2203 - DNA, 4212 bp, Artificial Sequence
  Synthetic Polynucleotide
atggccttaccagtgaccgccttgctcctgccgctggccttgctgctccacgccgccaggccggaagtgcagctggttgaatctggcggaggactggttcaggctggcggatctctgagactgtcttgtgccgccagcggcagaacctttagcatgggctggtttagacaggcccctggcaaagagagagagttcgtcgccgccatcacatactctggcggcagcccttactacgccgactctgtgaagggcagattcaccatcagccgggacaacgccaagaacaccgtgtacctccagatgaacagcctgaagcctgaggacaccgccgtgtactactgcgccgccaatccaacatacggcagcgactggaacgccgagaattggggccagggaacccaagtgacagtgtctagcggtaccggcggaggcggatctggcggcggaggtagcggtggcggaggatctgaattcgacatccagatgacacagagccctagcagcctgtctgccagcgtgggagacagagtgaccatcacatgcaaggccagcgaccacatcaacaactggctggcctggtatcagcagaagcctggacaggcccctaagctgctgatctacggcgctaccacactggaaacaggcgtgcccagcagattttctggcagcggctctggcaccgactacaccctgacaatatccagcctccagcctgaggacttcgccacctactactgtcagcagagctggaacaccccttggacattcggccagggcaccaagctggaaatcaagagactcgaggacctgaagaacgtgttcccacctgaggtggccgtgttcgagcctagcgaggccgagatcagccacacccagaaagccaccctcgtgtgcctggctaccggcttctaccccgaccatgtggaactgtcttggtgggtcaacggcaaagaggtgcacagcggcgtgtctaccgacccccagccactgaaagaacagcccgccctgaacgacagccggtactgcctgagcagcagactgagagtgtccgccaccttctggcagaacccccggaaccacttcagatgccaggtgcagttctacggcctgagcgagaacgacgagtggacccaggacagagccaagcccgtgacccagatcgtgtctgccgaagcctggggcagagccgattgcggatccacaacacctggcgagagaagtagcctgcctgccttctatcctggcaccagcggctcttgttctggctgtggatctctgagcctgcctctgctggctggactggttgctgctgatgctgtggcctctctgctgattgtgggagccgtgttcctgtgcgccagacctagaagaagccccgctcaagaggacggcaaggtgtacatcaacatgcccggcagaggaagcactagtagagtgaagttcagcagaagcgccgacgcccctgcctaccagcagggacagaaccaactgtacaacgagctgaacctgggcagacgggaagagtacgacgtgctggacaagcggagaggcagggaccctgagatgggcggaaagccccagcggagaaagaacccccaggaaggactgtataacgaactccagaaagacaagatggccgaagcctacagcgagatcggcatgaagggcgagcggagaagaggcaagggccacgatggcctgtaccagggcctgagcaccgccaccaaggacacctatgacgccctgcacatgcaggccctgcctccaagaagggccaagcgatctggatctggagcaacaaacttctcactactcaaacaagcaggtgacgtggaggagaatcccgggcctatggactggatttggcgcatccttttccttgtcggcgctgctaccggcgcgcattccttcgaacaagttcagcttcaacagcctggcgctgagctggtcaaacctggcgcttctgtgaagatgagctgcaaagccagcggctacgccttcagcagctactggatcaactggatgaagcagaaacccggccagggactcgaatggatcggccaaatctatcccggcgacggcgacaccaactacaacggcaagttcaagggcagagccacactgaccgccgatacctctagcagcacagcctacatgcagctgagcagcctgaccagcgaagatagcgccgtgtacttctgtgcccggtccatcacaacagtcgtgggctgcgctatggactattggggccagggaacaagcgtgaccgtgtctagtacgcgtatccagaaccctgatcctgccgtgtaccagctgcgggatagcaagagcagcgacaagagcgtgtgtctgttcaccgacttcgacagccagaccaacgtgtcccagagcaaggactccgacgtgtacatcaccgataagaccgtgctggacatgcggagcatggacttcaagagcaactccgccgtggcctggtccaacaagtccgatttcgcctgcgccaacgccttcaacaacagcattatccccgaggacacattcttcccaagccccgagagcagctgcggtaccgctaagccaaccaccacgccagctcctagacctcctacaccagctcctacaatcgccagccagcctctgtctctcagacccgaagcctgcagacctgctgctggcggagctgtgcataccagaggactggatttcgcctgcgattccaatctgttcgtggcaagctggattgccgtcatgataattttccgcattggaatggctgtcgcaatcttttgttgtttcttctttccctcctggcgacgcaagcgcaaagaaaagcaaagcgagacaagcccaaaagaatttctcactatatacgaggacgtgaaagatttgaagacgaggcggaatcatgagcaagagcagacatttcctggcgggggctctactatctactcaatgattcaatcccaaagctccgctccgacttcccaagagcccgcttacactctctactcactgatacagccttcaagaaaatcaggctctcggaaacggaatcattccccatccttcaatagtaccatctatgaagtaatcggtaagagtcaacctaaagctcaaaaccccgctcgcttgagccgcaaggagctggaaaacttcgatgtatatagcagctctagacgggttaagttttccagatccgcagacgcacccgcttaccaacaagggcagaaccaactctacaatgaacttaatttggggcggagggaagagtacgacgttctggacaaaaggaggggacgagatcccgagatgggcggaaagcctcagcgaaggaagaatccgcaagaggggctttataacgaactccagaaagataaaatggcagaagcctatagtgagattgggatgaagggagaaaggaggaggggtaaaggtcacgatgggttgtaccaaggattgagcacagccactaaagatacctatgatgcgctccacatgcaggccctgccgccaagacgcgccaagagaagcggatctggcgtgaagcagaccctgaatttcgacctgctgaagctggctggcgacgtggaatccaacccaggccctggccatatgaccgagtacaagcccacggtgcgcctcgccacccgcgacgacgtccccagggccgtacgcaccctcgccgccgcgttcgccgactaccccgccacgcgccacaccgtcgatccggaccgccacatcgagcgggtcaccgagctgcaagaactcttcctcacgcgcgtcgggctcgacatcggcaaggtgtgggtcgcggacgacggcgccgcggtggcggtctggaccacgccggagagcgtcgaagcgggggcggtgttcgccgagatcggcccgcgcatggccgagttgagcggttcccggctggccgcgcagcaacagatggaaggcctcctggcgccgcaccggcccaaggagcccgcgtggttcctggccaccgtcggcgtctcgcccgaccaccagggcaagggtctgggcagcgccgtcgtgctccccggagtggaggcggccgagcgcgccggggtgcccgccttcctggagacctccgcgccccgcaacctccccttctacgagcggctcggcttcaccgtcaccgccgacgtcgaggtgcccgaaggaccgcgcacctggtgcatgacccgcaagcccggtgcctga

SEQ ID NO: 2204 - DNA, 4623 bp, Artificial Sequence
  Synthetic Polynucleotide
atggccttaccagtgaccgccttgctcctgccgctggccttgctgctccacgccgccaggccggaagtgcagctggttgaatctggcggaggactggttcaggctggcggatctctgagactgtcttgtgccgccagcggcagaacctttagcatgggctggtttagacaggcccctggcaaagagagagagttcgtcgccgccatcacatactctggcggcagcccttactacgccgactctgtgaagggcagattcaccatcagccgggacaacgccaagaacaccgtgtacctccagatgaacagcctgaagcctgaggacaccgccgtgtactactgcgccgccaatccaacatacggcagcgactggaacgccgagaattggggccagggaacccaagtgacagtgtctagcggtaccggcggaggcggatctggcggcggaggtagcggtggcggaggatctgaattcgacatccagatgacacagagccctagcagcctgtctgccagcgtgggagacagagtgaccatcacatgcaaggccagcgaccacatcaacaactggctggcctggtatcagcagaagcctggacaggcccctaagctgctgatctacggcgctaccacactggaaacaggcgtgcccagcagattttctggcagcggctctggcaccgactacaccctgacaatatccagcctccagcctgaggacttcgccacctactactgtcagcagagctggaacaccccttggacattcggccagggcaccaagctggaaatcaagagactcgaggacctgaagaacgtgttcccacctgaggtggccgtgttcgagcctagcgaggccgagatcagccacacccagaaagccaccctcgtgtgcctggctaccggcttctaccccgaccatgtggaactgtcttggtgggtcaacggcaaagaggtgcacagcggcgtgtctaccgacccccagccactgaaagaacagcccgccctgaacgacagccggtactgcctgagcagcagactgagagtgtccgccaccttctggcagaacccccggaaccacttcagatgccaggtgcagttctacggcctgagcgagaacgacgagtggacccaggacagagccaagcccgtgacccagatcgtgtctgccgaagcctggggcagagccgattgcggatccacaacacctggcgagagaagtagcctgcctgccttctatcctggcaccagcggctcttgttctggctgtggatctctgagcctgcctctgctggctggactggttgctgctgatgctgtggcctctctgctgattgtgggagccgtgttcctgtgcgccagacctagaagaagccccgctcaagaggacggcaaggtgtacatcaacatgcccggcagaggaagcactagtagagtgaagttcagcagaagcgccgacgcccctgcctaccagcagggacagaaccaactgtacaacgagctgaacctgggcagacgggaagagtacgacgtgctggacaagcggagaggcagggaccctgagatgggcggaaagccccagcggagaaagaacccccaggaaggactgtataacgaactccagaaagacaagatggccgaagcctacagcgagatcggcatgaagggcgagcggagaagaggcaagggccacgatggcctgtaccagggcctgagcaccgccaccaaggacacctatgacgccctgcacatgcaggccctgcctccaagaagggccaagcgatctggatctggagcaacaaacttctcactactcaaacaagcaggtgacgtggaggagaatcccgggcctatggactggatttggcgcatccttttccttgtcggcgctgctaccggcgcgcattccgggcccgaagtgcaactggttgaatccggtggcggcctggtgcaagcaggcggatctctcagacttagctgtgccgcctccggcagaaccttcacaatgggatggtttaggcaggctccagggaaagagagagagttcgtcgccgccatctctctgtctcccacactggcctactacgccgactctgtgaaaggccggttcaccatctccagagataatgccaagaacaccgtggtgctgcaaatgaactctctgaaacccgaggatacagccctgtactattgtgccgctgaccggaagtccgtgatgagcatcagacccgattactggggacagggcacacaagtcacagtgtcctctggatccggcggcggaggatctggcggaggcggatctgggggcggaggctctttcgaacaagttcagcttcaacagcctggcgctgagctggtcaaacctggcgcttctgtgaagatgagctgcaaagccagcggctacgccttcagcagctactggatcaactggatgaagcagaaacccggccagggactcgaatggatcggccaaatctatcccggcgacggcgacaccaactacaacggcaagttcaagggcagagccacactgaccgccgatacctctagcagcacagcctacatgcagctgagcagcctgaccagcgaagatagcgccgtgtacttctgtgcccggtccatcacaacagtcgtgggctgcgctatggactattggggccagggaacaagcgtgaccgtgtctagtacgcgtatccagaaccctgatcctgccgtgtaccagctgcgggatagcaagagcagcgacaagagcgtgtgtctgttcaccgacttcgacagccagaccaacgtgtcccagagcaaggactccgacgtgtacatcaccgataagaccgtgctggacatgcggagcatggacttcaagagcaactccgccgtggcctggtccaacaagtccgatttcgcctgcgccaacgccttcaacaacagcattatccccgaggacacattcttcccaagccccgagagcagctgcggtaccgctaagccaaccaccacgccagctcctagacctcctacaccagctcctacaatcgccagccagcctctgtctctcagacccgaagcctgcagacctgctgctggcggagctgtgcataccagaggactggatttcgcctgcgattccaatctgttcgtggcaagctggattgccgtcatgataattttccgcattggaatggctgtcgcaatcttttgttgtttcttctttccctcctggcgacgcaagcgcaaagaaaagcaaagcgagacaagcccaaaagaatttctcactatatacgaggacgtgaaagatttgaagacgaggcggaatcatgagcaagagcagacatttcctggcgggggctctactatctactcaatgattcaatcccaaagctccgctccgacttcccaagagcccgcttacactctctactcactgatacagccttcaagaaaatcaggctctcggaaacggaatcattccccatccttcaatagtaccatctatgaagtaatcggtaagagtcaacctaaagctcaaaaccccgctcgcttgagccgcaaggagctggaaaacttcgatgtatatagcagctctagacgggttaagttttccagatccgcagacgcacccgcttaccaacaagggcagaaccaactctacaatgaacttaatttggggcggagggaagagtacgacgttctggacaaaaggaggggacgagatcccgagatgggcggaaagcctcagcgaaggaagaatccgcaagaggggctttataacgaactccagaaagataaaatggcagaagcctatagtgagattgggatgaagggagaaaggaggaggggtaaaggtcacgatgggttgtaccaaggattgagcacagccactaaagatacctatgatgcgctccacatgcaggccctgccgccaagacgcgccaagagaagcggatctggcgtgaagcagaccctgaatttcgacctgctgaagctggctggcgacgtggaatccaacccaggccctggccatatgaccgagtacaagcccacggtgcgcctcgccacccgcgacgacgtccccagggccgtacgcaccctcgccgccgcgttcgccgactaccccgccacgcgccacaccgtcgatccggaccgccacatcgagcgggtcaccgagctgcaagaactcttcctcacgcgcgtcgggctcgacatcggcaaggtgtgggtcgcggacgacggcgccgcggtggcggtctggaccacgccggagagcgtcgaagcgggggcggtgttcgccgagatcggcccgcgcatggccgagttgagcggttcccggctggccgcgcagcaacagatggaaggcctcctggcgccgcaccggcccaaggagcccgcgtggttcctggccaccgtcggcgtctcgcccgaccaccagggcaagggtctgggcagcgccgtcgtgctccccggagtggaggcggccgagcgcgccggggtgcccgccttcctggagacctccgcgccccgcaacctccccttctacgagcggctcggcttcaccgtcaccgccgacgtcgaggtgcccgaaggaccgcgcacctggtgcatgacccgcaagcccggtgcctga

SEQ ID NO: 2205 - DNA, 3822 bp, Artificial Sequence
  Synthetic Polynucleotide
atggccttaccagtgaccgccttgctcctgccgctggccttgctgctccacgccgccaggccggaagtgcagctggttgaatctggcggaggactggttcaggctggcggatctctgagactgtcttgtgccgccagcggcagaacctttagcatgggctggtttagacaggcccctggcaaagagagagagttcgtcgccgccatcacatactctggcggcagcccttactacgccgactctgtgaagggcagattcaccatcagccgggacaacgccaagaacaccgtgtacctccagatgaacagcctgaagcctgaggacaccgccgtgtactactgcgccgccaatccaacatacggcagcgactggaacgccgagaattggggccagggaacccaagtgacagtgtctagcctcgaggacctgaagaacgtgttcccacctgaggtggccgtgttcgagcctagcgaggccgagatcagccacacccagaaagccaccctcgtgtgcctggctaccggcttctaccccgaccatgtggaactgtcttggtgggtcaacggcaaagaggtgcacagcggcgtgtctaccgacccccagccactgaaagaacagcccgccctgaacgacagccggtactgcctgagcagcagactgagagtgtccgccaccttctggcagaacccccggaaccacttcagatgccaggtgcagttctacggcctgagcgagaacgacgagtggacccaggacagagccaagcccgtgacccagatcgtgtctgccgaagcctggggcagagccgattgcggatccacaacacctggcgagagaagtagcctgcctgccttctatcctggcaccagcggctcttgttctggctgtggatctctgagcctgcctctgctggctggactggttgctgctgatgctgtggcctctctgctgattgtgggagccgtgttcctgtgcgccagacctagaagaagccccgctcaagaggacggcaaggtgtacatcaacatgcccggcagaggaagcactagtagagtgaagttcagcagaagcgccgacgcccctgcctaccagcagggacagaaccaactgtacaacgagctgaacctgggcagacgggaagagtacgacgtgctggacaagcggagaggcagggaccctgagatgggcggaaagccccagcggagaaagaacccccaggaaggactgtataacgaactccagaaagacaagatggccgaagcctacagcgagatcggcatgaagggcgagcggagaagaggcaagggccacgatggcctgtaccagggcctgagcaccgccaccaaggacacctatgacgccctgcacatgcaggccctgcctccaagaagggccaagcgatctggatctggagcaacaaacttctcactactcaaacaagcaggtgacgtggaggagaatcccgggcctatggactggatttggcgcatccttttccttgtcggcgctgctaccggcgcgcattccgggcccgaagtgcaactggttgaatccggtggcggcctggtgcaagcaggcggatctctcagacttagctgtgccgcctccggcagaaccttcacaatgggatggtttaggcaggctccagggaaagagagagagttcgtcgccgccatctctctgtctcccacactggcctactacgccgactctgtgaaaggccggttcaccatctccagagataatgccaagaacaccgtggtgctgcaaatgaactctctgaaacccgaggatacagccctgtactattgtgccgctgaccggaagtccgtgatgagcatcagacccgattactggggacagggcacacaagtcacagtgtcctctacgcgtatccagaaccctgatcctgccgtgtaccagctgcgggatagcaagagcagcgacaagagcgtgtgtctgttcaccgacttcgacagccagaccaacgtgtcccagagcaaggactccgacgtgtacatcaccgataagaccgtgctggacatgcggagcatggacttcaagagcaactccgccgtggcctggtccaacaagtccgatttcgcctgcgccaacgccttcaacaacagcattatccccgaggacacattcttcccaagccccgagagcagctgcggtaccgctaagccaaccaccacgccagctcctagacctcctacaccagctcctacaatcgccagccagcctctgtctctcagacccgaagcctgcagacctgctgctggcggagctgtgcataccagaggactggatttcgcctgcgattccaatctgttcgtggcaagctggattgccgtcatgataattttccgcattggaatggctgtcgcaatcttttgttgtttcttctttccctcctggcgacgcaagcgcaaagaaaagcaaagcgagacaagcccaaaagaatttctcactatatacgaggacgtgaaagatttgaagacgaggcggaatcatgagcaagagcagacatttcctggcgggggctctactatctactcaatgattcaatcccaaagctccgctccgacttcccaagagcccgcttacactctctactcactgatacagccttcaagaaaatcaggctctcggaaacggaatcattccccatccttcaatagtaccatctatgaagtaatcggtaagagtcaacctaaagctcaaaaccccgctcgcttgagccgcaaggagctggaaaacttcgatgtatatagcagctctagacgggttaagttttccagatccgcagacgcacccgcttaccaacaagggcagaaccaactctacaatgaacttaatttggggcggagggaagagtacgacgttctggacaaaaggaggggacgagatcccgagatgggcggaaagcctcagcgaaggaagaatccgcaagaggggctttataacgaactccagaaagataaaatggcagaagcctatagtgagattgggatgaagggagaaaggaggaggggtaaaggtcacgatgggttgtaccaaggattgagcacagccactaaagatacctatgatgcgctccacatgcaggccctgccgccaagacgcgccaagagaagcggatctggcgtgaagcagaccctgaatttcgacctgctgaagctggctggcgacgtggaatccaacccaggccctggccatatgaccgagtacaagcccacggtgcgcctcgccacccgcgacgacgtccccagggccgtacgcaccctcgccgccgcgttcgccgactaccccgccacgcgccacaccgtcgatccggaccgccacatcgagcgggtcaccgagctgcaagaactcttcctcacgcgcgtcgggctcgacatcggcaaggtgtgggtcgcggacgacggcgccgcggtggcggtctggaccacgccggagagcgtcgaagcgggggcggtgttcgccgagatcggcccgcgcatggccgagttgagcggttcccggctggccgcgcagcaacagatggaaggcctcctggcgccgcaccggcccaaggagcccgcgtggttcctggccaccgtcggcgtctcgcccgaccaccagggcaagggtctgggcagcgccgtcgtgctccccggagtggaggcggccgagcgcgccggggtgcccgccttcctggagacctccgcgccccgcaacctccccttctacgagcggctcggcttcaccgtcaccgccgacgtcgaggtgcccgaaggaccgcgcacctggtgcatgacccgcaagcccggtgcctga

SEQ ID NO: 2206 - DNA, 1758 bp, Artificial Sequence; identical to SEQ ID NO: 2037
  Synthetic Polynucleotide

SEQ ID NO: 2207 - DNA, 3492 bp, Artificial Sequence
  Synthetic Polynucleotide
atggccttaccagtgaccgccttgctcctgccgctggccttgctgctccacgccgccaggccggacatccagatgacacagagccctagcagcctgtctgccagcgtgggagacagagtgaccatcacatgcaaggccagcgaccacatcaacaactggctggcctggtatcagcagaagcctggacaggcccctaagctgctgatctacggcgctaccacactggaaacaggcgtgcccagcagattttctggcagcggctctggcaccgactacaccctgacaatatccagcctccagcctgaggacttcgccacctactactgtcagcagagctggaacaccccttggacattcggccagggcaccaagctggaaatcaagagactcgaggcaaagcccaccacgactccagcgccgcgaccaccaacaccggcgcccactatcgcgtcgcagcccctgtccctgagaccagaggcgtgtagaccagcggctggaggcgcagtgcacacgagggggctggacttcgcctgtgacagcaacctgtttgtggcctcttggatcgccgtgatgattatcttcagaatcggaatggccgtggctatcttctgctgcttcttcttcccatcctggcggcggaagcggaaagagaagcagtctgagacaagccccaaagagttcctgaccatctacgaggacgtgaaggacctgaaaacccggcggaaccacgaacaagagcagacctttcctggcggaggcagcaccatctacagcatgatccagagccagagcagcgcccctacaagccaagagcctgcctacacactgtactccctgatccagcctagcagaaagagcggcagccggaagagaaatcacagccccagcttcaacagcacgatctacgaagtgatcggcaagagccagccaaaggctcagaaccctgccagactgagccggaaagagctggaaaacttcgacgtgtacagcagcactagtagagtgaagttcagcagaagcgccgacgcccctgcctaccagcagggacagaaccaactgtacaacgagctgaacctgggcagacgggaagagtacgacgtgctggacaagcggagaggcagggaccctgagatgggcggaaagccccagcggagaaagaacccccaggaaggactgtataacgaactccagaaagacaagatggccgaagcctacagcgagatcggcatgaagggcgagcggagaagaggcaagggccacgatggcctgtaccagggcctgagcaccgccaccaaggacacctatgacgccctgcacatgcaggccctgcctccaagaagggccaagcgatctggatctggagcaacaaacttctcactactcaaacaagcaggtgacgtggaggagaatcccgggcctatggactggatttggcgcatccttttccttgtcggcgctgctaccggcgcgcattccttcgaacaagttcagcttcaacagcctggcgctgagctggtcaaacctggcgcttctgtgaagatgagctgcaaagccagcggctacgccttcagcagctactggatcaactggatgaagcagaaacccggccagggactcgaatggatcggccaaatctatcccggcgacggcgacaccaactacaacggcaagttcaagggcagagccacactgaccgccgatacctctagcagcacagcctacatgcagctgagcagcctgaccagcgaagatagcgccgtgtacttctgtgcccggtccatcacaacagtcgtgggctgcgctatggactattggggccagggaacaagcgtgaccgtgtctagtacgcgtgctaagccaaccaccacgccagctcctagacctcctacaccagctcctacaatcgccagccagcctctgtctctcagacccgaagcctgcagacctgctgctggcggagctgtgcataccagaggactggatttcgcctgcgattccaatctgttcgtggcaagctggattgccgtcatgataattttccgcattggaatggctgtcgcaatcttttgttgtttcttctttccctcctggcgacgcaagcgcaaagaaaagcaaagcgagacaagcccaaaagaatttctcactatatacgaggacgtgaaagatttgaagacgaggcggaatcatgagcaagagcagacatttcctggcgggggctctactatctactcaatgattcaatcccaaagctccgctccgacttcccaagagcccgcttacactctctactcactgatacagccttcaagaaaatcaggctctcggaaacggaatcattccccatccttcaatagtaccatctatgaagtaatcggtaagagtcaacctaaagctcaaaaccccgctcgcttgagccgcaaggagctggaaaacttcgatgtatatagcagctctagacgggttaagttttccagatccgcagacgcacccgcttaccaacaagggcagaaccaactctacaatgaacttaatttggggcggagggaagagtacgacgttctggacaaaaggaggggacgagatcccgagatgggcggaaagcctcagcgaaggaagaatccgcaagaggggctttataacgaactccagaaagataaaatggcagaagcctatagtgagattgggatgaagggagaaaggaggaggggtaaaggtcacgatgggttgtaccaaggattgagcacagccactaaagatacctatgatgcgctccacatgcaggccctgccgccaagacgcgccaagagaagcggatctggcgtgaagcagaccctgaatttcgacctgctgaagctggctggcgacgtggaatccaacccaggccctggccatatgaccgagtacaagcccacggtgcgcctcgccacccgcgacgacgtccccagggccgtacgcaccctcgccgccgcgttcgccgactaccccgccacgcgccacaccgtcgatccggaccgccacatcgagcgggtcaccgagctgcaagaactcttcctcacgcgcgtcgggctcgacatcggcaaggtgtgggtcgcggacgacggcgccgcggtggcggtctggaccacgccggagagcgtcgaagcgggggcggtgttcgccgagatcggcccgcgcatggccgagttgagcggttcccggctggccgcgcagcaacagatggaaggcctcctggcgccgcaccggcccaaggagcccgcgtggttcctggccaccgtcggcgtctcgcccgaccaccagggcaagggtctgggcagcgccgtcgtgctccccggagtggaggcggccgagcgcgccggggtgcccgccttcctggagacctccgcgccccgcaacctccccttctacgagcggctcggcttcaccgtcaccgccgacgtcgaggtgcccgaaggaccgcgcacctggtgcatgacccgcaagcccggtgcctga

SEQ ID NO: 2208 - DNA, 3648 bp, Artificial Sequence
  Synthetic Polynucleotide
atggccttaccagtgaccgccttgctcctgccgctggccttgctgctccacgccgccaggccggcatgcgaagtgcagctgcttgaaagtggcggcggactgattcagcctggcggatctctgagactgagctgtgccgccagcggcttcaccttttctagccacgccatgacctgggtccgacaggcacctggaaaagggcttgaatgggtgtccgccatcagcggctctggcgattacacacactacgccgacagcgtgaagggcagattcaccatcagcagagacaacagcaagaacaccgtgtacctccagatgaacagcctgagagccgaggacagcgccgtgtattattgcgccaaggatgaggatggcggcagcctgcttggacacagaggacaaggcaccctggtcaccgtttcttccggtaccggcggaggcggatctggcggcggaggtagcggtggcggaggatctgaattcggatctctcgaggcaaagcccaccacgactccagcgccgcgaccaccaacaccggcgcccactatcgcgtcgcagcccctgtccctgagaccagaggcgtgtagaccagcggctggaggcgcagtgcacacgagggggctggacttcgcctgtgacagcaacctgtttgtggcctcttggatcgccgtgatgattatcttcagaatcggaatggccgtggctatcttctgctgcttcttcttcccatcctggcggcggaagcggaaagagaagcagtctgagacaagccccaaagagttcctgaccatctacgaggacgtgaaggacctgaaaacccggcggaaccacgaacaagagcagacctttcctggcggaggcagcaccatctacagcatgatccagagccagagcagcgcccctacaagccaagagcctgcctacacactgtactccctgatccagcctagcagaaagagcggcagccggaagagaaatcacagccccagcttcaacagcacgatctacgaagtgatcggcaagagccagccaaaggctcagaaccctgccagactgagccggaaagagctggaaaacttcgacgtgtacagcagcactagtagagtgaagttcagcagaagcgccgacgcccctgcctaccagcagggacagaaccaactgtacaacgagctgaacctgggcagacgggaagagtacgacgtgctggacaagcggagaggcagggaccctgagatgggcggaaagccccagcggagaaagaacccccaggaaggactgtataacgaactccagaaagacaagatggccgaagcctacagcgagatcggcatgaagggcgagcggagaagaggcaagggccacgatggcctgtaccagggcctgagcaccgccaccaaggacacctatgacgccctgcacatgcaggccctgcctccaagaagggccaagcgatctggatctggagcaacaaacttctcactactcaaacaagcaggtgacgtggaggagaatcccgggcctatggactggatttggcgcatccttttccttgtcggcgctgctaccggcgcgcattccgggcccgaagtgcagctggttgaatctggcggaggactggttcaggctggcggatctctgagactgtcttgtgccgccagcggcagaacctttagcatgggctggtttagacaggcccctggcaaagagagagagttcgtcgccgccatcacatactctggcggcagcccttactacgccgactctgtgaagggcagattcaccatcagccgggacaacgccaagaacaccgtgtacctccagatgaacagcctgaagcctgaggacaccgccgtgtactactgcgccgccaatccaacatacggcagcgactggaacgccgagaattggggccagggaacccaagtgacagtgtctagcggatccggcggcggaggatctggcggaggcggatctgggggcggaggctctttcgaaggcagcacgcgtgctaagccaaccaccacgccagctcctagacctcctacaccagctcctacaatcgccagccagcctctgtctctcagacccgaagcctgcagacctgctgctggcggagctgtgcataccagaggactggatttcgcctgcgattccaatctgttcgtggcaagctggattgccgtcatgataattttccgcattggaatggctgtcgcaatcttttgttgtttcttctttccctcctggcgacgcaagcgcaaagaaaagcaaagcgagacaagcccaaaagaatttctcactatatacgaggacgtgaaagatttgaagacgaggcggaatcatgagcaagagcagacatttcctggcgggggctctactatctactcaatgattcaatcccaaagctccgctccgacttcccaagagcccgcttacactctctactcactgatacagccttcaagaaaatcaggctctcggaaacggaatcattccccatccttcaatagtaccatctatgaagtaatcggtaagagtcaacctaaagctcaaaaccccgctcgcttgagccgcaaggagctggaaaacttcgatgtatatagcagctctagacgggttaagttttccagatccgcagacgcacccgcttaccaacaagggcagaaccaactctacaatgaacttaatttggggcggagggaagagtacgacgttctggacaaaaggaggggacgagatcccgagatgggcggaaagcctcagcgaaggaagaatccgcaagaggggctttataacgaactccagaaagataaaatggcagaagcctatagtgagattgggatgaagggagaaaggaggaggggtaaaggtcacgatgggttgtaccaaggattgagcacagccactaaagatacctatgatgcgctccacatgcaggccctgccgccaagacgcgccaagagaagcggatctggcgtgaagcagaccctgaatttcgacctgctgaagctggctggcgacgtggaatccaacccaggccctggccatatgaccgagtacaagcccacggtgcgcctcgccacccgcgacgacgtccccagggccgtacgcaccctcgccgccgcgttcgccgactaccccgccacgcgccacaccgtcgatccggaccgccacatcgagcgggtcaccgagctgcaagaactcttcctcacgcgcgtcgggctcgacatcggcaaggtgtgggtcgcggacgacggcgccgcggtggcggtctggaccacgccggagagcgtcgaagcgggggcggtgttcgccgagatcggcccgcgcatggccgagttgagcggttcccggctggccgcgcagcaacagatggaaggcctcctggcgccgcaccggcccaaggagcccgcgtggttcctggccaccgtcggcgtctcgcccgaccaccagggcaagggtctgggcagcgccgtcgtgctccccggagtggaggcggccgagcgcgccggggtgcccgccttcctggagacctccgcgccccgcaacctccccttctacgagcggctcggcttcaccgtcaccgccgacgtcgaggtgcccgaaggaccgcgcacctggtgcatgacccgcaagcccggtgcctga

SEQ ID NO: 2209 - DNA, 4095 bp, Artificial Sequence
  Synthetic Polynucleotide
atggccttaccagtgaccgccttgctcctgccgctggccttgctgctccacgccgccaggccggacatccagatgacacagagccctagcagcctgtctgccagcgtgggagacagagtgaccatcacatgcaaggccagcgaccacatcaacaactggctggcctggtatcagcagaagcctggacaggcccctaagctgctgatctacggcgctaccacactggaaacaggcgtgcccagcagattttctggcagcggctctggcaccgactacaccctgacaatatccagcctccagcctgaggacttcgccacctactactgtcagcagagctggaacaccccttggacattcggccagggcaccaagctggaaatcaagagactcgagggacagcctaaggccaatcctaccgtgacactgttccctccaagcagcgaagaactccaggccaacaaggccacacttgtgtgcctgatctccgacttctaccctggggctgtgacagtggcttggaaggccgatggatctcctgtgaaagccggcgtggaaaccaccaagccatccaagcagagcaacaacaaatacgccgccagctcctacctgagcctgacacctgagcagtggaagtcccacagatcctacagctgccaagtgacccacgaaggcagcaccgtggaaaagacagtggcccctacagagtgcagcggatccgcaaagcccaccacgactccagcgccgcgaccaccaacaccggcgcccactatcgcgtcgcagcccctgtccctgagaccagaggcgtgtagaccagcggctggaggcgcagtgcacacgagggggctggacttcgcctgtgacagcaacctgtttgtggcctcttggatcgccgtgatgattatcttcagaatcggaatggccgtggctatcttctgctgcttcttcttcccatcctggcggcggaagcggaaagagaagcagtctgagacaagccccaaagagttcctgaccatctacgaggacgtgaaggacctgaaaacccggcggaaccacgaacaagagcagacctttcctggcggaggcagcaccatctacagcatgatccagagccagagcagcgcccctacaagccaagagcctgcctacacactgtactccctgatccagcctagcagaaagagcggcagccggaagagaaatcacagccccagcttcaacagcacgatctacgaagtgatcggcaagagccagccaaaggctcagaaccctgccagactgagccggaaagagctggaaaacttcgacgtgtacagcagcactagtagagtgaagttcagcagaagcgccgacgcccctgcctaccagcagggacagaaccaactgtacaacgagctgaacctgggcagacgggaagagtacgacgtgctggacaagcggagaggcagggaccctgagatgggcggaaagccccagcggagaaagaacccccaggaaggactgtataacgaactccagaaagacaagatggccgaagcctacagcgagatcggcatgaagggcgagcggagaagaggcaagggccacgatggcctgtaccagggcctgagcaccgccaccaaggacacctatgacgccctgcacatgcaggccctgcctccaagaagggccaagcgatctggatctggagcaacaaacttctcactactcaaacaagcaggtgacgtggaggagaatcccgggcctatggactggatttggcgcatccttttccttgtcggcgctgctaccggcgcgcattccttcgaacaagttcagcttcaacagcctggcgctgagctggtcaaacctggcgcttctgtgaagatgagctgcaaagccagcggctacgccttcagcagctactggatcaactggatgaagcagaaacccggccagggactcgaatggatcggccaaatctatcccggcgacggcgacaccaactacaacggcaagttcaagggcagagccacactgaccgccgatacctctagcagcacagcctacatgcagctgagcagcctgaccagcgaagatagcgccgtgtacttctgtgcccggtccatcacaacagtcgtgggctgcgctatggactattggggccagggaacaagcgtgaccgtgtctagtacgcgtgcctctacaaagggaccctccgtgtttcctctggctcccagcagcaagtctacaagcggaggaacagccgctctgggctgcctggtcaaggattactttcccgagcctgtgaccgtgtcctggaatagcggagcactgacaagcggcgtgcacacctttccagccgtgctgcaaagcagcggcctgtactctctgagcagcgtggtcacagtgcctagctctagcctgggcacccagacctacatctgcaatgtgaaccacaagcctagcaacaccaaggtggacaagagagtggaacccaagagctgtggtaccgctaagccaaccaccacgccagctcctagacctcctacaccagctcctacaatcgccagccagcctctgtctctcagacccgaagcctgcagacctgctgctggcggagctgtgcataccagaggactggatttcgcctgcgattccaatctgttcgtggcaagctggattgccgtcatgataattttccgcattggaatggctgtcgcaatcttttgttgtttcttctttccctcctggcgacgcaagcgcaaagaaaagcaaagcgagacaagcccaaaagaatttctcactatatacgaggacgtgaaagatttgaagacgaggcggaatcatgagcaagagcagacatttcctggcgggggctctactatctactcaatgattcaatcccaaagctccgctccgacttcccaagagcccgcttacactctctactcactgatacagccttcaagaaaatcaggctctcggaaacggaatcattccccatccttcaatagtaccatctatgaagtaatcggtaagagtcaacctaaagctcaaaaccccgctcgcttgagccgcaaggagctggaaaacttcgatgtatatagcagctctagacgggttaagttttccagatccgcagacgcacccgcttaccaacaagggcagaaccaactctacaatgaacttaatttggggcggagggaagagtacgacgttctggacaaaaggaggggacgagatcccgagatgggcggaaagcctcagcgaaggaagaatccgcaagaggggctttataacgaactccagaaagataaaatggcagaagcctatagtgagattgggatgaagggagaaaggaggaggggtaaaggtcacgatgggttgtaccaaggattgagcacagccactaaagatacctatgatgcgctccacatgcaggccctgccgccaagacgcgccaagagaagcggatctggcgtgaagcagaccctgaatttcgacctgctgaagctggctggcgacgtggaatccaacccaggccctggccatatggctacctacgaggtgctgtgcgaggtggcaagaaagctgggcaccgacgacagagaagtggtgctgttcctgctgaacgtgttcatccctcagcctacactggcccagctgatcggtgcactgagagccctgaaagaggaaggccggctgacctttcctctgctggccgaatgcctgttcagagccggaagaagggatctgctgcgggacctgctgcatctggaccccagatttctggaaagacacctggccggcaccatgagctacttcagcccttaccagctgaccgtgctgcacgttgacggcgaactgtgcgccagagatattcggagcctgatcttcctgagcaaggacaccatcggcagccggtctacccctcagacatttctgcactgggtgtactgcatggaaaacctggacctgctcggccccacagatgtggatgccctgatgtccatgctgagaagcctgagcagagtggacctccagagacaggtgcagacactgatgggactgcacctgagcggacctagccacagccagcactacagacacacccct

SEQ ID NO: 2210 - DNA, 4254 bp, Artificial Sequence
  Synthetic Polynucleotide
atggccttaccagtgaccgccttgctcctgccgctggccttgctgctccacgccgccaggccggacatccagatgacacagagccctagcagcctgtctgccagcgtgggagacagagtgaccatcacatgcaaggccagcgaccacatcaacaactggctggcctggtatcagcagaagcctggacaggcccctaagctgctgatctacggcgctaccacactggaaacaggcgtgcccagcagattttctggcagcggctctggcaccgactacaccctgacaatatccagcctccagcctgaggacttcgccacctactactgtcagcagagctggaacaccccttggacattcggccagggcaccaagctggaaatcaagagactcgagggacagcctaaggccaatcctaccgtgacactgttccctccaagcagcgaagaactccaggccaacaaggccacacttgtgtgcctgatctccgacttctaccctggggctgtgacagtggcttggaaggccgatggatctcctgtgaaagccggcgtggaaaccaccaagccatccaagcagagcaacaacaaatacgccgccagctcctacctgagcctgacacctgagcagtggaagtcccacagatcctacagctgccaagtgacccacgaaggcagcaccgtggaaaagacagtggcccctacagagtgcagcggatccgcaaagcccaccacgactccagcgccgcgaccaccaacaccggcgcccactatcgcgtcgcagcccctgtccctgagaccagaggcgtgtagaccagcggctggaggcgcagtgcacacgagggggctggacttcgcctgtgacagcaacctgtttgtggcctcttggatcgccgtgatgattatcttcagaatcggaatggccgtggctatcttctgctgcttcttcttcccatcctggcggcggaagcggaaagagaagcagtctgagacaagccccaaagagttcctgaccatctacgaggacgtgaaggacctgaaaacccggcggaaccacgaacaagagcagacctttcctggcggaggcagcaccatctacagcatgatccagagccagagcagcgcccctacaagccaagagcctgcctacacactgtactccctgatccagcctagcagaaagagcggcagccggaagagaaatcacagccccagcttcaacagcacgatctacgaagtgatcggcaagagccagccaaaggctcagaaccctgccagactgagccggaaagagctggaaaacttcgacgtgtacagcagcactagtagagtgaagttcagcagaagcgccgacgcccctgcctaccagcagggacagaaccaactgtacaacgagctgaacctgggcagacgggaagagtacgacgtgctggacaagcggagaggcagggaccctgagatgggcggaaagccccagcggagaaagaacccccaggaaggactgtataacgaactccagaaagacaagatggccgaagcctacagcgagatcggcatgaagggcgagcggagaagaggcaagggccacgatggcctgtaccagggcctgagcaccgccaccaaggacacctatgacgccctgcacatgcaggccctgcctccaagaagggccaagcgatctggatctggagcaacaaacttctcactactcaaacaagcaggtgacgtggaggagaatcccgggcctatggactggatttggcgcatccttttccttgtcggcgctgctaccggcgcgcattccttcgaacaagttcagcttcaacagcctggcgctgagctggtcaaacctggcgcttctgtgaagatgagctgcaaagccagcggctacgccttcagcagctactggatcaactggatgaagcagaaacccggccagggactcgaatggatcggccaaatctatcccggcgacggcgacaccaactacaacggcaagttcaagggcagagccacactgaccgccgatacctctagcagcacagcctacatgcagctgagcagcctgaccagcgaagatagcgccgtgtacttctgtgcccggtccatcacaacagtcgtgggctgcgctatggactattggggccagggaacaagcgtgaccgtgtctagtacgcgtgcctctacaaagggaccctccgtgtttcctctggctcccagcagcaagtctacaagcggaggaacagccgctctgggctgcctggtcaaggattactttcccgagcctgtgaccgtgtcctggaatagcggagcactgacaagcggcgtgcacacctttccagccgtgctgcaaagcagcggcctgtactctctgagcagcgtggtcacagtgcctagctctagcctgggcacccagacctacatctgcaatgtgaaccacaagcctagcaacaccaaggtggacaagagagtggaacccaagagctgtggtaccgctaagccaaccaccacgccagctcctagacctcctacaccagctcctacaatcgccagccagcctctgtctctcagacccgaagcctgcagacctgctgctggcggagctgtgcataccagaggactggatttcgcctgcgattccaatctgttcgtggcaagctggattgccgtcatgataattttccgcattggaatggctgtcgcaatcttttgttgtttcttctttccctcctggcgacgcaagcgcaaagaaaagcaaagcgagacaagcccaaaagaatttctcactatatacgaggacgtgaaagatttgaagacgaggcggaatcatgagcaagagcagacatttcctggcgggggctctactatctactcaatgattcaatcccaaagctccgctccgacttcccaagagcccgcttacactctctactcactgatacagccttcaagaaaatcaggctctcggaaacggaatcattccccatccttcaatagtaccatctatgaagtaatcggtaagagtcaacctaaagctcaaaaccccgctcgcttgagccgcaaggagctggaaaacttcgatgtatatagcagctctagacgggttaagttttccagatccgcagacgcacccgcttaccaacaagggcagaaccaactctacaatgaacttaatttggggcggagggaagagtacgacgttctggacaaaaggaggggacgagatcccgagatgggcggaaagcctcagcgaaggaagaatccgcaagaggggctttataacgaactccagaaagataaaatggcagaagcctatagtgagattgggatgaagggagaaaggaggaggggtaaaggtcacgatgggttgtaccaaggattgagcacagccactaaagatacctatgatgcgctccacatgcaggccctgccgccaagacgcgccaagagaagcggatctggcgtgaagcagaccctgaatttcgacctgctgaagctggctggcgacgtggaatccaacccaggccctggccatatgtccgactccaaggaggtccctagccttccatttttgcgacacttgctcgaagagttggacagccatgaggacagcttgctgctgtttctgtgtcacgacgcggccccgggctgcacgacggtcacgcaagctttgtgctcgcttagccaacagcgcaagctgaccctcgcggctctggtcgagatgctctacgtgctgcagcgtatggatcttctcaagagccgcttcgggctcagcaaggagggggccgagcaattgctgggcacaagctttctcacgcgctaccgcaagctcatggtttgcgtgggtgaggagctcgactcgagcgagctacgcgctctacgcttgttcgcgtgcaacctgaatccgagcctgagcacggcgctttctgagagcagccgctttgtcgagcttgtactcgcgcttgaaaacgtaggactcgtctcgccatcgagtgtttccgtgcttgcggacatgttgcgcactcttcggcgcctcgatttgtgccagcagcttgttgagtacgaacaacaagagcaagccaggtaccgttactgttacgcggcctcgccctcattgccagttcgtacgttacgtcgggggcacggcgcgagtgaacacgagcagctgtgcatgcccgtgcaagaatcctctgacagccccgagctgctgcgcacgcccgtacaagaatcctccagcgacagccccgagcaaacgact

SEQ ID NO: 2211 - DNA, 4131 bp, Artificial Sequence
  Synthetic Polynucleotide
atggccttaccagtgaccgccttgctcctgccgctggccttgctgctccacgccgccaggccggacatccagatgacacagagccctagcagcctgtctgccagcgtgggagacagagtgaccatcacatgcaaggccagcgaccacatcaacaactggctggcctggtatcagcagaagcctggacaggcccctaagctgctgatctacggcgctaccacactggaaacaggcgtgcccagcagattttctggcagcggctctggcaccgactacaccctgacaatatccagcctccagcctgaggacttcgccacctactactgtcagcagagctggaacaccccttggacattcggccagggcaccaagctggaaatcaagagactcgagggacagcctaaggccaatcctaccgtgacactgttccctccaagcagcgaagaactccaggccaacaaggccacacttgtgtgcctgatctccgacttctaccctggggctgtgacagtggcttggaaggccgatggatctcctgtgaaagccggcgtggaaaccaccaagccatccaagcagagcaacaacaaatacgccgccagctcctacctgagcctgacacctgagcagtggaagtcccacagatcctacagctgccaagtgacccacgaaggcagcaccgtggaaaagacagtggcccctacagagtgcagcggatccgcaaagcccaccacgactccagcgccgcgaccaccaacaccggcgcccactatcgcgtcgcagcccctgtccctgagaccagaggcgtgtagaccagcggctggaggcgcagtgcacacgagggggctggacttcgcctgtgacagcaacctgtttgtggcctcttggatcgccgtgatgattatcttcagaatcggaatggccgtggctatcttctgctgcttcttcttcccatcctggcggcggaagcggaaagagaagcagtctgagacaagccccaaagagttcctgaccatctacgaggacgtgaaggacctgaaaacccggcggaaccacgaacaagagcagacctttcctggcggaggcagcaccatctacagcatgatccagagccagagcagcgcccctacaagccaagagcctgcctacacactgtactccctgatccagcctagcagaaagagcggcagccggaagagaaatcacagccccagcttcaacagcacgatctacgaagtgatcggcaagagccagccaaaggctcagaaccctgccagactgagccggaaagagctggaaaacttcgacgtgtacagcagcactagtagagtgaagttcagcagaagcgccgacgcccctgcctaccagcagggacagaaccaactgtacaacgagctgaacctgggcagacgggaagagtacgacgtgctggacaagcggagaggcagggaccctgagatgggcggaaagccccagcggagaaagaacccccaggaaggactgtataacgaactccagaaagacaagatggccgaagcctacagcgagatcggcatgaagggcgagcggagaagaggcaagggccacgatggcctgtaccagggcctgagcaccgccaccaaggacacctatgacgccctgcacatgcaggccctgcctccaagaagggccaagcgatctggatctggagcaacaaacttctcactactcaaacaagcaggtgacgtggaggagaatcccgggcctatggactggatttggcgcatccttttccttgtcggcgctgctaccggcgcgcattccttcgaacaagttcagcttcaacagcctggcgctgagctggtcaaacctggcgcttctgtgaagatgagctgcaaagccagcggctacgccttcagcagctactggatcaactggatgaagcagaaacccggccagggactcgaatggatcggccaaatctatcccggcgacggcgacaccaactacaacggcaagttcaagggcagagccacactgaccgccgatacctctagcagcacagcctacatgcagctgagcagcctgaccagcgaagatagcgccgtgtacttctgtgcccggtccatcacaacagtcgtgggctgcgctatggactattggggccagggaacaagcgtgaccgtgtctagtacgcgtgcctctacaaagggaccctccgtgtttcctctggctcccagcagcaagtctacaagcggaggaacagccgctctgggctgcctggtcaaggattactttcccgagcctgtgaccgtgtcctggaatagcggagcactgacaagcggcgtgcacacctttccagccgtgctgcaaagcagcggcctgtactctctgagcagcgtggtcacagtgcctagctctagcctgggcacccagacctacatctgcaatgtgaaccacaagcctagcaacaccaaggtggacaagagagtggaacccaagagctgtggtaccgctaagccaaccaccacgccagctcctagacctcctacaccagctcctacaatcgccagccagcctctgtctctcagacccgaagcctgcagacctgctgctggcggagctgtgcataccagaggactggatttcgcctgcgattccaatctgttcgtggcaagctggattgccgtcatgataattttccgcattggaatggctgtcgcaatcttttgttgtttcttctttccctcctggcgacgcaagcgcaaagaaaagcaaagcgagacaagcccaaaagaatttctcactatatacgaggacgtgaaagatttgaagacgaggcggaatcatgagcaagagcagacatttcctggcgggggctctactatctactcaatgattcaatcccaaagctccgctccgacttcccaagagcccgcttacactctctactcactgatacagccttcaagaaaatcaggctctcggaaacggaatcattccccatccttcaatagtaccatctatgaagtaatcggtaagagtcaacctaaagctcaaaaccccgctcgcttgagccgcaaggagctggaaaacttcgatgtatatagcagctctagacgggttaagttttccagatccgcagacgcacccgcttaccaacaagggcagaaccaactctacaatgaacttaatttggggcggagggaagagtacgacgttctggacaaaaggaggggacgagatcccgagatgggcggaaagcctcagcgaaggaagaatccgcaagaggggctttataacgaactccagaaagataaaatggcagaagcctatagtgagattgggatgaagggagaaaggaggaggggtaaaggtcacgatgggttgtaccaaggattgagcacagccactaaagatacctatgatgcgctccacatgcaggccctgccgccaagacgcgccaagagaagcggatctggcgtgaagcagaccctgaatttcgacctgctgaagctggctggcgacgtggaatccaacccaggccctggccatatgaccgagtacaagcccacggtgcgcctcgccacccgcgacgacgtccccagggccgtacgcaccctcgccgccgcgttcgccgactaccccgccacgcgccacaccgtcgatccggaccgccacatcgagcgggtcaccgagctgcaagaactcttcctcacgcgcgtcgggctcgacatcggcaaggtgtgggtcgcggacgacggcgccgcggtggcggtctggaccacgccggagagcgtcgaagcgggggcggtgttcgccgagatcggcccgcgcatggccgagttgagcggttcccggctggccgcgcagcaacagatggaaggcctcctggcgccgcaccggcccaaggagcccgcgtggttcctggccaccgtcggcgtctcgcccgaccaccagggcaagggtctgggcagcgccgtcgtgctccccggagtggaggcggccgagcgcgccggggtgcccgccttcctggagacctccgcgccccgcaacctccccttctacgagcggctcggcttcaccgtcaccgccgacgtcgaggtgcccgaaggaccgcgcacctggtgcatgacccgcaagcccggtgcctga

SEQ ID NO: 2212 - DNA, 4542 bp, Artificial Sequence
  Synthetic Polynucleotide
atggccttaccagtgaccgccttgctcctgccgctggccttgctgctccacgccgccaggccggaagtgcagctggttgaatctggcggaggactggttcaggctggcggatctctgagactgtcttgtgccgccagcggcagaacctttagcatgggctggtttagacaggcccctggcaaagagagagagttcgtcgccgccatcacatactctggcggcagcccttactacgccgactctgtgaagggcagattcaccatcagccgggacaacgccaagaacaccgtgtacctccagatgaacagcctgaagcctgaggacaccgccgtgtactactgcgccgccaatccaacatacggcagcgactggaacgccgagaattggggccagggaacccaagtgacagtgtctagcggtaccggcggaggcggatctggcggcggaggtagcggtggcggaggatctgaattcgacatccagatgacacagagccctagcagcctgtctgccagcgtgggagacagagtgaccatcacatgcaaggccagcgaccacatcaacaactggctggcctggtatcagcagaagcctggacaggcccctaagctgctgatctacggcgctaccacactggaaacaggcgtgcccagcagattttctggcagcggctctggcaccgactacaccctgacaatatccagcctccagcctgaggacttcgccacctactactgtcagcagagctggaacaccccttggacattcggccagggcaccaagctggaaatcaagagactcgagggacagcctaaggccaatcctaccgtgacactgttccctccaagcagcgaagaactccaggccaacaaggccacacttgtgtgcctgatctccgacttctaccctggggctgtgacagtggcttggaaggccgatggatctcctgtgaaagccggcgtggaaaccaccaagccatccaagcagagcaacaacaaatacgccgccagctcctacctgagcctgacacctgagcagtggaagtcccacagatcctacagctgccaagtgacccacgaaggcagcaccgtggaaaagacagtggcccctacagagtgcagcggatccgcaaagcccaccacgactccagcgccgcgaccaccaacaccggcgcccactatcgcgtcgcagcccctgtccctgagaccagaggcgtgtagaccagcggctggaggcgcagtgcacacgagggggctggacttcgcctgtgacagcaacctgtttgtggcctcttggatcgccgtgatgattatcttcagaatcggaatggccgtggctatcttctgctgcttcttcttcccatcctggcggcggaagcggaaagagaagcagtctgagacaagccccaaagagttcctgaccatctacgaggacgtgaaggacctgaaaacccggcggaaccacgaacaagagcagacctttcctggcggaggcagcaccatctacagcatgatccagagccagagcagcgcccctacaagccaagagcctgcctacacactgtactccctgatccagcctagcagaaagagcggcagccggaagagaaatcacagccccagcttcaacagcacgatctacgaagtgatcggcaagagccagccaaaggctcagaaccctgccagactgagccggaaagagctggaaaacttcgacgtgtacagcagcactagtagagtgaagttcagcagaagcgccgacgcccctgcctaccagcagggacagaaccaactgtacaacgagctgaacctgggcagacgggaagagtacgacgtgctggacaagcggagaggcagggaccctgagatgggcggaaagccccagcggagaaagaacccccaggaaggactgtataacgaactccagaaagacaagatggccgaagcctacagcgagatcggcatgaagggcgagcggagaagaggcaagggccacgatggcctgtaccagggcctgagcaccgccaccaaggacacctatgacgccctgcacatgcaggccctgcctccaagaagggccaagcgatctggatctggagcaacaaacttctcactactcaaacaagcaggtgacgtggaggagaatcccgggcctatggactggatttggcgcatccttttccttgtcggcgctgctaccggcgcgcattccttcgaacaagttcagcttcaacagcctggcgctgagctggtcaaacctggcgcttctgtgaagatgagctgcaaagccagcggctacgccttcagcagctactggatcaactggatgaagcagaaacccggccagggactcgaatggatcggccaaatctatcccggcgacggcgacaccaactacaacggcaagttcaagggcagagccacactgaccgccgatacctctagcagcacagcctacatgcagctgagcagcctgaccagcgaagatagcgccgtgtacttctgtgcccggtccatcacaacagtcgtgggctgcgctatggactattggggccagggaacaagcgtgaccgtgtctagtacgcgtgcctctacaaagggaccctccgtgtttcctctggctcccagcagcaagtctacaagcggaggaacagccgctctgggctgcctggtcaaggattactttcccgagcctgtgaccgtgtcctggaatagcggagcactgacaagcggcgtgcacacctttccagccgtgctgcaaagcagcggcctgtactctctgagcagcgtggtcacagtgcctagctctagcctgggcacccagacctacatctgcaatgtgaaccacaagcctagcaacaccaaggtggacaagagagtggaacccaagagctgtggtaccgctaagccaaccaccacgccagctcctagacctcctacaccagctcctacaatcgccagccagcctctgtctctcagacccgaagcctgcagacctgctgctggcggagctgtgcataccagaggactggatttcgcctgcgattccaatctgttcgtggcaagctggattgccgtcatgataattttccgcattggaatggctgtcgcaatcttttgttgtttcttctttccctcctggcgacgcaagcgcaaagaaaagcaaagcgagacaagcccaaaagaatttctcactatatacgaggacgtgaaagatttgaagacgaggcggaatcatgagcaagagcagacatttcctggcgggggctctactatctactcaatgattcaatcccaaagctccgctccgacttcccaagagcccgcttacactctctactcactgatacagccttcaagaaaatcaggctctcggaaacggaatcattccccatccttcaatagtaccatctatgaagtaatcggtaagagtcaacctaaagctcaaaaccccgctcgcttgagccgcaaggagctggaaaacttcgatgtatatagcagctctagacgggttaagttttccagatccgcagacgcacccgcttaccaacaagggcagaaccaactctacaatgaacttaatttggggcggagggaagagtacgacgttctggacaaaaggaggggacgagatcccgagatgggcggaaagcctcagcgaaggaagaatccgcaagaggggctttataacgaactccagaaagataaaatggcagaagcctatagtgagattgggatgaagggagaaaggaggaggggtaaaggtcacgatgggttgtaccaaggattgagcacagccactaaagatacctatgatgcgctccacatgcaggccctgccgccaagacgcgccaagagaagcggatctggcgtgaagcagaccctgaatttcgacctgctgaagctggctggcgacgtggaatccaacccaggccctggccatatgaccgagtacaagcccacggtgcgcctcgccacccgcgacgacgtccccagggccgtacgcaccctcgccgccgcgttcgccgactaccccgccacgcgccacaccgtcgatccggaccgccacatcgagcgggtcaccgagctgcaagaactcttcctcacgcgcgtcgggctcgacatcggcaaggtgtgggtcgcggacgacggcgccgcggtggcggtctggaccacgccggagagcgtcgaagcgggggcggtgttcgccgagatcggcccgcgcatggccgagttgagcggttcccggctggccgcgcagcaacagatggaaggcctcctggcgccgcaccggcccaaggagcccgcgtggttcctggccaccgtcggcgtctcgcccgaccaccagggcaagggtctgggcagcgccgtcgtgctccccggagtggaggcggccgagcgcgccggggtgcccgccttcctggagacctccgcgccccgcaacctccccttctacgagcggctcggcttcaccgtcaccgccgacgtcgaggtgcccgaaggaccgcgcacctggtgcatgacccgcaagcccggtgcctga

SEQ ID NO: 2213 - DNA, 4953 bp, Artificial Sequence
  Synthetic Polynucleotide
atggccttaccagtgaccgccttgctcctgccgctggccttgctgctccacgccgccaggccggaagtgcagctggttgaatctggcggaggactggttcaggctggcggatctctgagactgtcttgtgccgccagcggcagaacctttagcatgggctggtttagacaggcccctggcaaagagagagagttcgtcgccgccatcacatactctggcggcagcccttactacgccgactctgtgaagggcagattcaccatcagccgggacaacgccaagaacaccgtgtacctccagatgaacagcctgaagcctgaggacaccgccgtgtactactgcgccgccaatccaacatacggcagcgactggaacgccgagaattggggccagggaacccaagtgacagtgtctagcggtaccggcggaggcggatctggcggcggaggtagcggtggcggaggatctgaattcgacatccagatgacacagagccctagcagcctgtctgccagcgtgggagacagagtgaccatcacatgcaaggccagcgaccacatcaacaactggctggcctggtatcagcagaagcctggacaggcccctaagctgctgatctacggcgctaccacactggaaacaggcgtgcccagcagattttctggcagcggctctggcaccgactacaccctgacaatatccagcctccagcctgaggacttcgccacctactactgtcagcagagctggaacaccccttggacattcggccagggcaccaagctggaaatcaagagactcgagggacagcctaaggccaatcctaccgtgacactgttccctccaagcagcgaagaactccaggccaacaaggccacacttgtgtgcctgatctccgacttctaccctggggctgtgacagtggcttggaaggccgatggatctcctgtgaaagccggcgtggaaaccaccaagccatccaagcagagcaacaacaaatacgccgccagctcctacctgagcctgacacctgagcagtggaagtcccacagatcctacagctgccaagtgacccacgaaggcagcaccgtggaaaagacagtggcccctacagagtgcagcggatccgcaaagcccaccacgactccagcgccgcgaccaccaacaccggcgcccactatcgcgtcgcagcccctgtccctgagaccagaggcgtgtagaccagcggctggaggcgcagtgcacacgagggggctggacttcgcctgtgacagcaacctgtttgtggcctcttggatcgccgtgatgattatcttcagaatcggaatggccgtggctatcttctgctgcttcttcttcccatcctggcggcggaagcggaaagagaagcagtctgagacaagccccaaagagttcctgaccatctacgaggacgtgaaggacctgaaaacccggcggaaccacgaacaagagcagacctttcctggcggaggcagcaccatctacagcatgatccagagccagagcagcgcccctacaagccaagagcctgcctacacactgtactccctgatccagcctagcagaaagagcggcagccggaagagaaatcacagccccagcttcaacagcacgatctacgaagtgatcggcaagagccagccaaaggctcagaaccctgccagactgagccggaaagagctggaaaacttcgacgtgtacagcagcactagtagagtgaagttcagcagaagcgccgacgcccctgcctaccagcagggacagaaccaactgtacaacgagctgaacctgggcagacgggaagagtacgacgtgctggacaagcggagaggcagggaccctgagatgggcggaaagccccagcggagaaagaacccccaggaaggactgtataacgaactccagaaagacaagatggccgaagcctacagcgagatcggcatgaagggcgagcggagaagaggcaagggccacgatggcctgtaccagggcctgagcaccgccaccaaggacacctatgacgccctgcacatgcaggccctgcctccaagaagggccaagcgatctggatctggagcaacaaacttctcactactcaaacaagcaggtgacgtggaggagaatcccgggcctatggactggatttggcgcatccttttccttgtcggcgctgctaccggcgcgcattccgggcccgaagtgcaactggttgaatccggtggcggcctggtgcaagcaggcggatctctcagacttagctgtgccgcctccggcagaaccttcacaatgggatggtttaggcaggctccagggaaagagagagagttcgtcgccgccatctctctgtctcccacactggcctactacgccgactctgtgaaaggccggttcaccatctccagagataatgccaagaacaccgtggtgctgcaaatgaactctctgaaacccgaggatacagccctgtactattgtgccgctgaccggaagtccgtgatgagcatcagacccgattactggggacagggcacacaagtcacagtgtcctctggatccggcggcggaggatctggcggaggcggatctgggggcggaggctctttcgaacaagttcagcttcaacagcctggcgctgagctggtcaaacctggcgcttctgtgaagatgagctgcaaagccagcggctacgccttcagcagctactggatcaactggatgaagcagaaacccggccagggactcgaatggatcggccaaatctatcccggcgacggcgacaccaactacaacggcaagttcaagggcagagccacactgaccgccgatacctctagcagcacagcctacatgcagctgagcagcctgaccagcgaagatagcgccgtgtacttctgtgcccggtccatcacaacagtcgtgggctgcgctatggactattggggccagggaacaagcgtgaccgtgtctagtacgcgtgcctctacaaagggaccctccgtgtttcctctggctcccagcagcaagtctacaagcggaggaacagccgctctgggctgcctggtcaaggattactttcccgagcctgtgaccgtgtcctggaatagcggagcactgacaagcggcgtgcacacctttccagccgtgctgcaaagcagcggcctgtactctctgagcagcgtggtcacagtgcctagctctagcctgggcacccagacctacatctgcaatgtgaaccacaagcctagcaacaccaaggtggacaagagagtggaacccaagagctgtggtaccgctaagccaaccaccacgccagctcctagacctcctacaccagctcctacaatcgccagccagcctctgtctctcagacccgaagcctgcagacctgctgctggcggagctgtgcataccagaggactggatttcgcctgcgattccaatctgttcgtggcaagctggattgccgtcatgataattttccgcattggaatggctgtcgcaatcttttgttgtttcttctttccctcctggcgacgcaagcgcaaagaaaagcaaagcgagacaagcccaaaagaatttctcactatatacgaggacgtgaaagatttgaagacgaggcggaatcatgagcaagagcagacatttcctggcgggggctctactatctactcaatgattcaatcccaaagctccgctccgacttcccaagagcccgcttacactctctactcactgatacagccttcaagaaaatcaggctctcggaaacggaatcattccccatccttcaatagtaccatctatgaagtaatcggtaagagtcaacctaaagctcaaaaccccgctcgcttgagccgcaaggagctggaaaacttcgatgtatatagcagctctagacgggttaagttttccagatccgcagacgcacccgcttaccaacaagggcagaaccaactctacaatgaacttaatttggggcggagggaagagtacgacgttctggacaaaaggaggggacgagatcccgagatgggcggaaagcctcagcgaaggaagaatccgcaagaggggctttataacgaactccagaaagataaaatggcagaagcctatagtgagattgggatgaagggagaaaggaggaggggtaaaggtcacgatgggttgtaccaaggattgagcacagccactaaagatacctatgatgcgctccacatgcaggccctgccgccaagacgcgccaagagaagcggatctggcgtgaagcagaccctgaatttcgacctgctgaagctggctggcgacgtggaatccaacccaggccctggccatatgaccgagtacaagcccacggtgcgcctcgccacccgcgacgacgtccccagggccgtacgcaccctcgccgccgcgttcgccgactaccccgccacgcgccacaccgtcgatccggaccgccacatcgagcgggtcaccgagctgcaagaactcttcctcacgcgcgtcgggctcgacatcggcaaggtgtgggtcgcggacgacggcgccgcggtggcggtctggaccacgccggagagcgtcgaagcgggggcggtgttcgccgagatcggcccgcgcatggccgagttgagcggttcccggctggccgcgcagcaacagatggaaggcctcctggcgccgcaccggcccaaggagcccgcgtggttcctggccaccgtcggcgtctcgcccgaccaccagggcaagggtctgggcagcgccgtcgtgctccccggagtggaggcggccgagcgcgccggggtgcccgccttcctggagacctccgcgccccgcaacctccccttctacgagcggctcggcttcaccgtcaccgccgacgtcgaggtgcccgaaggaccgcgcacctggtgcatgacccgcaagcccggtgcctga

SEQ ID NO: 2214 - DNA, 4152 bp, Artificial Sequence
  Synthetic Polynucleotide
atggccttaccagtgaccgccttgctcctgccgctggccttgctgctccacgccgccaggccggaagtgcagctggttgaatctggcggaggactggttcaggctggcggatctctgagactgtcttgtgccgccagcggcagaacctttagcatgggctggtttagacaggcccctggcaaagagagagagttcgtcgccgccatcacatactctggcggcagcccttactacgccgactctgtgaagggcagattcaccatcagccgggacaacgccaagaacaccgtgtacctccagatgaacagcctgaagcctgaggacaccgccgtgtactactgcgccgccaatccaacatacggcagcgactggaacgccgagaattggggccagggaacccaagtgacagtgtctagcctcgagggacagcctaaggccaatcctaccgtgacactgttccctccaagcagcgaagaactccaggccaacaaggccacacttgtgtgcctgatctccgacttctaccctggggctgtgacagtggcttggaaggccgatggatctcctgtgaaagccggcgtggaaaccaccaagccatccaagcagagcaacaacaaatacgccgccagctcctacctgagcctgacacctgagcagtggaagtcccacagatcctacagctgccaagtgacccacgaaggcagcaccgtggaaaagacagtggcccctacagagtgcagcggatccgcaaagcccaccacgactccagcgccgcgaccaccaacaccggcgcccactatcgcgtcgcagcccctgtccctgagaccagaggcgtgtagaccagcggctggaggcgcagtgcacacgagggggctggacttcgcctgtgacagcaacctgtttgtggcctcttggatcgccgtgatgattatcttcagaatcggaatggccgtggctatcttctgctgcttcttcttcccatcctggcggcggaagcggaaagagaagcagtctgagacaagccccaaagagttcctgaccatctacgaggacgtgaaggacctgaaaacccggcggaaccacgaacaagagcagacctttcctggcggaggcagcaccatctacagcatgatccagagccagagcagcgcccctacaagccaagagcctgcctacacactgtactccctgatccagcctagcagaaagagcggcagccggaagagaaatcacagccccagcttcaacagcacgatctacgaagtgatcggcaagagccagccaaaggctcagaaccctgccagactgagccggaaagagctggaaaacttcgacgtgtacagcagcactagtagagtgaagttcagcagaagcgccgacgcccctgcctaccagcagggacagaaccaactgtacaacgagctgaacctgggcagacgggaagagtacgacgtgctggacaagcggagaggcagggaccctgagatgggcggaaagccccagcggagaaagaacccccaggaaggactgtataacgaactccagaaagacaagatggccgaagcctacagcgagatcggcatgaagggcgagcggagaagaggcaagggccacgatggcctgtaccagggcctgagcaccgccaccaaggacacctatgacgccctgcacatgcaggccctgcctccaagaagggccaagcgatctggatctggagcaacaaacttctcactactcaaacaagcaggtgacgtggaggagaatcccgggcctatggactggatttggcgcatccttttccttgtcggcgctgctaccggcgcgcattccgggcccgaagtgcaactggttgaatccggtggcggcctggtgcaagcaggcggatctctcagacttagctgtgccgcctccggcagaaccttcacaatgggatggtttaggcaggctccagggaaagagagagagttcgtcgccgccatctctctgtctcccacactggcctactacgccgactctgtgaaaggccggttcaccatctccagagataatgccaagaacaccgtggtgctgcaaatgaactctctgaaacccgaggatacagccctgtactattgtgccgctgaccggaagtccgtgatgagcatcagacccgattactggggacagggcacacaagtcacagtgtcctctacgcgtgcctctacaaagggaccctccgtgtttcctctggctcccagcagcaagtctacaagcggaggaacagccgctctgggctgcctggtcaaggattactttcccgagcctgtgaccgtgtcctggaatagcggagcactgacaagcggcgtgcacacctttccagccgtgctgcaaagcagcggcctgtactctctgagcagcgtggtcacagtgcctagctctagcctgggcacccagacctacatctgcaatgtgaaccacaagcctagcaacaccaaggtggacaagagagtggaacccaagagctgtggtaccgctaagccaaccaccacgccagctcctagacctcctacaccagctcctacaatcgccagccagcctctgtctctcagacccgaagcctgcagacctgctgctggcggagctgtgcataccagaggactggatttcgcctgcgattccaatctgttcgtggcaagctggattgccgtcatgataattttccgcattggaatggctgtcgcaatcttttgttgtttcttctttccctcctggcgacgcaagcgcaaagaaaagcaaagcgagacaagcccaaaagaatttctcactatatacgaggacgtgaaagatttgaagacgaggcggaatcatgagcaagagcagacatttcctggcgggggctctactatctactcaatgattcaatcccaaagctccgctccgacttcccaagagcccgcttacactctctactcactgatacagccttcaagaaaatcaggctctcggaaacggaatcattccccatccttcaatagtaccatctatgaagtaatcggtaagagtcaacctaaagctcaaaaccccgctcgcttgagccgcaaggagctggaaaacttcgatgtatatagcagctctagacgggttaagttttccagatccgcagacgcacccgcttaccaacaagggcagaaccaactctacaatgaacttaatttggggcggagggaagagtacgacgttctggacaaaaggaggggacgagatcccgagatgggcggaaagcctcagcgaaggaagaatccgcaagaggggctttataacgaactccagaaagataaaatggcagaagcctatagtgagattgggatgaagggagaaaggaggaggggtaaaggtcacgatgggttgtaccaaggattgagcacagccactaaagatacctatgatgcgctccacatgcaggccctgccgccaagacgcgccaagagaagcggatctggcgtgaagcagaccctgaatttcgacctgctgaagctggctggcgacgtggaatccaacccaggccctggccatatgaccgagtacaagcccacggtgcgcctcgccacccgcgacgacgtccccagggccgtacgcaccctcgccgccgcgttcgccgactaccccgccacgcgccacaccgtcgatccggaccgccacatcgagcgggtcaccgagctgcaagaactcttcctcacgcgcgtcgggctcgacatcggcaaggtgtgggtcgcggacgacggcgccgcggtggcggtctggaccacgccggagagcgtcgaagcgggggcggtgttcgccgagatcggcccgcgcatggccgagttgagcggttcccggctggccgcgcagcaacagatggaaggcctcctggcgccgcaccggcccaaggagcccgcgtggttcctggccaccgtcggcgtctcgcccgaccaccagggcaagggtctgggcagcgccgtcgtgctccccggagtggaggcggccgagcgcgccggggtgcccgccttcctggagacctccgcgccccgcaacctccccttctacgagcggctcggcttcaccgtcaccgccgacgtcgaggtgcccgaaggaccgcgcacctggtgcatgacccgcaagcccggtgcctga

SEQ ID NO: 2215 - DNA, 4176 bp, Artificial Sequence
  Synthetic Polynucleotide
atggccttaccagtgaccgccttgctcctgccgctggccttgctgctccacgccgccaggccggacatccagatgacacagagccctagcagcctgtctgccagcgtgggagacagagtgaccatcacatgcaaggccagcgaccacatcaacaactggctggcctggtatcagcagaagcctggacaggcccctaagctgctgatctacggcgctaccacactggaaacaggcgtgcccagcagattttctggcagcggctctggcaccgactacaccctgacaatatccagcctccagcctgaggacttcgccacctactactgtcagcagagctggaacaccccttggacattcggccagggcaccaagctggaaatcaagagactcgaggacctgaagaacgtgttcccacctgaggtggccgtgttcgagcctagcgaggccgagatcagccacacccagaaagccaccctcgtgtgcctggctaccggcttctaccccgaccatgtggaactgtcttggtgggtcaacggcaaagaggtgcacagcggcgtgtctaccgacccccagccactgaaagaacagcccgccctgaacgacagccggtactgcctgagcagcagactgagagtgtccgccaccttctggcagaacccccggaaccacttcagatgccaggtgcagttctacggcctgagcgagaacgacgagtggacccaggacagagccaagcccgtgacccagatcgtgtctgccgaagcctggggcagagccgattgcggatccgcaaagcccaccacgactccagcgccgcgaccaccaacaccggcgcccactatcgcgtcgcagcccctgtccctgagaccagaggcgtgtagaccagcggctggaggcgcagtgcacacgagggggctggacttcgcctgtgacagcaacctgtttgtggcctcttggatcgccgtgatgattatcttcagaatcggaatggccgtggctatcttctgctgcttcttcttcccatcctggcggcggaagcggaaagagaagcagtctgagacaagccccaaagagttcctgaccatctacgaggacgtgaaggacctgaaaacccggcggaaccacgaacaagagcagacctttcctggcggaggcagcaccatctacagcatgatccagagccagagcagcgcccctacaagccaagagcctgcctacacactgtactccctgatccagcctagcagaaagagcggcagccggaagagaaatcacagccccagcttcaacagcacgatctacgaagtgatcggcaagagccagccaaaggctcagaaccctgccagactgagccggaaagagctggaaaacttcgacgtgtacagcagcactagtagagtgaagttcagcagaagcgccgacgcccctgcctaccagcagggacagaaccaactgtacaacgagctgaacctgggcagacgggaagagtacgacgtgctggacaagcggagaggcagggaccctgagatgggcggaaagccccagcggagaaagaacccccaggaaggactgtataacgaactccagaaagacaagatggccgaagcctacagcgagatcggcatgaagggcgagcggagaagaggcaagggccacgatggcctgtaccagggcctgagcaccgccaccaaggacacctatgacgccctgcacatgcaggccctgcctccaagaagggccaagcgatctggatctggagcaacaaacttctcactactcaaacaagcaggtgacgtggaggagaatcccgggcctatggactggatttggcgcatccttttccttgtcggcgctgctaccggcgcgcattccttcgaacaagttcagcttcaacagcctggcgctgagctggtcaaacctggcgcttctgtgaagatgagctgcaaagccagcggctacgccttcagcagctactggatcaactggatgaagcagaaacccggccagggactcgaatggatcggccaaatctatcccggcgacggcgacaccaactacaacggcaagttcaagggcagagccacactgaccgccgatacctctagcagcacagcctacatgcagctgagcagcctgaccagcgaagatagcgccgtgtacttctgtgcccggtccatcacaacagtcgtgggctgcgctatggactattggggccagggaacaagcgtgaccgtgtctagtacgcgtatccagaaccctgatcctgccgtgtaccagctgcgggatagcaagagcagcgacaagagcgtgtgtctgttcaccgacttcgacagccagaccaacgtgtcccagagcaaggactccgacgtgtacatcaccgataagaccgtgctggacatgcggagcatggacttcaagagcaactccgccgtggcctggtccaacaagtccgatttcgcctgcgccaacgccttcaacaacagcattatccccgaggacacattcttcccaagccccgagagcagctgcggtaccgctaagccaaccaccacgccagctcctagacctcctacaccagctcctacaatcgccagccagcctctgtctctcagacccgaagcctgcagacctgctgctggcggagctgtgcataccagaggactggatttcgcctgcgattccaatctgttcgtggcaagctggattgccgtcatgataattttccgcattggaatggctgtcgcaatcttttgttgtttcttctttccctcctggcgacgcaagcgcaaagaaaagcaaagcgagacaagcccaaaagaatttctcactatatacgaggacgtgaaagatttgaagacgaggcggaatcatgagcaagagcagacatttcctggcgggggctctactatctactcaatgattcaatcccaaagctccgctccgacttcccaagagcccgcttacactctctactcactgatacagccttcaagaaaatcaggctctcggaaacggaatcattccccatccttcaatagtaccatctatgaagtaatcggtaagagtcaacctaaagctcaaaaccccgctcgcttgagccgcaaggagctggaaaacttcgatgtatatagcagctctagacgggttaagttttccagatccgcagacgcacccgcttaccaacaagggcagaaccaactctacaatgaacttaatttggggcggagggaagagtacgacgttctggacaaaaggaggggacgagatcccgagatgggcggaaagcctcagcgaaggaagaatccgcaagaggggctttataacgaactccagaaagataaaatggcagaagcctatagtgagattgggatgaagggagaaaggaggaggggtaaaggtcacgatgggttgtaccaaggattgagcacagccactaaagatacctatgatgcgctccacatgcaggccctgccgccaagacgcgccaagagaagcggatctggcgtgaagcagaccctgaatttcgacctgctgaagctggctggcgacgtggaatccaacccaggccctggccatatgaccgagtacaagcccacggtgcgcctcgccacccgcgacgacgtccccagggccgtacgcaccctcgccgccgcgttcgccgactaccccgccacgcgccacaccgtcgatccggaccgccacatcgagcgggtcaccgagctgcaagaactcttcctcacgcgcgtcgggctcgacatcggcaaggtgtgggtcgcggacgacggcgccgcggtggcggtctggaccacgccggagagcgtcgaagcgggggcggtgttcgccgagatcggcccgcgcatggccgagttgagcggttcccggctggccgcgcagcaacagatggaaggcctcctggcgccgcaccggcccaaggagcccgcgtggttcctggccaccgtcggcgtctcgcccgaccaccagggcaagggtctgggcagcgccgtcgtgctccccggagtggaggcggccgagcgcgccggggtgcccgccttcctggagacctccgcgccccgcaacctccccttctacgagcggctcggcttcaccgtcaccgccgacgtcgaggtgcccgaaggaccgcgcacctggtgcatgacccgcaagcccggtgcctga

SEQ ID NO: 2216 - DNA, 4587 bp, Artificial Sequence
  Synthetic Polynucleotide
atggccttaccagtgaccgccttgctcctgccgctggccttgctgctccacgccgccaggccggaagtgcagctggttgaatctggcggaggactggttcaggctggcggatctctgagactgtcttgtgccgccagcggcagaacctttagcatgggctggtttagacaggcccctggcaaagagagagagttcgtcgccgccatcacatactctggcggcagcccttactacgccgactctgtgaagggcagattcaccatcagccgggacaacgccaagaacaccgtgtacctccagatgaacagcctgaagcctgaggacaccgccgtgtactactgcgccgccaatccaacatacggcagcgactggaacgccgagaattggggccagggaacccaagtgacagtgtctagcggtaccggcggaggcggatctggcggcggaggtagcggtggcggaggatctgaattcgacatccagatgacacagagccctagcagcctgtctgccagcgtgggagacagagtgaccatcacatgcaaggccagcgaccacatcaacaactggctggcctggtatcagcagaagcctggacaggcccctaagctgctgatctacggcgctaccacactggaaacaggcgtgcccagcagattttctggcagcggctctggcaccgactacaccctgacaatatccagcctccagcctgaggacttcgccacctactactgtcagcagagctggaacaccccttggacattcggccagggcaccaagctggaaatcaagagactcgaggacctgaagaacgtgttcccacctgaggtggccgtgttcgagcctagcgaggccgagatcagccacacccagaaagccaccctcgtgtgcctggctaccggcttctaccccgaccatgtggaactgtcttggtgggtcaacggcaaagaggtgcacagcggcgtgtctaccgacccccagccactgaaagaacagcccgccctgaacgacagccggtactgcctgagcagcagactgagagtgtccgccaccttctggcagaacccccggaaccacttcagatgccaggtgcagttctacggcctgagcgagaacgacgagtggacccaggacagagccaagcccgtgacccagatcgtgtctgccgaagcctggggcagagccgattgcggatccgcaaagcccaccacgactccagcgccgcgaccaccaacaccggcgcccactatcgcgtcgcagcccctgtccctgagaccagaggcgtgtagaccagcggctggaggcgcagtgcacacgagggggctggacttcgcctgtgacagcaacctgtttgtggcctcttggatcgccgtgatgattatcttcagaatcggaatggccgtggctatcttctgctgcttcttcttcccatcctggcggcggaagcggaaagagaagcagtctgagacaagccccaaagagttcctgaccatctacgaggacgtgaaggacctgaaaacccggcggaaccacgaacaagagcagacctttcctggcggaggcagcaccatctacagcatgatccagagccagagcagcgcccctacaagccaagagcctgcctacacactgtactccctgatccagcctagcagaaagagcggcagccggaagagaaatcacagccccagcttcaacagcacgatctacgaagtgatcggcaagagccagccaaaggctcagaaccctgccagactgagccggaaagagctggaaaacttcgacgtgtacagcagcactagtagagtgaagttcagcagaagcgccgacgcccctgcctaccagcagggacagaaccaactgtacaacgagctgaacctgggcagacgggaagagtacgacgtgctggacaagcggagaggcagggaccctgagatgggcggaaagccccagcggagaaagaacccccaggaaggactgtataacgaactccagaaagacaagatggccgaagcctacagcgagatcggcatgaagggcgagcggagaagaggcaagggccacgatggcctgtaccagggcctgagcaccgccaccaaggacacctatgacgccctgcacatgcaggccctgcctccaagaagggccaagcgatctggatctggagcaacaaacttctcactactcaaacaagcaggtgacgtggaggagaatcccgggcctatggactggatttggcgcatccttttccttgtcggcgctgctaccggcgcgcattccttcgaacaagttcagcttcaacagcctggcgctgagctggtcaaacctggcgcttctgtgaagatgagctgcaaagccagcggctacgccttcagcagctactggatcaactggatgaagcagaaacccggccagggactcgaatggatcggccaaatctatcccggcgacggcgacaccaactacaacggcaagttcaagggcagagccacactgaccgccgatacctctagcagcacagcctacatgcagctgagcagcctgaccagcgaagatagcgccgtgtacttctgtgcccggtccatcacaacagtcgtgggctgcgctatggactattggggccagggaacaagcgtgaccgtgtctagtacgcgtatccagaaccctgatcctgccgtgtaccagctgcgggatagcaagagcagcgacaagagcgtgtgtctgttcaccgacttcgacagccagaccaacgtgtcccagagcaaggactccgacgtgtacatcaccgataagaccgtgctggacatgcggagcatggacttcaagagcaactccgccgtggcctggtccaacaagtccgatttcgcctgcgccaacgccttcaacaacagcattatccccgaggacacattcttcccaagccccgagagcagctgcggtaccgctaagccaaccaccacgccagctcctagacctcctacaccagctcctacaatcgccagccagcctctgtctctcagacccgaagcctgcagacctgctgctggcggagctgtgcataccagaggactggatttcgcctgcgattccaatctgttcgtggcaagctggattgccgtcatgataattttccgcattggaatggctgtcgcaatcttttgttgtttcttctttccctcctggcgacgcaagcgcaaagaaaagcaaagcgagacaagcccaaaagaatttctcactatatacgaggacgtgaaagatttgaagacgaggcggaatcatgagcaagagcagacatttcctggcgggggctctactatctactcaatgattcaatcccaaagctccgctccgacttcccaagagcccgcttacactctctactcactgatacagccttcaagaaaatcaggctctcggaaacggaatcattccccatccttcaatagtaccatctatgaagtaatcggtaagagtcaacctaaagctcaaaaccccgctcgcttgagccgcaaggagctggaaaacttcgatgtatatagcagctctagacgggttaagttttccagatccgcagacgcacccgcttaccaacaagggcagaaccaactctacaatgaacttaatttggggcggagggaagagtacgacgttctggacaaaaggaggggacgagatcccgagatgggcggaaagcctcagcgaaggaagaatccgcaagaggggctttataacgaactccagaaagataaaatggcagaagcctatagtgagattgggatgaagggagaaaggaggaggggtaaaggtcacgatgggttgtaccaaggattgagcacagccactaaagatacctatgatgcgctccacatgcaggccctgccgccaagacgcgccaagagaagcggatctggcgtgaagcagaccctgaatttcgacctgctgaagctggctggcgacgtggaatccaacccaggccctggccatatgaccgagtacaagcccacggtgcgcctcgccacccgcgacgacgtccccagggccgtacgcaccctcgccgccgcgttcgccgactaccccgccacgcgccacaccgtcgatccggaccgccacatcgagcgggtcaccgagctgcaagaactcttcctcacgcgcgtcgggctcgacatcggcaaggtgtgggtcgcggacgacggcgccgcggtggcggtctggaccacgccggagagcgtcgaagcgggggcggtgttcgccgagatcggcccgcgcatggccgagttgagcggttcccggctggccgcgcagcaacagatggaaggcctcctggcgccgcaccggcccaaggagcccgcgtggttcctggccaccgtcggcgtctcgcccgaccaccagggcaagggtctgggcagcgccgtcgtgctccccggagtggaggcggccgagcgcgccggggtgcccgccttcctggagacctccgcgccccgcaacctccccttctacgagcggctcggcttcaccgtcaccgccgacgtcgaggtgcccgaaggaccgcgcacctggtgcatgacccgcaagcccggtgcctga

SEQ ID NO: 2217 - DNA, 4998 bp, Artificial Sequence
  Synthetic Polynucleotide
atggccttaccagtgaccgccttgctcctgccgctggccttgctgctccacgccgccaggccggaagtgcagctggttgaatctggcggaggactggttcaggctggcggatctctgagactgtcttgtgccgccagcggcagaacctttagcatgggctggtttagacaggcccctggcaaagagagagagttcgtcgccgccatcacatactctggcggcagcccttactacgccgactctgtgaagggcagattcaccatcagccgggacaacgccaagaacaccgtgtacctccagatgaacagcctgaagcctgaggacaccgccgtgtactactgcgccgccaatccaacatacggcagcgactggaacgccgagaattggggccagggaacccaagtgacagtgtctagcggtaccggcggaggcggatctggcggcggaggtagcggtggcggaggatctgaattcgacatccagatgacacagagccctagcagcctgtctgccagcgtgggagacagagtgaccatcacatgcaaggccagcgaccacatcaacaactggctggcctggtatcagcagaagcctggacaggcccctaagctgctgatctacggcgctaccacactggaaacaggcgtgcccagcagattttctggcagcggctctggcaccgactacaccctgacaatatccagcctccagcctgaggacttcgccacctactactgtcagcagagctggaacaccccttggacattcggccagggcaccaagctggaaatcaagagactcgaggacctgaagaacgtgttcccacctgaggtggccgtgttcgagcctagcgaggccgagatcagccacacccagaaagccaccctcgtgtgcctggctaccggcttctaccccgaccatgtggaactgtcttggtgggtcaacggcaaagaggtgcacagcggcgtgtctaccgacccccagccactgaaagaacagcccgccctgaacgacagccggtactgcctgagcagcagactgagagtgtccgccaccttctggcagaacccccggaaccacttcagatgccaggtgcagttctacggcctgagcgagaacgacgagtggacccaggacagagccaagcccgtgacccagatcgtgtctgccgaagcctggggcagagccgattgcggatccgcaaagcccaccacgactccagcgccgcgaccaccaacaccggcgcccactatcgcgtcgcagcccctgtccctgagaccagaggcgtgtagaccagcggctggaggcgcagtgcacacgagggggctggacttcgcctgtgacagcaacctgtttgtggcctcttggatcgccgtgatgattatcttcagaatcggaatggccgtggctatcttctgctgcttcttcttcccatcctggcggcggaagcggaaagagaagcagtctgagacaagccccaaagagttcctgaccatctacgaggacgtgaaggacctgaaaacccggcggaaccacgaacaagagcagacctttcctggcggaggcagcaccatctacagcatgatccagagccagagcagcgcccctacaagccaagagcctgcctacacactgtactccctgatccagcctagcagaaagagcggcagccggaagagaaatcacagccccagcttcaacagcacgatctacgaagtgatcggcaagagccagccaaaggctcagaaccctgccagactgagccggaaagagctggaaaacttcgacgtgtacagcagcactagtagagtgaagttcagcagaagcgccgacgcccctgcctaccagcagggacagaaccaactgtacaacgagctgaacctgggcagacgggaagagtacgacgtgctggacaagcggagaggcagggaccctgagatgggcggaaagccccagcggagaaagaacccccaggaaggactgtataacgaactccagaaagacaagatggccgaagcctacagcgagatcggcatgaagggcgagcggagaagaggcaagggccacgatggcctgtaccagggcctgagcaccgccaccaaggacacctatgacgccctgcacatgcaggccctgcctccaagaagggccaagcgatctggatctggagcaacaaacttctcactactcaaacaagcaggtgacgtggaggagaatcccgggcctatggactggatttggcgcatccttttccttgtcggcgctgctaccggcgcgcattccgggcccgaagtgcaactggttgaatccggtggcggcctggtgcaagcaggcggatctctcagacttagctgtgccgcctccggcagaaccttcacaatgggatggtttaggcaggctccagggaaagagagagagttcgtcgccgccatctctctgtctcccacactggcctactacgccgactctgtgaaaggccggttcaccatctccagagataatgccaagaacaccgtggtgctgcaaatgaactctctgaaacccgaggatacagccctgtactattgtgccgctgaccggaagtccgtgatgagcatcagacccgattactggggacagggcacacaagtcacagtgtcctctggatccggcggcggaggatctggcggaggcggatctgggggcggaggctctttcgaacaagttcagcttcaacagcctggcgctgagctggtcaaacctggcgcttctgtgaagatgagctgcaaagccagcggctacgccttcagcagctactggatcaactggatgaagcagaaacccggccagggactcgaatggatcggccaaatctatcccggcgacggcgacaccaactacaacggcaagttcaagggcagagccacactgaccgccgatacctctagcagcacagcctacatgcagctgagcagcctgaccagcgaagatagcgccgtgtacttctgtgcccggtccatcacaacagtcgtgggctgcgctatggactattggggccagggaacaagcgtgaccgtgtctagtacgcgtatccagaaccctgatcctgccgtgtaccagctgcgggatagcaagagcagcgacaagagcgtgtgtctgttcaccgacttcgacagccagaccaacgtgtcccagagcaaggactccgacgtgtacatcaccgataagaccgtgctggacatgcggagcatggacttcaagagcaactccgccgtggcctggtccaacaagtccgatttcgcctgcgccaacgccttcaacaacagcattatccccgaggacacattcttcccaagccccgagagcagctgcggtaccgctaagccaaccaccacgccagctcctagacctcctacaccagctcctacaatcgccagccagcctctgtctctcagacccgaagcctgcagacctgctgctggcggagctgtgcataccagaggactggatttcgcctgcgattccaatctgttcgtggcaagctggattgccgtcatgataattttccgcattggaatggctgtcgcaatcttttgttgtttcttctttccctcctggcgacgcaagcgcaaagaaaagcaaagcgagacaagcccaaaagaatttctcactatatacgaggacgtgaaagatttgaagacgaggcggaatcatgagcaagagcagacatttcctggcgggggctctactatctactcaatgattcaatcccaaagctccgctccgacttcccaagagcccgcttacactctctactcactgatacagccttcaagaaaatcaggctctcggaaacggaatcattccccatccttcaatagtaccatctatgaagtaatcggtaagagtcaacctaaagctcaaaaccccgctcgcttgagccgcaaggagctggaaaacttcgatgtatatagcagctctagacgggttaagttttccagatccgcagacgcacccgcttaccaacaagggcagaaccaactctacaatgaacttaatttggggcggagggaagagtacgacgttctggacaaaaggaggggacgagatcccgagatgggcggaaagcctcagcgaaggaagaatccgcaagaggggctttataacgaactccagaaagataaaatggcagaagcctatagtgagattgggatgaagggagaaaggaggaggggtaaaggtcacgatgggttgtaccaaggattgagcacagccactaaagatacctatgatgcgctccacatgcaggccctgccgccaagacgcgccaagagaagcggatctggcgtgaagcagaccctgaatttcgacctgctgaagctggctggcgacgtggaatccaacccaggccctggccatatgaccgagtacaagcccacggtgcgcctcgccacccgcgacgacgtccccagggccgtacgcaccctcgccgccgcgttcgccgactaccccgccacgcgccacaccgtcgatccggaccgccacatcgagcgggtcaccgagctgcaagaactcttcctcacgcgcgtcgggctcgacatcggcaaggtgtgggtcgcggacgacggcgccgcggtggcggtctggaccacgccggagagcgtcgaagcgggggcggtgttcgccgagatcggcccgcgcatggccgagttgagcggttcccggctggccgcgcagcaacagatggaaggcctcctggcgccgcaccggcccaaggagcccgcgtggttcctggccaccgtcggcgtctcgcccgaccaccagggcaagggtctgggcagcgccgtcgtgctccccggagtggaggcggccgagcgcgccggggtgcccgccttcctggagacctccgcgccccgcaacctccccttctacgagcggctcggcttcaccgtcaccgccgacgtcgaggtgcccgaaggaccgcgcacctggtgcatgacccgcaagcccggtgcctga

SEQ ID NO: 2218 - DNA, 4197 bp, Artificial Sequence
  Synthetic Polynucleotide
atggccttaccagtgaccgccttgctcctgccgctggccttgctgctccacgccgccaggccggaagtgcagctggttgaatctggcggaggactggttcaggctggcggatctctgagactgtcttgtgccgccagcggcagaacctttagcatgggctggtttagacaggcccctggcaaagagagagagttcgtcgccgccatcacatactctggcggcagcccttactacgccgactctgtgaagggcagattcaccatcagccgggacaacgccaagaacaccgtgtacctccagatgaacagcctgaagcctgaggacaccgccgtgtactactgcgccgccaatccaacatacggcagcgactggaacgccgagaattggggccagggaacccaagtgacagtgtctagcctcgaggacctgaagaacgtgttcccacctgaggtggccgtgttcgagcctagcgaggccgagatcagccacacccagaaagccaccctcgtgtgcctggctaccggcttctaccccgaccatgtggaactgtcttggtgggtcaacggcaaagaggtgcacagcggcgtgtctaccgacccccagccactgaaagaacagcccgccctgaacgacagccggtactgcctgagcagcagactgagagtgtccgccaccttctggcagaacccccggaaccacttcagatgccaggtgcagttctacggcctgagcgagaacgacgagtggacccaggacagagccaagcccgtgacccagatcgtgtctgccgaagcctggggcagagccgattgcggatccgcaaagcccaccacgactccagcgccgcgaccaccaacaccggcgcccactatcgcgtcgcagcccctgtccctgagaccagaggcgtgtagaccagcggctggaggcgcagtgcacacgagggggctggacttcgcctgtgacagcaacctgtttgtggcctcttggatcgccgtgatgattatcttcagaatcggaatggccgtggctatcttctgctgcttcttcttcccatcctggcggcggaagcggaaagagaagcagtctgagacaagccccaaagagttcctgaccatctacgaggacgtgaaggacctgaaaacccggcggaaccacgaacaagagcagacctttcctggcggaggcagcaccatctacagcatgatccagagccagagcagcgcccctacaagccaagagcctgcctacacactgtactccctgatccagcctagcagaaagagcggcagccggaagagaaatcacagccccagcttcaacagcacgatctacgaagtgatcggcaagagccagccaaaggctcagaaccctgccagactgagccggaaagagctggaaaacttcgacgtgtacagcagcactagtagagtgaagttcagcagaagcgccgacgcccctgcctaccagcagggacagaaccaactgtacaacgagctgaacctgggcagacgggaagagtacgacgtgctggacaagcggagaggcagggaccctgagatgggcggaaagccccagcggagaaagaacccccaggaaggactgtataacgaactccagaaagacaagatggccgaagcctacagcgagatcggcatgaagggcgagcggagaagaggcaagggccacgatggcctgtaccagggcctgagcaccgccaccaaggacacctatgacgccctgcacatgcaggccctgcctccaagaagggccaagcgatctggatctggagcaacaaacttctcactactcaaacaagcaggtgacgtggaggagaatcccgggcctatggactggatttggcgcatccttttccttgtcggcgctgctaccggcgcgcattccgggcccgaagtgcaactggttgaatccggtggcggcctggtgcaagcaggcggatctctcagacttagctgtgccgcctccggcagaaccttcacaatgggatggtttaggcaggctccagggaaagagagagagttcgtcgccgccatctctctgtctcccacactggcctactacgccgactctgtgaaaggccggttcaccatctccagagataatgccaagaacaccgtggtgctgcaaatgaactctctgaaacccgaggatacagccctgtactattgtgccgctgaccggaagtccgtgatgagcatcagacccgattactggggacagggcacacaagtcacagtgtcctctacgcgtatccagaaccctgatcctgccgtgtaccagctgcgggatagcaagagcagcgacaagagcgtgtgtctgttcaccgacttcgacagccagaccaacgtgtcccagagcaaggactccgacgtgtacatcaccgataagaccgtgctggacatgcggagcatggacttcaagagcaactccgccgtggcctggtccaacaagtccgatttcgcctgcgccaacgccttcaacaacagcattatccccgaggacacattcttcccaagccccgagagcagctgcggtaccgctaagccaaccaccacgccagctcctagacctcctacaccagctcctacaatcgccagccagcctctgtctctcagacccgaagcctgcagacctgctgctggcggagctgtgcataccagaggactggatttcgcctgcgattccaatctgttcgtggcaagctggattgccgtcatgataattttccgcattggaatggctgtcgcaatcttttgttgtttcttctttccctcctggcgacgcaagcgcaaagaaaagcaaagcgagacaagcccaaaagaatttctcactatatacgaggacgtgaaagatttgaagacgaggcggaatcatgagcaagagcagacatttcctggcgggggctctactatctactcaatgattcaatcccaaagctccgctccgacttcccaagagcccgcttacactctctactcactgatacagccttcaagaaaatcaggctctcggaaacggaatcattccccatccttcaatagtaccatctatgaagtaatcggtaagagtcaacctaaagctcaaaaccccgctcgcttgagccgcaaggagctggaaaacttcgatgtatatagcagctctagacgggttaagttttccagatccgcagacgcacccgcttaccaacaagggcagaaccaactctacaatgaacttaatttggggcggagggaagagtacgacgttctggacaaaaggaggggacgagatcccgagatgggcggaaagcctcagcgaaggaagaatccgcaagaggggctttataacgaactccagaaagataaaatggcagaagcctatagtgagattgggatgaagggagaaaggaggaggggtaaaggtcacgatgggttgtaccaaggattgagcacagccactaaagatacctatgatgcgctccacatgcaggccctgccgccaagacgcgccaagagaagcggatctggcgtgaagcagaccctgaatttcgacctgctgaagctggctggcgacgtggaatccaacccaggccctggccatatgaccgagtacaagcccacggtgcgcctcgccacccgcgacgacgtccccagggccgtacgcaccctcgccgccgcgttcgccgactaccccgccacgcgccacaccgtcgatccggaccgccacatcgagcgggtcaccgagctgcaagaactcttcctcacgcgcgtcgggctcgacatcggcaaggtgtgggtcgcggacgacggcgccgcggtggcggtctggaccacgccggagagcgtcgaagcgggggcggtgttcgccgagatcggcccgcgcatggccgagttgagcggttcccggctggccgcgcagcaacagatggaaggcctcctggcgccgcaccggcccaaggagcccgcgtggttcctggccaccgtcggcgtctcgcccgaccaccagggcaagggtctgggcagcgccgtcgtgctccccggagtggaggcggccgagcgcgccggggtgcccgccttcctggagacctccgcgccccgcaacctccccttctacgagcggctcggcttcaccgtcaccgccgacgtcgaggtgcccgaaggaccgcgcacctggtgcatgacccgcaagcccggtgcctga

SEQ ID NO: 2219 - DNA, 2133 bp, Artificial Sequence
  Synthetic Polynucleotide
atggccttaccagtgaccgccttgctcctgccgctggccttgctgctccacgccgccaggccggcatgcgaagtgcagctgcttgaaagtggcggcggactgattcagcctggcggatctctgagactgagctgtgccgccagcggcttcaccttttctagccacgccatgacctgggtccgacaggcacctggaaaagggcttgaatgggtgtccgccatcagcggctctggcgattacacacactacgccgacagcgtgaagggcagattcaccatcagcagagacaacagcaagaacaccgtgtacctccagatgaacagcctgagagccgaggacagcgccgtgtattattgcgccaaggatgaggatggcggcagcctgcttggacacagaggacaaggcaccctggtcaccgtttcttccggtaccggcggaggcggatctggcggcggaggtagcggtggcggaggatctgaattcggatctctcgaggcaaagcccaccacgactccagcgccgcgaccaccaacaccggcgcccactatcgcgtcgcagcccctgtccctgagaccagaggcgtgtagaccagcggctggaggcgcagtgcacacgagggggctggacttcgcctgtgacagcaacctgtttgtggcctcttggatcgccgtgatgattatcttcagaatcggaatggccgtggctatcttctgctgcttcttcttcccatcctggcggcggaagcggaaagagaagcagtctgagacaagccccaaagagttcctgaccatctacgaggacgtgaaggacctgaaaacccggcggaaccacgaacaagagcagacctttcctggcggaggcagcaccatctacagcatgatccagagccagagcagcgcccctacaagccaagagcctgcctacacactgtactccctgatccagcctagcagaaagagcggcagccggaagagaaatcacagccccagcttcaacagcacgatctacgaagtgatcggcaagagccagccaaaggctcagaaccctgccagactgagccggaaagagctggaaaacttcgacgtgtacagcagcactagtagagtgaagttcagcagaagcgccgacgcccctgcctaccagcagggacagaaccaactgtacaacgagctgaacctgggcagacgggaagagtacgacgtgctggacaagcggagaggcagggaccctgagatgggcggaaagccccagcggagaaagaacccccaggaaggactgtataacgaactccagaaagacaagatggccgaagcctacagcgagatcggcatgaagggcgagcggagaagaggcaagggccacgatggcctgtaccagggcctgagcaccgccaccaaggacacctatgacgccctgcacatgcaggccctgcctccaagaagggccaagcgatctggatctggagcaacaaacttctcactactcaaacaagcaggtgacgtggaggagaatcccgggcctactagaggccatatgaccgagtacaagcccacggtgcgcctcgccacccgcgacgacgtccccagggccgtacgcaccctcgccgccgcgttcgccgactaccccgccacgcgccacaccgtcgatccggaccgccacatcgagcgggtcaccgagctgcaagaactcttcctcacgcgcgtcgggctcgacatcggcaaggtgtgggtcgcggacgacggcgccgcggtggcggtctggaccacgccggagagcgtcgaagcgggggcggtgttcgccgagatcggcccgcgcatggccgagttgagcggttcccggctggccgcgcagcaacagatggaaggcctcctggcgccgcaccggcccaaggagcccgcgtggttcctggccaccgtcggcgtctcgcccgaccaccagggcaagggtctgggcagcgccgtcgtgctccccggagtggaggcggccgagcgcgccggggtgcccgccttcctggagacctccgcgccccgcaacctccccttctacgagcggctcggcttcaccgtcaccgccgacgtcgaggtgcccgaaggaccgcgcacctggtgcatgacccgcaagcccggtgcctga

SEQ ID NO: 2220 - DNA, 3117 bp, Artificial Sequence
  Synthetic Polynucleotide
atggccttaccagtgaccgccttgctcctgccgctggccttgctgctccacgccgccaggccggacatccagatgacacagagccctagcagcctgtctgccagcgtgggagacagagtgaccatcacatgcaaggccagcgaccacatcaacaactggctggcctggtatcagcagaagcctggacaggcccctaagctgctgatctacggcgctaccacactggaaacaggcgtgcccagcagattttctggcagcggctctggcaccgactacaccctgacaatatccagcctccagcctgaggacttcgccacctactactgtcagcagagctggaacaccccttggacattcggccagggcaccaagctggaaatcaagagactcgagacaacacctggcgagagaagtagcctgcctgccttctatcctggcaccagcggctcttgttctggctgtggatctctgagcctgcctctgctggctggactggttgctgctgatgctgtggcctctctgctgattgtgggagccgtgttcctgtgcgccagacctagaagaagccccgctcaagaggacggcaaggtgtacatcaacatgcccggcagaggaagcactagtagagtgaagttcagcagaagcgccgacgcccctgcctaccagcagggacagaaccaactgtacaacgagctgaacctgggcagacgggaagagtacgacgtgctggacaagcggagaggcagggaccctgagatgggcggaaagccccagcggagaaagaacccccaggaaggactgtataacgaactccagaaagacaagatggccgaagcctacagcgagatcggcatgaagggcgagcggagaagaggcaagggccacgatggcctgtaccagggcctgagcaccgccaccaaggacacctatgacgccctgcacatgcaggccctgcctccaagaagggccaagcgatctggatctggagcaacaaacttctcactactcaaacaagcaggtgacgtggaggagaatcccgggcctatggactggatttggcgcatccttttccttgtcggcgctgctaccggcgcgcattccttcgaacaagttcagcttcaacagcctggcgctgagctggtcaaacctggcgcttctgtgaagatgagctgcaaagccagcggctacgccttcagcagctactggatcaactggatgaagcagaaacccggccagggactcgaatggatcggccaaatctatcccggcgacggcgacaccaactacaacggcaagttcaagggcagagccacactgaccgccgatacctctagcagcacagcctacatgcagctgagcagcctgaccagcgaagatagcgccgtgtacttctgtgcccggtccatcacaacagtcgtgggctgcgctatggactattggggccagggaacaagcgtgaccgtgtctagtacgcgtgctaagccaaccaccacgccagctcctagacctcctacaccagctcctacaatcgccagccagcctctgtctctcagacccgaagccgcgagacctgctgctggcggagctgtgcataccagaggactggatttcgcctgcgattccaatctgttcgtggcaagctggattgccgtcatgataattttccgcattggaatggctgtcgcaatcttttgttgtttcttctttccctcctggcgacgcaagcgcaaagaaaagcaaagcgagacaagcccaaaagaatttctcactatatacgaggacgtgaaagatttgaagacgaggcggaatcatgagcaagagcagacatttcctggcgggggctctactatctactcaatgattcaatcccaaagctccgctccgacttcccaagagcccgcttacactctctactcactgatacagccttcaagaaaatcaggctctcggaaacggaatcattccccatccttcaatagtaccatctatgaagtaatcggtaagagtcaacctaaagctcaaaaccccgctcgcttgagccgcaaggagctggaaaacttcgatgtatatagcagctctagacgggttaagttttccagatccgcagacgcacccgcttaccaacaagggcagaaccaactctacaatgaacttaatttggggcggagggaagagtacgacgttctggacaaaaggaggggacgagatcccgagatgggcggaaagcctcagcgaaggaagaatccgcaagaggggctttataacgaactccagaaagataaaatggcagaagcctatagtgagattgggatgaagggagaaaggaggaggggtaaaggtcacgatgggttgtaccaaggattgagcacagccactaaagatacctatgatgcgctccacatgcaggccctgccgccaagacgcgccaagagaagcggatctggcgtgaagcagaccctgaatttcgacctgctgaagctggctggcgacgtggaatccaacccaggccctggccatatgaccgagtacaagcccacggtgcgcctcgccacccgcgacgacgtccccagggccgtacgcaccctcgccgccgcgttcgccgactaccccgccacgcgccacaccgtcgatccggaccgccacatcgagcgggtcaccgagctgcaagaactcttcctcacgcgcgtcgggctcgacatcggcaaggtgtgggtcgcggacgacggcgccgcggtggcggtctggaccacgccggagagcgtcgaagcgggggcggtgttcgccgagatcggcccgcgcatggccgagttgagcggttcccggctggccgcgcagcaacagatggaaggcctcctggcgccgcaccggcccaaggagcccgcgtggttcctggccaccgtcggcgtctcgcccgaccaccagggcaagggtctgggcagcgccgtcgtgctccccggagtggaggcggccgagcgcgccggggtgcccgccttcctggagacctccgcgccccgcaacctccccttctacgagcggctcggcttcaccgtcaccgccgacgtcgaggtgcccgaaggaccgcgcacctggtgcatgacccgcaagcccggtgcctga

SEQ ID NO: 2221 - DNA, 3273 bp, Artificial Sequence
  Synthetic Polynucleotide
atggccttaccagtgaccgccttgctcctgccgctggccttgctgctccacgccgccaggccggcatgcgaagtgcagctgcttgaaagtggcggcggactgattcagcctggcggatctctgagactgagctgtgccgccagcggcttcaccttttctagccacgccatgacctgggtccgacaggcacctggaaaagggcttgaatgggtgtccgccatcagcggctctggcgattacacacactacgccgacagcgtgaagggcagattcaccatcagcagagacaacagcaagaacaccgtgtacctccagatgaacagcctgagagccgaggacagcgccgtgtattattgcgccaaggatgaggatggcggcagcctgcttggacacagaggacaaggcaccctggtcaccgtttcttccggtaccggcggaggcggatctggcggcggaggtagcggtggcggaggatctgaattcggatctctcgagacaacacctggcgagagaagtagcctgcctgccttctatcctggcaccagcggctcttgttctggctgtggatctctgagcctgcctctgctggctggactggttgctgctgatgctgtggcctctctgctgattgtgggagccgtgttcctgtgcgccagacctagaagaagccccgctcaagaggacggcaaggtgtacatcaacatgcccggcagaggaagcactagtagagtgaagttcagcagaagcgccgacgcccctgcctaccagcagggacagaaccaactgtacaacgagctgaacctgggcagacgggaagagtacgacgtgctggacaagcggagaggcagggaccctgagatgggcggaaagccccagcggagaaagaacccccaggaaggactgtataacgaactccagaaagacaagatggccgaagcctacagcgagatcggcatgaagggcgagcggagaagaggcaagggccacgatggcctgtaccagggcctgagcaccgccaccaaggacacctatgacgccctgcacatgcaggccctgcctccaagaagggccaagcgatctggatctggagcaacaaacttctcactactcaaacaagcaggtgacgtggaggagaatcccgggcctatggactggatttggcgcatccttttccttgtcggcgctgctaccggcgcgcattccgggcccgaagtgcagctggttgaatctggcggaggactggttcaggctggcggatctctgagactgtcttgtgccgccagcggcagaacctttagcatgggctggtttagacaggcccctggcaaagagagagagttcgtcgccgccatcacatactctggcggcagcccttactacgccgactctgtgaagggcagattcaccatcagccgggacaacgccaagaacaccgtgtacctccagatgaacagcctgaagcctgaggacaccgccgtgtactactgcgccgccaatccaacatacggcagcgactggaacgccgagaattggggccagggaacccaagtgacagtgtctagcggatccggcggcggaggatctggcggaggcggatctgggggcggaggctctttcgaaggcagcacgcgtgctaagccaaccaccacgccagctcctagacctcctacaccagctcctacaatcgccagccagcctctgtctctcagacccgaagccgcgagacctgctgctggcggagctgtgcataccagaggactggatttcgcctgcgattccaatctgttcgtggcaagctggattgccgtcatgataattttccgcattggaatggctgtcgcaatcttttgttgtttcttctttccctcctggcgacgcaagcgcaaagaaaagcaaagcgagacaagcccaaaagaatttctcactatatacgaggacgtgaaagatttgaagacgaggcggaatcatgagcaagagcagacatttcctggcgggggctctactatctactcaatgattcaatcccaaagctccgctccgacttcccaagagcccgcttacactctctactcactgatacagccttcaagaaaatcaggctctcggaaacggaatcattccccatccttcaatagtaccatctatgaagtaatcggtaagagtcaacctaaagctcaaaaccccgctcgcttgagccgcaaggagctggaaaacttcgatgtatatagcagctctagacgggttaagttttccagatccgcagacgcacccgcttaccaacaagggcagaaccaactctacaatgaacttaatttggggcggagggaagagtacgacgttctggacaaaaggaggggacgagatcccgagatgggcggaaagcctcagcgaaggaagaatccgcaagaggggctttataacgaactccagaaagataaaatggcagaagcctatagtgagattgggatgaagggagaaaggaggaggggtaaaggtcacgatgggttgtaccaaggattgagcacagccactaaagatacctatgatgcgctccacatgcaggccctgccgccaagacgcgccaagagaagcggatctggcgtgaagcagaccctgaatttcgacctgctgaagctggctggcgacgtggaatccaacccaggccctggccatatgaccgagtacaagcccacggtgcgcctcgccacccgcgacgacgtccccagggccgtacgcaccctcgccgccgcgttcgccgactaccccgccacgcgccacaccgtcgatccggaccgccacatcgagcgggtcaccgagctgcaagaactcttcctcacgcgcgtcgggctcgacatcggcaaggtgtgggtcgcggacgacggcgccgcggtggcggtctggaccacgccggagagcgtcgaagcgggggcggtgttcgccgagatcggcccgcgcatggccgagttgagcggttcccggctggccgcgcagcaacagatggaaggcctcctggcgccgcaccggcccaaggagcccgcgtggttcctggccaccgtcggcgtctcgcccgaccaccagggcaagggtctgggcagcgccgtcgtgctccccggagtggaggcggccgagcgcgccggggtgcccgccttcctggagacctccgcgccccgcaacctccccttctacgagcggctcggcttcaccgtcaccgccgacgtcgaggtgcccgaaggaccgcgcacctggtgcatgacccgcaagcccggtgcctga

SEQ ID NO: 2222 - DNA, 3720 bp, Artificial Sequence
  Synthetic Polynucleotide
atggccttaccagtgaccgccttgctcctgccgctggccttgctgctccacgccgccaggccggacatccagatgacacagagccctagcagcctgtctgccagcgtgggagacagagtgaccatcacatgcaaggccagcgaccacatcaacaactggctggcctggtatcagcagaagcctggacaggcccctaagctgctgatctacggcgctaccacactggaaacaggcgtgcccagcagattttctggcagcggctctggcaccgactacaccctgacaatatccagcctccagcctgaggacttcgccacctactactgtcagcagagctggaacaccccttggacattcggccagggcaccaagctggaaatcaagagactcgagggacagcctaaggccaatcctaccgtgacactgttccctccaagcagcgaagaactccaggccaacaaggccacacttgtgtgcctgatctccgacttctaccctggggctgtgacagtggcttggaaggccgatggatctcctgtgaaagccggcgtggaaaccaccaagccatccaagcagagcaacaacaaatacgccgccagctcctacctgagcctgacacctgagcagtggaagtcccacagatcctacagctgccaagtgacccacgaaggcagcaccgtggaaaagacagtggcccctacagagtgcagcggatccacaacacctggcgagagaagtagcctgcctgccttctatcctggcaccagcggctcttgttctggctgtggatctctgagcctgcctctgctggctggactggttgctgctgatgctgtggcctctctgctgattgtgggagccgtgttcctgtgcgccagacctagaagaagccccgctcaagaggacggcaaggtgtacatcaacatgcccggcagaggaagcactagtagagtgaagttcagcagaagcgccgacgcccctgcctaccagcagggacagaaccaactgtacaacgagctgaacctgggcagacgggaagagtacgacgtgctggacaagcggagaggcagggaccctgagatgggcggaaagccccagcggagaaagaacccccaggaaggactgtataacgaactccagaaagacaagatggccgaagcctacagcgagatcggcatgaagggcgagcggagaagaggcaagggccacgatggcctgtaccagggcctgagcaccgccaccaaggacacctatgacgccctgcacatgcaggccctgcctccaagaagggccaagcgatctggatctggagcaacaaacttctcactactcaaacaagcaggtgacgtggaggagaatcccgggcctatggactggatttggcgcatccttttccttgtcggcgctgctaccggcgcgcattccttcgaacaagttcagcttcaacagcctggcgctgagctggtcaaacctggcgcttctgtgaagatgagctgcaaagccagcggctacgccttcagcagctactggatcaactggatgaagcagaaacccggccagggactcgaatggatcggccaaatctatcccggcgacggcgacaccaactacaacggcaagttcaagggcagagccacactgaccgccgatacctctagcagcacagcctacatgcagctgagcagcctgaccagcgaagatagcgccgtgtacttctgtgcccggtccatcacaacagtcgtgggctgcgctatggactattggggccagggaacaagcgtgaccgtgtctagtacgcgtgcctctacaaagggaccctccgtgtttcctctggctcccagcagcaagtctacaagcggaggaacagccgctctgggctgcctggtcaaggattactttcccgagcctgtgaccgtgtcctggaatagcggagcactgacaagcggcgtgcacacctttccagccgtgctgcaaagcagcggcctgtactctctgagcagcgtggtcacagtgcctagctctagcctgggcacccagacctacatctgcaatgtgaaccacaagcctagcaacaccaaggtggacaagagagtggaacccaagagctgtggtaccgctaagccaaccaccacgccagctcctagacctcctacaccagctcctacaatcgccagccagcctctgtctctcagacccgaagccgcgagacctgctgctggcggagctgtgcataccagaggactggatttcgcctgcgattccaatctgttcgtggcaagctggattgccgtcatgataattttccgcattggaatggctgtcgcaatcttttgttgtttcttctttccctcctggcgacgcaagcgcaaagaaaagcaaagcgagacaagcccaaaagaatttctcactatatacgaggacgtgaaagatttgaagacgaggcggaatcatgagcaagagcagacatttcctggcgggggctctactatctactcaatgattcaatcccaaagctccgctccgacttcccaagagcccgcttacactctctactcactgatacagccttcaagaaaatcaggctctcggaaacggaatcattccccatccttcaatagtaccatctatgaagtaatcggtaagagtcaacctaaagctcaaaaccccgctcgcttgagccgcaaggagctggaaaacttcgatgtatatagcagctctagacgggttaagttttccagatccgcagacgcacccgcttaccaacaagggcagaaccaactctacaatgaacttaatttggggcggagggaagagtacgacgttctggacaaaaggaggggacgagatcccgagatgggcggaaagcctcagcgaaggaagaatccgcaagaggggctttataacgaactccagaaagataaaatggcagaagcctatagtgagattgggatgaagggagaaaggaggaggggtaaaggtcacgatgggttgtaccaaggattgagcacagccactaaagatacctatgatgcgctccacatgcaggccctgccgccaagacgcgccaagagaagcggatctggcgtgaagcagaccctgaatttcgacctgctgaagctggctggcgacgtggaatccaacccaggccctggccatatggctacctacgaggtgctgtgcgaggtggcaagaaagctgggcaccgacgacagagaagtggtgctgttcctgctgaacgtgttcatccctcagcctacactggcccagctgatcggtgcactgagagccctgaaagaggaaggccggctgacctttcctctgctggccgaatgcctgttcagagccggaagaagggatctgctgcgggacctgctgcatctggaccccagatttctggaaagacacctggccggcaccatgagctacttcagcccttaccagctgaccgtgctgcacgttgacggcgaactgtgcgccagagatattcggagcctgatcttcctgagcaaggacaccatcggcagccggtctacccctcagacatttctgcactgggtgtactgcatggaaaacctggacctgctcggccccacagatgtggatgccctgatgtccatgctgagaagcctgagcagagtggacctccagagacaggtgcagacactgatgggactgcacctgagcggacctagccacagccagcactacagacacacccct

SEQ ID NO: 2223 - DNA, 3879 bp, Artificial Sequence
  Synthetic Polynucleotide
atggccttaccagtgaccgccttgctcctgccgctggccttgctgctccacgccgccaggccggacatccagatgacacagagccctagcagcctgtctgccagcgtgggagacagagtgaccatcacatgcaaggccagcgaccacatcaacaactggctggcctggtatcagcagaagcctggacaggcccctaagctgctgatctacggcgctaccacactggaaacaggcgtgcccagcagattttctggcagcggctctggcaccgactacaccctgacaatatccagcctccagcctgaggacttcgccacctactactgtcagcagagctggaacaccccttggacattcggccagggcaccaagctggaaatcaagagactcgagggacagcctaaggccaatcctaccgtgacactgttccctccaagcagcgaagaactccaggccaacaaggccacacttgtgtgcctgatctccgacttctaccctggggctgtgacagtggcttggaaggccgatggatctcctgtgaaagccggcgtggaaaccaccaagccatccaagcagagcaacaacaaatacgccgccagctcctacctgagcctgacacctgagcagtggaagtcccacagatcctacagctgccaagtgacccacgaaggcagcaccgtggaaaagacagtggcccctacagagtgcagcggatccacaacacctggcgagagaagtagcctgcctgccttctatcctggcaccagcggctcttgttctggctgtggatctctgagcctgcctctgctggctggactggttgctgctgatgctgtggcctctctgctgattgtgggagccgtgttcctgtgcgccagacctagaagaagccccgctcaagaggacggcaaggtgtacatcaacatgcccggcagaggaagcactagtagagtgaagttcagcagaagcgccgacgcccctgcctaccagcagggacagaaccaactgtacaacgagctgaacctgggcagacgggaagagtacgacgtgctggacaagcggagaggcagggaccctgagatgggcggaaagccccagcggagaaagaacccccaggaaggactgtataacgaactccagaaagacaagatggccgaagcctacagcgagatcggcatgaagggcgagcggagaagaggcaagggccacgatggcctgtaccagggcctgagcaccgccaccaaggacacctatgacgccctgcacatgcaggccctgcctccaagaagggccaagcgatctggatctggagcaacaaacttctcactactcaaacaagcaggtgacgtggaggagaatcccgggcctatggactggatttggcgcatccttttccttgtcggcgctgctaccggcgcgcattccttcgaacaagttcagcttcaacagcctggcgctgagctggtcaaacctggcgcttctgtgaagatgagctgcaaagccagcggctacgccttcagcagctactggatcaactggatgaagcagaaacccggccagggactcgaatggatcggccaaatctatcccggcgacggcgacaccaactacaacggcaagttcaagggcagagccacactgaccgccgatacctctagcagcacagcctacatgcagctgagcagcctgaccagcgaagatagcgccgtgtacttctgtgcccggtccatcacaacagtcgtgggctgcgctatggactattggggccagggaacaagcgtgaccgtgtctagtacgcgtgcctctacaaagggaccctccgtgtttcctctggctcccagcagcaagtctacaagcggaggaacagccgctctgggctgcctggtcaaggattactttcccgagcctgtgaccgtgtcctggaatagcggagcactgacaagcggcgtgcacacctttccagccgtgctgcaaagcagcggcctgtactctctgagcagcgtggtcacagtgcctagctctagcctgggcacccagacctacatctgcaatgtgaaccacaagcctagcaacaccaaggtggacaagagagtggaacccaagagctgtggtaccgctaagccaaccaccacgccagctcctagacctcctacaccagctcctacaatcgccagccagcctctgtctctcagacccgaagccgcgagacctgctgctggcggagctgtgcataccagaggactggatttcgcctgcgattccaatctgttcgtggcaagctggattgccgtcatgataattttccgcattggaatggctgtcgcaatcttttgttgtttcttctttccctcctggcgacgcaagcgcaaagaaaagcaaagcgagacaagcccaaaagaatttctcactatatacgaggacgtgaaagatttgaagacgaggcggaatcatgagcaagagcagacatttcctggcgggggctctactatctactcaatgattcaatcccaaagctccgctccgacttcccaagagcccgcttacactctctactcactgatacagccttcaagaaaatcaggctctcggaaacggaatcattccccatccttcaatagtaccatctatgaagtaatcggtaagagtcaacctaaagctcaaaaccccgctcgcttgagccgcaaggagctggaaaacttcgatgtatatagcagctctagacgggttaagttttccagatccgcagacgcacccgcttaccaacaagggcagaaccaactctacaatgaacttaatttggggcggagggaagagtacgacgttctggacaaaaggaggggacgagatcccgagatgggcggaaagcctcagcgaaggaagaatccgcaagaggggctttataacgaactccagaaagataaaatggcagaagcctatagtgagattgggatgaagggagaaaggaggaggggtaaaggtcacgatgggttgtaccaaggattgagcacagccactaaagatacctatgatgcgctccacatgcaggccctgccgccaagacgcgccaagagaagcggatctggcgtgaagcagaccctgaatttcgacctgctgaagctggctggcgacgtggaatccaacccaggccctggccatatgtccgactccaaggaggtccctagccttccatttttgcgacacttgctcgaagagttggacagccatgaggacagcttgctgctgtttctgtgtcacgacgcggccccgggctgcacgacggtcacgcaagctttgtgctcgcttagccaacagcgcaagctgaccctcgcggctctggtcgagatgctctacgtgctgcagcgtatggatcttctcaagagccgcttcgggctcagcaaggagggggccgagcaattgctgggcacaagctttctcacgcgctaccgcaagctcatggtttgcgtgggtgaggagctcgactcgagcgagctacgcgctctacgcttgttcgcgtgcaacctgaatccgagcctgagcacggcgctttctgagagcagccgctttgtcgagcttgtactcgcgcttgaaaacgtaggactcgtctcgccatcgagtgtttccgtgcttgcggacatgttgcgcactcttcggcgcctcgatttgtgccagcagcttgttgagtacgaacaacaagagcaagccaggtaccgttactgttacgcggcctcgccctcattgccagttcgtacgttacgtcgggggcacggcgcgagtgaacacgagcagctgtgcatgcccgtgcaagaatcctctgacagccccgagctgctgcgcacgcccgtacaagaatcctccagcgacagccccgagcaaacgact

SEQ ID NO: 2224 - DNA, 3756 bp, Artificial Sequence
  Synthetic Polynucleotide
atggccttaccagtgaccgccttgctcctgccgctggccttgctgctccacgccgccaggccggacatccagatgacacagagccctagcagcctgtctgccagcgtgggagacagagtgaccatcacatgcaaggccagcgaccacatcaacaactggctggcctggtatcagcagaagcctggacaggcccctaagctgctgatctacggcgctaccacactggaaacaggcgtgcccagcagattttctggcagcggctctggcaccgactacaccctgacaatatccagcctccagcctgaggacttcgccacctactactgtcagcagagctggaacaccccttggacattcggccagggcaccaagctggaaatcaagagactcgagggacagcctaaggccaatcctaccgtgacactgttccctccaagcagcgaagaactccaggccaacaaggccacacttgtgtgcctgatctccgacttctaccctggggctgtgacagtggcttggaaggccgatggatctcctgtgaaagccggcgtggaaaccaccaagccatccaagcagagcaacaacaaatacgccgccagctcctacctgagcctgacacctgagcagtggaagtcccacagatcctacagctgccaagtgacccacgaaggcagcaccgtggaaaagacagtggcccctacagagtgcagcggatccacaacacctggcgagagaagtagcctgcctgccttctatcctggcaccagcggctcttgttctggctgtggatctctgagcctgcctctgctggctggactggttgctgctgatgctgtggcctctctgctgattgtgggagccgtgttcctgtgcgccagacctagaagaagccccgctcaagaggacggcaaggtgtacatcaacatgcccggcagaggaagcactagtagagtgaagttcagcagaagcgccgacgcccctgcctaccagcagggacagaaccaactgtacaacgagctgaacctgggcagacgggaagagtacgacgtgctggacaagcggagaggcagggaccctgagatgggcggaaagccccagcggagaaagaacccccaggaaggactgtataacgaactccagaaagacaagatggccgaagcctacagcgagatcggcatgaagggcgagcggagaagaggcaagggccacgatggcctgtaccagggcctgagcaccgccaccaaggacacctatgacgccctgcacatgcaggccctgcctccaagaagggccaagcgatctggatctggagcaacaaacttctcactactcaaacaagcaggtgacgtggaggagaatcccgggcctatggactggatttggcgcatccttttccttgtcggcgctgctaccggcgcgcattccttcgaacaagttcagcttcaacagcctggcgctgagctggtcaaacctggcgcttctgtgaagatgagctgcaaagccagcggctacgccttcagcagctactggatcaactggatgaagcagaaacccggccagggactcgaatggatcggccaaatctatcccggcgacggcgacaccaactacaacggcaagttcaagggcagagccacactgaccgccgatacctctagcagcacagcctacatgcagctgagcagcctgaccagcgaagatagcgccgtgtacttctgtgcccggtccatcacaacagtcgtgggctgcgctatggactattggggccagggaacaagcgtgaccgtgtctagtacgcgtgcctctacaaagggaccctccgtgtttcctctggctcccagcagcaagtctacaagcggaggaacagccgctctgggctgcctggtcaaggattactttcccgagcctgtgaccgtgtcctggaatagcggagcactgacaagcggcgtgcacacctttccagccgtgctgcaaagcagcggcctgtactctctgagcagcgtggtcacagtgcctagctctagcctgggcacccagacctacatctgcaatgtgaaccacaagcctagcaacaccaaggtggacaagagagtggaacccaagagctgtggtaccgctaagccaaccaccacgccagctcctagacctcctacaccagctcctacaatcgccagccagcctctgtctctcagacccgaagccgcgagacctgctgctggcggagctgtgcataccagaggactggatttcgcctgcgattccaatctgttcgtggcaagctggattgccgtcatgataattttccgcattggaatggctgtcgcaatcttttgttgtttcttctttccctcctggcgacgcaagcgcaaagaaaagcaaagcgagacaagcccaaaagaatttctcactatatacgaggacgtgaaagatttgaagacgaggcggaatcatgagcaagagcagacatttcctggcgggggctctactatctactcaatgattcaatcccaaagctccgctccgacttcccaagagcccgcttacactctctactcactgatacagccttcaagaaaatcaggctctcggaaacggaatcattccccatccttcaatagtaccatctatgaagtaatcggtaagagtcaacctaaagctcaaaaccccgctcgcttgagccgcaaggagctggaaaacttcgatgtatatagcagctctagacgggttaagttttccagatccgcagacgcacccgcttaccaacaagggcagaaccaactctacaatgaacttaatttggggcggagggaagagtacgacgttctggacaaaaggaggggacgagatcccgagatgggcggaaagcctcagcgaaggaagaatccgcaagaggggctttataacgaactccagaaagataaaatggcagaagcctatagtgagattgggatgaagggagaaaggaggaggggtaaaggtcacgatgggttgtaccaaggattgagcacagccactaaagatacctatgatgcgctccacatgcaggccctgccgccaagacgcgccaagagaagcggatctggcgtgaagcagaccctgaatttcgacctgctgaagctggctggcgacgtggaatccaacccaggccctggccatatgaccgagtacaagcccacggtgcgcctcgccacccgcgacgacgtccccagggccgtacgcaccctcgccgccgcgttcgccgactaccccgccacgcgccacaccgtcgatccggaccgccacatcgagcgggtcaccgagctgcaagaactcttcctcacgcgcgtcgggctcgacatcggcaaggtgtgggtcgcggacgacggcgccgcggtggcggtctggaccacgccggagagcgtcgaagcgggggcggtgttcgccgagatcggcccgcgcatggccgagttgagcggttcccggctggccgcgcagcaacagatggaaggcctcctggcgccgcaccggcccaaggagcccgcgtggttcctggccaccgtcggcgtctcgcccgaccaccagggcaagggtctgggcagcgccgtcgtgctccccggagtggaggcggccgagcgcgccggggtgcccgccttcctggagacctccgcgccccgcaacctccccttctacgagcggctcggcttcaccgtcaccgccgacgtcgaggtgcccgaaggaccgcgcacctggtgcatgacccgcaagcccggtgcctga

SEQ ID NO: 2225 - DNA, 4167 bp, Artificial Sequence
  Synthetic Polynucleotide
atggccttaccagtgaccgccttgctcctgccgctggccttgctgctccacgccgccaggccggaagtgcagctggttgaatctggcggaggactggttcaggctggcggatctctgagactgtcttgtgccgccagcggcagaacctttagcatgggctggtttagacaggcccctggcaaagagagagagttcgtcgccgccatcacatactctggcggcagcccttactacgccgactctgtgaagggcagattcaccatcagccgggacaacgccaagaacaccgtgtacctccagatgaacagcctgaagcctgaggacaccgccgtgtactactgcgccgccaatccaacatacggcagcgactggaacgccgagaattggggccagggaacccaagtgacagtgtctagcggtaccggcggaggcggatctggcggcggaggtagcggtggcggaggatctgaattcgacatccagatgacacagagccctagcagcctgtctgccagcgtgggagacagagtgaccatcacatgcaaggccagcgaccacatcaacaactggctggcctggtatcagcagaagcctggacaggcccctaagctgctgatctacggcgctaccacactggaaacaggcgtgcccagcagattttctggcagcggctctggcaccgactacaccctgacaatatccagcctccagcctgaggacttcgccacctactactgtcagcagagctggaacaccccttggacattcggccagggcaccaagctggaaatcaagagactcgagggacagcctaaggccaatcctaccgtgacactgttccctccaagcagcgaagaactccaggccaacaaggccacacttgtgtgcctgatctccgacttctaccctggggctgtgacagtggcttggaaggccgatggatctcctgtgaaagccggcgtggaaaccaccaagccatccaagcagagcaacaacaaatacgccgccagctcctacctgagcctgacacctgagcagtggaagtcccacagatcctacagctgccaagtgacccacgaaggcagcaccgtggaaaagacagtggcccctacagagtgcagcggatccacaacacctggcgagagaagtagcctgcctgccttctatcctggcaccagcggctcttgttctggctgtggatctctgagcctgcctctgctggctggactggttgctgctgatgctgtggcctctctgctgattgtgggagccgtgttcctgtgcgccagacctagaagaagccccgctcaagaggacggcaaggtgtacatcaacatgcccggcagaggaagcactagtagagtgaagttcagcagaagcgccgacgcccctgcctaccagcagggacagaaccaactgtacaacgagctgaacctgggcagacgggaagagtacgacgtgctggacaagcggagaggcagggaccctgagatgggcggaaagccccagcggagaaagaacccccaggaaggactgtataacgaactccagaaagacaagatggccgaagcctacagcgagatcggcatgaagggcgagcggagaagaggcaagggccacgatggcctgtaccagggcctgagcaccgccaccaaggacacctatgacgccctgcacatgcaggccctgcctccaagaagggccaagcgatctggatctggagcaacaaacttctcactactcaaacaagcaggtgacgtggaggagaatcccgggcctatggactggatttggcgcatccttttccttgtcggcgctgctaccggcgcgcattccttcgaacaagttcagcttcaacagcctggcgctgagctggtcaaacctggcgcttctgtgaagatgagctgcaaagccagcggctacgccttcagcagctactggatcaactggatgaagcagaaacccggccagggactcgaatggatcggccaaatctatcccggcgacggcgacaccaactacaacggcaagttcaagggcagagccacactgaccgccgatacctctagcagcacagcctacatgcagctgagcagcctgaccagcgaagatagcgccgtgtacttctgtgcccggtccatcacaacagtcgtgggctgcgctatggactattggggccagggaacaagcgtgaccgtgtctagtacgcgtgcctctacaaagggaccctccgtgtttcctctggctcccagcagcaagtctacaagcggaggaacagccgctctgggctgcctggtcaaggattactttcccgagcctgtgaccgtgtcctggaatagcggagcactgacaagcggcgtgcacacctttccagccgtgctgcaaagcagcggcctgtactctctgagcagcgtggtcacagtgcctagctctagcctgggcacccagacctacatctgcaatgtgaaccacaagcctagcaacaccaaggtggacaagagagtggaacccaagagctgtggtaccgctaagccaaccaccacgccagctcctagacctcctacaccagctcctacaatcgccagccagcctctgtctctcagacccgaagccgcgagacctgctgctggcggagctgtgcataccagaggactggatttcgcctgcgattccaatctgttcgtggcaagctggattgccgtcatgataattttccgcattggaatggctgtcgcaatcttttgttgtttcttctttccctcctggcgacgcaagcgcaaagaaaagcaaagcgagacaagcccaaaagaatttctcactatatacgaggacgtgaaagatttgaagacgaggcggaatcatgagcaagagcagacatttcctggcgggggctctactatctactcaatgattcaatcccaaagctccgctccgacttcccaagagcccgcttacactctctactcactgatacagccttcaagaaaatcaggctctcggaaacggaatcattccccatccttcaatagtaccatctatgaagtaatcggtaagagtcaacctaaagctcaaaaccccgctcgcttgagccgcaaggagctggaaaacttcgatgtatatagcagctctagacgggttaagttttccagatccgcagacgcacccgcttaccaacaagggcagaaccaactctacaatgaacttaatttggggcggagggaagagtacgacgttctggacaaaaggaggggacgagatcccgagatgggcggaaagcctcagcgaaggaagaatccgcaagaggggctttataacgaactccagaaagataaaatggcagaagcctatagtgagattgggatgaagggagaaaggaggaggggtaaaggtcacgatgggttgtaccaaggattgagcacagccactaaagatacctatgatgcgctccacatgcaggccctgccgccaagacgcgccaagagaagcggatctggcgtgaagcagaccctgaatttcgacctgctgaagctggctggcgacgtggaatccaacccaggccctggccatatgaccgagtacaagcccacggtgcgcctcgccacccgcgacgacgtccccagggccgtacgcaccctcgccgccgcgttcgccgactaccccgccacgcgccacaccgtcgatccggaccgccacatcgagcgggtcaccgagctgcaagaactcttcctcacgcgcgtcgggctcgacatcggcaaggtgtgggtcgcggacgacggcgccgcggtggcggtctggaccacgccggagagcgtcgaagcgggggcggtgttcgccgagatcggcccgcgcatggccgagttgagcggttcccggctggccgcgcagcaacagatggaaggcctcctggcgccgcaccggcccaaggagcccgcgtggttcctggccaccgtcggcgtctcgcccgaccaccagggcaagggtctgggcagcgccgtcgtgctccccggagtggaggcggccgagcgcgccggggtgcccgccttcctggagacctccgcgccccgcaacctccccttctacgagcggctcggcttcaccgtcaccgccgacgtcgaggtgcccgaaggaccgcgcacctggtgcatgacccgcaagcccggtgcctga

SEQ ID NO: 2226 - DNA, 4578 bp, Artificial Sequence
  Synthetic Polynucleotide
atggccttaccagtgaccgccttgctcctgccgctggccttgctgctccacgccgccaggccggaagtgcagctggttgaatctggcggaggactggttcaggctggcggatctctgagactgtcttgtgccgccagcggcagaacctttagcatgggctggtttagacaggcccctggcaaagagagagagttcgtcgccgccatcacatactctggcggcagcccttactacgccgactctgtgaagggcagattcaccatcagccgggacaacgccaagaacaccgtgtacctccagatgaacagcctgaagcctgaggacaccgccgtgtactactgcgccgccaatccaacatacggcagcgactggaacgccgagaattggggccagggaacccaagtgacagtgtctagcggtaccggcggaggcggatctggcggcggaggtagcggtggcggaggatctgaattcgacatccagatgacacagagccctagcagcctgtctgccagcgtgggagacagagtgaccatcacatgcaaggccagcgaccacatcaacaactggctggcctggtatcagcagaagcctggacaggcccctaagctgctgatctacggcgctaccacactggaaacaggcgtgcccagcagattttctggcagcggctctggcaccgactacaccctgacaatatccagcctccagcctgaggacttcgccacctactactgtcagcagagctggaacaccccttggacattcggccagggcaccaagctggaaatcaagagactcgagggacagcctaaggccaatcctaccgtgacactgttccctccaagcagcgaagaactccaggccaacaaggccacacttgtgtgcctgatctccgacttctaccctggggctgtgacagtggcttggaaggccgatggatctcctgtgaaagccggcgtggaaaccaccaagccatccaagcagagcaacaacaaatacgccgccagctcctacctgagcctgacacctgagcagtggaagtcccacagatcctacagctgccaagtgacccacgaaggcagcaccgtggaaaagacagtggcccctacagagtgcagcggatccacaacacctggcgagagaagtagcctgcctgccttctatcctggcaccagcggctcttgttctggctgtggatctctgagcctgcctctgctggctggactggttgctgctgatgctgtggcctctctgctgattgtgggagccgtgttcctgtgcgccagacctagaagaagccccgctcaagaggacggcaaggtgtacatcaacatgcccggcagaggaagcactagtagagtgaagttcagcagaagcgccgacgcccctgcctaccagcagggacagaaccaactgtacaacgagctgaacctgggcagacgggaagagtacgacgtgctggacaagcggagaggcagggaccctgagatgggcggaaagccccagcggagaaagaacccccaggaaggactgtataacgaactccagaaagacaagatggccgaagcctacagcgagatcggcatgaagggcgagcggagaagaggcaagggccacgatggcctgtaccagggcctgagcaccgccaccaaggacacctatgacgccctgcacatgcaggccctgcctccaagaagggccaagcgatctggatctggagcaacaaacttctcactactcaaacaagcaggtgacgtggaggagaatcccgggcctatggactggatttggcgcatccttttccttgtcggcgctgctaccggcgcgcattccgggcccgaagtgcaactggttgaatccggtggcggcctggtgcaagcaggcggatctctcagacttagctgtgccgcctccggcagaaccttcacaatgggatggtttaggcaggctccagggaaagagagagagttcgtcgccgccatctctctgtctcccacactggcctactacgccgactctgtgaaaggccggttcaccatctccagagataatgccaagaacaccgtggtgctgcaaatgaactctctgaaacccgaggatacagccctgtactattgtgccgctgaccggaagtccgtgatgagcatcagacccgattactggggacagggcacacaagtcacagtgtcctctggatccggcggcggaggatctggcggaggcggatctgggggcggaggctctttcgaacaagttcagcttcaacagcctggcgctgagctggtcaaacctggcgcttctgtgaagatgagctgcaaagccagcggctacgccttcagcagctactggatcaactggatgaagcagaaacccggccagggactcgaatggatcggccaaatctatcccggcgacggcgacaccaactacaacggcaagttcaagggcagagccacactgaccgccgatacctctagcagcacagcctacatgcagctgagcagcctgaccagcgaagatagcgccgtgtacttctgtgcccggtccatcacaacagtcgtgggctgcgctatggactattggggccagggaacaagcgtgaccgtgtctagtacgcgtgcctctacaaagggaccctccgtgtttcctctggctcccagcagcaagtctacaagcggaggaacagccgctctgggctgcctggtcaaggattactttcccgagcctgtgaccgtgtcctggaatagcggagcactgacaagcggcgtgcacacctttccagccgtgctgcaaagcagcggcctgtactctctgagcagcgtggtcacagtgcctagctctagcctgggcacccagacctacatctgcaatgtgaaccacaagcctagcaacaccaaggtggacaagagagtggaacccaagagctgtggtaccgctaagccaaccaccacgccagctcctagacctcctacaccagctcctacaatcgccagccagcctctgtctctcagacccgaagccgcgagacctgctgctggcggagctgtgcataccagaggactggatttcgcctgcgattccaatctgttcgtggcaagctggattgccgtcatgataattttccgcattggaatggctgtcgcaatcttttgttgtttcttctttccctcctggcgacgcaagcgcaaagaaaagcaaagcgagacaagcccaaaagaatttctcactatatacgaggacgtgaaagatttgaagacgaggcggaatcatgagcaagagcagacatttcctggcgggggctctactatctactcaatgattcaatcccaaagctccgctccgacttcccaagagcccgcttacactctctactcactgatacagccttcaagaaaatcaggctctcggaaacggaatcattccccatccttcaatagtaccatctatgaagtaatcggtaagagtcaacctaaagctcaaaaccccgctcgcttgagccgcaaggagctggaaaacttcgatgtatatagcagctctagacgggttaagttttccagatccgcagacgcacccgcttaccaacaagggcagaaccaactctacaatgaacttaatttggggcggagggaagagtacgacgttctggacaaaaggaggggacgagatcccgagatgggcggaaagcctcagcgaaggaagaatccgcaagaggggctttataacgaactccagaaagataaaatggcagaagcctatagtgagattgggatgaagggagaaaggaggaggggtaaaggtcacgatgggttgtaccaaggattgagcacagccactaaagatacctatgatgcgctccacatgcaggccctgccgccaagacgcgccaagagaagcggatctggcgtgaagcagaccctgaatttcgacctgctgaagctggctggcgacgtggaatccaacccaggccctggccatatgaccgagtacaagcccacggtgcgcctcgccacccgcgacgacgtccccagggccgtacgcaccctcgccgccgcgttcgccgactaccccgccacgcgccacaccgtcgatccggaccgccacatcgagcgggtcaccgagctgcaagaactcttcctcacgcgcgtcgggctcgacatcggcaaggtgtgggtcgcggacgacggcgccgcggtggcggtctggaccacgccggagagcgtcgaagcgggggcggtgttcgccgagatcggcccgcgcatggccgagttgagcggttcccggctggccgcgcagcaacagatggaaggcctcctggcgccgcaccggcccaaggagcccgcgtggttcctggccaccgtcggcgtctcgcccgaccaccagggcaagggtctgggcagcgccgtcgtgctccccggagtggaggcggccgagcgcgccggggtgcccgccttcctggagacctccgcgccccgcaacctccccttctacgagcggctcggcttcaccgtcaccgccgacgtcgaggtgcccgaaggaccgcgcacctggtgcatgacccgcaagcccggtgcctga

SEQ ID NO: 2227 - DNA, 3777 bp, Artificial Sequence
  Synthetic Polynucleotide
atggccttaccagtgaccgccttgctcctgccgctggccttgctgctccacgccgccaggccggaagtgcagctggttgaatctggcggaggactggttcaggctggcggatctctgagactgtcttgtgccgccagcggcagaacctttagcatgggctggtttagacaggcccctggcaaagagagagagttcgtcgccgccatcacatactctggcggcagcccttactacgccgactctgtgaagggcagattcaccatcagccgggacaacgccaagaacaccgtgtacctccagatgaacagcctgaagcctgaggacaccgccgtgtactactgcgccgccaatccaacatacggcagcgactggaacgccgagaattggggccagggaacccaagtgacagtgtctagcctcgagggacagcctaaggccaatcctaccgtgacactgttccctccaagcagcgaagaactccaggccaacaaggccacacttgtgtgcctgatctccgacttctaccctggggctgtgacagtggcttggaaggccgatggatctcctgtgaaagccggcgtggaaaccaccaagccatccaagcagagcaacaacaaatacgccgccagctcctacctgagcctgacacctgagcagtggaagtcccacagatcctacagctgccaagtgacccacgaaggcagcaccgtggaaaagacagtggcccctacagagtgcagcggatccacaacacctggcgagagaagtagcctgcctgccttctatcctggcaccagcggctcttgttctggctgtggatctctgagcctgcctctgctggctggactggttgctgctgatgctgtggcctctctgctgattgtgggagccgtgttcctgtgcgccagacctagaagaagccccgctcaagaggacggcaaggtgtacatcaacatgcccggcagaggaagcactagtagagtgaagttcagcagaagcgccgacgcccctgcctaccagcagggacagaaccaactgtacaacgagctgaacctgggcagacgggaagagtacgacgtgctggacaagcggagaggcagggaccctgagatgggcggaaagccccagcggagaaagaacccccaggaaggactgtataacgaactccagaaagacaagatggccgaagcctacagcgagatcggcatgaagggcgagcggagaagaggcaagggccacgatggcctgtaccagggcctgagcaccgccaccaaggacacctatgacgccctgcacatgcaggccctgcctccaagaagggccaagcgatctggatctggagcaacaaacttctcactactcaaacaagcaggtgacgtggaggagaatcccgggcctatggactggatttggcgcatccttttccttgtcggcgctgctaccggcgcgcattccgggcccgaagtgcaactggttgaatccggtggcggcctggtgcaagcaggcggatctctcagacttagctgtgccgcctccggcagaaccttcacaatgggatggtttaggcaggctccagggaaagagagagagttcgtcgccgccatctctctgtctcccacactggcctactacgccgactctgtgaaaggccggttcaccatctccagagataatgccaagaacaccgtggtgctgcaaatgaactctctgaaacccgaggatacagccctgtactattgtgccgctgaccggaagtccgtgatgagcatcagacccgattactggggacagggcacacaagtcacagtgtcctctacgcgtgcctctacaaagggaccctccgtgtttcctctggctcccagcagcaagtctacaagcggaggaacagccgctctgggctgcctggtcaaggattactttcccgagcctgtgaccgtgtcctggaatagcggagcactgacaagcggcgtgcacacctttccagccgtgctgcaaagcagcggcctgtactctctgagcagcgtggtcacagtgcctagctctagcctgggcacccagacctacatctgcaatgtgaaccacaagcctagcaacaccaaggtggacaagagagtggaacccaagagctgtggtaccgctaagccaaccaccacgccagctcctagacctcctacaccagctcctacaatcgccagccagcctctgtctctcagacccgaagccgcgagacctgctgctggcggagctgtgcataccagaggactggatttcgcctgcgattccaatctgttcgtggcaagctggattgccgtcatgataattttccgcattggaatggctgtcgcaatcttttgttgtttcttctttccctcctggcgacgcaagcgcaaagaaaagcaaagcgagacaagcccaaaagaatttctcactatatacgaggacgtgaaagatttgaagacgaggcggaatcatgagcaagagcagacatttcctggcgggggctctactatctactcaatgattcaatcccaaagctccgctccgacttcccaagagcccgcttacactctctactcactgatacagccttcaagaaaatcaggctctcggaaacggaatcattccccatccttcaatagtaccatctatgaagtaatcggtaagagtcaacctaaagctcaaaaccccgctcgcttgagccgcaaggagctggaaaacttcgatgtatatagcagctctagacgggttaagttttccagatccgcagacgcacccgcttaccaacaagggcagaaccaactctacaatgaacttaatttggggcggagggaagagtacgacgttctggacaaaaggaggggacgagatcccgagatgggcggaaagcctcagcgaaggaagaatccgcaagaggggctttataacgaactccagaaagataaaatggcagaagcctatagtgagattgggatgaagggagaaaggaggaggggtaaaggtcacgatgggttgtaccaaggattgagcacagccactaaagatacctatgatgcgctccacatgcaggccctgccgccaagacgcgccaagagaagcggatctggcgtgaagcagaccctgaatttcgacctgctgaagctggctggcgacgtggaatccaacccaggccctggccatatgaccgagtacaagcccacggtgcgcctcgccacccgcgacgacgtccccagggccgtacgcaccctcgccgccgcgttcgccgactaccccgccacgcgccacaccgtcgatccggaccgccacatcgagcgggtcaccgagctgcaagaactcttcctcacgcgcgtcgggctcgacatcggcaaggtgtgggtcgcggacgacggcgccgcggtggcggtctggaccacgccggagagcgtcgaagcgggggcggtgttcgccgagatcggcccgcgcatggccgagttgagcggttcccggctggccgcgcagcaacagatggaaggcctcctggcgccgcaccggcccaaggagcccgcgtggttcctggccaccgtcggcgtctcgcccgaccaccagggcaagggtctgggcagcgccgtcgtgctccccggagtggaggcggccgagcgcgccggggtgcccgccttcctggagacctccgcgccccgcaacctccccttctacgagcggctcggcttcaccgtcaccgccgacgtcgaggtgcccgaaggaccgcgcacctggtgcatgacccgcaagcccggtgcctga

SEQ ID NO: 2228 - DNA, 3801 bp, Artificial Sequence
  Synthetic Polynucleotide
atggccttaccagtgaccgccttgctcctgccgctggccttgctgctccacgccgccaggccggacatccagatgacacagagccctagcagcctgtctgccagcgtgggagacagagtgaccatcacatgcaaggccagcgaccacatcaacaactggctggcctggtatcagcagaagcctggacaggcccctaagctgctgatctacggcgctaccacactggaaacaggcgtgcccagcagattttctggcagcggctctggcaccgactacaccctgacaatatccagcctccagcctgaggacttcgccacctactactgtcagcagagctggaacaccccttggacattcggccagggcaccaagctggaaatcaagagactcgaggacctgaagaacgtgttcccacctgaggtggccgtgttcgagcctagcgaggccgagatcagccacacccagaaagccaccctcgtgtgcctggctaccggcttctaccccgaccatgtggaactgtcttggtgggtcaacggcaaagaggtgcacagcggcgtgtctaccgacccccagccactgaaagaacagcccgccctgaacgacagccggtactgcctgagcagcagactgagagtgtccgccaccttctggcagaacccccggaaccacttcagatgccaggtgcagttctacggcctgagcgagaacgacgagtggacccaggacagagccaagcccgtgacccagatcgtgtctgccgaagcctggggcagagccgattgcggatccacaacacctggcgagagaagtagcctgcctgccttctatcctggcaccagcggctcttgttctggctgtggatctctgagcctgcctctgctggctggactggttgctgctgatgctgtggcctctctgctgattgtgggagccgtgttcctgtgcgccagacctagaagaagccccgctcaagaggacggcaaggtgtacatcaacatgcccggcagaggaagcactagtagagtgaagttcagcagaagcgccgacgcccctgcctaccagcagggacagaaccaactgtacaacgagctgaacctgggcagacgggaagagtacgacgtgctggacaagcggagaggcagggaccctgagatgggcggaaagccccagcggagaaagaacccccaggaaggactgtataacgaactccagaaagacaagatggccgaagcctacagcgagatcggcatgaagggcgagcggagaagaggcaagggccacgatggcctgtaccagggcctgagcaccgccaccaaggacacctatgacgccctgcacatgcaggccctgcctccaagaagggccaagcgatctggatctggagcaacaaacttctcactactcaaacaagcaggtgacgtggaggagaatcccgggcctatggactggatttggcgcatccttttccttgtcggcgctgctaccggcgcgcattccttcgaacaagttcagcttcaacagcctggcgctgagctggtcaaacctggcgcttctgtgaagatgagctgcaaagccagcggctacgccttcagcagctactggatcaactggatgaagcagaaacccggccagggactcgaatggatcggccaaatctatcccggcgacggcgacaccaactacaacggcaagttcaagggcagagccacactgaccgccgatacctctagcagcacagcctacatgcagctgagcagcctgaccagcgaagatagcgccgtgtacttctgtgcccggtccatcacaacagtcgtgggctgcgctatggactattggggccagggaacaagcgtgaccgtgtctagtacgcgtatccagaaccctgatcctgccgtgtaccagctgcgggatagcaagagcagcgacaagagcgtgtgtctgttcaccgacttcgacagccagaccaacgtgtcccagagcaaggactccgacgtgtacatcaccgataagaccgtgctggacatgcggagcatggacttcaagagcaactccgccgtggcctggtccaacaagtccgatttcgcctgcgccaacgccttcaacaacagcattatccccgaggacacattcttcccaagccccgagagcagctgcggtaccgctaagccaaccaccacgccagctcctagacctcctacaccagctcctacaatcgccagccagcctctgtctctcagacccgaagccgcgagacctgctgctggcggagctgtgcataccagaggactggatttcgcctgcgattccaatctgttcgtggcaagctggattgccgtcatgataattttccgcattggaatggctgtcgcaatcttttgttgtttcttctttccctcctggcgacgcaagcgcaaagaaaagcaaagcgagacaagcccaaaagaatttctcactatatacgaggacgtgaaagatttgaagacgaggcggaatcatgagcaagagcagacatttcctggcgggggctctactatctactcaatgattcaatcccaaagctccgctccgacttcccaagagcccgcttacactctctactcactgatacagccttcaagaaaatcaggctctcggaaacggaatcattccccatccttcaatagtaccatctatgaagtaatcggtaagagtcaacctaaagctcaaaaccccgctcgcttgagccgcaaggagctggaaaacttcgatgtatatagcagctctagacgggttaagttttccagatccgcagacgcacccgcttaccaacaagggcagaaccaactctacaatgaacttaatttggggcggagggaagagtacgacgttctggacaaaaggaggggacgagatcccgagatgggcggaaagcctcagcgaaggaagaatccgcaagaggggctttataacgaactccagaaagataaaatggcagaagcctatagtgagattgggatgaagggagaaaggaggaggggtaaaggtcacgatgggttgtaccaaggattgagcacagccactaaagatacctatgatgcgctccacatgcaggccctgccgccaagacgcgccaagagaagcggatctggcgtgaagcagaccctgaatttcgacctgctgaagctggctggcgacgtggaatccaacccaggccctggccatatgaccgagtacaagcccacggtgcgcctcgccacccgcgacgacgtccccagggccgtacgcaccctcgccgccgcgttcgccgactaccccgccacgcgccacaccgtcgatccggaccgccacatcgagcgggtcaccgagctgcaagaactcttcctcacgcgcgtcgggctcgacatcggcaaggtgtgggtcgcggacgacggcgccgcggtggcggtctggaccacgccggagagcgtcgaagcgggggcggtgttcgccgagatcggcccgcgcatggccgagttgagcggttcccggctggccgcgcagcaacagatggaaggcctcctggcgccgcaccggcccaaggagcccgcgtggttcctggccaccgtcggcgtctcgcccgaccaccagggcaagggtctgggcagcgccgtcgtgctccccggagtggaggcggccgagcgcgccggggtgcccgccttcctggagacctccgcgccccgcaacctccccttctacgagcggctcggcttcaccgtcaccgccgacgtcgaggtgcccgaaggaccgcgcacctggtgcatgacccgcaagcccggtgcctga

SEQ ID NO: 2229 - DNA, 4212 bp, Artificial Sequence
  Synthetic Polynucleotide
atggccttaccagtgaccgccttgctcctgccgctggccttgctgctccacgccgccaggccggaagtgcagctggttgaatctggcggaggactggttcaggctggcggatctctgagactgtcttgtgccgccagcggcagaacctttagcatgggctggtttagacaggcccctggcaaagagagagagttcgtcgccgccatcacatactctggcggcagcccttactacgccgactctgtgaagggcagattcaccatcagccgggacaacgccaagaacaccgtgtacctccagatgaacagcctgaagcctgaggacaccgccgtgtactactgcgccgccaatccaacatacggcagcgactggaacgccgagaattggggccagggaacccaagtgacagtgtctagcggtaccggcggaggcggatctggcggcggaggtagcggtggcggaggatctgaattcgacatccagatgacacagagccctagcagcctgtctgccagcgtgggagacagagtgaccatcacatgcaaggccagcgaccacatcaacaactggctggcctggtatcagcagaagcctggacaggcccctaagctgctgatctacggcgctaccacactggaaacaggcgtgcccagcagattttctggcagcggctctggcaccgactacaccctgacaatatccagcctccagcctgaggacttcgccacctactactgtcagcagagctggaacaccccttggacattcggccagggcaccaagctggaaatcaagagactcgaggacctgaagaacgtgttcccacctgaggtggccgtgttcgagcctagcgaggccgagatcagccacacccagaaagccaccctcgtgtgcctggctaccggcttctaccccgaccatgtggaactgtcttggtgggtcaacggcaaagaggtgcacagcggcgtgtctaccgacccccagccactgaaagaacagcccgccctgaacgacagccggtactgcctgagcagcagactgagagtgtccgccaccttctggcagaacccccggaaccacttcagatgccaggtgcagttctacggcctgagcgagaacgacgagtggacccaggacagagccaagcccgtgacccagatcgtgtctgccgaagcctggggcagagccgattgcggatccacaacacctggcgagagaagtagcctgcctgccttctatcctggcaccagcggctcttgttctggctgtggatctctgagcctgcctctgctggctggactggttgctgctgatgctgtggcctctctgctgattgtgggagccgtgttcctgtgcgccagacctagaagaagccccgctcaagaggacggcaaggtgtacatcaacatgcccggcagaggaagcactagtagagtgaagttcagcagaagcgccgacgcccctgcctaccagcagggacagaaccaactgtacaacgagctgaacctgggcagacgggaagagtacgacgtgctggacaagcggagaggcagggaccctgagatgggcggaaagccccagcggagaaagaacccccaggaaggactgtataacgaactccagaaagacaagatggccgaagcctacagcgagatcggcatgaagggcgagcggagaagaggcaagggccacgatggcctgtaccagggcctgagcaccgccaccaaggacacctatgacgccctgcacatgcaggccctgcctccaagaagggccaagcgatctggatctggagcaacaaacttctcactactcaaacaagcaggtgacgtggaggagaatcccgggcctatggactggatttggcgcatccttttccttgtcggcgctgctaccggcgcgcattccttcgaacaagttcagcttcaacagcctggcgctgagctggtcaaacctggcgcttctgtgaagatgagctgcaaagccagcggctacgccttcagcagctactggatcaactggatgaagcagaaacccggccagggactcgaatggatcggccaaatctatcccggcgacggcgacaccaactacaacggcaagttcaagggcagagccacactgaccgccgatacctctagcagcacagcctacatgcagctgagcagcctgaccagcgaagatagcgccgtgtacttctgtgcccggtccatcacaacagtcgtgggctgcgctatggactattggggccagggaacaagcgtgaccgtgtctagtacgcgtatccagaaccctgatcctgccgtgtaccagctgcgggatagcaagagcagcgacaagagcgtgtgtctgttcaccgacttcgacagccagaccaacgtgtcccagagcaaggactccgacgtgtacatcaccgataagaccgtgctggacatgcggagcatggacttcaagagcaactccgccgtggcctggtccaacaagtccgatttcgcctgcgccaacgccttcaacaacagcattatccccgaggacacattcttcccaagccccgagagcagctgcggtaccgctaagccaaccaccacgccagctcctagacctcctacaccagctcctacaatcgccagccagcctctgtctctcagacccgaagccgcgagacctgctgctggcggagctgtgcataccagaggactggatttcgcctgcgattccaatctgttcgtggcaagctggattgccgtcatgataattttccgcattggaatggctgtcgcaatcttttgttgtttcttctttccctcctggcgacgcaagcgcaaagaaaagcaaagcgagacaagcccaaaagaatttctcactatatacgaggacgtgaaagatttgaagacgaggcggaatcatgagcaagagcagacatttcctggcgggggctctactatctactcaatgattcaatcccaaagctccgctccgacttcccaagagcccgcttacactctctactcactgatacagccttcaagaaaatcaggctctcggaaacggaatcattccccatccttcaatagtaccatctatgaagtaatcggtaagagtcaacctaaagctcaaaaccccgctcgcttgagccgcaaggagctggaaaacttcgatgtatatagcagctctagacgggttaagttttccagatccgcagacgcacccgcttaccaacaagggcagaaccaactctacaatgaacttaatttggggcggagggaagagtacgacgttctggacaaaaggaggggacgagatcccgagatgggcggaaagcctcagcgaaggaagaatccgcaagaggggctttataacgaactccagaaagataaaatggcagaagcctatagtgagattgggatgaagggagaaaggaggaggggtaaaggtcacgatgggttgtaccaaggattgagcacagccactaaagatacctatgatgcgctccacatgcaggccctgccgccaagacgcgccaagagaagcggatctggcgtgaagcagaccctgaatttcgacctgctgaagctggctggcgacgtggaatccaacccaggccctggccatatgaccgagtacaagcccacggtgcgcctcgccacccgcgacgacgtccccagggccgtacgcaccctcgccgccgcgttcgccgactaccccgccacgcgccacaccgtcgatccggaccgccacatcgagcgggtcaccgagctgcaagaactcttcctcacgcgcgtcgggctcgacatcggcaaggtgtgggtcgcggacgacggcgccgcggtggcggtctggaccacgccggagagcgtcgaagcgggggcggtgttcgccgagatcggcccgcgcatggccgagttgagcggttcccggctggccgcgcagcaacagatggaaggcctcctggcgccgcaccggcccaaggagcccgcgtggttcctggccaccgtcggcgtctcgcccgaccaccagggcaagggtctgggcagcgccgtcgtgctccccggagtggaggcggccgagcgcgccggggtgcccgccttcctggagacctccgcgccccgcaacctccccttctacgagcggctcggcttcaccgtcaccgccgacgtcgaggtgcccgaaggaccgcgcacctggtgcatgacccgcaagcccggtgcctga

SEQ ID NO: 2230 - DNA, 4623 bp, Artificial Sequence
  Synthetic Polynucleotide
atggccttaccagtgaccgccttgctcctgccgctggccttgctgctccacgccgccaggccggaagtgcagctggttgaatctggcggaggactggttcaggctggcggatctctgagactgtcttgtgccgccagcggcagaacctttagcatgggctggtttagacaggcccctggcaaagagagagagttcgtcgccgccatcacatactctggcggcagcccttactacgccgactctgtgaagggcagattcaccatcagccgggacaacgccaagaacaccgtgtacctccagatgaacagcctgaagcctgaggacaccgccgtgtactactgcgccgccaatccaacatacggcagcgactggaacgccgagaattggggccagggaacccaagtgacagtgtctagcggtaccggcggaggcggatctggcggcggaggtagcggtggcggaggatctgaattcgacatccagatgacacagagccctagcagcctgtctgccagcgtgggagacagagtgaccatcacatgcaaggccagcgaccacatcaacaactggctggcctggtatcagcagaagcctggacaggcccctaagctgctgatctacggcgctaccacactggaaacaggcgtgcccagcagattttctggcagcggctctggcaccgactacaccctgacaatatccagcctccagcctgaggacttcgccacctactactgtcagcagagctggaacaccccttggacattcggccagggcaccaagctggaaatcaagagactcgaggacctgaagaacgtgttcccacctgaggtggccgtgttcgagcctagcgaggccgagatcagccacacccagaaagccaccctcgtgtgcctggctaccggcttctaccccgaccatgtggaactgtcttggtgggtcaacggcaaagaggtgcacagcggcgtgtctaccgacccccagccactgaaagaacagcccgccctgaacgacagccggtactgcctgagcagcagactgagagtgtccgccaccttctggcagaacccccggaaccacttcagatgccaggtgcagttctacggcctgagcgagaacgacgagtggacccaggacagagccaagcccgtgacccagatcgtgtctgccgaagcctggggcagagccgattgcggatccacaacacctggcgagagaagtagcctgcctgccttctatcctggcaccagcggctcttgttctggctgtggatctctgagcctgcctctgctggctggactggttgctgctgatgctgtggcctctctgctgattgtgggagccgtgttcctgtgcgccagacctagaagaagccccgctcaagaggacggcaaggtgtacatcaacatgcccggcagaggaagcactagtagagtgaagttcagcagaagcgccgacgcccctgcctaccagcagggacagaaccaactgtacaacgagctgaacctgggcagacgggaagagtacgacgtgctggacaagcggagaggcagggaccctgagatgggcggaaagccccagcggagaaagaacccccaggaaggactgtataacgaactccagaaagacaagatggccgaagcctacagcgagatcggcatgaagggcgagcggagaagaggcaagggccacgatggcctgtaccagggcctgagcaccgccaccaaggacacctatgacgccctgcacatgcaggccctgcctccaagaagggccaagcgatctggatctggagcaacaaacttctcactactcaaacaagcaggtgacgtggaggagaatcccgggcctatggactggatttggcgcatccttttccttgtcggcgctgctaccggcgcgcattccgggcccgaagtgcaactggttgaatccggtggcggcctggtgcaagcaggcggatctctcagacttagctgtgccgcctccggcagaaccttcacaatgggatggtttaggcaggctccagggaaagagagagagttcgtcgccgccatctctctgtctcccacactggcctactacgccgactctgtgaaaggccggttcaccatctccagagataatgccaagaacaccgtggtgctgcaaatgaactctctgaaacccgaggatacagccctgtactattgtgccgctgaccggaagtccgtgatgagcatcagacccgattactggggacagggcacacaagtcacagtgtcctctggatccggcggcggaggatctggcggaggcggatctgggggcggaggctctttcgaacaagttcagcttcaacagcctggcgctgagctggtcaaacctggcgcttctgtgaagatgagctgcaaagccagcggctacgccttcagcagctactggatcaactggatgaagcagaaacccggccagggactcgaatggatcggccaaatctatcccggcgacggcgacaccaactacaacggcaagttcaagggcagagccacactgaccgccgatacctctagcagcacagcctacatgcagctgagcagcctgaccagcgaagatagcgccgtgtacttctgtgcccggtccatcacaacagtcgtgggctgcgctatggactattggggccagggaacaagcgtgaccgtgtctagtacgcgtatccagaaccctgatcctgccgtgtaccagctgcgggatagcaagagcagcgacaagagcgtgtgtctgttcaccgacttcgacagccagaccaacgtgtcccagagcaaggactccgacgtgtacatcaccgataagaccgtgctggacatgcggagcatggacttcaagagcaactccgccgtggcctggtccaacaagtccgatttcgcctgcgccaacgccttcaacaacagcattatccccgaggacacattcttcccaagccccgagagcagctgcggtaccgctaagccaaccaccacgccagctcctagacctcctacaccagctcctacaatcgccagccagcctctgtctctcagacccgaagccgcgagacctgctgctggcggagctgtgcataccagaggactggatttcgcctgcgattccaatctgttcgtggcaagctggattgccgtcatgataattttccgcattggaatggctgtcgcaatcttttgttgtttcttctttccctcctggcgacgcaagcgcaaagaaaagcaaagcgagacaagcccaaaagaatttctcactatatacgaggacgtgaaagatttgaagacgaggcggaatcatgagcaagagcagacatttcctggcgggggctctactatctactcaatgattcaatcccaaagctccgctccgacttcccaagagcccgcttacactctctactcactgatacagccttcaagaaaatcaggctctcggaaacggaatcattccccatccttcaatagtaccatctatgaagtaatcggtaagagtcaacctaaagctcaaaaccccgctcgcttgagccgcaaggagctggaaaacttcgatgtatatagcagctctagacgggttaagttttccagatccgcagacgcacccgcttaccaacaagggcagaaccaactctacaatgaacttaatttggggcggagggaagagtacgacgttctggacaaaaggaggggacgagatcccgagatgggcggaaagcctcagcgaaggaagaatccgcaagaggggctttataacgaactccagaaagataaaatggcagaagcctatagtgagattgggatgaagggagaaaggaggaggggtaaaggtcacgatgggttgtaccaaggattgagcacagccactaaagatacctatgatgcgctccacatgcaggccctgccgccaagacgcgccaagagaagcggatctggcgtgaagcagaccctgaatttcgacctgctgaagctggctggcgacgtggaatccaacccaggccctggccatatgaccgagtacaagcccacggtgcgcctcgccacccgcgacgacgtccccagggccgtacgcaccctcgccgccgcgttcgccgactaccccgccacgcgccacaccgtcgatccggaccgccacatcgagcgggtcaccgagctgcaagaactcttcctcacgcgcgtcgggctcgacatcggcaaggtgtgggtcgcggacgacggcgccgcggtggcggtctggaccacgccggagagcgtcgaagcgggggcggtgttcgccgagatcggcccgcgcatggccgagttgagcggttcccggctggccgcgcagcaacagatggaaggcctcctggcgccgcaccggcccaaggagcccgcgtggttcctggccaccgtcggcgtctcgcccgaccaccagggcaagggtctgggcagcgccgtcgtgctccccggagtggaggcggccgagcgcgccggggtgcccgccttcctggagacctccgcgccccgcaacctccccttctacgagcggctcggcttcaccgtcaccgccgacgtcgaggtgcccgaaggaccgcgcacctggtgcatgacccgcaagcccggtgcctga

SEQ ID NO: 2231 - DNA, 3822 bp, Artificial Sequence
  Synthetic Polynucleotide
atggccttaccagtgaccgccttgctcctgccgctggccttgctgctccacgccgccaggccggaagtgcagctggttgaatctggcggaggactggttcaggctggcggatctctgagactgtcttgtgccgccagcggcagaacctttagcatgggctggtttagacaggcccctggcaaagagagagagttcgtcgccgccatcacatactctggcggcagcccttactacgccgactctgtgaagggcagattcaccatcagccgggacaacgccaagaacaccgtgtacctccagatgaacagcctgaagcctgaggacaccgccgtgtactactgcgccgccaatccaacatacggcagcgactggaacgccgagaattggggccagggaacccaagtgacagtgtctagcctcgaggacctgaagaacgtgttcccacctgaggtggccgtgttcgagcctagcgaggccgagatcagccacacccagaaagccaccctcgtgtgcctggctaccggcttctaccccgaccatgtggaactgtcttggtgggtcaacggcaaagaggtgcacagcggcgtgtctaccgacccccagccactgaaagaacagcccgccctgaacgacagccggtactgcctgagcagcagactgagagtgtccgccaccttctggcagaacccccggaaccacttcagatgccaggtgcagttctacggcctgagcgagaacgacgagtggacccaggacagagccaagcccgtgacccagatcgtgtctgccgaagcctggggcagagccgattgcggatccacaacacctggcgagagaagtagcctgcctgccttctatcctggcaccagcggctcttgttctggctgtggatctctgagcctgcctctgctggctggactggttgctgctgatgctgtggcctctctgctgattgtgggagccgtgttcctgtgcgccagacctagaagaagccccgctcaagaggacggcaaggtgtacatcaacatgcccggcagaggaagcactagtagagtgaagttcagcagaagcgccgacgcccctgcctaccagcagggacagaaccaactgtacaacgagctgaacctgggcagacgggaagagtacgacgtgctggacaagcggagaggcagggaccctgagatgggcggaaagccccagcggagaaagaacccccaggaaggactgtataacgaactccagaaagacaagatggccgaagcctacagcgagatcggcatgaagggcgagcggagaagaggcaagggccacgatggcctgtaccagggcctgagcaccgccaccaaggacacctatgacgccctgcacatgcaggccctgcctccaagaagggccaagcgatctggatctggagcaacaaacttctcactactcaaacaagcaggtgacgtggaggagaatcccgggcctatggactggatttggcgcatccttttccttgtcggcgctgctaccggcgcgcattccgggcccgaagtgcaactggttgaatccggtggcggcctggtgcaagcaggcggatctctcagacttagctgtgccgcctccggcagaaccttcacaatgggatggtttaggcaggctccagggaaagagagagagttcgtcgccgccatctctctgtctcccacactggcctactacgccgactctgtgaaaggccggttcaccatctccagagataatgccaagaacaccgtggtgctgcaaatgaactctctgaaacccgaggatacagccctgtactattgtgccgctgaccggaagtccgtgatgagcatcagacccgattactggggacagggcacacaagtcacagtgtcctctacgcgtatccagaaccctgatcctgccgtgtaccagctgcgggatagcaagagcagcgacaagagcgtgtgtctgttcaccgacttcgacagccagaccaacgtgtcccagagcaaggactccgacgtgtacatcaccgataagaccgtgctggacatgcggagcatggacttcaagagcaactccgccgtggcctggtccaacaagtccgatttcgcctgcgccaacgccttcaacaacagcattatccccgaggacacattcttcccaagccccgagagcagctgcggtaccgctaagccaaccaccacgccagctcctagacctcctacaccagctcctacaatcgccagccagcctctgtctctcagacccgaagccgcgagacctgctgctggcggagctgtgcataccagaggactggatttcgcctgcgattccaatctgttcgtggcaagctggattgccgtcatgataattttccgcattggaatggctgtcgcaatcttttgttgtttcttctttccctcctggcgacgcaagcgcaaagaaaagcaaagcgagacaagcccaaaagaatttctcactatatacgaggacgtgaaagatttgaagacgaggcggaatcatgagcaagagcagacatttcctggcgggggctctactatctactcaatgattcaatcccaaagctccgctccgacttcccaagagcccgcttacactctctactcactgatacagccttcaagaaaatcaggctctcggaaacggaatcattccccatccttcaatagtaccatctatgaagtaatcggtaagagtcaacctaaagctcaaaaccccgctcgcttgagccgcaaggagctggaaaacttcgatgtatatagcagctctagacgggttaagttttccagatccgcagacgcacccgcttaccaacaagggcagaaccaactctacaatgaacttaatttggggcggagggaagagtacgacgttctggacaaaaggaggggacgagatcccgagatgggcggaaagcctcagcgaaggaagaatccgcaagaggggctttataacgaactccagaaagataaaatggcagaagcctatagtgagattgggatgaagggagaaaggaggaggggtaaaggtcacgatgggttgtaccaaggattgagcacagccactaaagatacctatgatgcgctccacatgcaggccctgccgccaagacgcgccaagagaagcggatctggcgtgaagcagaccctgaatttcgacctgctgaagctggctggcgacgtggaatccaacccaggccctggccatatgaccgagtacaagcccacggtgcgcctcgccacccgcgacgacgtccccagggccgtacgcaccctcgccgccgcgttcgccgactaccccgccacgcgccacaccgtcgatccggaccgccacatcgagcgggtcaccgagctgcaagaactcttcctcacgcgcgtcgggctcgacatcggcaaggtgtgggtcgcggacgacggcgccgcggtggcggtctggaccacgccggagagcgtcgaagcgggggcggtgttcgccgagatcggcccgcgcatggccgagttgagcggttcccggctggccgcgcagcaacagatggaaggcctcctggcgccgcaccggcccaaggagcccgcgtggttcctggccaccgtcggcgtctcgcccgaccaccagggcaagggtctgggcagcgccgtcgtgctccccggagtggaggcggccgagcgcgccggggtgcccgccttcctggagacctccgcgccccgcaacctccccttctacgagcggctcggcttcaccgtcaccgccgacgtcgaggtgcccgaaggaccgcgcacctggtgcatgacccgcaagcccggtgcctga

SEQ ID NO: 2232 - DNA, 1758 bp, Artificial Sequence; identical to SEQ ID NO: 2037
  Synthetic Polynucleotide

SEQ ID NO: 2233 - DNA, 3492 bp, Artificial Sequence
  Synthetic Polynucleotide
atggccttaccagtgaccgccttgctcctgccgctggccttgctgctccacgccgccaggccggacatccagatgacacagagccctagcagcctgtctgccagcgtgggagacagagtgaccatcacatgcaaggccagcgaccacatcaacaactggctggcctggtatcagcagaagcctggacaggcccctaagctgctgatctacggcgctaccacactggaaacaggcgtgcccagcagattttctggcagcggctctggcaccgactacaccctgacaatatccagcctccagcctgaggacttcgccacctactactgtcagcagagctggaacaccccttggacattcggccagggcaccaagctggaaatcaagagactcgaggcaaagcccaccacgactccagcgccgcgaccaccaacaccggcgcccactatcgcgtcgcagcccctgtccctgagaccagaggcggccagaccagcggctggaggcgcagtgcacacgagggggctggacttcgcctgtgacagcaacctgtttgtggcctcttggatcgccgtgatgattatcttcagaatcggaatggccgtggctatcttctgctgcttcttcttcccatcctggcggcggaagcggaaagagaagcagtctgagacaagccccaaagagttcctgaccatctacgaggacgtgaaggacctgaaaacccggcggaaccacgaacaagagcagacctttcctggcggaggcagcaccatctacagcatgatccagagccagagcagcgcccctacaagccaagagcctgcctacacactgtactccctgatccagcctagcagaaagagcggcagccggaagagaaatcacagccccagcttcaacagcacgatctacgaagtgatcggcaagagccagccaaaggctcagaaccctgccagactgagccggaaagagctggaaaacttcgacgtgtacagcagcactagtagagtgaagttcagcagaagcgccgacgcccctgcctaccagcagggacagaaccaactgtacaacgagctgaacctgggcagacgggaagagtacgacgtgctggacaagcggagaggcagggaccctgagatgggcggaaagccccagcggagaaagaacccccaggaaggactgtataacgaactccagaaagacaagatggccgaagcctacagcgagatcggcatgaagggcgagcggagaagaggcaagggccacgatggcctgtaccagggcctgagcaccgccaccaaggacacctatgacgccctgcacatgcaggccctgcctccaagaagggccaagcgatctggatctggagcaacaaacttctcactactcaaacaagcaggtgacgtggaggagaatcccgggcctatggactggatttggcgcatccttttccttgtcggcgctgctaccggcgcgcattccttcgaacaagttcagcttcaacagcctggcgctgagctggtcaaacctggcgcttctgtgaagatgagctgcaaagccagcggctacgccttcagcagctactggatcaactggatgaagcagaaacccggccagggactcgaatggatcggccaaatctatcccggcgacggcgacaccaactacaacggcaagttcaagggcagagccacactgaccgccgatacctctagcagcacagcctacatgcagctgagcagcctgaccagcgaagatagcgccgtgtacttctgtgcccggtccatcacaacagtcgtgggctgcgctatggactattggggccagggaacaagcgtgaccgtgtctagtacgcgtgctaagccaaccaccacgccagctcctagacctcctacaccagctcctacaatcgccagccagcctctgtctctcagacccgaagccgcgagacctgctgctggcggagctgtgcataccagaggactggatttcgcctgcgattccaatctgttcgtggcaagctggattgccgtcatgataattttccgcattggaatggctgtcgcaatcttttgttgtttcttctttccctcctggcgacgcaagcgcaaagaaaagcaaagcgagacaagcccaaaagaatttctcactatatacgaggacgtgaaagatttgaagacgaggcggaatcatgagcaagagcagacatttcctggcgggggctctactatctactcaatgattcaatcccaaagctccgctccgacttcccaagagcccgcttacactctctactcactgatacagccttcaagaaaatcaggctctcggaaacggaatcattccccatccttcaatagtaccatctatgaagtaatcggtaagagtcaacctaaagctcaaaaccccgctcgcttgagccgcaaggagctggaaaacttcgatgtatatagcagctctagacgggttaagttttccagatccgcagacgcacccgcttaccaacaagggcagaaccaactctacaatgaacttaatttggggcggagggaagagtacgacgttctggacaaaaggaggggacgagatcccgagatgggcggaaagcctcagcgaaggaagaatccgcaagaggggctttataacgaactccagaaagataaaatggcagaagcctatagtgagattgggatgaagggagaaaggaggaggggtaaaggtcacgatgggttgtaccaaggattgagcacagccactaaagatacctatgatgcgctccacatgcaggccctgccgccaagacgcgccaagagaagcggatctggcgtgaagcagaccctgaatttcgacctgctgaagctggctggcgacgtggaatccaacccaggccctggccatatgaccgagtacaagcccacggtgcgcctcgccacccgcgacgacgtccccagggccgtacgcaccctcgccgccgcgttcgccgactaccccgccacgcgccacaccgtcgatccggaccgccacatcgagcgggtcaccgagctgcaagaactcttcctcacgcgcgtcgggctcgacatcggcaaggtgtgggtcgcggacgacggcgccgcggtggcggtctggaccacgccggagagcgtcgaagcgggggcggtgttcgccgagatcggcccgcgcatggccgagttgagcggttcccggctggccgcgcagcaacagatggaaggcctcctggcgccgcaccggcccaaggagcccgcgtggttcctggccaccgtcggcgtctcgcccgaccaccagggcaagggtctgggcagcgccgtcgtgctccccggagtggaggcggccgagcgcgccggggtgcccgccttcctggagacctccgcgccccgcaacctccccttctacgagcggctcggcttcaccgtcaccgccgacgtcgaggtgcccgaaggaccgcgcacctggtgcatgacccgcaagcccggtgcctga

SEQ ID NO: 2234 - DNA, 3648 bp, Artificial Sequence
  Synthetic Polynucleotide
atggccttaccagtgaccgccttgctcctgccgctggccttgctgctccacgccgccaggccggcatgcgaagtgcagctgcttgaaagtggcggcggactgattcagcctggcggatctctgagactgagctgtgccgccagcggcttcaccttttctagccacgccatgacctgggtccgacaggcacctggaaaagggcttgaatgggtgtccgccatcagcggctctggcgattacacacactacgccgacagcgtgaagggcagattcaccatcagcagagacaacagcaagaacaccgtgtacctccagatgaacagcctgagagccgaggacagcgccgtgtattattgcgccaaggatgaggatggcggcagcctgcttggacacagaggacaaggcaccctggtcaccgtttcttccggtaccggcggaggcggatctggcggcggaggtagcggtggcggaggatctgaattcggatctctcgaggcaaagcccaccacgactccagcgccgcgaccaccaacaccggcgcccactatcgcgtcgcagcccctgtccctgagaccagaggcggccagaccagcggctggaggcgcagtgcacacgagggggctggacttcgcctgtgacagcaacctgtttgtggcctcttggatcgccgtgatgattatcttcagaatcggaatggccgtggctatcttctgctgcttcttcttcccatcctggcggcggaagcggaaagagaagcagtctgagacaagccccaaagagttcctgaccatctacgaggacgtgaaggacctgaaaacccggcggaaccacgaacaagagcagacctttcctggcggaggcagcaccatctacagcatgatccagagccagagcagcgcccctacaagccaagagcctgcctacacactgtactccctgatccagcctagcagaaagagcggcagccggaagagaaatcacagccccagcttcaacagcacgatctacgaagtgatcggcaagagccagccaaaggctcagaaccctgccagactgagccggaaagagctggaaaacttcgacgtgtacagcagcactagtagagtgaagttcagcagaagcgccgacgcccctgcctaccagcagggacagaaccaactgtacaacgagctgaacctgggcagacgggaagagtacgacgtgctggacaagcggagaggcagggaccctgagatgggcggaaagccccagcggagaaagaacccccaggaaggactgtataacgaactccagaaagacaagatggccgaagcctacagcgagatcggcatgaagggcgagcggagaagaggcaagggccacgatggcctgtaccagggcctgagcaccgccaccaaggacacctatgacgccctgcacatgcaggccctgcctccaagaagggccaagcgatctggatctggagcaacaaacttctcactactcaaacaagcaggtgacgtggaggagaatcccgggcctatggactggatttggcgcatccttttccttgtcggcgctgctaccggcgcgcattccgggcccgaagtgcagctggttgaatctggcggaggactggttcaggctggcggatctctgagactgtcttgtgccgccagcggcagaacctttagcatgggctggtttagacaggcccctggcaaagagagagagttcgtcgccgccatcacatactctggcggcagcccttactacgccgactctgtgaagggcagattcaccatcagccgggacaacgccaagaacaccgtgtacctccagatgaacagcctgaagcctgaggacaccgccgtgtactactgcgccgccaatccaacatacggcagcgactggaacgccgagaattggggccagggaacccaagtgacagtgtctagcggatccggcggcggaggatctggcggaggcggatctgggggcggaggctctttcgaaggcagcacgcgtgctaagccaaccaccacgccagctcctagacctcctacaccagctcctacaatcgccagccagcctctgtctctcagacccgaagccgcgagacctgctgctggcggagctgtgcataccagaggactggatttcgcctgcgattccaatctgttcgtggcaagctggattgccgtcatgataattttccgcattggaatggctgtcgcaatcttttgttgtttcttctttccctcctggcgacgcaagcgcaaagaaaagcaaagcgagacaagcccaaaagaatttctcactatatacgaggacgtgaaagatttgaagacgaggcggaatcatgagcaagagcagacatttcctggcgggggctctactatctactcaatgattcaatcccaaagctccgctccgacttcccaagagcccgcttacactctctactcactgatacagccttcaagaaaatcaggctctcggaaacggaatcattccccatccttcaatagtaccatctatgaagtaatcggtaagagtcaacctaaagctcaaaaccccgctcgcttgagccgcaaggagctggaaaacttcgatgtatatagcagctctagacgggttaagttttccagatccgcagacgcacccgcttaccaacaagggcagaaccaactctacaatgaacttaatttggggcggagggaagagtacgacgttctggacaaaaggaggggacgagatcccgagatgggcggaaagcctcagcgaaggaagaatccgcaagaggggctttataacgaactccagaaagataaaatggcagaagcctatagtgagattgggatgaagggagaaaggaggaggggtaaaggtcacgatgggttgtaccaaggattgagcacagccactaaagatacctatgatgcgctccacatgcaggccctgccgccaagacgcgccaagagaagcggatctggcgtgaagcagaccctgaatttcgacctgctgaagctggctggcgacgtggaatccaacccaggccctggccatatgaccgagtacaagcccacggtgcgcctcgccacccgcgacgacgtccccagggccgtacgcaccctcgccgccgcgttcgccgactaccccgccacgcgccacaccgtcgatccggaccgccacatcgagcgggtcaccgagctgcaagaactcttcctcacgcgcgtcgggctcgacatcggcaaggtgtgggtcgcggacgacggcgccgcggtggcggtctggaccacgccggagagcgtcgaagcgggggcggtgttcgccgagatcggcccgcgcatggccgagttgagcggttcccggctggccgcgcagcaacagatggaaggcctcctggcgccgcaccggcccaaggagcccgcgtggttcctggccaccgtcggcgtctcgcccgaccaccagggcaagggtctgggcagcgccgtcgtgctccccggagtggaggcggccgagcgcgccggggtgcccgccttcctggagacctccgcgccccgcaacctccccttctacgagcggctcggcttcaccgtcaccgccgacgtcgaggtgcccgaaggaccgcgcacctggtgcatgacccgcaagcccggtgcctga

SEQ ID NO: 2235 - DNA, 4095 bp, Artificial Sequence
  Synthetic Polynucleotide
atggccttaccagtgaccgccttgctcctgccgctggccttgctgctccacgccgccaggccggacatccagatgacacagagccctagcagcctgtctgccagcgtgggagacagagtgaccatcacatgcaaggccagcgaccacatcaacaactggctggcctggtatcagcagaagcctggacaggcccctaagctgctgatctacggcgctaccacactggaaacaggcgtgcccagcagattttctggcagcggctctggcaccgactacaccctgacaatatccagcctccagcctgaggacttcgccacctactactgtcagcagagctggaacaccccttggacattcggccagggcaccaagctggaaatcaagagactcgagggacagcctaaggccaatcctaccgtgacactgttccctccaagcagcgaagaactccaggccaacaaggccacacttgtgtgcctgatctccgacttctaccctggggctgtgacagtggcttggaaggccgatggatctcctgtgaaagccggcgtggaaaccaccaagccatccaagcagagcaacaacaaatacgccgccagctcctacctgagcctgacacctgagcagtggaagtcccacagatcctacagctgccaagtgacccacgaaggcagcaccgtggaaaagacagtggcccctacagagtgcagcggatccgcaaagcccaccacgactccagcgccgcgaccaccaacaccggcgcccactatcgcgtcgcagcccctgtccctgagaccagaggcggccagaccagcggctggaggcgcagtgcacacgagggggctggacttcgcctgtgacagcaacctgtttgtggcctcttggatcgccgtgatgattatcttcagaatcggaatggccgtggctatcttctgctgcttcttcttcccatcctggcggcggaagcggaaagagaagcagtctgagacaagccccaaagagttcctgaccatctacgaggacgtgaaggacctgaaaacccggcggaaccacgaacaagagcagacctttcctggcggaggcagcaccatctacagcatgatccagagccagagcagcgcccctacaagccaagagcctgcctacacactgtactccctgatccagcctagcagaaagagcggcagccggaagagaaatcacagccccagcttcaacagcacgatctacgaagtgatcggcaagagccagccaaaggctcagaaccctgccagactgagccggaaagagctggaaaacttcgacgtgtacagcagcactagtagagtgaagttcagcagaagcgccgacgcccctgcctaccagcagggacagaaccaactgtacaacgagctgaacctgggcagacgggaagagtacgacgtgctggacaagcggagaggcagggaccctgagatgggcggaaagccccagcggagaaagaacccccaggaaggactgtataacgaactccagaaagacaagatggccgaagcctacagcgagatcggcatgaagggcgagcggagaagaggcaagggccacgatggcctgtaccagggcctgagcaccgccaccaaggacacctatgacgccctgcacatgcaggccctgcctccaagaagggccaagcgatctggatctggagcaacaaacttctcactactcaaacaagcaggtgacgtggaggagaatcccgggcctatggactggatttggcgcatccttttccttgtcggcgctgctaccggcgcgcattccttcgaacaagttcagcttcaacagcctggcgctgagctggtcaaacctggcgcttctgtgaagatgagctgcaaagccagcggctacgccttcagcagctactggatcaactggatgaagcagaaacccggccagggactcgaatggatcggccaaatctatcccggcgacggcgacaccaactacaacggcaagttcaagggcagagccacactgaccgccgatacctctagcagcacagcctacatgcagctgagcagcctgaccagcgaagatagcgccgtgtacttctgtgcccggtccatcacaacagtcgtgggctgcgctatggactattggggccagggaacaagcgtgaccgtgtctagtacgcgtgcctctacaaagggaccctccgtgtttcctctggctcccagcagcaagtctacaagcggaggaacagccgctctgggctgcctggtcaaggattactttcccgagcctgtgaccgtgtcctggaatagcggagcactgacaagcggcgtgcacacctttccagccgtgctgcaaagcagcggcctgtactctctgagcagcgtggtcacagtgcctagctctagcctgggcacccagacctacatctgcaatgtgaaccacaagcctagcaacaccaaggtggacaagagagtggaacccaagagctgtggtaccgctaagccaaccaccacgccagctcctagacctcctacaccagctcctacaatcgccagccagcctctgtctctcagacccgaagccgcgagacctgctgctggcggagctgtgcataccagaggactggatttcgcctgcgattccaatctgttcgtggcaagctggattgccgtcatgataattttccgcattggaatggctgtcgcaatcttttgttgtttcttctttccctcctggcgacgcaagcgcaaagaaaagcaaagcgagacaagcccaaaagaatttctcactatatacgaggacgtgaaagatttgaagacgaggcggaatcatgagcaagagcagacatttcctggcgggggctctactatctactcaatgattcaatcccaaagctccgctccgacttcccaagagcccgcttacactctctactcactgatacagccttcaagaaaatcaggctctcggaaacggaatcattccccatccttcaatagtaccatctatgaagtaatcggtaagagtcaacctaaagctcaaaaccccgctcgcttgagccgcaaggagctggaaaacttcgatgtatatagcagctctagacgggttaagttttccagatccgcagacgcacccgcttaccaacaagggcagaaccaactctacaatgaacttaatttggggcggagggaagagtacgacgttctggacaaaaggaggggacgagatcccgagatgggcggaaagcctcagcgaaggaagaatccgcaagaggggctttataacgaactccagaaagataaaatggcagaagcctatagtgagattgggatgaagggagaaaggaggaggggtaaaggtcacgatgggttgtaccaaggattgagcacagccactaaagatacctatgatgcgctccacatgcaggccctgccgccaagacgcgccaagagaagcggatctggcgtgaagcagaccctgaatttcgacctgctgaagctggctggcgacgtggaatccaacccaggccctggccatatggctacctacgaggtgctgtgcgaggtggcaagaaagctgggcaccgacgacagagaagtggtgctgttcctgctgaacgtgttcatccctcagcctacactggcccagctgatcggtgcactgagagccctgaaagaggaaggccggctgacctttcctctgctggccgaatgcctgttcagagccggaagaagggatctgctgcgggacctgctgcatctggaccccagatttctggaaagacacctggccggcaccatgagctacttcagcccttaccagctgaccgtgctgcacgttgacggcgaactgtgcgccagagatattcggagcctgatcttcctgagcaaggacaccatcggcagccggtctacccctcagacatttctgcactgggtgtactgcatggaaaacctggacctgctcggccccacagatgtggatgccctgatgtccatgctgagaagcctgagcagagtggacctccagagacaggtgcagacactgatgggactgcacctgagcggacctagccacagccagcactacagacacacccct

SEQ ID NO: 2236 - DNA, 4254 bp, Artificial Sequence
  Synthetic Polynucleotide
atggccttaccagtgaccgccttgctcctgccgctggccttgctgctccacgccgccaggccggacatccagatgacacagagccctagcagcctgtctgccagcgtgggagacagagtgaccatcacatgcaaggccagcgaccacatcaacaactggctggcctggtatcagcagaagcctggacaggcccctaagctgctgatctacggcgctaccacactggaaacaggcgtgcccagcagattttctggcagcggctctggcaccgactacaccctgacaatatccagcctccagcctgaggacttcgccacctactactgtcagcagagctggaacaccccttggacattcggccagggcaccaagctggaaatcaagagactcgagggacagcctaaggccaatcctaccgtgacactgttccctccaagcagcgaagaactccaggccaacaaggccacacttgtgtgcctgatctccgacttctaccctggggctgtgacagtggcttggaaggccgatggatctcctgtgaaagccggcgtggaaaccaccaagccatccaagcagagcaacaacaaatacgccgccagctcctacctgagcctgacacctgagcagtggaagtcccacagatcctacagctgccaagtgacccacgaaggcagcaccgtggaaaagacagtggcccctacagagtgcagcggatccgcaaagcccaccacgactccagcgccgcgaccaccaacaccggcgcccactatcgcgtcgcagcccctgtccctgagaccagaggcggccagaccagcggctggaggcgcagtgcacacgagggggctggacttcgcctgtgacagcaacctgtttgtggcctcttggatcgccgtgatgattatcttcagaatcggaatggccgtggctatcttctgctgcttcttcttcccatcctggcggcggaagcggaaagagaagcagtctgagacaagccccaaagagttcctgaccatctacgaggacgtgaaggacctgaaaacccggcggaaccacgaacaagagcagacctttcctggcggaggcagcaccatctacagcatgatccagagccagagcagcgcccctacaagccaagagcctgcctacacactgtactccctgatccagcctagcagaaagagcggcagccggaagagaaatcacagccccagcttcaacagcacgatctacgaagtgatcggcaagagccagccaaaggctcagaaccctgccagactgagccggaaagagctggaaaacttcgacgtgtacagcagcactagtagagtgaagttcagcagaagcgccgacgcccctgcctaccagcagggacagaaccaactgtacaacgagctgaacctgggcagacgggaagagtacgacgtgctggacaagcggagaggcagggaccctgagatgggcggaaagccccagcggagaaagaacccccaggaaggactgtataacgaactccagaaagacaagatggccgaagcctacagcgagatcggcatgaagggcgagcggagaagaggcaagggccacgatggcctgtaccagggcctgagcaccgccaccaaggacacctatgacgccctgcacatgcaggccctgcctccaagaagggccaagcgatctggatctggagcaacaaacttctcactactcaaacaagcaggtgacgtggaggagaatcccgggcctatggactggatttggcgcatccttttccttgtcggcgctgctaccggcgcgcattccttcgaacaagttcagcttcaacagcctggcgctgagctggtcaaacctggcgcttctgtgaagatgagctgcaaagccagcggctacgccttcagcagctactggatcaactggatgaagcagaaacccggccagggactcgaatggatcggccaaatctatcccggcgacggcgacaccaactacaacggcaagttcaagggcagagccacactgaccgccgatacctctagcagcacagcctacatgcagctgagcagcctgaccagcgaagatagcgccgtgtacttctgtgcccggtccatcacaacagtcgtgggctgcgctatggactattggggccagggaacaagcgtgaccgtgtctagtacgcgtgcctctacaaagggaccctccgtgtttcctctggctcccagcagcaagtctacaagcggaggaacagccgctctgggctgcctggtcaaggattactttcccgagcctgtgaccgtgtcctggaatagcggagcactgacaagcggcgtgcacacctttccagccgtgctgcaaagcagcggcctgtactctctgagcagcgtggtcacagtgcctagctctagcctgggcacccagacctacatctgcaatgtgaaccacaagcctagcaacaccaaggtggacaagagagtggaacccaagagctgtggtaccgctaagccaaccaccacgccagctcctagacctcctacaccagctcctacaatcgccagccagcctctgtctctcagacccgaagccgcgagacctgctgctggcggagctgtgcataccagaggactggatttcgcctgcgattccaatctgttcgtggcaagctggattgccgtcatgataattttccgcattggaatggctgtcgcaatcttttgttgtttcttctttccctcctggcgacgcaagcgcaaagaaaagcaaagcgagacaagcccaaaagaatttctcactatatacgaggacgtgaaagatttgaagacgaggcggaatcatgagcaagagcagacatttcctggcgggggctctactatctactcaatgattcaatcccaaagctccgctccgacttcccaagagcccgcttacactctctactcactgatacagccttcaagaaaatcaggctctcggaaacggaatcattccccatccttcaatagtaccatctatgaagtaatcggtaagagtcaacctaaagctcaaaaccccgctcgcttgagccgcaaggagctggaaaacttcgatgtatatagcagctctagacgggttaagttttccagatccgcagacgcacccgcttaccaacaagggcagaaccaactctacaatgaacttaatttggggcggagggaagagtacgacgttctggacaaaaggaggggacgagatcccgagatgggcggaaagcctcagcgaaggaagaatccgcaagaggggctttataacgaactccagaaagataaaatggcagaagcctatagtgagattgggatgaagggagaaaggaggaggggtaaaggtcacgatgggttgtaccaaggattgagcacagccactaaagatacctatgatgcgctccacatgcaggccctgccgccaagacgcgccaagagaagcggatctggcgtgaagcagaccctgaatttcgacctgctgaagctggctggcgacgtggaatccaacccaggccctggccatatgtccgactccaaggaggtccctagccttccatttttgcgacacttgctcgaagagttggacagccatgaggacagcttgctgctgtttctgtgtcacgacgcggccccgggctgcacgacggtcacgcaagctttgtgctcgcttagccaacagcgcaagctgaccctcgcggctctggtcgagatgctctacgtgctgcagcgtatggatcttctcaagagccgcttcgggctcagcaaggagggggccgagcaattgctgggcacaagctttctcacgcgctaccgcaagctcatggtttgcgtgggtgaggagctcgactcgagcgagctacgcgctctacgcttgttcgcgtgcaacctgaatccgagcctgagcacggcgctttctgagagcagccgctttgtcgagcttgtactcgcgcttgaaaacgtaggactcgtctcgccatcgagtgtttccgtgcttgcggacatgttgcgcactcttcggcgcctcgatttgtgccagcagcttgttgagtacgaacaacaagagcaagccaggtaccgttactgttacgcggcctcgccctcattgccagttcgtacgttacgtcgggggcacggcgcgagtgaacacgagcagctgtgcatgcccgtgcaagaatcctctgacagccccgagctgctgcgcacgcccgtacaagaatcctccagcgacagccccgagcaaacgact

SEQ ID NO: 2237 - DNA, 4131 bp, Artificial Sequence
  Synthetic Polynucleotide
atggccttaccagtgaccgccttgctcctgccgctggccttgctgctccacgccgccaggccggacatccagatgacacagagccctagcagcctgtctgccagcgtgggagacagagtgaccatcacatgcaaggccagcgaccacatcaacaactggctggcctggtatcagcagaagcctggacaggcccctaagctgctgatctacggcgctaccacactggaaacaggcgtgcccagcagattttctggcagcggctctggcaccgactacaccctgacaatatccagcctccagcctgaggacttcgccacctactactgtcagcagagctggaacaccccttggacattcggccagggcaccaagctggaaatcaagagactcgagggacagcctaaggccaatcctaccgtgacactgttccctccaagcagcgaagaactccaggccaacaaggccacacttgtgtgcctgatctccgacttctaccctggggctgtgacagtggcttggaaggccgatggatctcctgtgaaagccggcgtggaaaccaccaagccatccaagcagagcaacaacaaatacgccgccagctcctacctgagcctgacacctgagcagtggaagtcccacagatcctacagctgccaagtgacccacgaaggcagcaccgtggaaaagacagtggcccctacagagtgcagcggatccgcaaagcccaccacgactccagcgccgcgaccaccaacaccggcgcccactatcgcgtcgcagcccctgtccctgagaccagaggcggccagaccagcggctggaggcgcagtgcacacgagggggctggacttcgcctgtgacagcaacctgtttgtggcctcttggatcgccgtgatgattatcttcagaatcggaatggccgtggctatcttctgctgcttcttcttcccatcctggcggcggaagcggaaagagaagcagtctgagacaagccccaaagagttcctgaccatctacgaggacgtgaaggacctgaaaacccggcggaaccacgaacaagagcagacctttcctggcggaggcagcaccatctacagcatgatccagagccagagcagcgcccctacaagccaagagcctgcctacacactgtactccctgatccagcctagcagaaagagcggcagccggaagagaaatcacagccccagcttcaacagcacgatctacgaagtgatcggcaagagccagccaaaggctcagaaccctgccagactgagccggaaagagctggaaaacttcgacgtgtacagcagcactagtagagtgaagttcagcagaagcgccgacgcccctgcctaccagcagggacagaaccaactgtacaacgagctgaacctgggcagacgggaagagtacgacgtgctggacaagcggagaggcagggaccctgagatgggcggaaagccccagcggagaaagaacccccaggaaggactgtataacgaactccagaaagacaagatggccgaagcctacagcgagatcggcatgaagggcgagcggagaagaggcaagggccacgatggcctgtaccagggcctgagcaccgccaccaaggacacctatgacgccctgcacatgcaggccctgcctccaagaagggccaagcgatctggatctggagcaacaaacttctcactactcaaacaagcaggtgacgtggaggagaatcccgggcctatggactggatttggcgcatccttttccttgtcggcgctgctaccggcgcgcattccttcgaacaagttcagcttcaacagcctggcgctgagctggtcaaacctggcgcttctgtgaagatgagctgcaaagccagcggctacgccttcagcagctactggatcaactggatgaagcagaaacccggccagggactcgaatggatcggccaaatctatcccggcgacggcgacaccaactacaacggcaagttcaagggcagagccacactgaccgccgatacctctagcagcacagcctacatgcagctgagcagcctgaccagcgaagatagcgccgtgtacttctgtgcccggtccatcacaacagtcgtgggctgcgctatggactattggggccagggaacaagcgtgaccgtgtctagtacgcgtgcctctacaaagggaccctccgtgtttcctctggctcccagcagcaagtctacaagcggaggaacagccgctctgggctgcctggtcaaggattactttcccgagcctgtgaccgtgtcctggaatagcggagcactgacaagcggcgtgcacacctttccagccgtgctgcaaagcagcggcctgtactctctgagcagcgtggtcacagtgcctagctctagcctgggcacccagacctacatctgcaatgtgaaccacaagcctagcaacaccaaggtggacaagagagtggaacccaagagctgtggtaccgctaagccaaccaccacgccagctcctagacctcctacaccagctcctacaatcgccagccagcctctgtctctcagacccgaagccgcgagacctgctgctggcggagctgtgcataccagaggactggatttcgcctgcgattccaatctgttcgtggcaagctggattgccgtcatgataattttccgcattggaatggctgtcgcaatcttttgttgtttcttctttccctcctggcgacgcaagcgcaaagaaaagcaaagcgagacaagcccaaaagaatttctcactatatacgaggacgtgaaagatttgaagacgaggcggaatcatgagcaagagcagacatttcctggcgggggctctactatctactcaatgattcaatcccaaagctccgctccgacttcccaagagcccgcttacactctctactcactgatacagccttcaagaaaatcaggctctcggaaacggaatcattccccatccttcaatagtaccatctatgaagtaatcggtaagagtcaacctaaagctcaaaaccccgctcgcttgagccgcaaggagctggaaaacttcgatgtatatagcagctctagacgggttaagttttccagatccgcagacgcacccgcttaccaacaagggcagaaccaactctacaatgaacttaatttggggcggagggaagagtacgacgttctggacaaaaggaggggacgagatcccgagatgggcggaaagcctcagcgaaggaagaatccgcaagaggggctttataacgaactccagaaagataaaatggcagaagcctatagtgagattgggatgaagggagaaaggaggaggggtaaaggtcacgatgggttgtaccaaggattgagcacagccactaaagatacctatgatgcgctccacatgcaggccctgccgccaagacgcgccaagagaagcggatctggcgtgaagcagaccctgaatttcgacctgctgaagctggctggcgacgtggaatccaacccaggccctggccatatgaccgagtacaagcccacggtgcgcctcgccacccgcgacgacgtccccagggccgtacgcaccctcgccgccgcgttcgccgactaccccgccacgcgccacaccgtcgatccggaccgccacatcgagcgggtcaccgagctgcaagaactcttcctcacgcgcgtcgggctcgacatcggcaaggtgtgggtcgcggacgacggcgccgcggtggcggtctggaccacgccggagagcgtcgaagcgggggcggtgttcgccgagatcggcccgcgcatggccgagttgagcggttcccggctggccgcgcagcaacagatggaaggcctcctggcgccgcaccggcccaaggagcccgcgtggttcctggccaccgtcggcgtctcgcccgaccaccagggcaagggtctgggcagcgccgtcgtgctccccggagtggaggcggccgagcgcgccggggtgcccgccttcctggagacctccgcgccccgcaacctccccttctacgagcggctcggcttcaccgtcaccgccgacgtcgaggtgcccgaaggaccgcgcacctggtgcatgacccgcaagcccggtgcctga

SEQ ID NO: 2238 - DNA, 4542 bp, Artificial Sequence
  Synthetic Polynucleotide
atggccttaccagtgaccgccttgctcctgccgctggccttgctgctccacgccgccaggccggaagtgcagctggttgaatctggcggaggactggttcaggctggcggatctctgagactgtcttgtgccgccagcggcagaacctttagcatgggctggtttagacaggcccctggcaaagagagagagttcgtcgccgccatcacatactctggcggcagcccttactacgccgactctgtgaagggcagattcaccatcagccgggacaacgccaagaacaccgtgtacctccagatgaacagcctgaagcctgaggacaccgccgtgtactactgcgccgccaatccaacatacggcagcgactggaacgccgagaattggggccagggaacccaagtgacagtgtctagcggtaccggcggaggcggatctggcggcggaggtagcggtggcggaggatctgaattcgacatccagatgacacagagccctagcagcctgtctgccagcgtgggagacagagtgaccatcacatgcaaggccagcgaccacatcaacaactggctggcctggtatcagcagaagcctggacaggcccctaagctgctgatctacggcgctaccacactggaaacaggcgtgcccagcagattttctggcagcggctctggcaccgactacaccctgacaatatccagcctccagcctgaggacttcgccacctactactgtcagcagagctggaacaccccttggacattcggccagggcaccaagctggaaatcaagagactcgagggacagcctaaggccaatcctaccgtgacactgttccctccaagcagcgaagaactccaggccaacaaggccacacttgtgtgcctgatctccgacttctaccctggggctgtgacagtggcttggaaggccgatggatctcctgtgaaagccggcgtggaaaccaccaagccatccaagcagagcaacaacaaatacgccgccagctcctacctgagcctgacacctgagcagtggaagtcccacagatcctacagctgccaagtgacccacgaaggcagcaccgtggaaaagacagtggcccctacagagtgcagcggatccgcaaagcccaccacgactccagcgccgcgaccaccaacaccggcgcccactatcgcgtcgcagcccctgtccctgagaccagaggcggccagaccagcggctggaggcgcagtgcacacgagggggctggacttcgcctgtgacagcaacctgtttgtggcctcttggatcgccgtgatgattatcttcagaatcggaatggccgtggctatcttctgctgcttcttcttcccatcctggcggcggaagcggaaagagaagcagtctgagacaagccccaaagagttcctgaccatctacgaggacgtgaaggacctgaaaacccggcggaaccacgaacaagagcagacctttcctggcggaggcagcaccatctacagcatgatccagagccagagcagcgcccctacaagccaagagcctgcctacacactgtactccctgatccagcctagcagaaagagcggcagccggaagagaaatcacagccccagcttcaacagcacgatctacgaagtgatcggcaagagccagccaaaggctcagaaccctgccagactgagccggaaagagctggaaaacttcgacgtgtacagcagcactagtagagtgaagttcagcagaagcgccgacgcccctgcctaccagcagggacagaaccaactgtacaacgagctgaacctgggcagacgggaagagtacgacgtgctggacaagcggagaggcagggaccctgagatgggcggaaagccccagcggagaaagaacccccaggaaggactgtataacgaactccagaaagacaagatggccgaagcctacagcgagatcggcatgaagggcgagcggagaagaggcaagggccacgatggcctgtaccagggcctgagcaccgccaccaaggacacctatgacgccctgcacatgcaggccctgcctccaagaagggccaagcgatctggatctggagcaacaaacttctcactactcaaacaagcaggtgacgtggaggagaatcccgggcctatggactggatttggcgcatccttttccttgtcggcgctgctaccggcgcgcattccttcgaacaagttcagcttcaacagcctggcgctgagctggtcaaacctggcgcttctgtgaagatgagctgcaaagccagcggctacgccttcagcagctactggatcaactggatgaagcagaaacccggccagggactcgaatggatcggccaaatctatcccggcgacggcgacaccaactacaacggcaagttcaagggcagagccacactgaccgccgatacctctagcagcacagcctacatgcagctgagcagcctgaccagcgaagatagcgccgtgtacttctgtgcccggtccatcacaacagtcgtgggctgcgctatggactattggggccagggaacaagcgtgaccgtgtctagtacgcgtgcctctacaaagggaccctccgtgtttcctctggctcccagcagcaagtctacaagcggaggaacagccgctctgggctgcctggtcaaggattactttcccgagcctgtgaccgtgtcctggaatagcggagcactgacaagcggcgtgcacacctttccagccgtgctgcaaagcagcggcctgtactctctgagcagcgtggtcacagtgcctagctctagcctgggcacccagacctacatctgcaatgtgaaccacaagcctagcaacaccaaggtggacaagagagtggaacccaagagctgtggtaccgctaagccaaccaccacgccagctcctagacctcctacaccagctcctacaatcgccagccagcctctgtctctcagacccgaagccgcgagacctgctgctggcggagctgtgcataccagaggactggatttcgcctgcgattccaatctgttcgtggcaagctggattgccgtcatgataattttccgcattggaatggctgtcgcaatcttttgttgtttcttctttccctcctggcgacgcaagcgcaaagaaaagcaaagcgagacaagcccaaaagaatttctcactatatacgaggacgtgaaagatttgaagacgaggcggaatcatgagcaagagcagacatttcctggcgggggctctactatctactcaatgattcaatcccaaagctccgctccgacttcccaagagcccgcttacactctctactcactgatacagccttcaagaaaatcaggctctcggaaacggaatcattccccatccttcaatagtaccatctatgaagtaatcggtaagagtcaacctaaagctcaaaaccccgctcgcttgagccgcaaggagctggaaaacttcgatgtatatagcagctctagacgggttaagttttccagatccgcagacgcacccgcttaccaacaagggcagaaccaactctacaatgaacttaatttggggcggagggaagagtacgacgttctggacaaaaggaggggacgagatcccgagatgggcggaaagcctcagcgaaggaagaatccgcaagaggggctttataacgaactccagaaagataaaatggcagaagcctatagtgagattgggatgaagggagaaaggaggaggggtaaaggtcacgatgggttgtaccaaggattgagcacagccactaaagatacctatgatgcgctccacatgcaggccctgccgccaagacgcgccaagagaagcggatctggcgtgaagcagaccctgaatttcgacctgctgaagctggctggcgacgtggaatccaacccaggccctggccatatgaccgagtacaagcccacggtgcgcctcgccacccgcgacgacgtccccagggccgtacgcaccctcgccgccgcgttcgccgactaccccgccacgcgccacaccgtcgatccggaccgccacatcgagcgggtcaccgagctgcaagaactcttcctcacgcgcgtcgggctcgacatcggcaaggtgtgggtcgcggacgacggcgccgcggtggcggtctggaccacgccggagagcgtcgaagcgggggcggtgttcgccgagatcggcccgcgcatggccgagttgagcggttcccggctggccgcgcagcaacagatggaaggcctcctggcgccgcaccggcccaaggagcccgcgtggttcctggccaccgtcggcgtctcgcccgaccaccagggcaagggtctgggcagcgccgtcgtgctccccggagtggaggcggccgagcgcgccggggtgcccgccttcctggagacctccgcgccccgcaacctccccttctacgagcggctcggcttcaccgtcaccgccgacgtcgaggtgcccgaaggaccgcgcacctggtgcatgacccgcaagcccggtgcctga

SEQ ID NO: 2239 - DNA, 4953 bp, Artificial Sequence
  Synthetic Polynucleotide
atggccttaccagtgaccgccttgctcctgccgctggccttgctgctccacgccgccaggccggaagtgcagctggttgaatctggcggaggactggttcaggctggcggatctctgagactgtcttgtgccgccagcggcagaacctttagcatgggctggtttagacaggcccctggcaaagagagagagttcgtcgccgccatcacatactctggcggcagcccttactacgccgactctgtgaagggcagattcaccatcagccgggacaacgccaagaacaccgtgtacctccagatgaacagcctgaagcctgaggacaccgccgtgtactactgcgccgccaatccaacatacggcagcgactggaacgccgagaattggggccagggaacccaagtgacagtgtctagcggtaccggcggaggcggatctggcggcggaggtagcggtggcggaggatctgaattcgacatccagatgacacagagccctagcagcctgtctgccagcgtgggagacagagtgaccatcacatgcaaggccagcgaccacatcaacaactggctggcctggtatcagcagaagcctggacaggcccctaagctgctgatctacggcgctaccacactggaaacaggcgtgcccagcagattttctggcagcggctctggcaccgactacaccctgacaatatccagcctccagcctgaggacttcgccacctactactgtcagcagagctggaacaccccttggacattcggccagggcaccaagctggaaatcaagagactcgagggacagcctaaggccaatcctaccgtgacactgttccctccaagcagcgaagaactccaggccaacaaggccacacttgtgtgcctgatctccgacttctaccctggggctgtgacagtggcttggaaggccgatggatctcctgtgaaagccggcgtggaaaccaccaagccatccaagcagagcaacaacaaatacgccgccagctcctacctgagcctgacacctgagcagtggaagtcccacagatcctacagctgccaagtgacccacgaaggcagcaccgtggaaaagacagtggcccctacagagtgcagcggatccgcaaagcccaccacgactccagcgccgcgaccaccaacaccggcgcccactatcgcgtcgcagcccctgtccctgagaccagaggcggccagaccagcggctggaggcgcagtgcacacgagggggctggacttcgcctgtgacagcaacctgtttgtggcctcttggatcgccgtgatgattatcttcagaatcggaatggccgtggctatcttctgctgcttcttcttcccatcctggcggcggaagcggaaagagaagcagtctgagacaagccccaaagagttcctgaccatctacgaggacgtgaaggacctgaaaacccggcggaaccacgaacaagagcagacctttcctggcggaggcagcaccatctacagcatgatccagagccagagcagcgcccctacaagccaagagcctgcctacacactgtactccctgatccagcctagcagaaagagcggcagccggaagagaaatcacagccccagcttcaacagcacgatctacgaagtgatcggcaagagccagccaaaggctcagaaccctgccagactgagccggaaagagctggaaaacttcgacgtgtacagcagcactagtagagtgaagttcagcagaagcgccgacgcccctgcctaccagcagggacagaaccaactgtacaacgagctgaacctgggcagacgggaagagtacgacgtgctggacaagcggagaggcagggaccctgagatgggcggaaagccccagcggagaaagaacccccaggaaggactgtataacgaactccagaaagacaagatggccgaagcctacagcgagatcggcatgaagggcgagcggagaagaggcaagggccacgatggcctgtaccagggcctgagcaccgccaccaaggacacctatgacgccctgcacatgcaggccctgcctccaagaagggccaagcgatctggatctggagcaacaaacttctcactactcaaacaagcaggtgacgtggaggagaatcccgggcctatggactggatttggcgcatccttttccttgtcggcgctgctaccggcgcgcattccgggcccgaagtgcaactggttgaatccggtggcggcctggtgcaagcaggcggatctctcagacttagctgtgccgcctccggcagaaccttcacaatgggatggtttaggcaggctccagggaaagagagagagttcgtcgccgccatctctctgtctcccacactggcctactacgccgactctgtgaaaggccggttcaccatctccagagataatgccaagaacaccgtggtgctgcaaatgaactctctgaaacccgaggatacagccctgtactattgtgccgctgaccggaagtccgtgatgagcatcagacccgattactggggacagggcacacaagtcacagtgtcctctggatccggcggcggaggatctggcggaggcggatctgggggcggaggctctttcgaacaagttcagcttcaacagcctggcgctgagctggtcaaacctggcgcttctgtgaagatgagctgcaaagccagcggctacgccttcagcagctactggatcaactggatgaagcagaaacccggccagggactcgaatggatcggccaaatctatcccggcgacggcgacaccaactacaacggcaagttcaagggcagagccacactgaccgccgatacctctagcagcacagcctacatgcagctgagcagcctgaccagcgaagatagcgccgtgtacttctgtgcccggtccatcacaacagtcgtgggctgcgctatggactattggggccagggaacaagcgtgaccgtgtctagtacgcgtgcctctacaaagggaccctccgtgtttcctctggctcccagcagcaagtctacaagcggaggaacagccgctctgggctgcctggtcaaggattactttcccgagcctgtgaccgtgtcctggaatagcggagcactgacaagcggcgtgcacacctttccagccgtgctgcaaagcagcggcctgtactctctgagcagcgtggtcacagtgcctagctctagcctgggcacccagacctacatctgcaatgtgaaccacaagcctagcaacaccaaggtggacaagagagtggaacccaagagctgtggtaccgctaagccaaccaccacgccagctcctagacctcctacaccagctcctacaatcgccagccagcctctgtctctcagacccgaagccgcgagacctgctgctggcggagctgtgcataccagaggactggatttcgcctgcgattccaatctgttcgtggcaagctggattgccgtcatgataattttccgcattggaatggctgtcgcaatcttttgttgtttcttctttccctcctggcgacgcaagcgcaaagaaaagcaaagcgagacaagcccaaaagaatttctcactatatacgaggacgtgaaagatttgaagacgaggcggaatcatgagcaagagcagacatttcctggcgggggctctactatctactcaatgattcaatcccaaagctccgctccgacttcccaagagcccgcttacactctctactcactgatacagccttcaagaaaatcaggctctcggaaacggaatcattccccatccttcaatagtaccatctatgaagtaatcggtaagagtcaacctaaagctcaaaaccccgctcgcttgagccgcaaggagctggaaaacttcgatgtatatagcagctctagacgggttaagttttccagatccgcagacgcacccgcttaccaacaagggcagaaccaactctacaatgaacttaatttggggcggagggaagagtacgacgttctggacaaaaggaggggacgagatcccgagatgggcggaaagcctcagcgaaggaagaatccgcaagaggggctttataacgaactccagaaagataaaatggcagaagcctatagtgagattgggatgaagggagaaaggaggaggggtaaaggtcacgatgggttgtaccaaggattgagcacagccactaaagatacctatgatgcgctccacatgcaggccctgccgccaagacgcgccaagagaagcggatctggcgtgaagcagaccctgaatttcgacctgctgaagctggctggcgacgtggaatccaacccaggccctggccatatgaccgagtacaagcccacggtgcgcctcgccacccgcgacgacgtccccagggccgtacgcaccctcgccgccgcgttcgccgactaccccgccacgcgccacaccgtcgatccggaccgccacatcgagcgggtcaccgagctgcaagaactcttcctcacgcgcgtcgggctcgacatcggcaaggtgtgggtcgcggacgacggcgccgcggtggcggtctggaccacgccggagagcgtcgaagcgggggcggtgttcgccgagatcggcccgcgcatggccgagttgagcggttcccggctggccgcgcagcaacagatggaaggcctcctggcgccgcaccggcccaaggagcccgcgtggttcctggccaccgtcggcgtctcgcccgaccaccagggcaagggtctgggcagcgccgtcgtgctccccggagtggaggcggccgagcgcgccggggtgcccgccttcctggagacctccgcgccccgcaacctccccttctacgagcggctcggcttcaccgtcaccgccgacgtcgaggtgcccgaaggaccgcgcacctggtgcatgacccgcaagcccggtgcctga

SEQ ID NO: 2240 - DNA, 4152 bp, Artificial Sequence
  Synthetic Polynucleotide
atggccttaccagtgaccgccttgctcctgccgctggccttgctgctccacgccgccaggccggaagtgcagctggttgaatctggcggaggactggttcaggctggcggatctctgagactgtcttgtgccgccagcggcagaacctttagcatgggctggtttagacaggcccctggcaaagagagagagttcgtcgccgccatcacatactctggcggcagcccttactacgccgactctgtgaagggcagattcaccatcagccgggacaacgccaagaacaccgtgtacctccagatgaacagcctgaagcctgaggacaccgccgtgtactactgcgccgccaatccaacatacggcagcgactggaacgccgagaattggggccagggaacccaagtgacagtgtctagcctcgagggacagcctaaggccaatcctaccgtgacactgttccctccaagcagcgaagaactccaggccaacaaggccacacttgtgtgcctgatctccgacttctaccctggggctgtgacagtggcttggaaggccgatggatctcctgtgaaagccggcgtggaaaccaccaagccatccaagcagagcaacaacaaatacgccgccagctcctacctgagcctgacacctgagcagtggaagtcccacagatcctacagctgccaagtgacccacgaaggcagcaccgtggaaaagacagtggcccctacagagtgcagcggatccgcaaagcccaccacgactccagcgccgcgaccaccaacaccggcgcccactatcgcgtcgcagcccctgtccctgagaccagaggcggccagaccagcggctggaggcgcagtgcacacgagggggctggacttcgcctgtgacagcaacctgtttgtggcctcttggatcgccgtgatgattatcttcagaatcggaatggccgtggctatcttctgctgcttcttcttcccatcctggcggcggaagcggaaagagaagcagtctgagacaagccccaaagagttcctgaccatctacgaggacgtgaaggacctgaaaacccggcggaaccacgaacaagagcagacctttcctggcggaggcagcaccatctacagcatgatccagagccagagcagcgcccctacaagccaagagcctgcctacacactgtactccctgatccagcctagcagaaagagcggcagccggaagagaaatcacagccccagcttcaacagcacgatctacgaagtgatcggcaagagccagccaaaggctcagaaccctgccagactgagccggaaagagctggaaaacttcgacgtgtacagcagcactagtagagtgaagttcagcagaagcgccgacgcccctgcctaccagcagggacagaaccaactgtacaacgagctgaacctgggcagacgggaagagtacgacgtgctggacaagcggagaggcagggaccctgagatgggcggaaagccccagcggagaaagaacccccaggaaggactgtataacgaactccagaaagacaagatggccgaagcctacagcgagatcggcatgaagggcgagcggagaagaggcaagggccacgatggcctgtaccagggcctgagcaccgccaccaaggacacctatgacgccctgcacatgcaggccctgcctccaagaagggccaagcgatctggatctggagcaacaaacttctcactactcaaacaagcaggtgacgtggaggagaatcccgggcctatggactggatttggcgcatccttttccttgtcggcgctgctaccggcgcgcattccgggcccgaagtgcaactggttgaatccggtggcggcctggtgcaagcaggcggatctctcagacttagctgtgccgcctccggcagaaccttcacaatgggatggtttaggcaggctccagggaaagagagagagttcgtcgccgccatctctctgtctcccacactggcctactacgccgactctgtgaaaggccggttcaccatctccagagataatgccaagaacaccgtggtgctgcaaatgaactctctgaaacccgaggatacagccctgtactattgtgccgctgaccggaagtccgtgatgagcatcagacccgattactggggacagggcacacaagtcacagtgtcctctacgcgtgcctctacaaagggaccctccgtgtttcctctggctcccagcagcaagtctacaagcggaggaacagccgctctgggctgcctggtcaaggattactttcccgagcctgtgaccgtgtcctggaatagcggagcactgacaagcggcgtgcacacctttccagccgtgctgcaaagcagcggcctgtactctctgagcagcgtggtcacagtgcctagctctagcctgggcacccagacctacatctgcaatgtgaaccacaagcctagcaacaccaaggtggacaagagagtggaacccaagagctgtggtaccgctaagccaaccaccacgccagctcctagacctcctacaccagctcctacaatcgccagccagcctctgtctctcagacccgaagccgcgagacctgctgctggcggagctgtgcataccagaggactggatttcgcctgcgattccaatctgttcgtggcaagctggattgccgtcatgataattttccgcattggaatggctgtcgcaatcttttgttgtttcttctttccctcctggcgacgcaagcgcaaagaaaagcaaagcgagacaagcccaaaagaatttctcactatatacgaggacgtgaaagatttgaagacgaggcggaatcatgagcaagagcagacatttcctggcgggggctctactatctactcaatgattcaatcccaaagctccgctccgacttcccaagagcccgcttacactctctactcactgatacagccttcaagaaaatcaggctctcggaaacggaatcattccccatccttcaatagtaccatctatgaagtaatcggtaagagtcaacctaaagctcaaaaccccgctcgcttgagccgcaaggagctggaaaacttcgatgtatatagcagctctagacgggttaagttttccagatccgcagacgcacccgcttaccaacaagggcagaaccaactctacaatgaacttaatttggggcggagggaagagtacgacgttctggacaaaaggaggggacgagatcccgagatgggcggaaagcctcagcgaaggaagaatccgcaagaggggctttataacgaactccagaaagataaaatggcagaagcctatagtgagattgggatgaagggagaaaggaggaggggtaaaggtcacgatgggttgtaccaaggattgagcacagccactaaagatacctatgatgcgctccacatgcaggccctgccgccaagacgcgccaagagaagcggatctggcgtgaagcagaccctgaatttcgacctgctgaagctggctggcgacgtggaatccaacccaggccctggccatatgaccgagtacaagcccacggtgcgcctcgccacccgcgacgacgtccccagggccgtacgcaccctcgccgccgcgttcgccgactaccccgccacgcgccacaccgtcgatccggaccgccacatcgagcgggtcaccgagctgcaagaactcttcctcacgcgcgtcgggctcgacatcggcaaggtgtgggtcgcggacgacggcgccgcggtggcggtctggaccacgccggagagcgtcgaagcgggggcggtgttcgccgagatcggcccgcgcatggccgagttgagcggttcccggctggccgcgcagcaacagatggaaggcctcctggcgccgcaccggcccaaggagcccgcgtggttcctggccaccgtcggcgtctcgcccgaccaccagggcaagggtctgggcagcgccgtcgtgctccccggagtggaggcggccgagcgcgccggggtgcccgccttcctggagacctccgcgccccgcaacctccccttctacgagcggctcggcttcaccgtcaccgccgacgtcgaggtgcccgaaggaccgcgcacctggtgcatgacccgcaagcccggtgcctga

SEQ ID NO: 2241 - DNA, 4176 bp, Artificial Sequence
  Synthetic Polynucleotide
atggccttaccagtgaccgccttgctcctgccgctggccttgctgctccacgccgccaggccggacatccagatgacacagagccctagcagcctgtctgccagcgtgggagacagagtgaccatcacatgcaaggccagcgaccacatcaacaactggctggcctggtatcagcagaagcctggacaggcccctaagctgctgatctacggcgctaccacactggaaacaggcgtgcccagcagattttctggcagcggctctggcaccgactacaccctgacaatatccagcctccagcctgaggacttcgccacctactactgtcagcagagctggaacaccccttggacattcggccagggcaccaagctggaaatcaagagactcgaggacctgaagaacgtgttcccacctgaggtggccgtgttcgagcctagcgaggccgagatcagccacacccagaaagccaccctcgtgtgcctggctaccggcttctaccccgaccatgtggaactgtcttggtgggtcaacggcaaagaggtgcacagcggcgtgtctaccgacccccagccactgaaagaacagcccgccctgaacgacagccggtactgcctgagcagcagactgagagtgtccgccaccttctggcagaacccccggaaccacttcagatgccaggtgcagttctacggcctgagcgagaacgacgagtggacccaggacagagccaagcccgtgacccagatcgtgtctgccgaagcctggggcagagccgattgcggatccgcaaagcccaccacgactccagcgccgcgaccaccaacaccggcgcccactatcgcgtcgcagcccctgtccctgagaccagaggcggccagaccagcggctggaggcgcagtgcacacgagggggctggacttcgcctgtgacagcaacctgtttgtggcctcttggatcgccgtgatgattatcttcagaatcggaatggccgtggctatcttctgctgcttcttcttcccatcctggcggcggaagcggaaagagaagcagtctgagacaagccccaaagagttcctgaccatctacgaggacgtgaaggacctgaaaacccggcggaaccacgaacaagagcagacctttcctggcggaggcagcaccatctacagcatgatccagagccagagcagcgcccctacaagccaagagcctgcctacacactgtactccctgatccagcctagcagaaagagcggcagccggaagagaaatcacagccccagcttcaacagcacgatctacgaagtgatcggcaagagccagccaaaggctcagaaccctgccagactgagccggaaagagctggaaaacttcgacgtgtacagcagcactagtagagtgaagttcagcagaagcgccgacgcccctgcctaccagcagggacagaaccaactgtacaacgagctgaacctgggcagacgggaagagtacgacgtgctggacaagcggagaggcagggaccctgagatgggcggaaagccccagcggagaaagaacccccaggaaggactgtataacgaactccagaaagacaagatggccgaagcctacagcgagatcggcatgaagggcgagcggagaagaggcaagggccacgatggcctgtaccagggcctgagcaccgccaccaaggacacctatgacgccctgcacatgcaggccctgcctccaagaagggccaagcgatctggatctggagcaacaaacttctcactactcaaacaagcaggtgacgtggaggagaatcccgggcctatggactggatttggcgcatccttttccttgtcggcgctgctaccggcgcgcattccttcgaacaagttcagcttcaacagcctggcgctgagctggtcaaacctggcgcttctgtgaagatgagctgcaaagccagcggctacgccttcagcagctactggatcaactggatgaagcagaaacccggccagggactcgaatggatcggccaaatctatcccggcgacggcgacaccaactacaacggcaagttcaagggcagagccacactgaccgccgatacctctagcagcacagcctacatgcagctgagcagcctgaccagcgaagatagcgccgtgtacttctgtgcccggtccatcacaacagtcgtgggctgcgctatggactattggggccagggaacaagcgtgaccgtgtctagtacgcgtatccagaaccctgatcctgccgtgtaccagctgcgggatagcaagagcagcgacaagagcgtgtgtctgttcaccgacttcgacagccagaccaacgtgtcccagagcaaggactccgacgtgtacatcaccgataagaccgtgctggacatgcggagcatggacttcaagagcaactccgccgtggcctggtccaacaagtccgatttcgcctgcgccaacgccttcaacaacagcattatccccgaggacacattcttcccaagccccgagagcagctgcggtaccgctaagccaaccaccacgccagctcctagacctcctacaccagctcctacaatcgccagccagcctctgtctctcagacccgaagccgcgagacctgctgctggcggagctgtgcataccagaggactggatttcgcctgcgattccaatctgttcgtggcaagctggattgccgtcatgataattttccgcattggaatggctgtcgcaatcttttgttgtttcttctttccctcctggcgacgcaagcgcaaagaaaagcaaagcgagacaagcccaaaagaatttctcactatatacgaggacgtgaaagatttgaagacgaggcggaatcatgagcaagagcagacatttcctggcgggggctctactatctactcaatgattcaatcccaaagctccgctccgacttcccaagagcccgcttacactctctactcactgatacagccttcaagaaaatcaggctctcggaaacggaatcattccccatccttcaatagtaccatctatgaagtaatcggtaagagtcaacctaaagctcaaaaccccgctcgcttgagccgcaaggagctggaaaacttcgatgtatatagcagctctagacgggttaagttttccagatccgcagacgcacccgcttaccaacaagggcagaaccaactctacaatgaacttaatttggggcggagggaagagtacgacgttctggacaaaaggaggggacgagatcccgagatgggcggaaagcctcagcgaaggaagaatccgcaagaggggctttataacgaactccagaaagataaaatggcagaagcctatagtgagattgggatgaagggagaaaggaggaggggtaaaggtcacgatgggttgtaccaaggattgagcacagccactaaagatacctatgatgcgctccacatgcaggccctgccgccaagacgcgccaagagaagcggatctggcgtgaagcagaccctgaatttcgacctgctgaagctggctggcgacgtggaatccaacccaggccctggccatatgaccgagtacaagcccacggtgcgcctcgccacccgcgacgacgtccccagggccgtacgcaccctcgccgccgcgttcgccgactaccccgccacgcgccacaccgtcgatccggaccgccacatcgagcgggtcaccgagctgcaagaactcttcctcacgcgcgtcgggctcgacatcggcaaggtgtgggtcgcggacgacggcgccgcggtggcggtctggaccacgccggagagcgtcgaagcgggggcggtgttcgccgagatcggcccgcgcatggccgagttgagcggttcccggctggccgcgcagcaacagatggaaggcctcctggcgccgcaccggcccaaggagcccgcgtggttcctggccaccgtcggcgtctcgcccgaccaccagggcaagggtctgggcagcgccgtcgtgctccccggagtggaggcggccgagcgcgccggggtgcccgccttcctggagacctccgcgccccgcaacctccccttctacgagcggctcggcttcaccgtcaccgccgacgtcgaggtgcccgaaggaccgcgcacctggtgcatgacccgcaagcccggtgcctga

SEQ ID NO: 2242 - DNA, 4587 bp, Artificial Sequence
  Synthetic Polynucleotide
atggccttaccagtgaccgccttgctcctgccgctggccttgctgctccacgccgccaggccggaagtgcagctggttgaatctggcggaggactggttcaggctggcggatctctgagactgtcttgtgccgccagcggcagaacctttagcatgggctggtttagacaggcccctggcaaagagagagagttcgtcgccgccatcacatactctggcggcagcccttactacgccgactctgtgaagggcagattcaccatcagccgggacaacgccaagaacaccgtgtacctccagatgaacagcctgaagcctgaggacaccgccgtgtactactgcgccgccaatccaacatacggcagcgactggaacgccgagaattggggccagggaacccaagtgacagtgtctagcggtaccggcggaggcggatctggcggcggaggtagcggtggcggaggatctgaattcgacatccagatgacacagagccctagcagcctgtctgccagcgtgggagacagagtgaccatcacatgcaaggccagcgaccacatcaacaactggctggcctggtatcagcagaagcctggacaggcccctaagctgctgatctacggcgctaccacactggaaacaggcgtgcccagcagattttctggcagcggctctggcaccgactacaccctgacaatatccagcctccagcctgaggacttcgccacctactactgtcagcagagctggaacaccccttggacattcggccagggcaccaagctggaaatcaagagactcgaggacctgaagaacgtgttcccacctgaggtggccgtgttcgagcctagcgaggccgagatcagccacacccagaaagccaccctcgtgtgcctggctaccggcttctaccccgaccatgtggaactgtcttggtgggtcaacggcaaagaggtgcacagcggcgtgtctaccgacccccagccactgaaagaacagcccgccctgaacgacagccggtactgcctgagcagcagactgagagtgtccgccaccttctggcagaacccccggaaccacttcagatgccaggtgcagttctacggcctgagcgagaacgacgagtggacccaggacagagccaagcccgtgacccagatcgtgtctgccgaagcctggggcagagccgattgcggatccgcaaagcccaccacgactccagcgccgcgaccaccaacaccggcgcccactatcgcgtcgcagcccctgtccctgagaccagaggcggccagaccagcggctggaggcgcagtgcacacgagggggctggacttcgcctgtgacagcaacctgtttgtggcctcttggatcgccgtgatgattatcttcagaatcggaatggccgtggctatcttctgctgcttcttcttcccatcctggcggcggaagcggaaagagaagcagtctgagacaagccccaaagagttcctgaccatctacgaggacgtgaaggacctgaaaacccggcggaaccacgaacaagagcagacctttcctggcggaggcagcaccatctacagcatgatccagagccagagcagcgcccctacaagccaagagcctgcctacacactgtactccctgatccagcctagcagaaagagcggcagccggaagagaaatcacagccccagcttcaacagcacgatctacgaagtgatcggcaagagccagccaaaggctcagaaccctgccagactgagccggaaagagctggaaaacttcgacgtgtacagcagcactagtagagtgaagttcagcagaagcgccgacgcccctgcctaccagcagggacagaaccaactgtacaacgagctgaacctgggcagacgggaagagtacgacgtgctggacaagcggagaggcagggaccctgagatgggcggaaagccccagcggagaaagaacccccaggaaggactgtataacgaactccagaaagacaagatggccgaagcctacagcgagatcggcatgaagggcgagcggagaagaggcaagggccacgatggcctgtaccagggcctgagcaccgccaccaaggacacctatgacgccctgcacatgcaggccctgcctccaagaagggccaagcgatctggatctggagcaacaaacttctcactactcaaacaagcaggtgacgtggaggagaatcccgggcctatggactggatttggcgcatccttttccttgtcggcgctgctaccggcgcgcattccttcgaacaagttcagcttcaacagcctggcgctgagctggtcaaacctggcgcttctgtgaagatgagctgcaaagccagcggctacgccttcagcagctactggatcaactggatgaagcagaaacccggccagggactcgaatggatcggccaaatctatcccggcgacggcgacaccaactacaacggcaagttcaagggcagagccacactgaccgccgatacctctagcagcacagcctacatgcagctgagcagcctgaccagcgaagatagcgccgtgtacttctgtgcccggtccatcacaacagtcgtgggctgcgctatggactattggggccagggaacaagcgtgaccgtgtctagtacgcgtatccagaaccctgatcctgccgtgtaccagctgcgggatagcaagagcagcgacaagagcgtgtgtctgttcaccgacttcgacagccagaccaacgtgtcccagagcaaggactccgacgtgtacatcaccgataagaccgtgctggacatgcggagcatggacttcaagagcaactccgccgtggcctggtccaacaagtccgatttcgcctgcgccaacgccttcaacaacagcattatccccgaggacacattcttcccaagccccgagagcagctgcggtaccgctaagccaaccaccacgccagctcctagacctcctacaccagctcctacaatcgccagccagcctctgtctctcagacccgaagccgcgagacctgctgctggcggagctgtgcataccagaggactggatttcgcctgcgattccaatctgttcgtggcaagctggattgccgtcatgataattttccgcattggaatggctgtcgcaatcttttgttgtttcttctttccctcctggcgacgcaagcgcaaagaaaagcaaagcgagacaagcccaaaagaatttctcactatatacgaggacgtgaaagatttgaagacgaggcggaatcatgagcaagagcagacatttcctggcgggggctctactatctactcaatgattcaatcccaaagctccgctccgacttcccaagagcccgcttacactctctactcactgatacagccttcaagaaaatcaggctctcggaaacggaatcattccccatccttcaatagtaccatctatgaagtaatcggtaagagtcaacctaaagctcaaaaccccgctcgcttgagccgcaaggagctggaaaacttcgatgtatatagcagctctagacgggttaagttttccagatccgcagacgcacccgcttaccaacaagggcagaaccaactctacaatgaacttaatttggggcggagggaagagtacgacgttctggacaaaaggaggggacgagatcccgagatgggcggaaagcctcagcgaaggaagaatccgcaagaggggctttataacgaactccagaaagataaaatggcagaagcctatagtgagattgggatgaagggagaaaggaggaggggtaaaggtcacgatgggttgtaccaaggattgagcacagccactaaagatacctatgatgcgctccacatgcaggccctgccgccaagacgcgccaagagaagcggatctggcgtgaagcagaccctgaatttcgacctgctgaagctggctggcgacgtggaatccaacccaggccctggccatatgaccgagtacaagcccacggtgcgcctcgccacccgcgacgacgtccccagggccgtacgcaccctcgccgccgcgttcgccgactaccccgccacgcgccacaccgtcgatccggaccgccacatcgagcgggtcaccgagctgcaagaactcttcctcacgcgcgtcgggctcgacatcggcaaggtgtgggtcgcggacgacggcgccgcggtggcggtctggaccacgccggagagcgtcgaagcgggggcggtgttcgccgagatcggcccgcgcatggccgagttgagcggttcccggctggccgcgcagcaacagatggaaggcctcctggcgccgcaccggcccaaggagcccgcgtggttcctggccaccgtcggcgtctcgcccgaccaccagggcaagggtctgggcagcgccgtcgtgctccccggagtggaggcggccgagcgcgccggggtgcccgccttcctggagacctccgcgccccgcaacctccccttctacgagcggctcggcttcaccgtcaccgccgacgtcgaggtgcccgaaggaccgcgcacctggtgcatgacccgcaagcccggtgcctga

SEQ ID NO: 2243 - DNA, 4998 bp, Artificial Sequence
  Synthetic Polynucleotide
atggccttaccagtgaccgccttgctcctgccgctggccttgctgctccacgccgccaggccggaagtgcagctggttgaatctggcggaggactggttcaggctggcggatctctgagactgtcttgtgccgccagcggcagaacctttagcatgggctggtttagacaggcccctggcaaagagagagagttcgtcgccgccatcacatactctggcggcagcccttactacgccgactctgtgaagggcagattcaccatcagccgggacaacgccaagaacaccgtgtacctccagatgaacagcctgaagcctgaggacaccgccgtgtactactgcgccgccaatccaacatacggcagcgactggaacgccgagaattggggccagggaacccaagtgacagtgtctagcggtaccggcggaggcggatctggcggcggaggtagcggtggcggaggatctgaattcgacatccagatgacacagagccctagcagcctgtctgccagcgtgggagacagagtgaccatcacatgcaaggccagcgaccacatcaacaactggctggcctggtatcagcagaagcctggacaggcccctaagctgctgatctacggcgctaccacactggaaacaggcgtgcccagcagattttctggcagcggctctggcaccgactacaccctgacaatatccagcctccagcctgaggacttcgccacctactactgtcagcagagctggaacaccccttggacattcggccagggcaccaagctggaaatcaagagactcgaggacctgaagaacgtgttcccacctgaggtggccgtgttcgagcctagcgaggccgagatcagccacacccagaaagccaccctcgtgtgcctggctaccggcttctaccccgaccatgtggaactgtcttggtgggtcaacggcaaagaggtgcacagcggcgtgtctaccgacccccagccactgaaagaacagcccgccctgaacgacagccggtactgcctgagcagcagactgagagtgtccgccaccttctggcagaacccccggaaccacttcagatgccaggtgcagttctacggcctgagcgagaacgacgagtggacccaggacagagccaagcccgtgacccagatcgtgtctgccgaagcctggggcagagccgattgcggatccgcaaagcccaccacgactccagcgccgcgaccaccaacaccggcgcccactatcgcgtcgcagcccctgtccctgagaccagaggcggccagaccagcggctggaggcgcagtgcacacgagggggctggacttcgcctgtgacagcaacctgtttgtggcctcttggatcgccgtgatgattatcttcagaatcggaatggccgtggctatcttctgctgcttcttcttcccatcctggcggcggaagcggaaagagaagcagtctgagacaagccccaaagagttcctgaccatctacgaggacgtgaaggacctgaaaacccggcggaaccacgaacaagagcagacctttcctggcggaggcagcaccatctacagcatgatccagagccagagcagcgcccctacaagccaagagcctgcctacacactgtactccctgatccagcctagcagaaagagcggcagccggaagagaaatcacagccccagcttcaacagcacgatctacgaagtgatcggcaagagccagccaaaggctcagaaccctgccagactgagccggaaagagctggaaaacttcgacgtgtacagcagcactagtagagtgaagttcagcagaagcgccgacgcccctgcctaccagcagggacagaaccaactgtacaacgagctgaacctgggcagacgggaagagtacgacgtgctggacaagcggagaggcagggaccctgagatgggcggaaagccccagcggagaaagaacccccaggaaggactgtataacgaactccagaaagacaagatggccgaagcctacagcgagatcggcatgaagggcgagcggagaagaggcaagggccacgatggcctgtaccagggcctgagcaccgccaccaaggacacctatgacgccctgcacatgcaggccctgcctccaagaagggccaagcgatctggatctggagcaacaaacttctcactactcaaacaagcaggtgacgtggaggagaatcccgggcctatggactggatttggcgcatccttttccttgtcggcgctgctaccggcgcgcattccgggcccgaagtgcaactggttgaatccggtggcggcctggtgcaagcaggcggatctctcagacttagctgtgccgcctccggcagaaccttcacaatgggatggtttaggcaggctccagggaaagagagagagttcgtcgccgccatctctctgtctcccacactggcctactacgccgactctgtgaaaggccggttcaccatctccagagataatgccaagaacaccgtggtgctgcaaatgaactctctgaaacccgaggatacagccctgtactattgtgccgctgaccggaagtccgtgatgagcatcagacccgattactggggacagggcacacaagtcacagtgtcctctggatccggcggcggaggatctggcggaggcggatctgggggcggaggctctttcgaacaagttcagcttcaacagcctggcgctgagctggtcaaacctggcgcttctgtgaagatgagctgcaaagccagcggctacgccttcagcagctactggatcaactggatgaagcagaaacccggccagggactcgaatggatcggccaaatctatcccggcgacggcgacaccaactacaacggcaagttcaagggcagagccacactgaccgccgatacctctagcagcacagcctacatgcagctgagcagcctgaccagcgaagatagcgccgtgtacttctgtgcccggtccatcacaacagtcgtgggctgcgctatggactattggggccagggaacaagcgtgaccgtgtctagtacgcgtatccagaaccctgatcctgccgtgtaccagctgcgggatagcaagagcagcgacaagagcgtgtgtctgttcaccgacttcgacagccagaccaacgtgtcccagagcaaggactccgacgtgtacatcaccgataagaccgtgctggacatgcggagcatggacttcaagagcaactccgccgtggcctggtccaacaagtccgatttcgcctgcgccaacgccttcaacaacagcattatccccgaggacacattcttcccaagccccgagagcagctgcggtaccgctaagccaaccaccacgccagctcctagacctcctacaccagctcctacaatcgccagccagcctctgtctctcagacccgaagccgcgagacctgctgctggcggagctgtgcataccagaggactggatttcgcctgcgattccaatctgttcgtggcaagctggattgccgtcatgataattttccgcattggaatggctgtcgcaatcttttgttgtttcttctttccctcctggcgacgcaagcgcaaagaaaagcaaagcgagacaagcccaaaagaatttctcactatatacgaggacgtgaaagatttgaagacgaggcggaatcatgagcaagagcagacatttcctggcgggggctctactatctactcaatgattcaatcccaaagctccgctccgacttcccaagagcccgcttacactctctactcactgatacagccttcaagaaaatcaggctctcggaaacggaatcattccccatccttcaatagtaccatctatgaagtaatcggtaagagtcaacctaaagctcaaaaccccgctcgcttgagccgcaaggagctggaaaacttcgatgtatatagcagctctagacgggttaagttttccagatccgcagacgcacccgcttaccaacaagggcagaaccaactctacaatgaacttaatttggggcggagggaagagtacgacgttctggacaaaaggaggggacgagatcccgagatgggcggaaagcctcagcgaaggaagaatccgcaagaggggctttataacgaactccagaaagataaaatggcagaagcctatagtgagattgggatgaagggagaaaggaggaggggtaaaggtcacgatgggttgtaccaaggattgagcacagccactaaagatacctatgatgcgctccacatgcaggccctgccgccaagacgcgccaagagaagcggatctggcgtgaagcagaccctgaatttcgacctgctgaagctggctggcgacgtggaatccaacccaggccctggccatatgaccgagtacaagcccacggtgcgcctcgccacccgcgacgacgtccccagggccgtacgcaccctcgccgccgcgttcgccgactaccccgccacgcgccacaccgtcgatccggaccgccacatcgagcgggtcaccgagctgcaagaactcttcctcacgcgcgtcgggctcgacatcggcaaggtgtgggtcgcggacgacggcgccgcggtggcggtctggaccacgccggagagcgtcgaagcgggggcggtgttcgccgagatcggcccgcgcatggccgagttgagcggttcccggctggccgcgcagcaacagatggaaggcctcctggcgccgcaccggcccaaggagcccgcgtggttcctggccaccgtcggcgtctcgcccgaccaccagggcaagggtctgggcagcgccgtcgtgctccccggagtggaggcggccgagcgcgccggggtgcccgccttcctggagacctccgcgccccgcaacctccccttctacgagcggctcggcttcaccgtcaccgccgacgtcgaggtgcccgaaggaccgcgcacctggtgcatgacccgcaagcccggtgcctga

SEQ ID NO: 2244 - DNA, 4197 bp, Artificial Sequence
  Synthetic Polynucleotide
atggccttaccagtgaccgccttgctcctgccgctggccttgctgctccacgccgccaggccggaagtgcagctggttgaatctggcggaggactggttcaggctggcggatctctgagactgtcttgtgccgccagcggcagaacctttagcatgggctggtttagacaggcccctggcaaagagagagagttcgtcgccgccatcacatactctggcggcagcccttactacgccgactctgtgaagggcagattcaccatcagccgggacaacgccaagaacaccgtgtacctccagatgaacagcctgaagcctgaggacaccgccgtgtactactgcgccgccaatccaacatacggcagcgactggaacgccgagaattggggccagggaacccaagtgacagtgtctagcctcgaggacctgaagaacgtgttcccacctgaggtggccgtgttcgagcctagcgaggccgagatcagccacacccagaaagccaccctcgtgtgcctggctaccggcttctaccccgaccatgtggaactgtcttggtgggtcaacggcaaagaggtgcacagcggcgtgtctaccgacccccagccactgaaagaacagcccgccctgaacgacagccggtactgcctgagcagcagactgagagtgtccgccaccttctggcagaacccccggaaccacttcagatgccaggtgcagttctacggcctgagcgagaacgacgagtggacccaggacagagccaagcccgtgacccagatcgtgtctgccgaagcctggggcagagccgattgcggatccgcaaagcccaccacgactccagcgccgcgaccaccaacaccggcgcccactatcgcgtcgcagcccctgtccctgagaccagaggcggccagaccagcggctggaggcgcagtgcacacgagggggctggacttcgcctgtgacagcaacctgtttgtggcctcttggatcgccgtgatgattatcttcagaatcggaatggccgtggctatcttctgctgcttcttcttcccatcctggcggcggaagcggaaagagaagcagtctgagacaagccccaaagagttcctgaccatctacgaggacgtgaaggacctgaaaacccggcggaaccacgaacaagagcagacctttcctggcggaggcagcaccatctacagcatgatccagagccagagcagcgcccctacaagccaagagcctgcctacacactgtactccctgatccagcctagcagaaagagcggcagccggaagagaaatcacagccccagcttcaacagcacgatctacgaagtgatcggcaagagccagccaaaggctcagaaccctgccagactgagccggaaagagctggaaaacttcgacgtgtacagcagcactagtagagtgaagttcagcagaagcgccgacgcccctgcctaccagcagggacagaaccaactgtacaacgagctgaacctgggcagacgggaagagtacgacgtgctggacaagcggagaggcagggaccctgagatgggcggaaagccccagcggagaaagaacccccaggaaggactgtataacgaactccagaaagacaagatggccgaagcctacagcgagatcggcatgaagggcgagcggagaagaggcaagggccacgatggcctgtaccagggcctgagcaccgccaccaaggacacctatgacgccctgcacatgcaggccctgcctccaagaagggccaagcgatctggatctggagcaacaaacttctcactactcaaacaagcaggtgacgtggaggagaatcccgggcctatggactggatttggcgcatccttttccttgtcggcgctgctaccggcgcgcattccgggcccgaagtgcaactggttgaatccggtggcggcctggtgcaagcaggcggatctctcagacttagctgtgccgcctccggcagaaccttcacaatgggatggtttaggcaggctccagggaaagagagagagttcgtcgccgccatctctctgtctcccacactggcctactacgccgactctgtgaaaggccggttcaccatctccagagataatgccaagaacaccgtggtgctgcaaatgaactctctgaaacccgaggatacagccctgtactattgtgccgctgaccggaagtccgtgatgagcatcagacccgattactggggacagggcacacaagtcacagtgtcctctacgcgtatccagaaccctgatcctgccgtgtaccagctgcgggatagcaagagcagcgacaagagcgtgtgtctgttcaccgacttcgacagccagaccaacgtgtcccagagcaaggactccgacgtgtacatcaccgataagaccgtgctggacatgcggagcatggacttcaagagcaactccgccgtggcctggtccaacaagtccgatttcgcctgcgccaacgccttcaacaacagcattatccccgaggacacattcttcccaagccccgagagcagctgcggtaccgctaagccaaccaccacgccagctcctagacctcctacaccagctcctacaatcgccagccagcctctgtctctcagacccgaagccgcgagacctgctgctggcggagctgtgcataccagaggactggatttcgcctgcgattccaatctgttcgtggcaagctggattgccgtcatgataattttccgcattggaatggctgtcgcaatcttttgttgtttcttctttccctcctggcgacgcaagcgcaaagaaaagcaaagcgagacaagcccaaaagaatttctcactatatacgaggacgtgaaagatttgaagacgaggcggaatcatgagcaagagcagacatttcctggcgggggctctactatctactcaatgattcaatcccaaagctccgctccgacttcccaagagcccgcttacactctctactcactgatacagccttcaagaaaatcaggctctcggaaacggaatcattccccatccttcaatagtaccatctatgaagtaatcggtaagagtcaacctaaagctcaaaaccccgctcgcttgagccgcaaggagctggaaaacttcgatgtatatagcagctctagacgggttaagttttccagatccgcagacgcacccgcttaccaacaagggcagaaccaactctacaatgaacttaatttggggcggagggaagagtacgacgttctggacaaaaggaggggacgagatcccgagatgggcggaaagcctcagcgaaggaagaatccgcaagaggggctttataacgaactccagaaagataaaatggcagaagcctatagtgagattgggatgaagggagaaaggaggaggggtaaaggtcacgatgggttgtaccaaggattgagcacagccactaaagatacctatgatgcgctccacatgcaggccctgccgccaagacgcgccaagagaagcggatctggcgtgaagcagaccctgaatttcgacctgctgaagctggctggcgacgtggaatccaacccaggccctggccatatgaccgagtacaagcccacggtgcgcctcgccacccgcgacgacgtccccagggccgtacgcaccctcgccgccgcgttcgccgactaccccgccacgcgccacaccgtcgatccggaccgccacatcgagcgggtcaccgagctgcaagaactcttcctcacgcgcgtcgggctcgacatcggcaaggtgtgggtcgcggacgacggcgccgcggtggcggtctggaccacgccggagagcgtcgaagcgggggcggtgttcgccgagatcggcccgcgcatggccgagttgagcggttcccggctggccgcgcagcaacagatggaaggcctcctggcgccgcaccggcccaaggagcccgcgtggttcctggccaccgtcggcgtctcgcccgaccaccagggcaagggtctgggcagcgccgtcgtgctccccggagtggaggcggccgagcgcgccggggtgcccgccttcctggagacctccgcgccccgcaacctccccttctacgagcggctcggcttcaccgtcaccgccgacgtcgaggtgcccgaaggaccgcgcacctggtgcatgacccgcaagcccggtgcctga

SEQ ID NO: 2245 - DNA, 2133 bp, Artificial Sequence
  Synthetic Polynucleotide
atggccttaccagtgaccgccttgctcctgccgctggccttgctgctccacgccgccaggccggcatgcgaagtgcagctgcttgaaagtggcggcggactgattcagcctggcggatctctgagactgagctgtgccgccagcggcttcaccttttctagccacgccatgacctgggtccgacaggcacctggaaaagggcttgaatgggtgtccgccatcagcggctctggcgattacacacactacgccgacagcgtgaagggcagattcaccatcagcagagacaacagcaagaacaccgtgtacctccagatgaacagcctgagagccgaggacagcgccgtgtattattgcgccaaggatgaggatggcggcagcctgcttggacacagaggacaaggcaccctggtcaccgtttcttccggtaccggcggaggcggatctggcggcggaggtagcggtggcggaggatctgaattcggatctctcgaggcaaagcccaccacgactccagcgccgcgaccaccaacaccggcgcccactatcgcgtcgcagcccctgtccctgagaccagaggcggccagaccagcggctggaggcgcagtgcacacgagggggctggacttcgcctgtgacagcaacctgtttgtggcctcttggatcgccgtgatgattatcttcagaatcggaatggccgtggctatcttctgctgcttcttcttcccatcctggcggcggaagcggaaagagaagcagtctgagacaagccccaaagagttcctgaccatctacgaggacgtgaaggacctgaaaacccggcggaaccacgaacaagagcagacctttcctggcggaggcagcaccatctacagcatgatccagagccagagcagcgcccctacaagccaagagcctgcctacacactgtactccctgatccagcctagcagaaagagcggcagccggaagagaaatcacagccccagcttcaacagcacgatctacgaagtgatcggcaagagccagccaaaggctcagaaccctgccagactgagccggaaagagctggaaaacttcgacgtgtacagcagcactagtagagtgaagttcagcagaagcgccgacgcccctgcctaccagcagggacagaaccaactgtacaacgagctgaacctgggcagacgggaagagtacgacgtgctggacaagcggagaggcagggaccctgagatgggcggaaagccccagcggagaaagaacccccaggaaggactgtataacgaactccagaaagacaagatggccgaagcctacagcgagatcggcatgaagggcgagcggagaagaggcaagggccacgatggcctgtaccagggcctgagcaccgccaccaaggacacctatgacgccctgcacatgcaggccctgcctccaagaagggccaagcgatctggatctggagcaacaaacttctcactactcaaacaagcaggtgacgtggaggagaatcccgggcctactagaggccatatgaccgagtacaagcccacggtgcgcctcgccacccgcgacgacgtccccagggccgtacgcaccctcgccgccgcgttcgccgactaccccgccacgcgccacaccgtcgatccggaccgccacatcgagcgggtcaccgagctgcaagaactcttcctcacgcgcgtcgggctcgacatcggcaaggtgtgggtcgcggacgacggcgccgcggtggcggtctggaccacgccggagagcgtcgaagcgggggcggtgttcgccgagatcggcccgcgcatggccgagttgagcggttcccggctggccgcgcagcaacagatggaaggcctcctggcgccgcaccggcccaaggagcccgcgtggttcctggccaccgtcggcgtctcgcccgaccaccagggcaagggtctgggcagcgccgtcgtgctccccggagtggaggcggccgagcgcgccggggtgcccgccttcctggagacctccgcgccccgcaacctccccttctacgagcggctcggcttcaccgtcaccgccgacgtcgaggtgcccgaaggaccgcgcacctggtgcatgacccgcaagcccggtgcctga

SEQ ID NO: 2246 - DNA, 51 bp, Artificial Sequence
  Synthetic Polynucleotide
ggggggggggggggggggggggggggggggggggggggggggggggggggg

SEQ ID NO: 2247 - DNA, 51 bp, Artificial Sequence; identical to SEQ ID NO: 2246
  Synthetic Polynucleotide

SEQ ID NO: 2248 - DNA, 51 bp, Artificial Sequence; identical to SEQ ID NO: 2246
  Synthetic Polynucleotide

SEQ ID NO: 2249 - DNA, 51 bp, Artificial Sequence; identical to SEQ ID NO: 2246
  Synthetic Polynucleotide

SEQ ID NO: 2250 - DNA, 51 bp, Artificial Sequence; identical to SEQ ID NO: 2246
  Synthetic Polynucleotide

SEQ ID NO: 2251 - DNA, 51 bp, Artificial Sequence; identical to SEQ ID NO: 2246
  Synthetic Polynucleotide

SEQ ID NO: 2252 - DNA, 51 bp, Artificial Sequence; identical to SEQ ID NO: 2246
  Synthetic Polynucleotide

SEQ ID NO: 2253 - DNA, 51 bp, Artificial Sequence; identical to SEQ ID NO: 2246
  Synthetic Polynucleotide

SEQ ID NO: 2254 - DNA, 51 bp, Artificial Sequence; identical to SEQ ID NO: 2246
  Synthetic Polynucleotide

SEQ ID NO: 2255 - DNA, 51 bp, Artificial Sequence; identical to SEQ ID NO: 2246
  Synthetic Polynucleotide

SEQ ID NO: 2256 - DNA, 51 bp, Artificial Sequence; identical to SEQ ID NO: 2246
  Synthetic Polynucleotide

SEQ ID NO: 2257 - DNA, 51 bp, Artificial Sequence; identical to SEQ ID NO: 2246
  Synthetic Polynucleotide

SEQ ID NO: 2258 - DNA, 51 bp, Artificial Sequence; identical to SEQ ID NO: 2246
  Synthetic Polynucleotide

SEQ ID NO: 2259 - DNA, 51 bp, Artificial Sequence; identical to SEQ ID NO: 2246
  Synthetic Polynucleotide

SEQ ID NO: 2260 - DNA, 51 bp, Artificial Sequence; identical to SEQ ID NO: 2246
  Synthetic Polynucleotide

SEQ ID NO: 2261 - DNA, 51 bp, Artificial Sequence; identical to SEQ ID NO: 2246
  Synthetic Polynucleotide

SEQ ID NO: 2262 - DNA, 51 bp, Artificial Sequence; identical to SEQ ID NO: 2246
  Synthetic Polynucleotide

SEQ ID NO: 2263 - DNA, 51 bp, Artificial Sequence; identical to SEQ ID NO: 2246
  Synthetic Polynucleotide

SEQ ID NO: 2264 - DNA, 51 bp, Artificial Sequence; identical to SEQ ID NO: 2246
  Synthetic Polynucleotide

SEQ ID NO: 2265 - DNA, 51 bp, Artificial Sequence; identical to SEQ ID NO: 2246
  Synthetic Polynucleotide

SEQ ID NO: 2266 - DNA, 51 bp, Artificial Sequence; identical to SEQ ID NO: 2246
  Synthetic Polynucleotide

SEQ ID NO: 2267 - DNA, 51 bp, Artificial Sequence; identical to SEQ ID NO: 2246
  Synthetic Polynucleotide

SEQ ID NO: 2268 - DNA, 51 bp, Artificial Sequence; identical to SEQ ID NO: 2246
  Synthetic Polynucleotide

SEQ ID NO: 2269 - DNA, 51 bp, Artificial Sequence; identical to SEQ ID NO: 2246
  Synthetic Polynucleotide

SEQ ID NO: 2270 - DNA, 51 bp, Artificial Sequence; identical to SEQ ID NO: 2246
  Synthetic Polynucleotide

SEQ ID NO: 2271 - DNA, 51 bp, Artificial Sequence; identical to SEQ ID NO: 2246
  Synthetic Polynucleotide

SEQ ID NO: 2272 - DNA, 51 bp, Artificial Sequence; identical to SEQ ID NO: 2246
  Synthetic Polynucleotide

SEQ ID NO: 2273 - DNA, 51 bp, Artificial Sequence; identical to SEQ ID NO: 2246
  Synthetic Polynucleotide

SEQ ID NO: 2274 - DNA, 51 bp, Artificial Sequence; identical to SEQ ID NO: 2246
  Synthetic Polynucleotide

SEQ ID NO: 2275 - DNA, 2691 bp, Artificial Sequence
  Synthetic Polynucleotide
atggccttaccagtgaccgccttgctcctgccgctggccttgctgctccacgccgccaggccggacatccagatgacacagagccctagcagcctgtctgccagcgtgggagacagagtgaccatcacatgcaaggccagcgaccacatcaacaactggctggcctggtatcagcagaagcctggacaggcccctaagctgctgatctacggcgctaccacactggaaacaggcgtgcccagcagattttctggcagcggctctggcaccgactacaccctgacaatatccagcctccagcctgaggacttcgccacctactactgtcagcagagctggaacaccccttggacattcggccagggcaccaagctggaaatcaagagactcgagggacagcctaaggccaatcctaccgtgacactgttccctccaagcagcgaagaactccaggccaacaaggccacacttgtgtgcctgatctccgacttctaccctggggctgtgacagtggcttggaaggccgatggatctcctgtgaaagccggcgtggaaaccaccaagccatccaagcagagcaacaacaaatacgccgccagctcctacctgagcctgacacctgagcagtggaagtcccacagatcctacagctgccaagtgacccacgaaggcagcaccgtggaaaagacagtggcccctacagagtgcagcacaacacctggcgagagaagtagcctgcctgccttctatcctggcaccagcggctcttgttctggctgtggatctctgagcctgcctctgctggctggactggttgctgctgatgctgtggcctctctgctgattgtgggagccgtgttcctgtgcgccagacctagaagaagccccgctcaagaggacggcaaggtgtacatcaacatgcccggcagaggaagggccaagcgatctggatctggagcaacaaacttctcactactcaaacaagcaggtgacgtggaggagaatcccgggcctactagtatggactggatttggcgcatccttttccttgtcggcgctgctaccggcgcgcattccttcgaacaagttcagcttcaacagcctggcgctgagctggtcaaacctggcgcttctgtgaagatgagctgcaaagccagcggctacgccttcagcagctactggatcaactggatgaagcagaaacccggccagggactcgaatggatcggccaaatctatcccggcgacggcgacaccaactacaacggcaagttcaagggcagagccacactgaccgccgatacctctagcagcacagcctacatgcagctgagcagcctgaccagcgaagatagcgccgtgtacttctgtgcccggtccatcacaacagtcgtgggctgcgctatggactattggggccagggaacaagcgtgaccgtgtctagtacgcgtgcctctacaaagggaccctccgtgtttcctctggctcccagcagcaagtctacaagcggaggaacagccgctctgggctgcctggtcaaggattactttcccgagcctgtgaccgtgtcctggaatagcggagcactgacaagcggcgtgcacacctttccagccgtgctgcaaagcagcggcctgtactctctgagcagcgtggtcacagtgcctagctctagcctgggcacccagacctacatctgcaatgtgaaccacaagcctagcaacaccaaggtggacaagagagtggaacccaagagctgtacaacgccgggcgaaaggagttccttgccggccttttaccccggcacaagcggaagctgtagtgggtgtggaagcctcagcctcccacttcttgcgggcctcgtcgcggcagatgcagtagcttcacttcttattgtaggcgcggtatttctctgtgctcgaccaaggaggtcacccgctcaggaggatggtaaggtgtatataaatatgccaggacgcggacgcgccaagagaagcggatctggcgtgaagcagaccctgaatttcgacctgctgaagctggctggcgacgtggaatccaacccaggcccttctagaggccatatgaccgagtacaagcccacggtgcgcctcgccacccgcgacgacgtccccagggccgtacgcaccctcgccgccgcgttcgccgactaccccgccacgcgccacaccgtcgatccggaccgccacatcgagcgggtcaccgagctgcaagaactcttcctcacgcgcgtcgggctcgacatcggcaaggtgtgggtcgcggacgacggcgccgcggtggcggtctggaccacgccggagagcgtcgaagcgggggcggtgttcgccgagatcggcccgcgcatggccgagttgagcggttcccggctggccgcgcagcaacagatggaaggcctcctggcgccgcaccggcccaaggagcccgcgtggttcctggccaccgtcggcgtctcgcccgaccaccagggcaagggtctgggcagcgccgtcgtgctccccggagtggaggcggccgagcgcgccggggtgcccgccttcctggagacctccgcgccccgcaacctccccttctacgagcggctcggcttcaccgtcaccgccgacgtcgaggtgcccgaaggaccgcgcacctggtgcatgacccgcaagcccggtgcctgagtcgac

SEQ ID NO: 2276 - DNA, 2883 bp, Artificial Sequence
  Synthetic Polynucleotide
atggccttaccagtgaccgccttgctcctgccgctggccttgctgctccacgccgccaggccgctgcctgttctgacacagcctccatccgtgtctgtggcccctggaaagaccgccagaatcacatgcggcggcaacaacatcggcagcaagagcgtgcactggtatcagcagaagcctggacaggctcctgtgctggtggtgtacgacgacagcgatagacctagcggcatccccgagagattcagcggcagcaattccggcaataccgccacactgaccatcagcagagtggaagctggcgacgaggccgactactactgccaagtgtgggacagcagcagcgactacgtggtgtttggcggcggaacaaagctgacagtgcttggacagcctaaggccaatcctaccgtgacactgttccctccaagcagcgaagaactccaggccaacaaggccacacttgtgtgcctgatctccgacttctaccctggggctgtgacagtggcttggaaggccgatggatctcctgtgaaagccggcgtggaaaccaccaagccatccaagcagagcaacaacaaatacgccgccagctcctacctgagcctgacacctgagcagtggaagtcccacagatcctacagctgccaagtgacccacgaaggcagcaccgtggaaaagacagtggcccctacagagtgcagcggatcccagagcttcggcctgctggaccccaagctgtgctacctgctggatggcatcctgttcatctacggcgtgatcctgaccgccctgttcctgagagtgaagttcagcagaagcgccgacgcccctgcctaccagcagggacagaaccaactgtacaacgagctgaacctgggcagacgggaagagtacgacgtgctggacaagcggagaggcagggaccctgagatgggcggaaagccccagcggagaaagaacccccaggaaggactgtataacgaactccagaaagacaagatggccgaagcctacagcgagatcggcatgaagggcgagcggagaagaggcaagggccacgatggcctgtaccagggcctgagcaccgccaccaaggacacctatgacgccctgcacatgcaggccctgcctccaagaagggccaagcgatctggatctggagcaacaaacttctcactactcaaacaagcaggtgacgtggaggagaatcccgggcctactagtatggactggatttggcgcatccttttccttgtcggcgctgctaccggcgcgcattccttcgaagaagttcaactggtgcagagcggagccgaagtgaagaagccaggcgagagcctgaagattagctgcaaaggcagcggctacagcttcaccagctactggatcggctgggtccgacagatgcctggcaaaggactggaatggatgggcatcatctaccccggcgacagcgacaccagatacagccctagctttcagggccaagtgaccatctccgccgacaagagcatcagcacagcctacctccagtggtcctctctgaaggccagcgataccgccatgtactactgcgccagacaagtctggggatggcaaggcggcatgtaccccaggtctaactggtggtacaacctggactcttggggccagggcacactggtcacagtctcttctgcctctacaaagggaccctccgtgtttcctctggctcccagcagcaagtctacaagcggaggaacagccgctctgggctgcctggtcaaggattactttcccgagcctgtgaccgtgtcctggaatagcggagcactgacaagcggcgtgcacacctttccagccgtgctgcaaagcagcggcctgtactctctgagcagcgtggtcacagtgcctagctctagcctgggcacccagacctacatctgcaatgtgaaccacaagcctagcaacaccaaggtggacaagagagtggaacccaagagctgtggtaccatcactcaaggtttggcagtgtcaaccatctcatcattctttccacctggctaccaagtgtccttctgcctggtcatggtgctgctgttcgccgtggataccggcctgtacttcagcgtcaagaccaacatccggtccagcaccagagactggaaggaccacaagttcaagtggcggaaggaccctcaggacaagagggccaagcgatctggatctggagcaacaaacttctcactactcaaacaagcaggtgacgtggaggagaatcccgggccttctagaggccatatgaccgagtacaagcccacggtgcgcctcgccacccgcgacgacgtccccagggccgtacgcaccctcgccgccgcgttcgccgactaccccgccacgcgccacaccgtcgatccggaccgccacatcgagcgggtcaccgagctgcaagaactcttcctcacgcgcgtcgggctcgacatcggcaaggtgtgggtcgcggacgacggcgccgcggtggcggtctggaccacgccggagagcgtcgaagcgggggcggtgttcgccgagatcggcccgcgcatggccgagttgagcggttcccggctggccgcgcagcaacagatggaaggcctcctggcgccgcaccggcccaaggagcccgcgtggttcctggccaccgtcggcgtctcgcccgaccaccagggcaagggtctgggcagcgccgtcgtgctccccggagtggaggcggccgagcgcgccggggtgcccgccttcctggagacctccgcgccccgcaacctccccttctacgagcggctcggcttcaccgtcaccgccgacgtcgaggtgcccgaaggaccgcgcacctggtgcatgacccgcaagcccggtgcctga

SEQ ID NO: 2277 - DNA, 3126 bp, Artificial Sequence
  Synthetic Polynucleotide
atggccttaccagtgaccgccttgctcctgccgctggccttgctgctccacgccgccaggccgctgcctgttctgacacagcctccatccgtgtctgtggcccctggaaagaccgccagaatcacatgcggcggcaacaacatcggcagcaagagcgtgcactggtatcagcagaagcctggacaggctcctgtgctggtggtgtacgacgacagcgatagacctagcggcatccccgagagattcagcggcagcaattccggcaataccgccacactgaccatcagcagagtggaagctggcgacgaggccgactactactgccaagtgtgggacagcagcagcgactacgtggtgtttggcggcggaacaaagctgacagtgcttggacagcctaaggccaatcctaccgtgacactgttccctccaagcagcgaagaactccaggccaacaaggccacacttgtgtgcctgatctccgacttctaccctggggctgtgacagtggcttggaaggccgatggatctcctgtgaaagccggcgtggaaaccaccaagccatccaagcagagcaacaacaaatacgccgccagctcctacctgagcctgacacctgagcagtggaagtcccacagatcctacagctgccaagtgacccacgaaggcagcaccgtggaaaagacagtggcccctacagagtgcagcggatcccagagcttcggcctgctggaccccaagctgtgctacctgctggatggcatcctgttcatctacggcgtgatcctgaccgccctgttcctgagagtgaagttcagcagaagcgccgacgcccctgcctaccagcagggacagaaccaactgtacaacgagctgaacctgggcagacgggaagagtacgacgtgctggacaagcggagaggcagggaccctgagatgggcggaaagccccagcggagaaagaacccccaggaaggactgtataacgaactccagaaagacaagatggccgaagcctacagcgagatcggcatgaagggcgagcggagaagaggcaagggccacgatggcctgtaccagggcctgagcaccgccaccaaggacacctatgacgccctgcacatgcaggccctgcctccaagaagggccaagcgatctggatctggagcaacaaacttctcactactcaaacaagcaggtgacgtggaggagaatcccgggcctactagtatggactggatttggcgcatccttttccttgtcggcgctgctaccggcgcgcattccttcgaagaagttcaactggtgcagagcggagccgaagtgaagaagccaggcgagagcctgaagattagctgcaaaggcagcggctacagcttcaccagctactggatcggctgggtccgacagatgcctggcaaaggactggaatggatgggcatcatctaccccggcgacagcgacaccagatacagccctagctttcagggccaagtgaccatctccgccgacaagagcatcagcacagcctacctccagtggtcctctctgaaggccagcgataccgccatgtactactgcgccagacaagtctggggatggcaaggcggcatgtaccccaggtctaactggtggtacaacctggactcttggggccagggcacactggtcacagtctcttctgcctctacaaagggaccctccgtgtttcctctggctcccagcagcaagtctacaagcggaggaacagccgctctgggctgcctggtcaaggattactttcccgagcctgtgaccgtgtcctggaatagcggagcactgacaagcggcgtgcacacctttccagccgtgctgcaaagcagcggcctgtactctctgagcagcgtggtcacagtgcctagctctagcctgggcacccagacctacatctgcaatgtgaaccacaagcctagcaacaccaaggtggacaagagagtggaacccaagagctgtggtacccagagttttgggttgttggaccctaaattgtgctatctgttggacggaatcctgttcatttacggagtgatcctgaccgcattgttcctgcgggttaagttttccagatccgcagacgcacccgcttaccaacaagggcagaaccaactctacaatgaacttaatttggggcggagggaagagtacgacgttctggacaaaaggaggggacgagatcccgagatgggcggaaagcctcagcgaaggaagaatccgcaagaggggctttataacgaactccagaaagataaaatggcagaagcctatagtgagattgggatgaagggagaaaggaggaggggtaaaggtcacgatgggttgtaccaaggattgagcacagccactaaagatacctatgatgcgctccacatgcaggccctgccgccaagacgcgccaagagaagcggatctggcgtgaagcagaccctgaatttcgacctgctgaagctggctggcgacgtggaatccaacccaggcccttctagaggccatatgaccgagtacaagcccacggtgcgcctcgccacccgcgacgacgtccccagggccgtacgcaccctcgccgccgcgttcgccgactaccccgccacgcgccacaccgtcgatccggaccgccacatcgagcgggtcaccgagctgcaagaactcttcctcacgcgcgtcgggctcgacatcggcaaggtgtgggtcgcggacgacggcgccgcggtggcggtctggaccacgccggagagcgtcgaagcgggggcggtgttcgccgagatcggcccgcgcatggccgagttgagcggttcccggctggccgcgcagcaacagatggaaggcctcctggcgccgcaccggcccaaggagcccgcgtggttcctggccaccgtcggcgtctcgcccgaccaccagggcaagggtctgggcagcgccgtcgtgctccccggagtggaggcggccgagcgcgccggggtgcccgccttcctggagacctccgcgccccgcaacctccccttctacgagcggctcggcttcaccgtcaccgccgacgtcgaggtgcccgaaggaccgcgcacctggtgcatgacccgcaagcccggtgcctga

SEQ ID NO: 2278 - DNA, 2796 bp, Artificial Sequence
  Synthetic Polynucleotide
atggccttaccagtgaccgccttgctcctgccgctggccttgctgctccacgccgccaggccggacatccagatgacacagagccctagcagcctgtctgccagcgtgggagacagagtgaccatcacatgcaaggccagcgaccacatcaacaactggctggcctggtatcagcagaagcctggacaggcccctaagctgctgatctacggcgctaccacactggaaacaggcgtgcccagcagattttctggcagcggctctggcaccgactacaccctgacaatatccagcctccagcctgaggacttcgccacctactactgtcagcagagctggaacaccccttggacattcggccagggcaccaagctggaaatcaagagactcgagggacagcctaaggccaatcctaccgtgacactgttccctccaagcagcgaagaactccaggccaacaaggccacacttgtgtgcctgatctccgacttctaccctggggctgtgacagtggcttggaaggccgatggatctcctgtgaaagccggcgtggaaaccaccaagccatccaagcagagcaacaacaaatacgccgccagctcctacctgagcctgacacctgagcagtggaagtcccacagatcctacagctgccaagtgacccacgaaggcagcaccgtggaaaagacagtggcccctacagagtgcagcggtaccctgccaatccaggtggaacagaacttcctgagcaacctgttcgtggcctcctggatcgccgtgatgattatcttcagaatcggaatggccgtggctatcttctgctgcttcttcttcccatccgccaacgagcggtgcaagagcaaggtggtgccttgcagacagaagcagtggcggaccagcttcgacagcaagaagctggacctgaactacaaccacttcgagagcatggaatggtcccacagatccagacggggcagaatctggggaagggccaagcgatctggatctggagcaacaaacttctcactactcaaacaagcaggtgacgtggaggagaatcccgggcctactagtatggactggatttggcgcatccttttccttgtcggcgctgctaccggcgcgcattccttcgaacaagttcagcttcaacagcctggcgctgagctggtcaaacctggcgcttctgtgaagatgagctgcaaagccagcggctacgccttcagcagctactggatcaactggatgaagcagaaacccggccagggactcgaatggatcggccaaatctatcccggcgacggcgacaccaactacaacggcaagttcaagggcagagccacactgaccgccgatacctctagcagcacagcctacatgcagctgagcagcctgaccagcgaagatagcgccgtgtacttctgtgcccggtccatcacaacagtcgtgggctgcgctatggactattggggccagggaacaagcgtgaccgtgtctagtacgcgtgcctctacaaagggaccctccgtgtttcctctggctcccagcagcaagtctacaagcggaggaacagccgctctgggctgcctggtcaaggattactttcccgagcctgtgaccgtgtcctggaatagcggagcactgacaagcggcgtgcacacctttccagccgtgctgcaaagcagcggcctgtactctctgagcagcgtggtcacagtgcctagctctagcctgggcacccagacctacatctgcaatgtgaaccacaagcctagcaacaccaaggtggacaagagagtggaacccaagagctgtggatccacactgcctattcaggtcgagcagaatttcctctccaatctgttcgtcgccagctggattgctgtcatgataatctttcggattggaatggctgtcgcaatcttttgttgtttcttttttccgtccgccaatgagagatgcaagtctaaagtggtgccctgtcggcagaaacaatggcgcacctccttcgactccaagaaactggatctcaattacaatcatttcgagtctatggaatggtcacatcggagcagaagaggccggatctggggtcgcgccaagagaagcggatctggcgtgaagcagaccctgaatttcgacctgctgaagctggctggcgacgtggaatccaacccaggcccttctagaggccatatgaccgagtacaagcccacggtgcgcctcgccacccgcgacgacgtccccagggccgtacgcaccctcgccgccgcgttcgccgactaccccgccacgcgccacaccgtcgatccggaccgccacatcgagcgggtcaccgagctgcaagaactcttcctcacgcgcgtcgggctcgacatcggcaaggtgtgggtcgcggacgacggcgccgcggtggcggtctggaccacgccggagagcgtcgaagcgggggcggtgttcgccgagatcggcccgcgcatggccgagttgagcggttcccggctggccgcgcagcaacagatggaaggcctcctggcgccgcaccggcccaaggagcccgcgtggttcctggccaccgtcggcgtctcgcccgaccaccagggcaagggtctgggcagcgccgtcgtgctccccggagtggaggcggccgagcgcgccggggtgcccgccttcctggagacctccgcgccccgcaacctccccttctacgagcggctcggcttcaccgtcaccgccgacgtcgaggtgcccgaaggaccgcgcacctggtgcatgacccgcaagcccggtgcctga

SEQ ID NO: 2279 - DNA, 3114 bp, Artificial Sequence
  Synthetic Polynucleotide
atggccttaccagtgaccgccttgctcctgccgctggccttgctgctccacgccgccaggccggacatccagatgacacagagccctagcagcctgtctgccagcgtgggagacagagtgaccatcacatgcaaggccagcgaccacatcaacaactggctggcctggtatcagcagaagcctggacaggcccctaagctgctgatctacggcgctaccacactggaaacaggcgtgcccagcagattttctggcagcggctctggcaccgactacaccctgacaatatccagcctccagcctgaggacttcgccacctactactgtcagcagagctggaacaccccttggacattcggccagggcaccaagctggaaatcaagagaggcggaggcggaagtggaggcggaggatctggcggcggaggctctcaagttcagcttcaacagcctggcgctgagctggtcaaacctggcgcttctgtgaagatgagctgcaaagccagcggctacgccttcagcagctactggatcaactggatgaagcagaaacccggccagggactcgaatggatcggccaaatctatcccggcgacggcgacaccaactacaacggcaagttcaagggcagagccacactgaccgccgatacctctagcagcacagcctacatgcagctgagcagcctgaccagcgaagatagcgccgtgtacttctgtgcccggtccatcacaacagtcgtgggctgcgctatggactattggggccagggaacaagcgtgaccgtgtctagtacgcgtgcgaagcccaccacgacgccagctcctagacctcctacaccagctcctacaatcgccagccagcctctgtctctcagacccgaagcctgtagacctgctgctggcggagctgtgcataccagaggactggatttcgcctgcgacagcaacctgtttgtggcctcttggatcgccgtgatgattatcttcagaatcggaatggccgtggctatcttctgctgcttcttcttcccatcctggcggcggaagcggaaagagaagcagtctgagacaagccccaaagagttcctgaccatctacgaggacgtgaaggacctgaaaacccggcggaaccacgaacaagagcagacctttcctggcggaggcagcaccatctacagcatgatccagagccagagcagcgcccctacaagccaagagcctgcctacacactgtactccctgatccagcctagcagaaagagcggcagccggaagagaaatcacagccccagcttcaacagcacgatctacgaagtgatcggcaagagccagccaaaggctcagaaccctgccagactgagccggaaagagctggaaaacttcgacgtgtacagcagagtgaagttcagcaggagcgcagacgcccccgcgtaccagcagggccagaaccagctctataacgagctgaatctaggacgaagagaggagtacgatgttttggacaagagacgtggccgggaccctgagatggggggaaagccgagaaggaagaaccctcaggaaggcctgtacaatgaactgcagaaagataagatggcggaggcctacagtgagattgggatgaaaggcgagcgccggaggggcaaggggcacgatggcctttaccagggtctcagtacagccaccaaggacacctacgacgcccttcacatgcaggccctgcctccacgctctagagccaagcgatctggatctggagcaacaaacttctcactactcaaacaagcaggtgacgtggaggagaatcccgggcctgggatccacaccatggctacctacgaggtgctgtgcgaggtggcaagaaagctgggcaccgacgacagagaagtggtgctgttcctgctgaacgtgttcatccctcagcctacactggcccagctgatcggtgcactgagagccctgaaagaggaaggccggctgacctttcctctgctggccgaatgcctgttcagagccggaagaagggatctgctgcgggacctgctgcatctggaccccagatttctggaaagacacctggccggcaccatgagctacttcagcccttaccagctgaccgtgctgcacgttgacggcgaactgtgcgccagagatattcggagcctgatcttcctgagcaaggacaccatcggcagccggtctacccctcagacatttctgcactgggtgtactgcatggaaaacctggacctgctcggccccacagatgtggatgccctgatgtccatgctgagaagcctgagcagagtggacctccagagacaggtgcagacactgatgggactgcacctgagcggacctagccacagccagcactacagacacacccctctcgaggactacaaggacgacgatgacaagactagtagagcaaagcgaagtggtagcggagcaaccaacttttctctgctcaagcaagccggtgacgtggaagagaaccctggtcctcatatgaccgagtacaagcccacggtgcgcctcgccacccgcgacgacgtccccagggccgtacgcaccctcgccgccgcgttcgccgactaccccgccacgcgccacaccgtcgatccggaccgccacatcgagcgggtcaccgagctgcaagaactcttcctcacgcgcgtcgggctcgacatcggcaaggtgtgggtcgcggacgacggcgccgcggtggcggtctggaccacgccggagagcgtcgaagcgggggcggtgttcgccgagatcggcccgcgcatggccgagttgagcggttcccggctggccgcgcagcaacagatggaaggcctcctggcgccgcaccggcccaaggagcccgcgtggttcctggccaccgtcggcgtctcgcccgaccaccagggcaagggtctgggcagcgccgtcgtgctccccggagtggaggcggccgagcgcgccggggtgcccgccttcctggagacctccgcgccccgcaacctccccttctacgagcggctcggcttcaccgtcaccgccgacgtcgaggtgcccgaaggaccgcgcacctggtgcatgacccgcaagcccggtgcctga

SEQ ID NO: 2280 - DNA, 2487 bp, Artificial Sequence
  Synthetic Polynucleotide
atggccttaccagtgaccgccttgctcctgccgctggccttgctgctccacgccgccaggccggacatccagatgacacagagccctagcagcctgtctgccagcgtgggagacagagtgaccatcacatgcaaggccagcgaccacatcaacaactggctggcctggtatcagcagaagcctggacaggcccctaagctgctgatctacggcgctaccacactggaaacaggcgtgcccagcagattttctggcagcggctctggcaccgactacaccctgacaatatccagcctccagcctgaggacttcgccacctactactgtcagcagagctggaacaccccttggacattcggccagggcaccaagctggaaatcaagagactcgagggacagcctaaggccaatcctaccgtgacactgttccctccaagcagcgaagaactccaggccaacaaggccacacttgtgtgcctgatctccgacttctaccctggggctgtgacagtggcttggaaggccgatggatctcctgtgaaagccggcgtggaaaccaccaagccatccaagcagagcaacaacaaatacgccgccagctcctacctgagcctgacacctgagcagtggaagtcccacagatcctacagctgccaagtgacccacgaaggcagcaccgtggaaaagacagtggcccctacagagtgcagcggtaccctgccaatccaggtggaacagaacttcctgagcaacctgttcgtggcctcctggatcgccgtgatgattatcttcagaatcggaatggccgtggctatcttctgctgcttcttcttcccatccgccaacgagcggtgcaagagcaaggtggtgccttgcagacagaagcagtggcggaccagcttcgacagcaagaagctggacctgaactacaaccacttcgagagcatggaatggtcccacagatccagacggggcagaatctggggaagggccaagcgatctggatctggagcaacaaacttctcactactcaaacaagcaggtgacgtggaggagaatcccgggcctactagtatggactggatttggcgcatccttttccttgtcggcgctgctaccggcgcgcattccttcgaacaagttcagcttcaacagcctggcgctgagctggtcaaacctggcgcttctgtgaagatgagctgcaaagccagcggctacgccttcagcagctactggatcaactggatgaagcagaaacccggccagggactcgaatggatcggccaaatctatcccggcgacggcgacaccaactacaacggcaagttcaagggcagagccacactgaccgccgatacctctagcagcacagcctacatgcagctgagcagcctgaccagcgaagatagcgccgtgtacttctgtgcccggtccatcacaacagtcgtgggctgcgctatggactattggggccagggaacaagcgtgaccgtgtctagtacgcgtggcgatattgagaatacctctctggccccagaagatcctacattccccgccgacacatggggaacatatctgctgacaaccgaaaccgggctgcaaaaggaccatgctctgtgggatcataccgctcagaatctgcttcggatggggcttgcattcctggtcctggtggctcttgtctggtttctggtcgaggactggctgtcccggaagagaaccagagaaagagcttccagggccagcacctgggaaggcagacgcagactgaatactcagaccctgcgcgccaagagaagcggatctggcgtgaagcagaccctgaatttcgacctgctgaagctggctggcgacgtggaatccaacccaggcccttctagaggccatatgaccgagtacaagcccacggtgcgcctcgccacccgcgacgacgtccccagggccgtacgcaccctcgccgccgcgttcgccgactaccccgccacgcgccacaccgtcgatccggaccgccacatcgagcgggtcaccgagctgcaagaactcttcctcacgcgcgtcgggctcgacatcggcaaggtgtgggtcgcggacgacggcgccgcggtggcggtctggaccacgccggagagcgtcgaagcgggggcggtgttcgccgagatcggcccgcgcatggccgagttgagcggttcccggctggccgcgcagcaacagatggaaggcctcctggcgccgcaccggcccaaggagcccgcgtggttcctggccaccgtcggcgtctcgcccgaccaccagggcaagggtctgggcagcgccgtcgtgctccccggagtggaggcggccgagcgcgccggggtgcccgccttcctggagacctccgcgccccgcaacctccccttctacgagcggctcggcttcaccgtcaccgccgacgtcgaggtgcccgaaggaccgcgcacctggtgcatgacccgcaagcccggtgcctga

SEQ ID NO: 2281 - DNA, 2172 bp, Artificial Sequence; identical to SEQ ID NO: 1860
  Synthetic Polynucleotide

SEQ ID NO: 2282 - DNA, 2004 bp, Artificial Sequence
  Synthetic Polynucleotide
atggccttaccagtgaccgccttgctcctgccgctggccttgctgctccacgccgccaggccggacatccagatgacacagagccctagcagcctgtctgccagcgtgggagacagagtgaccatcacatgcaaggccagcgaccacatcaacaactggctggcctggtatcagcagaagcctggacaggcccctaagctgctgatctacggcgctaccacactggaaacaggcgtgcccagcagattttctggcagcggctctggcaccgactacaccctgacaatatccagcctccagcctgaggacttcgccacctactactgtcagcagagctggaacaccccttggacattcggccagggcaccaagctggaaatcaagagactcgagatcactcaaggtttggcagtgtcaaccatctcatcattctttccacctggctaccaagtgtccttctgcctggtcatggtgctgctgttcgccgtggataccggcctgtacttcagcgtcaagaccaacatccggtccagcaccagagactggaaggaccacaagttcaagtggcggaaggaccctcaggacaagagggccaagcgatctggatctggagcaacaaacttctcactactcaaacaagcaggtgacgtggaggagaatcccgggcctactagtatggactggatttggcgcatccttttccttgtcggcgctgctaccggcgcgcattccttcgaacaagttcagcttcaacagcctggcgctgagctggtcaaacctggcgcttctgtgaagatgagctgcaaagccagcggctacgccttcagcagctactggatcaactggatgaagcagaaacccggccagggactcgaatggatcggccaaatctatcccggcgacggcgacaccaactacaacggcaagttcaagggcagagccacactgaccgccgatacctctagcagcacagcctacatgcagctgagcagcctgaccagcgaagatagcgccgtgtacttctgtgcccggtccatcacaacagtcgtgggctgcgctatggactattggggccagggaacaagcgtgaccgtgtctagtacgcgtatcacccagggcctggccgtgtctaccatcagcagctttttcccacccggctaccaggtgtccttctgcctcgtgatggtgctgctgttcgccgtggacaccggcctgtacttcagcgtgaaaacaaacatccggtccagcaccagagactggaaggaccacaagttcaagtggcggaaggacccccaggacaagcgcgccaagagaagcggatctggcgtgaagcagaccctgaatttcgacctgctgaagctggctggcgacgtggaatccaacccaggcccttctagaggccatatgaccgagtacaagcccacggtgcgcctcgccacccgcgacgacgtccccagggccgtacgcaccctcgccgccgcgttcgccgactaccccgccacgcgccacaccgtcgatccggaccgccacatcgagcgggtcaccgagctgcaagaactcttcctcacgcgcgtcgggctcgacatcggcaaggtgtgggtcgcggacgacggcgccgcggtggcggtctggaccacgccggagagcgtcgaagcgggggcggtgttcgccgagatcggcccgcgcatggccgagttgagcggttcccggctggccgcgcagcaacagatggaaggcctcctggcgccgcaccggcccaaggagcccgcgtggttcctggccaccgtcggcgtctcgcccgaccaccagggcaagggtctgggcagcgccgtcgtgctccccggagtggaggcggccgagcgcgccggggtgcccgccttcctggagacctccgcgccccgcaacctccccttctacgagcggctcggcttcaccgtcaccgccgacgtcgaggtgcccgaaggaccgcgcacctggtgcatgacccgcaagcccggtgcctga

SEQ ID NO: 2283 - DNA, 3180 bp, Artificial Sequence
  Synthetic Polynucleotide
atggccttaccagtgaccgccttgctcctgccgctggccttgctgctccacgccgccaggccggcatgcgaagtgcagctgcttgaaagtggcggcggactgattcagcctggcggatctctgagactgagctgtgccgccagcggcttcaccttttctagccacgccatgacctgggtccgacaggcacctggaaaagggcttgaatgggtgtccgccatcagcggctctggcgattacacacactacgccgacagcgtgaagggcagattcaccatcagcagagacaacagcaagaacaccgtgtacctccagatgaacagcctgagagccgaggacagcgccgtgtattattgcgccaaggatgaggatggcggcagcctgcttggacacagaggacaaggcaccctggtcaccgtttcttccggtaccggcggaggcggatctggcggcggaggtagcggtggcggaggatctgaattcggcatgcggactgaagacctcccaaaggctgtggtgttcctggagcctcaatggtacagggtgctggagaaggacagtgtgactctgaagtgccagggagcctactcccctgaggacaattccacacagtggtttcacaatgagagcctcatctcaagccaggcctccagctacttcattgacgctgccacagtggacgacagtggagagtacaggtgccagacaaacctctccaccctcagtgacccggtgcagctagaagtccatatcggctggctgttgctccaggcccctcggtgggtgttcaaggaggaagaccctattcacctgaggtgtcacagctggaagaacactgctctgcataaggtcacatatttacagaatggcaaaggcaggaagtattttcatcataattctgacttctacattccaaaagccacactcaaagacagcggctcctacttctgcagggggcttgttgggagtaaaaatgtgtcttcagagactgtgaacatcaccatcactcaaggtttggcagtgtcaaccatctcatcattctttccacctggctaccaagtgtccttctgcctggtcatggtgctgctgttcgccgtggataccggcctgtacttcagcgtcaagaccaacatccggtccagcaccagagactggaaggaccacaagttcaagtggcggaaggaccctcaggacaagagggccaagcgatctggatctggagcaacaaacttctcactactcaaacaagcaggtgacgtggaggagaatcccgggcctactagtgccaccatggactggatttggcgcatccttttccttgtcggcgctgctaccggcgcccattccgggcccgaagtgcagctggttgaatctggcggaggactggttcaggctggcggatctctgagactgtcttgtgccgccagcggcagaacctttagcatgggctggtttagacaggcccctggcaaagagagagagttcgtcgccgccatcacatactctggcggcagcccttactacgccgactctgtgaagggcagattcaccatcagccgggacaacgccaagaacaccgtgtacctccagatgaacagcctgaagcctgaggacaccgccgtgtactactgcgccgccaatccaacatacggcagcgactggaacgccgagaattggggccagggaacccaagtgacagtgtctagcggatccggcggcggaggatctggcggaggcggatctgggggcggaggctctttcgaaggcatgagaaccgaggacctgcctaaggccgtggtgttcctggaaccccagtggtacagagtgctggaaaaggacagcgtgaccctgaagtgccagggcgcctacagccccgaggacaatagcacccagtggttccacaacgagagcctgatctccagccaggccagcagctacttcatcgacgccgccaccgtggacgacagcggcgagtatagatgccagaccaacctgagcaccctgagcgaccccgtgcagctggaagtgcacatcggatggctgctgctgcaggcccccagatgggtgttcaaagaagaggaccccatccacctgagatgccactcttggaagaacaccgccctgcacaaagtgacctacctgcagaacggcaagggcagaaagtacttccaccacaacagcgacttctacatccccaaggccaccctgaaggactccggctcctacttctgcagaggcctcgtgggcagcaagaacgtgtccagcgagacagtgaacatcaccatcacccagggcctggccgtgtctaccatcagcagctttttcccacccggctaccaggtgtccttctgcctcgtgatggtgctgctgttcgccgtggacaccggcctgtacttcagcgtgaaaacaaacatccggtccagcaccagagactggaaggaccacaagttcaagtggcggaaggacccccaggacaagcgcgccaagagaagcggatctggcgtgaagcagaccctgaatttcgacctgctgaagctggctggcgacgtggaatccaacccaggcccttctagaggccatatgaccgagtacaagcccacggtgcgcctcgccacccgcgacgacgtccccagggccgtacgcaccctcgccgccgcgttcgccgactaccccgccacgcgccacaccgtcgatccggaccgccacatcgagcgggtcaccgagctgcaagaactcttcctcacgcgcgtcgggctcgacatcggcaaggtgtgggtcgcggacgacggcgccgcggtggcggtctggaccacgccggagagcgtcgaagcgggggcggtgttcgccgagatcggcccgcgcatggccgagttgagcggttcccggctggccgcgcagcaacagatggaaggcctcctggcgccgcaccggcccaaggagcccgcgtggttcctggccaccgtcggcgtctcgcccgaccaccagggcaagggtctgggcagcgccgtcgtgctccccggagtggaggcggccgagcgcgccggggtgcccgccttcctggagacctccgcgccccgcaacctccccttctacgagcggctcggcttcaccgtcaccgccgacgtcgaggtgcccgaaggaccgcgcacctggtgcatgacccgcaagcccggtgcctga

SEQ ID NO: 2284-2286 - skipped (3 entries)

SEQ ID NO: 2287 - DNA, 3156 bp, Artificial Sequence
  Synthetic Polynucleotide
atggccttaccagtgaccgccttgctcctgccgctggccttgctgctccacgccgccaggccggacatccagatgacacagagccctagcagcctgtctgccagcgtgggagacagagtgaccatcacatgcaaggccagcgaccacatcaacaactggctggcctggtatcagcagaagcctggacaggcccctaagctgctgatctacggcgctaccacactggaaacaggcgtgcccagcagattttctggcagcggctctggcaccgactacaccctgacaatatccagcctccagcctgaggacttcgccacctactactgtcagcagagctggaacaccccttggacattcggccagggcaccaagctggaaatcaagagactcgaggacctgaagaacgtgttcccacctgaggtggccgtgttcgagcctagcgaggccgagatcagccacacccagaaagccaccctcgtgtgcctggctaccggcttctaccccgaccatgtggaactgtcttggtgggtcaacggcaaagaggtgcacagcggcgtgtctaccgacccccagccactgaaagaacagcccgccctgaacgacagccggtactgcctgagcagcagactgagagtgtccgccaccttctggcagaacccccggaaccacttcagatgccaggtgcagttctacggcctgagcgagaacgacgagtggacccaggacagagccaagcccgtgacccagatcgtgtctgccgaagcctggggcagagccgattgcggatcccagagcttcggcctgctggaccccaagctgtgctacctgctggatggcatcctgttcatctacggcgtgatcctgaccgccctgttcctgagagtgaagttcagcagaagcgccgacgcccctgcctaccagcagggacagaaccaactgtacaacgagctgaacctgggcagacgggaagagtacgacgtgctggacaagcggagaggcagggaccctgagatgggcggaaagccccagcggagaaagaacccccaggaaggactgtataacgaactccagaaagacaagatggccgaagcctacagcgagatcggcatgaagggcgagcggagaagaggcaagggccacgatggcctgtaccagggcctgagcaccgccaccaaggacacctatgacgccctgcacatgcaggccctgcctccaagaagggccaagcgatctggatctggagcaacaaacttctcactactcaaacaagcaggtgacgtggaggagaatcccgggcctactagtatggactggatttggcgcatccttttccttgtcggcgctgctaccggcgcgcattccttcgaacaagttcagcttcaacagcctggcgctgagctggtcaaacctggcgcttctgtgaagatgagctgcaaagccagcggctacgccttcagcagctactggatcaactggatgaagcagaaacccggccagggactcgaatggatcggccaaatctatcccggcgacggcgacaccaactacaacggcaagttcaagggcagagccacactgaccgccgatacctctagcagcacagcctacatgcagctgagcagcctgaccagcgaagatagcgccgtgtacttctgtgcccggtccatcacaacagtcgtgggctgcgctatggactattggggccagggaacaagcgtgaccgtgtctagtacgcgtatccagaaccctgatcctgccgtgtaccagctgcgggatagcaagagcagcgacaagagcgtgtgtctgttcaccgacttcgacagccagaccaacgtgtcccagagcaaggactccgacgtgtacatcaccgataagaccgtgctggacatgcggagcatggacttcaagagcaactccgccgtggcctggtccaacaagtccgatttcgcctgcgccaacgccttcaacaacagcattatccccgaggacacattcttcccaagccccgagagcagctgcggtacccagagttttgggttgttggaccctaaattgtgctatctgttggacggaatcctgttcatttacggagtgatcctgaccgcattgttcctgcgggttaagttttccagatccgcagacgcacccgcttaccaacaagggcagaaccaactctacaatgaacttaatttggggcggagggaagagtacgacgttctggacaaaaggaggggacgagatcccgagatgggcggaaagcctcagcgaaggaagaatccgcaagaggggctttataacgaactccagaaagataaaatggcagaagcctatagtgagattgggatgaagggagaaaggaggaggggtaaaggtcacgatgggttgtaccaaggattgagcacagccactaaagatacctatgatgcgctccacatgcaggccctgccgccaagacgcgccaagagaagcggatctggcgtgaagcagaccctgaatttcgacctgctgaagctggctggcgacgtggaatccaacccaggcccttctagaggccatatgaccgagtacaagcccacggtgcgcctcgccacccgcgacgacgtccccagggccgtacgcaccctcgccgccgcgttcgccgactaccccgccacgcgccacaccgtcgatccggaccgccacatcgagcgggtcaccgagctgcaagaactcttcctcacgcgcgtcgggctcgacatcggcaaggtgtgggtcgcggacgacggcgccgcggtggcggtctggaccacgccggagagcgtcgaagcgggggcggtgttcgccgagatcggcccgcgcatggccgagttgagcggttcccggctggccgcgcagcaacagatggaaggcctcctggcgccgcaccggcccaaggagcccgcgtggttcctggccaccgtcggcgtctcgcccgaccaccagggcaagggtctgggcagcgccgtcgtgctccccggagtggaggcggccgagcgcgccggggtgcccgccttcctggagacctccgcgccccgcaacctccccttctacgagcggctcggcttcaccgtcaccgccgacgtcgaggtgcccgaaggaccgcgcacctggtgcatgacccgcaagcccggtgcctga

SEQ ID NO: 2288 - DNA, 2472 bp, Artificial Sequence
  Synthetic Polynucleotide
atggccttaccagtgaccgccttgctcctgccgctggccttgctgctccacgccgccaggccggacatccagatgacacagagccctagcagcctgtctgccagcgtgggagacagagtgaccatcacatgcaaggccagcgaccacatcaacaactggctggcctggtatcagcagaagcctggacaggcccctaagctgctgatctacggcgctaccacactggaaacaggcgtgcccagcagattttctggcagcggctctggcaccgactacaccctgacaatatccagcctccagcctgaggacttcgccacctactactgtcagcagagctggaacaccccttggacattcggccagggcaccaagctggaaatcaagagactcgagcagagcttcggcctgctggaccccaagctgtgctacctgctggatggcatcctgttcatctacggcgtgatcctgaccgccctgttcctgagagtgaagttcagcagaagcgccgacgcccctgcctaccagcagggacagaaccaactgtacaacgagctgaacctgggcagacgggaagagtacgacgtgctggacaagcggagaggcagggaccctgagatgggcggaaagccccagcggagaaagaacccccaggaaggactgtataacgaactccagaaagacaagatggccgaagcctacagcgagatcggcatgaagggcgagcggagaagaggcaagggccacgatggcctgtaccagggcctgagcaccgccaccaaggacacctatgacgccctgcacatgcaggccctgcctccaagaagggccaagcgatctggatctggagcaacaaacttctcactactcaaacaagcaggtgacgtggaggagaatcccgggcctactagtatggactggatttggcgcatccttttccttgtcggcgctgctaccggcgcgcattccttcgaacaagttcagcttcaacagcctggcgctgagctggtcaaacctggcgcttctgtgaagatgagctgcaaagccagcggctacgccttcagcagctactggatcaactggatgaagcagaaacccggccagggactcgaatggatcggccaaatctatcccggcgacggcgacaccaactacaacggcaagttcaagggcagagccacactgaccgccgatacctctagcagcacagcctacatgcagctgagcagcctgaccagcgaagatagcgccgtgtacttctgtgcccggtccatcacaacagtcgtgggctgcgctatggactattggggccagggaacaagcgtgaccgtgtctagtacgcgtcagagttttgggttgttggaccctaaattgtgctatctgttggacggaatcctgttcatttacggagtgatcctgaccgcattgttcctgcgggttaagttttccagatccgcagacgcacccgcttaccaacaagggcagaaccaactctacaatgaacttaatttggggcggagggaagagtacgacgttctggacaaaaggaggggacgagatcccgagatgggcggaaagcctcagcgaaggaagaatccgcaagaggggctttataacgaactccagaaagataaaatggcagaagcctatagtgagattgggatgaagggagaaaggaggaggggtaaaggtcacgatgggttgtaccaaggattgagcacagccactaaagatacctatgatgcgctccacatgcaggccctgccgccaagacgcgccaagagaagcggatctggcgtgaagcagaccctgaatttcgacctgctgaagctggctggcgacgtggaatccaacccaggcccttctagaggccatatgaccgagtacaagcccacggtgcgcctcgccacccgcgacgacgtccccagggccgtacgcaccctcgccgccgcgttcgccgactaccccgccacgcgccacaccgtcgatccggaccgccacatcgagcgggtcaccgagctgcaagaactcttcctcacgcgcgtcgggctcgacatcggcaaggtgtgggtcgcggacgacggcgccgcggtggcggtctggaccacgccggagagcgtcgaagcgggggcggtgttcgccgagatcggcccgcgcatggccgagttgagcggttcccggctggccgcgcagcaacagatggaaggcctcctggcgccgcaccggcccaaggagcccgcgtggttcctggccaccgtcggcgtctcgcccgaccaccagggcaagggtctgggcagcgccgtcgtgctccccggagtggaggcggccgagcgcgccggggtgcccgccttcctggagacctccgcgccccgcaacctccccttctacgagcggctcggcttcaccgtcaccgccgacgtcgaggtgcccgaaggaccgcgcacctggtgcatgacccgcaagcccggtgcctga

SEQ ID NO: 2289 - DNA, 3111 bp, Artificial Sequence
  Synthetic Polynucleotide
atggccttaccagtgaccgccttgctcctgccgctggccttgctgctccacgccgccaggccggacatccagatgacacagagccctagcagcctgtctgccagcgtgggagacagagtgaccatcacatgcaaggccagcgaccacatcaacaactggctggcctggtatcagcagaagcctggacaggcccctaagctgctgatctacggcgctaccacactggaaacaggcgtgcccagcagattttctggcagcggctctggcaccgactacaccctgacaatatccagcctccagcctgaggacttcgccacctactactgtcagcagagctggaacaccccttggacattcggccagggcaccaagctggaaatcaagagactcgagggacagcctaaggccaatcctaccgtgacactgttccctccaagcagcgaagaactccaggccaacaaggccacacttgtgtgcctgatctccgacttctaccctggggctgtgacagtggcttggaaggccgatggatctcctgtgaaagccggcgtggaaaccaccaagccatccaagcagagcaacaacaaatacgccgccagctcctacctgagcctgacacctgagcagtggaagtcccacagatcctacagctgccaagtgacccacgaaggcagcaccgtggaaaagacagtggcccctacagagtgcagcggatcccagagcttcggcctgctggaccccaagctgtgctacctgctggatggcatcctgttcatctacggcgtgatcctgaccgccctgttcctgagagtgaagttcagcagaagcgccgacgcccctgcctaccagcagggacagaaccaactgtacaacgagctgaacctgggcagacgggaagagtacgacgtgctggacaagcggagaggcagggaccctgagatgggcggaaagccccagcggagaaagaacccccaggaaggactgtataacgaactccagaaagacaagatggccgaagcctacagcgagatcggcatgaagggcgagcggagaagaggcaagggccacgatggcctgtaccagggcctgagcaccgccaccaaggacacctatgacgccctgcacatgcaggccctgcctccaagaagggccaagcgatctggatctggagcaacaaacttctcactactcaaacaagcaggtgacgtggaggagaatcccgggcctactagtatggactggatttggcgcatccttttccttgtcggcgctgctaccggcgcgcattccttcgaacaagttcagcttcaacagcctggcgctgagctggtcaaacctggcgcttctgtgaagatgagctgcaaagccagcggctacgccttcagcagctactggatcaactggatgaagcagaaacccggccagggactcgaatggatcggccaaatctatcccggcgacggcgacaccaactacaacggcaagttcaagggcagagccacactgaccgccgatacctctagcagcacagcctacatgcagctgagcagcctgaccagcgaagatagcgccgtgtacttctgtgcccggtccatcacaacagtcgtgggctgcgctatggactattggggccagggaacaagcgtgaccgtgtctagtacgcgtgcctctacaaagggaccctccgtgtttcctctggctcccagcagcaagtctacaagcggaggaacagccgctctgggctgcctggtcaaggattactttcccgagcctgtgaccgtgtcctggaatagcggagcactgacaagcggcgtgcacacctttccagccgtgctgcaaagcagcggcctgtactctctgagcagcgtggtcacagtgcctagctctagcctgggcacccagacctacatctgcaatgtgaaccacaagcctagcaacaccaaggtggacaagagagtggaacccaagagctgtggtacccagagttttgggttgttggaccctaaattgtgctatctgttggacggaatcctgttcatttacggagtgatcctgaccgcattgttcctgcgggttaagttttccagatccgcagacgcacccgcttaccaacaagggcagaaccaactctacaatgaacttaatttggggcggagggaagagtacgacgttctggacaaaaggaggggacgagatcccgagatgggcggaaagcctcagcgaaggaagaatccgcaagaggggctttataacgaactccagaaagataaaatggcagaagcctatagtgagattgggatgaagggagaaaggaggaggggtaaaggtcacgatgggttgtaccaaggattgagcacagccactaaagatacctatgatgcgctccacatgcaggccctgccgccaagacgcgccaagagaagcggatctggcgtgaagcagaccctgaatttcgacctgctgaagctggctggcgacgtggaatccaacccaggcccttctagaggccatatgaccgagtacaagcccacggtgcgcctcgccacccgcgacgacgtccccagggccgtacgcaccctcgccgccgcgttcgccgactaccccgccacgcgccacaccgtcgatccggaccgccacatcgagcgggtcaccgagctgcaagaactcttcctcacgcgcgtcgggctcgacatcggcaaggtgtgggtcgcggacgacggcgccgcggtggcggtctggaccacgccggagagcgtcgaagcgggggcggtgttcgccgagatcggcccgcgcatggccgagttgagcggttcccggctggccgcgcagcaacagatggaaggcctcctggcgccgcaccggcccaaggagcccgcgtggttcctggccaccgtcggcgtctcgcccgaccaccagggcaagggtctgggcagcgccgtcgtgctccccggagtggaggcggccgagcgcgccggggtgcccgccttcctggagacctccgcgccccgcaacctccccttctacgagcggctcggcttcaccgtcaccgccgacgtcgaggtgcccgaaggaccgcgcacctggtgcatgacccgcaagcccggtgcctga

SEQ ID NO: 2290 - DNA, 3126 bp, Artificial Sequence; identical to SEQ ID NO: 2277
  Synthetic Polynucleotide

SEQ ID NO: 2291 - DNA, 3126 bp, Artificial Sequence
  Synthetic Polynucleotide
atggccttaccagtgaccgccttgctcctgccgctggccttgctgctccacgccgccaggccgctgcctgttctgacacagcctccatccgtgtctgtggcccctggaaagaccgccagaatcacatgcggcggcaacaacatcggcagcaagagcgtgcactggtatcagcagaagcctggacaggctcctgtgctggtggtgtacgacgacagcgatagacctagcggcatccccgagagattcagcggcagcaattccggcaataccgccacactgaccatcagcagagtggaagctggcgacgaggccgactactactgccaagtgtgggacagcagcagcgactacgtggtgtttggcggcggaacaaagctgacagtgcttggacagcctaaggccaatcctaccgtgacactgttccctccaagcagcgaagaactccaggccaacaaggccacacttgtgtgcctgatctccgacttctaccctggggctgtgacagtggcttggaaggccgatggatctcctgtgaaagccggcgtggaaaccaccaagccatccaagcagagcaacaacaaatacgccgccagctcctacctgagcctgacacctgagcagtggaagtcccacagatcctacagctgccaagtgacccacgaaggcagcaccgtggaaaagacagtggcccctacagagtgcagcctcgagcagagcttcggcctgctggaccccaagctgtgctacctgctggatggcatcctgttcatctacggcgtgatcctgaccgccctgttcctgagagtgaagttcagcagaagcgccgacgcccctgcctaccagcagggacagaaccaactgtacaacgagctgaacctgggcagacgggaagagtacgacgtgctggacaagcggagaggcagggaccctgagatgggcggaaagccccagcggagaaagaacccccaggaaggactgtataacgaactccagaaagacaagatggccgaagcctacagcgagatcggcatgaagggcgagcggagaagaggcaagggccacgatggcctgtaccagggcctgagcaccgccaccaaggacacctatgacgccctgcacatgcaggccctgcctccaagaagggccaagcgatctggatctggagcaacaaacttctcactactcaaacaagcaggtgacgtggaggagaatcccgggcctactagtatggactggatttggcgcatccttttccttgtcggcgctgctaccggcgcgcattccttcgaagaagttcaactggtgcagagcggagccgaagtgaagaagccaggcgagagcctgaagattagctgcaaaggcagcggctacagcttcaccagctactggatcggctgggtccgacagatgcctggcaaaggactggaatggatgggcatcatctaccccggcgacagcgacaccagatacagccctagctttcagggccaagtgaccatctccgccgacaagagcatcagcacagcctacctccagtggtcctctctgaaggccagcgataccgccatgtactactgcgccagacaagtctggggatggcaaggcggcatgtaccccaggtctaactggtggtacaacctggactcttggggccagggcacactggtcacagtctcttctgcctctacaaagggaccctccgtgtttcctctggctcccagcagcaagtctacaagcggaggaacagccgctctgggctgcctggtcaaggattactttcccgagcctgtgaccgtgtcctggaatagcggagcactgacaagcggcgtgcacacctttccagccgtgctgcaaagcagcggcctgtactctctgagcagcgtggtcacagtgcctagctctagcctgggcacccagacctacatctgcaatgtgaaccacaagcctagcaacaccaaggtggacaagagagtggaacccaagagctgtacgcgtcagagttttgggttgttggaccctaaattgtgctatctgttggacggaatcctgttcatttacggagtgatcctgaccgcattgttcctgcgggttaagttttccagatccgcagacgcacccgcttaccaacaagggcagaaccaactctacaatgaacttaatttggggcggagggaagagtacgacgttctggacaaaaggaggggacgagatcccgagatgggcggaaagcctcagcgaaggaagaatccgcaagaggggctttataacgaactccagaaagataaaatggcagaagcctatagtgagattgggatgaagggagaaaggaggaggggtaaaggtcacgatgggttgtaccaaggattgagcacagccactaaagatacctatgatgcgctccacatgcaggccctgccgccaagacgcgccaagagaagcggatctggcgtgaagcagaccctgaatttcgacctgctgaagctggctggcgacgtggaatccaacccaggcccttctagaggccatatgaccgagtacaagcccacggtgcgcctcgccacccgcgacgacgtccccagggccgtacgcaccctcgccgccgcgttcgccgactaccccgccacgcgccacaccgtcgatccggaccgccacatcgagcgggtcaccgagctgcaagaactcttcctcacgcgcgtcgggctcgacatcggcaaggtgtgggtcgcggacgacggcgccgcggtggcggtctggaccacgccggagagcgtcgaagcgggggcggtgttcgccgagatcggcccgcgcatggccgagttgagcggttcccggctggccgcgcagcaacagatggaaggcctcctggcgccgcaccggcccaaggagcccgcgtggttcctggccaccgtcggcgtctcgcccgaccaccagggcaagggtctgggcagcgccgtcgtgctccccggagtggaggcggccgagcgcgccggggtgcccgccttcctggagacctccgcgccccgcaacctccccttctacgagcggctcggcttcaccgtcaccgccgacgtcgaggtgcccgaaggaccgcgcacctggtgcatgacccgcaagcccggtgcctga

SEQ ID NO: 2292 - DNA, 3366 bp, Artificial Sequence
  Synthetic Polynucleotide
atggccttaccagtgaccgccttgctcctgccgctggccttgctgctccacgccgccaggccgctgcctgttctgacacagcctccatccgtgtctgtggcccctggaaagaccgccagaatcacatgcggcggcaacaacatcggcagcaagagcgtgcactggtatcagcagaagcctggacaggctcctgtgctggtggtgtacgacgacagcgatagacctagcggcatccccgagagattcagcggcagcaattccggcaataccgccacactgaccatcagcagagtggaagctggcgacgaggccgactactactgccaagtgtgggacagcagcagcgactacgtggtgtttggcggcggaacaaagctgacagtgcttggacagcctaaggccaatcctaccgtgacactgttccctccaagcagcgaagaactccaggccaacaaggccacacttgtgtgcctgatctccgacttctaccctggggctgtgacagtggcttggaaggccgatggatctcctgtgaaagccggcgtggaaaccaccaagccatccaagcagagcaacaacaaatacgccgccagctcctacctgagcctgacacctgagcagtggaagtcccacagatcctacagctgccaagtgacccacgaaggcagcaccgtggaaaagacagtggcccctacagagtgcagcctcgagctgtgggtttcacagcctccagagatcagaaccctggaaggcagcagcgccttcctgccttgcagcttcaatgcctctcagggcagactggctatcggcagcgtgacctggttcagagatgaggtggtgcccggcaaagaagtgcggaacggcacccctgagtttagaggaaggctggcccctctggcctccagcagatttctgcacgatcaccaggccgagctgcacatcagagatgtgcgaggacacgacgccagcatctacgtgtgcagagtggaagtgctcggcctcggagttggcacaggcaatggaacaagactggtggtggaaaaagagcaccctcagctcggagccggaacagtgctgcttctgagagccggcttttacgccgtgtcctttctgtctgtggccgtgggcagcaccgtgtactatcagggcaagtgcctgacctggaagggacctagaaggcaactgcctgctgtggtgcctgctcctttgcctcctccatgtggaagctctgcccatctgctgccacctgttccaggcggaagggccaagcgatctggatctggagcaacaaacttctcactactcaaacaagcaggtgacgtggaggagaatcccgggcctactagtatggactggatttggcgcatccttttccttgtcggcgctgctaccggcgcgcattccttcgaagaagttcaactggtgcagagcggagccgaagtgaagaagccaggcgagagcctgaagattagctgcaaaggcagcggctacagcttcaccagctactggatcggctgggtccgacagatgcctggcaaaggactggaatggatgggcatcatctaccccggcgacagcgacaccagatacagccctagctttcagggccaagtgaccatctccgccgacaagagcatcagcacagcctacctccagtggtcctctctgaaggccagcgataccgccatgtactactgcgccagacaagtctggggatggcaaggcggcatgtaccccaggtctaactggtggtacaacctggactcttggggccagggcacactggtcacagtctcttctgcctctacaaagggaccctccgtgtttcctctggctcccagcagcaagtctacaagcggaggaacagccgctctgggctgcctggtcaaggattactttcccgagcctgtgaccgtgtcctggaatagcggagcactgacaagcggcgtgcacacctttccagccgtgctgcaaagcagcggcctgtactctctgagcagcgtggtcacagtgcctagctctagcctgggcacccagacctacatctgcaatgtgaaccacaagcctagcaacaccaaggtggacaagagagtggaacccaagagctgtacgcgtctgtgggtgtcccagccacctgaaattcggacactggaaggctcctccgcctttctgccctgtagctttaacgccagccaggggagactcgccatcggctctgtgacatggttccgggatgaagtcgtccctggaaaagaagttcgcaacggaacaccagagttcagaggcagactcgccccactggcaagctccagattcctgcatgaccatcaggctgaactgcacattagggacgtgcggggccacgatgcctccatctatgtgtgtcgggtcgaagtgcttggactcggcgtcggaactggaaacggcactaggctggtggtcgagaaagaacatccacagcttggcgctggcaccgtcctgttgcttagagccggattctatgccgtcagcttcctgtccgtggctgtggggtctacagtgtattaccagggaaaatgtctcacctggaaaggccccagacgccagcttccagctgttgttcctgctccactgccaccaccttgtggctcctctgctcacttgcttccaccagtgcctggcggacgcgccaagagaagcggatctggcgtgaagcagaccctgaatttcgacctgctgaagctggctggcgacgtggaatccaacccaggcccttctagaggccatatgaccgagtacaagcccacggtgcgcctcgccacccgcgacgacgtccccagggccgtacgcaccctcgccgccgcgttcgccgactaccccgccacgcgccacaccgtcgatccggaccgccacatcgagcgggtcaccgagctgcaagaactcttcctcacgcgcgtcgggctcgacatcggcaaggtgtgggtcgcggacgacggcgccgcggtggcggtctggaccacgccggagagcgtcgaagcgggggcggtgttcgccgagatcggcccgcgcatggccgagttgagcggttcccggctggccgcgcagcaacagatggaaggcctcctggcgccgcaccggcccaaggagcccgcgtggttcctggccaccgtcggcgtctcgcccgaccaccagggcaagggtctgggcagcgccgtcgtgctccccggagtggaggcggccgagcgcgccggggtgcccgccttcctggagacctccgcgccccgcaacctccccttctacgagcggctcggcttcaccgtcaccgccgacgtcgaggtgcccgaaggaccgcgcacctggtgcatgacccgcaagcccggtgcctga

SEQ ID NO: 2293 - DNA, 2712 bp, Artificial Sequence; identical to SEQ ID NO: 1600
  Synthetic Polynucleotide

SEQ ID NO: 2294-2295 - skipped (2 entries)

SEQ ID NO: 2296 - DNA, 2688 bp, Artificial Sequence
  Synthetic Polynucleotide
atggccttaccagtgaccgccttgctcctgccgctggccttgctgctccacgccgccaggccggcatgcgaagtgcagctgcttgaaagtggcggcggactgattcagcctggcggatctctgagactgagctgtgccgccagcggcttcaccttttctagccacgccatgacctgggtccgacaggcacctggaaaagggcttgaatgggtgtccgccatcagcggctctggcgattacacacactacgccgacagcgtgaagggcagattcaccatcagcagagacaacagcaagaacaccgtgtacctccagatgaacagcctgagagccgaggacagcgccgtgtattattgcgccaaggatgaggatggcggcagcctgcttggacacagaggacaaggcaccctggtcaccgtttcttccggtaccggcggaggcggatctggcggcggaggtagcggtggcggaggatctgaattcaagagcgtgcggttctacctggtggtgtctcctgcctctgccagcacacagacaagctggaccccacgcgatctggtgtctagccagactcagacccagagctgtgtgcctcctacagctggtgctagacaggcccctgagagcccttctacaatccccgttccaagccagcctcagaacagcacactcagacctggacctgccgctcctattgctctggtgcctgtgttttgtggcctgctggtggctaagagcctggtgctgtctgccctgcttgtttggtggggagacatctggtggaaaaccatgatggaactgcggagcctggacacccagaaggccacctgtcatctccagcaagtgaccgatctgccctggacctctgtgtcaagccccgtggaaagagagatcctgtaccacaccgtggctcggaccaagatcagcgacgacgatgatgagcacacccttagggccaagcgatctggatctggagcaacaaacttctcactactcaaacaagcaggtgacgtggaggagaatcccgggcctactagtgccaccatggactggatttggcgcatccttttccttgtcggcgctgctaccggcgcccattccgggcccgaagtgcagctggttgaatctggcggaggactggttcaggctggcggatctctgagactgtcttgtgccgccagcggcagaacctttagcatgggctggtttagacaggcccctggcaaagagagagagttcgtcgccgccatcacatactctggcggcagcccttactacgccgactctgtgaagggcagattcaccatcagccgggacaacgccaagaacaccgtgtacctccagatgaacagcctgaagcctgaggacaccgccgtgtactactgcgccgccaatccaacatacggcagcgactggaacgccgagaattggggccagggaacccaagtgacagtgtctagcggatccggcggcggaggatctggcggaggcggatctgggggcggaggctctttcgaaaagtctgtgcgcttttacctggtcgtcagccctgccagtgcctccactcagacatcttggaccccaagggaccttgtgtcctctcagacacagacacagtcctgcgtgccaccaactgctggcgcaagacaggctccagagtctcccagcacaatccccgtcccttctcagccccagaactccacacttaggccaggaccagctgctccaatcgcactggtcccagtgttctgcggactgctggttgccaagtctctggtgctgagcgcactcctcgtttggtggggcgatatttggtggaaaacgatgatggaattgagatccctcgatacgcagaaagccacatgccaccttcagcaagtcacagacttgccttggaccagcgtcagctctcccgtggaacgggaaattctgtatcatacagtggcccgcaccaagatttccgacgatgacgacgagcacacactgcgcgccaagagaagcggatctggcgtgaagcagaccctgaatttcgacctgctgaagctggctggcgacgtggaatccaacccaggcccttctagaggccatatgaccgagtacaagcccacggtgcgcctcgccacccgcgacgacgtccccagggccgtacgcaccctcgccgccgcgttcgccgactaccccgccacgcgccacaccgtcgatccggaccgccacatcgagcgggtcaccgagctgcaagaactcttcctcacgcgcgtcgggctcgacatcggcaaggtgtgggtcgcggacgacggcgccgcggtggcggtctggaccacgccggagagcgtcgaagcgggggcggtgttcgccgagatcggcccgcgcatggccgagttgagcggttcccggctggccgcgcagcaacagatggaaggcctcctggcgccgcaccggcccaaggagcccgcgtggttcctggccaccgtcggcgtctcgcccgaccaccagggcaagggtctgggcagcgccgtcgtgctccccggagtggaggcggccgagcgcgccggggtgcccgccttcctggagacctccgcgccccgcaacctccccttctacgagcggctcggcttcaccgtcaccgccgacgtcgaggtgcccgaaggaccgcgcacctggtgcatgacccgcaagcccggtgcctga

SEQ ID NO: 2297 - DNA, 2874 bp, Artificial Sequence; identical to SEQ ID NO: 1601
  Synthetic Polynucleotide

SEQ ID NO: 2298 - DNA, 3798 bp, Artificial Sequence
  Synthetic Polynucleotide
atggccttaccagtgaccgccttgctcctgccgctggccttgctgctccacgccgccaggccgctgcctgttctgacacagcctccatccgtgtctgtggcccctggaaagaccgccagaatcacatgcggcggcaacaacatcggcagcaagagcgtgcactggtatcagcagaagcctggacaggctcctgtgctggtggtgtacgacgacagcgatagacctagcggcatccccgagagattcagcggcagcaattccggcaataccgccacactgaccatcagcagagtggaagctggcgacgaggccgactactactgccaagtgtgggacagcagcagcgactacgtggtgtttggcggcggaacaaagctgacagtgcttggacagcctaaggccaatcctaccgtgacactgttccctccaagcagcgaagaactccaggccaacaaggccacacttgtgtgcctgatctccgacttctaccctggggctgtgacagtggcttggaaggccgatggatctcctgtgaaagccggcgtggaaaccaccaagccatccaagcagagcaacaacaaatacgccgccagctcctacctgagcctgacacctgagcagtggaagtcccacagatcctacagctgccaagtgacccacgaaggcagcaccgtggaaaagacagtggcccctacagagtgcagcctcgagcagtctaaagcccaggtgctgcaatctgtggccggacagacactgacagtgcggtgtcagtatcctcctaccggcagcctgtacgagaagaaaggctggtgcaaagaggccagcgcactcgtctgtatcagactggtcaccagcagcaagccccggacaatggcatggaccagcagattcaccatctgggacgatcccgacgccggcttctttaccgtgaccatgaccgacctgagagaagaggacagcggccactactggtgccggatctacagacccagcgacaacagcgtgtccaagagcgtgcggttctacctggtggtgtctcctgcctctgccagcacacagacaagctggaccccacgcgatctggtgtctagccagactcagacccagagctgtgtgcctcctacagctggtgctagacaggcccctgagagcccttctacaatccccgttccaagccagcctcagaacagcacactcagacctggacctgccgctcctattgctctggtgcctgtgttttgtggcctgctggtggctaagagcctggtgctgtctgccctgcttgtttggtggggagacatctggtggaaaaccatgatggaactgcggagcctggacacccagaaggccacctgtcatctccagcaagtgaccgatctgccctggacctctgtgtcaagccccgtggaaagagagatcctgtaccacaccgtggctcggaccaagatcagcgacgacgatgatgagcacacccttagggccaagcgatctggatctggagcaacaaacttctcactactcaaacaagcaggtgacgtggaggagaatcccgggcctactagtatggactggatttggcgcatccttttccttgtcggcgctgctaccggcgcgcattccttcgaagaagttcaactggtgcagagcggagccgaagtgaagaagccaggcgagagcctgaagattagctgcaaaggcagcggctacagcttcaccagctactggatcggctgggtccgacagatgcctggcaaaggactggaatggatgggcatcatctaccccggcgacagcgacaccagatacagccctagctttcagggccaagtgaccatctccgccgacaagagcatcagcacagcctacctccagtggtcctctctgaaggccagcgataccgccatgtactactgcgccagacaagtctggggatggcaaggcggcatgtaccccaggtctaactggtggtacaacctggactcttggggccagggcacactggtcacagtctcttctgcctctacaaagggaccctccgtgtttcctctggctcccagcagcaagtctacaagcggaggaacagccgctctgggctgcctggtcaaggattactttcccgagcctgtgaccgtgtcctggaatagcggagcactgacaagcggcgtgcacacctttccagccgtgctgcaaagcagcggcctgtactctctgagcagcgtggtcacagtgcctagctctagcctgggcacccagacctacatctgcaatgtgaaccacaagcctagcaacaccaaggtggacaagagagtggaacccaagagctgtacgcgtcagagcaaggctcaggttctccagagtgtggcaggccagactctgactgtcagatgccagtatccaccaacaggctccctctatgagaaaaaaggatggtgtaaagaggcttctgccctcgtctgcatccggctggttacctctagcaagcccagaactatggcctggacatcccggtttacaatctgggatgaccctgatgccggatttttcacagtgacaatgacggatctgcgcgaggaagattccgggcactattggtgtagaatctacaggccctccgacaactccgtgtctaagtctgtgcgcttttacctggtcgtcagccctgccagtgcctccactcagacatcttggaccccaagggaccttgtgtcctctcagacacagacacagtcctgcgtgccaccaactgctggcgcaagacaggctccagagtctcccagcacaatccccgtcccttctcagccccagaactccacacttaggccaggaccagctgctccaatcgcactggtcccagtgttctgcggactgctggttgccaagtctctggtgctgagcgcactcctcgtttggtggggcgatatttggtggaaaacgatgatggaattgagatccctcgatacgcagaaagccacatgccaccttcagcaagtcacagacttgccttggaccagcgtcagctctcccgtggaacgggaaattctgtatcatacagtggcccgcaccaagatttccgacgatgacgacgagcacacactgcgcgccaagagaagcggatctggcgtgaagcagaccctgaatttcgacctgctgaagctggctggcgacgtggaatccaacccaggcccttctagaggccatatgaccgagtacaagcccacggtgcgcctcgccacccgcgacgacgtccccagggccgtacgcaccctcgccgccgcgttcgccgactaccccgccacgcgccacaccgtcgatccggaccgccacatcgagcgggtcaccgagctgcaagaactcttcctcacgcgcgtcgggctcgacatcggcaaggtgtgggtcgcggacgacggcgccgcggtggcggtctggaccacgccggagagcgtcgaagcgggggcggtgttcgccgagatcggcccgcgcatggccgagttgagcggttcccggctggccgcgcagcaacagatggaaggcctcctggcgccgcaccggcccaaggagcccgcgtggttcctggccaccgtcggcgtctcgcccgaccaccagggcaagggtctgggcagcgccgtcgtgctccccggagtggaggcggccgagcgcgccggggtgcccgccttcctggagacctccgcgccccgcaacctccccttctacgagcggctcggcttcaccgtcaccgccgacgtcgaggtgcccgaaggaccgcgcacctggtgcatgacccgcaagcccggtgcctga

SEQ ID NO: 2299 - DNA, 3144 bp, Artificial Sequence; identical to SEQ ID NO: 1730
  Synthetic Polynucleotide

SEQ ID NO: 2300 - DNA, 2550 bp, Artificial Sequence; identical to SEQ ID NO: 1756
  Synthetic Polynucleotide

SEQ ID NO: 2301 - DNA, 3231 bp, Artificial Sequence
  Synthetic Polynucleotide
atggccttaccagtgaccgccttgctcctgccgctggccttgctgctccacgccgccaggccggacatccagatgacacagagccctagcagcctgtctgccagcgtgggagacagagtgaccatcacatgcaaggccagcgaccacatcaacaactggctggcctggtatcagcagaagcctggacaggcccctaagctgctgatctacggcgctaccacactggaaacaggcgtgcccagcagattttctggcagcggctctggcaccgactacaccctgacaatatccagcctccagcctgaggacttcgccacctactactgtcagcagagctggaacaccccttggacattcggccagggcaccaagctggaaatcaagagactcgagggacagcctaaggccaatcctaccgtgacactgttccctccaagcagcgaagaactccaggccaacaaggccacacttgtgtgcctgatctccgacttctaccctggggctgtgacagtggcttggaaggccgatggatctcctgtgaaagccggcgtggaaaccaccaagccatccaagcagagcaacaacaaatacgccgccagctcctacctgagcctgacacctgagcagtggaagtcccacagatcctacagctgccaagtgacccacgaaggcagcaccgtggaaaagacagtggcccctacagagtgcagcggatccctgtgggtttcacagcctccagagatcagaaccctggaaggcagcagcgccttcctgccttgcagcttcaatgcctctcagggcagactggctatcggcagcgtgacctggttcagagatgaggtggtgcccggcaaagaagtgcggaacggcacccctgagtttagaggaaggctggcccctctggcctccagcagatttctgcacgatcaccaggccgagctgcacatcagagatgtgcgaggacacgacgccagcatctacgtgtgcagagtggaagtgctcggcctcggagttggcacaggcaatggaacaagactggtggtggaaaaagagcaccctcagctcggagccggaacagtgctgcttctgagagccggcttttacgccgtgtcctttctgtctgtggccgtgggcagcaccgtgtactatcagggcaagtgcctgacctggaagggacctagaaggcaactgcctgctgtggtgcctgctcctttgcctcctccatgtggaagctctgcccatctgctgccacctgttccaggcggaagggccaagcgatctggatctggagcaacaaacttctcactactcaaacaagcaggtgacgtggaggagaatcccgggcctactagtatggactggatttggcgcatccttttccttgtcggcgctgctaccggcgcgcattccttcgaacaagttcagcttcaacagcctggcgctgagctggtcaaacctggcgcttctgtgaagatgagctgcaaagccagcggctacgccttcagcagctactggatcaactggatgaagcagaaacccggccagggactcgaatggatcggccaaatctatcccggcgacggcgacaccaactacaacggcaagttcaagggcagagccacactgaccgccgatacctctagcagcacagcctacatgcagctgagcagcctgaccagcgaagatagcgccgtgtacttctgtgcccggtccatcacaacagtcgtgggctgcgctatggactattggggccagggaacaagcgtgaccgtgtctagtacgcgtgcctctacaaagggaccctccgtgtttcctctggctcccagcagcaagtctacaagcggaggaacagccgctctgggctgcctggtcaaggattactttcccgagcctgtgaccgtgtcctggaatagcggagcactgacaagcggcgtgcacacctttccagccgtgctgcaaagcagcggcctgtactctctgagcagcgtggtcacagtgcctagctctagcctgggcacccagacctacatctgcaatgtgaaccacaagcctagcaacaccaaggtggacaagagagtggaacccaagagctgtggtacccagagttttgggttgttggaccctaaattgtgctatctgttggacggaatcctgttcatttacggagtgatcctgaccgcattgttcctgcgggttaagttttccagatccgcagacgcacccgcttaccaacaagggcagaaccaactctacaatgaacttaatttggggcggagggaagagtacgacgttctggacaaaaggaggggacgagatcccgagatgggcggaaagcctcagcgaaggaagaatccgcaagaggggctttataacgaactccagaaagataaaatggcagaagcctatagtgagattgggatgaagggagaaaggaggaggggtaaaggtcacgatgggttgtaccaaggattgagcacagccactaaagatacctatgatgcgctccacatgcaggccctgccgccaagacgcgccaagagaagcggatctggcgtgaagcagaccctgaatttcgacctgctgaagctggctggcgacgtggaatccaacccaggcccttctagaggccatatgaccgagtacaagcccacggtgcgcctcgccacccgcgacgacgtccccagggccgtacgcaccctcgccgccgcgttcgccgactaccccgccacgcgccacaccgtcgatccggaccgccacatcgagcgggtcaccgagctgcaagaactcttcctcacgcgcgtcgggctcgacatcggcaaggtgtgggtcgcggacgacggcgccgcggtggcggtctggaccacgccggagagcgtcgaagcgggggcggtgttcgccgagatcggcccgcgcatggccgagttgagcggttcccggctggccgcgcagcaacagatggaaggcctcctggcgccgcaccggcccaaggagcccgcgtggttcctggccaccgtcggcgtctcgcccgaccaccagggcaagggtctgggcagcgccgtcgtgctccccggagtggaggcggccgagcgcgccggggtgcccgccttcctggagacctccgcgccccgcaacctccccttctacgagcggctcggcttcaccgtcaccgccgacgtcgaggtgcccgaaggaccgcgcacctggtgcatgacccgcaagcccggtgcctga

SEQ ID NO: 2302 - DNA, 3351 bp, Artificial Sequence; identical to SEQ ID NO: 1604
  Synthetic Polynucleotide

SEQ ID NO: 2303 - DNA, 1491 bp, Artificial Sequence
  Synthetic Polynucleotide
atggccttaccagtgaccgccttgctcctgccgctggccttgctgctccacgccgccaggccggacatccagatgacacagagccctagcagcctgtctgccagcgtgggagacagagtgaccatcacatgcaaggccagcgaccacatcaacaactggctggcctggtatcagcagaagcctggacaggcccctaagctgctgatctacggcgctaccacactggaaacaggcgtgcccagcagattttctggcagcggctctggcaccgactacaccctgacaatatccagcctccagcctgaggacttcgccacctactactgtcagcagagctggaacaccccttggacattcggccagggcaccaagctggaaatcaagagaggcggaggcggaagtggaggcggaggatctggcggcggaggctctcaagttcagcttcaacagcctggcgctgagctggtcaaacctggcgcttctgtgaagatgagctgcaaagccagcggctacgccttcagcagctactggatcaactggatgaagcagaaacccggccagggactcgaatggatcggccaaatctatcccggcgacggcgacaccaactacaacggcaagttcaagggcagagccacactgaccgccgatacctctagcagcacagcctacatgcagctgagcagcctgaccagcgaagatagcgccgtgtacttctgtgcccggtccatcacaacagtcgtgggctgcgctatggactattggggccagggaacaagcgtgaccgtgtctagtacgcgtgagcagaaactgatctcggaagaggatctgaaaattgaagttatgtatcctcctccttacctagacaatgagaagagcaatggaaccattatccatgtgaaagggaaacacctttgtccaagtcccctatttcccggaccttctaagcccttttgggtgctggtggtggttgggggagtcctggcttgctatagcttgctagtaacagtggcctttattattttctgggtgaggagtaagaggagcaggctcctgcacagtgactacatgaacatgactccacgccgccccggacccacccgcaagcattaccagccctatgccccaccacgcgacttcgcagcctatcgctccagagtgaagttcagcaggagcgcagacgcccccgcgtaccagcagggccagaaccagctctataacgagctcaatctaggacgaagagaggagtacgatgttttggacaagagacgtggccgggaccctgagatggggggaaagccgagaaggaagaaccctcaggaaggcctgtacaatgaactgcagaaagataagatggcggaggcctacagtgagattgggatgaaaggcgagcgccggaggggcaaggggcacgatggcctttaccagggtctcagtacagccaccaaggacacctacgacgcccttcacatgcaggccctgccccctcgc

SEQ ID NO: 2304 - DNA, 1512 bp, Artificial Sequence
  Synthetic Polynucleotide
atggccttaccagtgaccgccttgctcctgccgctggccttgctgctccacgccgccaggccggacatccagatgacacagagccctagcagcctgtctgccagcgtgggagacagagtgaccatcacatgcaaggccagcgaccacatcaacaactggctggcctggtatcagcagaagcctggacaggcccctaagctgctgatctacggcgctaccacactggaaacaggcgtgcccagcagattttctggcagcggctctggcaccgactacaccctgacaatatccagcctccagcctgaggacttcgccacctactactgtcagcagagctggaacaccccttggacattcggccagggcaccaagctggaaatcaagagaggcggaggcggaagtggaggcggaggatctggcggcggaggctctcaagttcagcttcaacagcctggcgctgagctggtcaaacctggcgcttctgtgaagatgagctgcaaagccagcggctacgccttcagcagctactggatcaactggatgaagcagaaacccggccagggactcgaatggatcggccaaatctatcccggcgacggcgacaccaactacaacggcaagttcaagggcagagccacactgaccgccgatacctctagcagcacagcctacatgcagctgagcagcctgaccagcgaagatagcgccgtgtacttctgtgcccggtccatcacaacagtcgtgggctgcgctatggactattggggccagggaacaagcgtgaccgtgtctagtacgcgtgagcagaaactgatctcggaagaggatctggcgaagcccaccacgacgccagcgccgcgaccaccaacaccggcgcccaccatcgcgtcgcagcccctgtccctgcgcccagaggcgtgccggccagcggcggggggcgcagtgcacacgagggggctggacttcgcctgtgacatctacatctgggcgcccttggccgggacttgtggggtccttctcctgtcactggttatcaccctttactgcaaacggggcagaaagaaactcctgtatatattcaaacaaccatttatgagaccagtacaaactactcaagaggaagatggctgtagctgccgatttccagaagaagaagaaggaggatgtgaactgagagtgaagttcagcaggagcgcagacgcccccgcgtaccagcagggccagaaccagctctataacgagctgaatctaggacgaagagaggagtacgatgttttggacaagagacgtggccgggaccctgagatggggggaaagccgagaaggaagaaccctcaggaaggcctgtacaatgaactgcagaaagataagatggcggaggcctacagtgagattgggatgaaaggcgagcgccggaggggcaaggggcacgatggcctttaccagggtctcagtacagccaccaaggacacctacgacgcccttcacatgcaggccctgccccctcgctga

SEQ ID NO: 2305 - DNA, 1866 bp, Artificial Sequence
  Synthetic Polynucleotide
atggccttaccagtgaccgccttgctcctgccgctggccttgctgctccacgccgccaggccggacatccagatgacacagagccctagcagcctgtctgccagcgtgggagacagagtgaccatcacatgcaaggccagcgaccacatcaacaactggctggcctggtatcagcagaagcctggacaggcccctaagctgctgatctacggcgctaccacactggaaacaggcgtgcccagcagattttctggcagcggctctggcaccgactacaccctgacaatatccagcctccagcctgaggacttcgccacctactactgtcagcagagctggaacaccccttggacattcggccagggcaccaagctggaaatcaagagactcgaggacctgaagaacgtgttcccacctgaggtggccgtgttcgagcctagcgaggccgagatcagccacacccagaaagccaccctcgtgtgcctggctaccggcttctaccccgaccatgtggaactgtcttggtgggtcaacggcaaagaggtgcacagcggcgtgtgtaccgacccccagccactgaaagaacagcccgccctgaacgacagccggtactgcctgagcagcagactgagagtgtccgccaccttctggcagaacccccggaaccacttcagatgccaggtgcagttctacggcctgagcgagaacgacgagtggacccaggacagagccaagcccgtgacccagatcgtgtctgccgaagcctggggcagagccgattgcggctttaccagcgagagctaccagcagggcgtgctgagcgccaccatcctgtacgagatcctgctgggcaaggccaccctgtacgccgtgctggtgtctgccctggtgctgatggctatggtcaagcggaaggacagccggggaagggccaagcgatctggatctggagcaacaaacttctcactactcaaacaagcaggtgacgtggaggagaatcccgggcctactagtatggactggatttggcgcatccttttccttgtcggcgctgctaccggcgcgcattccttcgaacaagttcagcttcaacagcctggcgctgagctggtcaaacctggcgcttctgtgaagatgagctgcaaagccagcggctacgccttcagcagctactggatcaactggatgaagcagaaacccggccagggactcgaatggatcggccaaatctatcccggcgacggcgacaccaactacaacggcaagttcaagggcagagccacactgaccgccgatacctctagcagcacagcctacatgcagctgagcagcctgaccagcgaagatagcgccgtgtacttctgtgcccggtccatcacaacagtcgtgggctgcgctatggactattggggccagggaacaagcgtgaccgtgtctagtacgcgtatccagaaccctgatcctgccgtgtaccagctgcgggatagcaagagcagcgacaagagcgtgtgtctgttcaccgacttcgacagccagaccaacgtgtcccagagcaaggactccgacgtgtacatcaccgataagtgcgtgctggacatgcggagcatggacttcaagagcaactccgccgtggcctggtccaacaagtccgatttcgcctgcgccaacgccttcaacaacagcattatccccgaggacacattcttcccaagccccgagagcagctgcgacgtgaagctggtggaaaagagcttcgagacagacaccaacctgaacttccagaacctgagcgtgatcggcttcagaatcctgctgctgaaagtggccggctttaacctgctgatgaccctgcggctgtggtccagc

SEQ ID NO: 2306 - DNA, 2397 bp, Artificial Sequence
  Synthetic Polynucleotide
atggccttaccagtgaccgccttgctcctgccgctggccttgctgctccacgccgccaggccggacatccagatgacacagagccctagcagcctgtctgccagcgtgggagacagagtgaccatcacatgcaaggccagcgaccacatcaacaactggctggcctggtatcagcagaagcctggacaggcccctaagctgctgatctacggcgctaccacactggaaacaggcgtgcccagcagattttctggcagcggctctggcaccgactacaccctgacaatatccagcctccagcctgaggacttcgccacctactactgtcagcagagctggaacaccccttggacattcggccagggcaccaagctggaaatcaagagaggacagcctaaggccaatcctaccgtgacactgttccctccaagcagcgaagaactccaggccaacaaggccacacttgtgtgcctgatctccgacttctaccctggggctgtgacagtggcttggaaggccgatggatctcctgtgaaagccggcgtggaaaccaccaagccatccaagcagagcaacaacaaatacgccgccagctcctacctgagcctgacacctgagcagtggaagtcccacagatcctacagctgccaagtgacccacgaaggcagcaccgtggaaaagacagtggcccctacagagtgcagcggatcccagagcttcggcctgctggaccccaagctgtgctacctgctggatggcatcctgttcatctacggcgtgatcctgaccgccctgttcctgagagtgaagttcagcagaagcgccgacgcccctgcctaccagcagggacagaaccaactgtacaacgagctgaacctgggcagacgggaagagtacgacgtgctggacaagcggagaggcagggaccctgagatgggcggaaagccccagcggagaaagaacccccaggaaggactgtataacgaactccagaaagacaagatggccgaagcctacagcgagatcggcatgaagggcgagcggagaagaggcaagggccacgatggcctgtaccagggcctgagcaccgccaccaaggacacctatgacgccctgcacatgcaggccctgcctccaagaagggccaagcgatctggatctggagcaacaaacttctcactactcaaacaagcaggtgacgtggaggagaatcccgggcctactagtatggactggatttggcgcatccttttccttgtcggcgctgctaccggcgcgcattccttcgaacaagttcagcttcaacagcctggcgctgagctggtcaaacctggcgcttctgtgaagatgagctgcaaagccagcggctacgccttcagcagctactggatcaactggatgaagcagaaacccggccagggactcgaatggatcggccaaatctatcccggcgacggcgacaccaactacaacggcaagttcaagggcagagccacactgaccgccgatacctctagcagcacagcctacatgcagctgagcagcctgaccagcgaagatagcgccgtgtacttctgtgcccggtccatcacaacagtcgtgggctgcgctatggactattggggccagggaacaagcgtgaccgtgtctagtgcctctacaaagggaccctccgtgtttcctctggctcccagcagcaagtctacaagcggaggaacagccgctctgggctgcctggtcaaggattactttcccgagcctgtgaccgtgtcctggaatagcggagcactgacaagcggcgtgcacacctttccagccgtgctgcaaagcagcggcctgtactctctgagcagcgtggtcacagtgcctagctctagcctgggcacccagacctacatctgcaatgtgaaccacaagcctagcaacaccaaggtggacaagagagtggaacccaagagctgtggtacccagagttttgggttgttggaccctaaattgtgctatctgttggacggaatcctgttcatttacggagtgatcctgaccgcattgttcctgcgggttaagttttccagatccgcagacgcacccgcttaccaacaagggcagaaccaactctacaatgaacttaatttggggcggagggaagagtacgacgttctggacaaaaggaggggacgagatcccgagatgggcggaaagcctcagcgaaggaagaatccgcaagaggggctttataacgaactccagaaagataaaatggcagaagcctatagtgagattgggatgaagggagaaaggaggaggggtaaaggtcacgatgggttgtaccaaggattgagcacagccactaaagatacctatgatgcgctccacatgcaggccctgccgccaaga

SEQ ID NO: 2307 - DNA, 1695 bp, Artificial Sequence
  Synthetic Polynucleotide
atggccttaccagtgaccgccttgctcctgccgctggccttgctgctccacgccgccaggccggacatccagatgacacagagccctagcagcctgtctgccagcgtgggagacagagtgaccatcacatgcaaggccagcgaccacatcaacaactggctggcctggtatcagcagaagcctggacaggcccctaagctgctgatctacggcgctaccacactggaaacaggcgtgcccagcagattttctggcagcggctctggcaccgactacaccctgacaatatccagcctccagcctgaggacttcgccacctactactgtcagcagagctggaacaccccttggacattcggccagggcaccaagctggaaatcaagagactcgagcagagcttcggcctgctggaccccaagctgtgctacctgctggatggcatcctgttcatctacggcgtgatcctgaccgccctgttcctgagagtgaagttcagcagaagcgccgacgcccctgcctaccagcagggacagaaccaactgtacaacgagctgaacctgggcagacgggaagagtacgacgtgctggacaagcggagaggcagggaccctgagatgggcggaaagccccagcggagaaagaacccccaggaaggactgtataacgaactccagaaagacaagatggccgaagcctacagcgagatcggcatgaagggcgagcggagaagaggcaagggccacgatggcctgtaccagggcctgagcaccgccaccaaggacacctatgacgccctgcacatgcaggccctgcctccaagaagggccaagcgatctggatctggagcaacaaacttctcactactcaaacaagcaggtgacgtggaggagaatcccgggcctactagtatggactggatttggcgcatccttttccttgtcggcgctgctaccggcgcgcattccttcgaacaagttcagcttcaacagcctggcgctgagctggtcaaacctggcgcttctgtgaagatgagctgcaaagccagcggctacgccttcagcagctactggatcaactggatgaagcagaaacccggccagggactcgaatggatcggccaaatctatcccggcgacggcgacaccaactacaacggcaagttcaagggcagagccacactgaccgccgatacctctagcagcacagcctacatgcagctgagcagcctgaccagcgaagatagcgccgtgtacttctgtgcccggtccatcacaacagtcgtgggctgcgctatggactattggggccagggaacaagcgtgaccgtgtctagtacgcgtcagagttttgggttgttggaccctaaattgtgctatctgttggacggaatcctgttcatttacggagtgatcctgaccgcattgttcctgcgggttaagttttccagatccgcagacgcacccgcttaccaacaagggcagaaccaactctacaatgaacttaatttggggcggagggaagagtacgacgttctggacaaaaggaggggacgagatcccgagatgggcggaaagcctcagcgaaggaagaatccgcaagaggggctttataacgaactccagaaagataaaatggcagaagcctatagtgagattgggatgaagggagaaaggaggaggggtaaaggtcacgat

SEQ ID NO: 2308 - DNA, 2454 bp, Artificial Sequence
  Synthetic Polynucleotide
atggccttaccagtgaccgccttgctcctgccgctggccttgctgctccacgccgccaggccggacatccagatgacacagagccctagcagcctgtctgccagcgtgggagacagagtgaccatcacatgcaaggccagcgaccacatcaacaactggctggcctggtatcagcagaagcctggacaggcccctaagctgctgatctacggcgctaccacactggaaacaggcgtgcccagcagattttctggcagcggctctggcaccgactacaccctgacaatatccagcctccagcctgaggacttcgccacctactactgtcagcagagctggaacaccccttggacattcggccagggcaccaagctggaaatcaagagactcgaggacctgaagaacgtgttcccacctgaggtggccgtgttcgagcctagcgaggccgagatcagccacacccagaaagccaccctcgtgtgcctggctaccggcttctaccccgaccatgtggaactgtcttggtgggtcaacggcaaagaggtgcacagcggcgtgtctaccgacccccagccactgaaagaacagcccgccctgaacgacagccggtactgcctgagcagcagactgagagtgtccgccaccttctggcagaacccccggaaccacttcagatgccaggtgcagttctacggcctgagcgagaacgacgagtggacccaggacagagccaagcccgtgacccagatcgtgtctgccgaagcctggggcagagccgattgcggatcccagagcttcggcctgctggaccccaagctgtgctacctgctggatggcatcctgttcatctacggcgtgatcctgaccgccctgttcctgagagtgaagttcagcagaagcgccgacgcccctgcctaccagcagggacagaaccaactgtacaacgagctgaacctgggcagacgggaagagtacgacgtgctggacaagcggagaggcagggaccctgagatgggcggaaagccccagcggagaaagaacccccaggaaggactgtataacgaactccagaaagacaagatggccgaagcctacagcgagatcggcatgaagggcgagcggagaagaggcaagggccacgatggcctgtaccagggcctgagcaccgccaccaaggacacctatgacgccctgcacatgcaggccctgcctccaagaagggccaagcgatctggatctggagcaacaaacttctcactactcaaacaagcaggtgacgtggaggagaatcccgggcctactagtatggactggatttggcgcatccttttccttgtcggcgctgctaccggcgcgcattccttcgaacaagttcagcttcaacagcctggcgctgagctggtcaaacctggcgcttctgtgaagatgagctgcaaagccagcggctacgccttcagcagctactggatcaactggatgaagcagaaacccggccagggactcgaatggatcggccaaatctatcccggcgacggcgacaccaactacaacggcaagttcaagggcagagccacactgaccgccgatacctctagcagcacagcctacatgcagctgagcagcctgaccagcgaagatagcgccgtgtacttctgtgcccggtccatcacaacagtcgtgggctgcgctatggactattggggccagggaacaagcgtgaccgtgtctagtacgcgtatccagaaccctgatcctgccgtgtaccagctgcgggatagcaagagcagcgacaagagcgtgtgtctgttcaccgacttcgacagccagaccaacgtgtcccagagcaaggactccgacgtgtacatcaccgataagaccgtgctggacatgcggagcatggacttcaagagcaactccgccgtggcctggtccaacaagtccgatttcgcctgcgccaacgccttcaacaacagcattatccccgaggacacattcttcccaagccccgagagcagctgcggtacccagagttttgggttgttggaccctaaattgtgctatctgttggacggaatcctgttcatttacggagtgatcctgaccgcattgttcctgcgggttaagttttccagatccgcagacgcacccgcttaccaacaagggcagaaccaactctacaatgaacttaatttggggcggagggaagagtacgacgttctggacaaaaggaggggacgagatcccgagatgggcggaaagcctcagcgaaggaagaatccgcaagaggggctttataacgaactccagaaagataaaatggcagaagcctatagtgagattgggatgaagggagaaaggaggaggggtaaaggtcacgatgggttgtaccaaggattgagcacagccactaaagatacctatgatgcgctccacatgcaggccctgccgccaaga

SEQ ID NO: 2309 - DNA, 1944 bp, Artificial Sequence
  Synthetic Polynucleotide
atggccttaccagtgaccgccttgctcctgccgctggccttgctgctccacgccgccaggccggacatccagatgacacagagccctagcagcctgtctgccagcgtgggagacagagtgaccatcacatgcaaggccagcgaccacatcaacaactggctggcctggtatcagcagaagcctggacaggcccctaagctgctgatctacggcgctaccacactggaaacaggcgtgcccagcagattttctggcagcggctctggcaccgactacaccctgacaatatccagcctccagcctgaggacttcgccacctactactgtcagcagagctggaacaccccttggacattcggccagggcaccaagctggaaatcaagagactcgagggacagcctaaggccaatcctaccgtgacactgttccctccaagcagcgaagaactccaggccaacaaggccacacttgtgtgcctgatctccgacttctaccctggggctgtgacagtggcttggaaggccgatggatctcctgtgaaagccggcgtggaaaccaccaagccatccaagcagagcaacaacaaatacgccgccagctcctacctgagcctgacacctgagcagtggaagtcccacagatcctacagctgccaagtgacccacgaaggcagcaccgtggaaaagacagtggcccctacagagtgcagccccatcaagaccgatgtgattacaatggaccccaaggacaactgctccaaggacgccaacgataccctgctgctccagctgaccaacaccagcgcctactacatgtacttgttgctgctgctgaagtccgtggtgtacttcgccatcatcacatgctgcctgctgcggagaaccgccttctgctgcaacggcgagaagtctagggccaagcgatctggatctggagcaacaaacttctcactactcaaacaagcaggtgacgtggaggagaatcccgggcctactagtatggactggatttggcgcatccttttccttgtcggcgctgctaccggcgcgcattccttcgaacaagttcagcttcaacagcctggcgctgagctggtcaaacctggcgcttctgtgaagatgagctgcaaagccagcggctacgccttcagcagctactggatcaactggatgaagcagaaacccggccagggactcgaatggatcggccaaatctatcccggcgacggcgacaccaactacaacggcaagttcaagggcagagccacactgaccgccgatacctctagcagcacagcctacatgcagctgagcagcctgaccagcgaagatagcgccgtgtacttctgtgcccggtccatcacaacagtcgtgggctgcgctatggactattggggccagggaacaagcgtgaccgtgtctagtacgcgtgcctctacaaagggaccctccgtgtttcctctggctcccagcagcaagtctacaagcggaggaacagccgctctgggctgcctggtcaaggattactttcccgagcctgtgaccgtgtcctggaatagcggagcactgacaagcggcgtgcacacctttccagccgtgctgcaaagcagcggcctgtactctctgagcagcgtggtcacagtgcctagctctagcctgggcacccagacctacatctgcaatgtgaaccacaagcctagcaacaccaaggtggacaagagagtggaacccaagagctgtgaagtgaaaaccgactccaccgaccacgtgaagcccaaagagacagagaacaccaagcagcccagcaagagctgccacaagcccaaggccatcgtgcacaccgagaaagtgaacatgatgagcctgaccgtgctgggcctgcggatgctgttcgccaaaaccgtggccgtgaacttcctgctgaccgccaagctgttcttcctc

SEQ ID NO: 2310 - DNA, 1878 bp, Artificial Sequence
  Synthetic Polynucleotide
atggccttaccagtgaccgccttgctcctgccgctggccttgctgctccacgccgccaggccggacatccagatgacacagagccctagcagcctgtctgccagcgtgggagacagagtgaccatcacatgcaaggccagcgaccacatcaacaactggctggcctggtatcagcagaagcctggacaggcccctaagctgctgatctacggcgctaccacactggaaacaggcgtgcccagcagattttctggcagcggctctggcaccgactacaccctgacaatatccagcctccagcctgaggacttcgccacctactactgtcagcagagctggaacaccccttggacattcggccagggcaccaagctggaaatcaagagactcgagggacagcctaaggccaatcctaccgtgacactgttccctccaagcagcgaagaactccaggccaacaaggccacacttgtgtgcctgatctccgacttctaccctggggctgtgacagtggcttggaaggccgatggatctcctgtgaaagccggcgtggaaaccaccaagccatccaagcagagcaacaacaaatacgccgccagctcctacctgagcctgacacctgagcagtggaagtcccacagatcctacagctgccaagtgacccacgaaggcagcaccgtggaaaagacagtggcccctacagagtgcagcggcagagccgattgcggctttaccagcgagagctaccagcagggcgtgctgagcgccaccatcctgtacgagatcctgctgggcaaggccaccctgtacgccgtgctggtgtctgccctggtgctgatggctatggtcaagcggaaggacagccggggaagggccaagcgatctggatctggagcaacaaacttctcactactcaaacaagcaggtgacgtggaggagaatcccgggcctactagtatggactggatttggcgcatccttttccttgtcggcgctgctaccggcgcgcattccttcgaacaagttcagcttcaacagcctggcgctgagctggtcaaacctggcgcttctgtgaagatgagctgcaaagccagcggctacgccttcagcagctactggatcaactggatgaagcagaaacccggccagggactcgaatggatcggccaaatctatcccggcgacggcgacaccaactacaacggcaagttcaagggcagagccacactgaccgccgatacctctagcagcacagcctacatgcagctgagcagcctgaccagcgaagatagcgccgtgtacttctgtgcccggtccatcacaacagtcgtgggctgcgctatggactattggggccagggaacaagcgtgaccgtgtctagtacgcgtgcctctacaaagggaccctccgtgtttcctctggctcccagcagcaagtctacaagcggaggaacagccgctctgggctgcctggtcaaggattactttcccgagcctgtgaccgtgtcctggaatagcggagcactgacaagcggcgtgcacacctttccagccgtgctgcaaagcagcggcctgtactctctgagcagcgtggtcacagtgcctagctctagcctgggcacccagacctacatctgcaatgtgaaccacaagcctagcaacaccaaggtggacaagagagtggaacccaagagctgtatccccgaggacacattcttcccaagccccgagagcagctgcgacgtgaagctggtggaaaagagcttcgagacagacaccaacctgaacttccagaacctgagcgtgatcggcttcagaatcctgctgctgaaagtggccggctttaacctgctgatgaccctgcggctgtggtccagc

SEQ ID NO: 2311 - DNA, 1356 bp, Artificial Sequence
  Synthetic Polynucleotide
atggccttaccagtgaccgccttgctcctgccgctggccttgctgctccacgccgccaggccggacatccagatgacacagagccctagcagcctgtctgccagcgtgggagacagagtgaccatcacatgcaaggccagcgaccacatcaacaactggctggcctggtatcagcagaagcctggacaggcccctaagctgctgatctacggcgctaccacactggaaacaggcgtgcccagcagattttctggcagcggctctggcaccgactacaccctgacaatatccagcctccagcctgaggacttcgccacctactactgtcagcagagctggaacaccccttggacattcggccagggcaccaagctggaaatcaagagaggcggaggcggaagtggaggcggaggatctggcggcggaggctctcaagttcagcttcaacagcctggcgctgagctggtcaaacctggcgcttctgtgaagatgagctgcaaagccagcggctacgccttcagcagctactggatcaactggatgaagcagaaacccggccagggactcgaatggatcggccaaatctatcccggcgacggcgacaccaactacaacggcaagttcaagggcagagccacactgaccgccgatacctctagcagcacagcctacatgcagctgagcagcctgaccagcgaagatagcgccgtgtacttctgtgcccggtccatcacaacagtcgtgggctgcgctatggactattggggccagggaacaagcgtgaccgtgtctagtacgcgtgacggtaacgaggagatgggaggaatcactcaaaccccttacaaagtctcaatttcaggaacaactgttatccttacatgtccccagtatcctggcagcgagatcctttggcagcataacgacaagaatatagggggagatgaagacgataagaatatcggatctgacgaggatcacttgagcctgaaagagttctccgagcttgaacaaagcggatattatgtgtgctatccgcgcgggtcaaagccggaagacgctaacttttacctttatctccgagccagagtgtgcgaaaattgcatggaaatggacgttatgtccgttgctacaatagttatcgtagatatatgcatcacgggtggactgcttctgctggtttattattggtccaagaatagaaaggccaaagctaaacccgtgaccagaggcgctggcgcaggcggaaggcaaaggggacaaaacaaagaacggccaccaccagtgccaaatccagattatgagcctattcggaaaggacagagggacctgtactctggcctgaatcagagaagaatc

SEQ ID NO: 2312 - DNA, 2826 bp, Artificial Sequence
  Synthetic Polynucleotide
atggccttaccagtgaccgccttgctcctgccgctggccttgctgctccacgccgccaggccgctgcctgttctgacacagcctccatccgtgtctgtggcccctggaaagaccgccagaatcacatgcggcggcaacaacatcggcagcaagagcgtgcactggtatcagcagaagcctggacaggctcctgtgctggtggtgtacgacgacagcgatagacctagcggcatccccgagagattcagcggcagcaattccggcaataccgccacactgaccatcagcagagtggaagctggcgacgaggccgactactactgccaagtgtgggacagcagcagcgactacgtggtgtttggcggcggaacaaagctgacagtgcttggacagcctaaggccaatcctaccgtgacactgttccctccaagcagcgaagaactccaggccaacaaggccacacttgtgtgcctgatctccgacttctaccctggggctgtgacagtggcttggaaggccgatggatctcctgtgaaagccggcgtggaaaccaccaagccatccaagcagagcaacaacaaatacgccgccagctcctacctgagcctgacacctgagcagtggaagtcccacagatcctacagctgccaagtgacccacgaaggcagcaccgtggaaaagacagtggcccctacagagtgcagcggatccggcgatattgagaatacctctctggccccagaagatcctacattccccgccgacacatggggaacatatctgctgacaaccgaaaccgggctgcaaaaggaccatgctctgtgggatcataccgctcagaatctgcttcggatggggcttgcattcctggtcctggtggctcttgtctggtttctggtcgaggactggctgtcccggaagagaaccagagaaagagcttccagggccagcacctgggaaggcagacgcagactgaatactcagaccctgcgcgccaagagaagcggatctggcgtgaagcagaccctgaatttcgacctgctgaagctggctggcgacgtggaatccaacccaggccctactagtatggactggatttggcgcatccttttccttgtcggcgctgctaccggcgcgcattccttcgaagaagttcaactggtgcagagcggagccgaagtgaagaagccaggcgagagcctgaagattagctgcaaaggcagcggctacagcttcaccagctactggatcggctgggtccgacagatgcctggcaaaggactggaatggatgggcatcatctaccccggcgacagcgacaccagatacagccctagctttcagggccaagtgaccatctccgccgacaagagcatcagcacagcctacctccagtggtcctctctgaaggccagcgataccgccatgtactactgcgccagacaagtctggggatggcaaggcggcatgtaccccaggtctaactggtggtacaacctggactcttggggccagggcacactggtcacagtctcttctgcctctacaaagggaccctccgtgtttcctctggctcccagcagcaagtctacaagcggaggaacagccgctctgggctgcctggtcaaggattactttcccgagcctgtgaccgtgtcctggaatagcggagcactgacaagcggcgtgcacacctttccagccgtgctgcaaagcagcggcctgtactctctgagcagcgtggtcacagtgcctagctctagcctgggcacccagacctacatctgcaatgtgaaccacaagcctagcaacaccaaggtggacaagagagtggaacccaagagctgtggtaccggcgacatcgagaacaccagtctggcccctgaggaccctacctttcctgccgatacctggggcacctacctgctgaccacagagacaggactccagaaagatcacgccctgtgggaccacacagcccagaacctgctgagaatgggcctcgcctttctggtgctggttgccctcgtgtggttcctggtggaagattggctgagccggaagcggacaagagagagagccagcagagcctctacctgggagggaagaagaaggctgaacacccagacacttagggccaagcgatctggatctggagcaacaaacttctcactactcaaacaagcaggtgacgtggaggagaatcccgggccttctagaggccatatgaccgagtacaagcccacggtgcgcctcgccacccgcgacgacgtccccagggccgtacgcaccctcgccgccgcgttcgccgactaccccgccacgcgccacaccgtcgatccggaccgccacatcgagcgggtcaccgagctgcaagaactcttcctcacgcgcgtcgggctcgacatcggcaaggtgtgggtcgcggacgacggcgccgcggtggcggtctggaccacgccggagagcgtcgaagcgggggcggtgttcgccgagatcggcccgcgcatggccgagttgagcggttcccggctggccgcgcagcaacagatggaaggcctcctggcgccgcaccggcccaaggagcccgcgtggttcctggccaccgtcggcgtctcgcccgaccaccagggcaagggtctgggcagcgccgtcgtgctccccggagtggaggcggccgagcgcgccggggtgcccgccttcctggagacctccgcgccccgcaacctccccttctacgagcggctcggcttcaccgtcaccgccgacgtcgaggtgcccgaaggaccgcgcacctggtgcatgacccgcaagcccggtgcctga

SEQ ID NO: 2313 - DNA, 3396 bp, Artificial Sequence
  Synthetic Polynucleotide
atggccttaccagtgaccgccttgctcctgccgctggccttgctgctccacgccgccaggccgctgcctgttctgacacagcctccatccgtgtctgtggcccctggaaagaccgccagaatcacatgcggcggcaacaacatcggcagcaagagcgtgcactggtatcagcagaagcctggacaggctcctgtgctggtggtgtacgacgacagcgatagacctagcggcatccccgagagattcagcggcagcaattccggcaataccgccacactgaccatcagcagagtggaagctggcgacgaggccgactactactgccaagtgtgggacagcagcagcgactacgtggtgtttggcggcggaacaaagctgacagtgcttggacagcctaaggccaatcctaccgtgacactgttccctccaagcagcgaagaactccaggccaacaaggccacacttgtgtgcctgatctccgacttctaccctggggctgtgacagtggcttggaaggccgatggatctcctgtgaaagccggcgtggaaaccaccaagccatccaagcagagcaacaacaaatacgccgccagctcctacctgagcctgacacctgagcagtggaagtcccacagatcctacagctgccaagtgacccacgaaggcagcaccgtggaaaagacagtggcccctacagagtgcagcggatccacaacacctggcgagagaagtagcctgcctgccttctatcctggcaccagcggctcttgttctggctgtggatctctgagcctgcctctgctggctggactggttgctgctgatgctgtggcctctctgctgattgtgggagccgtgttcctgtgcgccagacctagaagaagccccgctcaagaggacggcaaggtgtacatcaacatgcccggcagaggaagcactagtagagtgaagttcagcagaagcgccgacgcccctgcctaccagcagggacagaaccaactgtacaacgagctgaacctgggcagacgggaagagtacgacgtgctggacaagcggagaggcagggaccctgagatgggcggaaagccccagcggagaaagaacccccaggaaggactgtataacgaactccagaaagacaagatggccgaagcctacagcgagatcggcatgaagggcgagcggagaagaggcaagggccacgatggcctgtaccagggcctgagcaccgccaccaaggacacctatgacgccctgcacatgcaggccctgcctccaagaagggccaagcgatctggatctggagcaacaaacttctcactactcaaacaagcaggtgacgtggaggagaatcccgggcctatggactggatttggcgcatccttttccttgtcggcgctgctaccggcgcgcattccttcgaagaagttcaactggtgcagagcggagccgaagtgaagaagccaggcgagagcctgaagattagctgcaaaggcagcggctacagcttcaccagctactggatcggctgggtccgacagatgcctggcaaaggactggaatggatgggcatcatctaccccggcgacagcgacaccagatacagccctagctttcagggccaagtgaccatctccgccgacaagagcatcagcacagcctacctccagtggtcctctctgaaggccagcgataccgccatgtactactgcgccagacaagtctggggatggcaaggcggcatgtaccccaggtctaactggtggtacaacctggactcttggggccagggcacactggtcacagtctcttctgcctctacaaagggaccctccgtgtttcctctggctcccagcagcaagtctacaagcggaggaacagccgctctgggctgcctggtcaaggattactttcccgagcctgtgaccgtgtcctggaatagcggagcactgacaagcggcgtgcacacctttccagccgtgctgcaaagcagcggcctgtactctctgagcagcgtggtcacagtgcctagctctagcctgggcacccagacctacatctgcaatgtgaaccacaagcctagcaacaccaaggtggacaagagagtggaacccaagagctgtggtaccacaacgccgggcgaaaggagttccttgccggccttttaccccggcacaagcggaagctgtagtgggtgtggaagcctcagcctcccacttcttgcgggcctcgtcgcggcagatgcagtagcttcacttcttattgtaggcgcggtatttctctgtgctcgaccaaggaggtcacccgctcaggaggatggtaaggtgtatataaatatgccaggacgcggaagctctagacgggttaagttttccagatccgcagacgcacccgcttaccaacaagggcagaaccaactctacaatgaacttaatttggggcggagggaagagtacgacgttctggacaaaaggaggggacgagatcccgagatgggcggaaagcctcagcgaaggaagaatccgcaagaggggctttataacgaactccagaaagataaaatggcagaagcctatagtgagattgggatgaagggagaaaggaggaggggtaaaggtcacgatgggttgtaccaaggattgagcacagccactaaagatacctatgatgcgctccacatgcaggccctgccgccaagacgcgccaagagaagcggatctggcgtgaagcagaccctgaatttcgacctgctgaagctggctggcgacgtggaatccaacccaggccctggccatatgaccgagtacaagcccacggtgcgcctcgccacccgcgacgacgtccccagggccgtacgcaccctcgccgccgcgttcgccgactaccccgccacgcgccacaccgtcgatccggaccgccacatcgagcgggtcaccgagctgcaagaactcttcctcacgcgcgtcgggctcgacatcggcaaggtgtgggtcgcggacgacggcgccgcggtggcggtctggaccacgccggagagcgtcgaagcgggggcggtgttcgccgagatcggcccgcgcatggccgagttgagcggttcccggctggccgcgcagcaacagatggaaggcctcctggcgccgcaccggcccaaggagcccgcgtggttcctggccaccgtcggcgtctcgcccgaccaccagggcaagggtctgggcagcgccgtcgtgctccccggagtggaggcggccgagcgcgccggggtgcccgccttcctggagacctccgcgccccgcaacctccccttctacgagcggctcggcttcaccgtcaccgccgacgtcgaggtgcccgaaggaccgcgcacctggtgcatgacccgcaagcccggtgcctga

SEQ ID NO: 2314 - DNA, 3255 bp, Artificial Sequence
  Synthetic Polynucleotide
atggccttaccagtgaccgccttgctcctgccgctggccttgctgctccacgccgccaggccggcatgcgaagtgcagctgcttgaaagtggcggcggactgattcagcctggcggatctctgagactgagctgtgccgccagcggcttcaccttttctagccacgccatgacctgggtccgacaggcacctggaaaagggcttgaatgggtgtccgccatcagcggctctggcgattacacacactacgccgacagcgtgaagggcagattcaccatcagcagagacaacagcaagaacaccgtgtacctccagatgaacagcctgagagccgaggacagcgccgtgtattattgcgccaaggatgaggatggcggcagcctgcttggacacagaggacaaggcaccctggtcaccgtttcttccggtaccggcggaggcggatctggcggcggaggtagcggtggcggaggatctgaattcggcatgcggactgaagacctcccaaaggctgtggtgttcctggagcctcaatggtacagggtgctggagaaggacagtgtgactctgaagtgccagggagcctactcccctgaggacaattccacacagtggtttcacaatgagagcctcatctcaagccaggcctccagctacttcattgacgctgccacagtggacgacagtggagagtacaggtgccagacaaacctctccaccctcagtgacccggtgcagctagaagtccatatcggctggctgttgctccaggcccctcggtgggtgttcaaggaggaagaccctattcacctgaggtgtcacagctggaagaacactgctctgcataaggtcacatatttacagaatggcaaaggcaggaagtattttcatcataattctgacttctacattccaaaagccacactcaaagacagcggctcctacttctgcagggggcttgttgggagtaaaaatgtgtcttcagagactgtgaacatcaccatcactcaaggtttggcagtgtcaaccatctcatcattctttccacctggctaccaagtgtccttctgcctggtcatggtgctgctgttcgccgtggataccggcctgtacttcagcgtcaagaccaacatccggtccagcaccagagactggaaggaccacaagttcaagtggcggaaggaccctcaggacaagagggccaagcgatctggatctggagcaacaaacttctcactactcaaacaagcaggtgacgtggaggagaatcccgggcctactagtgccaccatggactggatttggcgcatccttttccttgtcggcgctgctaccggcgcccattccgggcccgaagtgcagctggttgaatctggcggaggactggttcaggctggcggatctctgagactgtcttgtgccgccagcggcagaacctttagcatgggctggtttagacaggcccctggcaaagagagagagttcgtcgccgccatcacatactctggcggcagcccttactacgccgactctgtgaagggcagattcaccatcagccgggacaacgccaagaacaccgtgtacctccagatgaacagcctgaagcctgaggacaccgccgtgtactactgcgccgccaatccaacatacggcagcgactggaacgccgagaattggggccagggaacccaagtgacagtgtctagcggatccggcggcggaggatctggcggaggcggatctgggggcggaggctctttcgaacaagttcagcttcaacagcctggcgctgagctggtcaaacctggcgcttctgtgaagatgagctgcaaagccagcggctacgccttcagcagctactggatcaactggatgaagcagaaacccggccagggactcgaatggatcggccaaatctatcccggcgacggcgacaccaactacaacggcaagttcaagggcagagccacactgaccgccgatacctctagcagcacagcctacatgcagctgagcagcctgaccagcgaagatagcgccgtgtacttctgtgcccggtccatcacaacagtcgtgggctgcgctatggactattggggccagggaacaagcgtgaccgtgtctagtacgcgtatccagaaccctgatcctgccgtgtaccagctgcgggatagcaagagcagcgacaagagcgtgtgtctgttcaccgacttcgacagccagaccaacgtgtcccagagcaaggactccgacgtgtacatcaccgataagtgcgtgctggacatgcggagcatggacttcaagagcaactccgccgtggcctggtccaacaagtccgatttcgcctgcgccaacgccttcaacaacagcattatccccgaggacacattcttcccaagccccgagagcagctgcgacgtgaagctggtggaaaagagcttcgagacagacaccaacctgaacttccagaacctgagcgtgatcggcttcagaatcctgctgctgaaagtggccggctttaacctgctgatgaccctgcggctgtggtccagccgcgccaagagaagcggatctggcgtgaagcagaccctgaatttcgacctgctgaagctggctggcgacgtggaatccaacccaggcccttctagaggccatatgaccgagtacaagcccacggtgcgcctcgccacccgcgacgacgtccccagggccgtacgcaccctcgccgccgcgttcgccgactaccccgccacgcgccacaccgtcgatccggaccgccacatcgagcgggtcaccgagctgcaagaactcttcctcacgcgcgtcgggctcgacatcggcaaggtgtgggtcgcggacgacggcgccgcggtggcggtctggaccacgccggagagcgtcgaagcgggggcggtgttcgccgagatcggcccgcgcatggccgagttgagcggttcccggctggccgcgcagcaacagatggaaggcctcctggcgccgcaccggcccaaggagcccgcgtggttcctggccaccgtcggcgtctcgcccgaccaccagggcaagggtctgggcagcgccgtcgtgctccccggagtggaggcggccgagcgcgccggggtgcccgccttcctggagacctccgcgccccgcaacctccccttctacgagcggctcggcttcaccgtcaccgccgacgtcgaggtgcccgaaggaccgcgcacctggtgcatgacccgcaagcccggtgcctga

SEQ ID NO: 2315 - DNA, 2988 bp, Artificial Sequence
  Synthetic Polynucleotide
atggccttaccagtgaccgccttgctcctgccgctggccttgctgctccacgccgccaggccggcatgcgaagtgcagctgcttgaaagtggcggcggactgattcagcctggcggatctctgagactgagctgtgccgccagcggcttcaccttttctagccacgccatgacctgggtccgacaggcacctggaaaagggcttgaatgggtgtccgccatcagcggctctggcgattacacacactacgccgacagcgtgaagggcagattcaccatcagcagagacaacagcaagaacaccgtgtacctccagatgaacagcctgagagccgaggacagcgccgtgtattattgcgccaaggatgaggatggcggcagcctgcttggacacagaggacaaggcaccctggtcaccgtttcttccggtaccggcggaggcggatctggcggcggaggtagcggtggcggaggatctgaattcatcggctggctgttgctccaggcccctcggtgggtgttcaaggaggaagaccctattcacctgaggtgtcacagctggaagaacactgctctgcataaggtcacatatttacagaatggcaaaggcaggaagtattttcatcataattctgacttctacattccaaaagccacactcaaagacagcggctcctacttctgcagggggcttgttgggagtaaaaatgtgtcttcagagactgtgaacatcaccatcactcaaggtttggcagtgtcaaccatctcatcattctttccacctggctaccaagtgtccttctgcctggtcatggtgctgctgttcgccgtggataccggcctgtacttcagcgtcaagaccaacatccggtccagcaccagagactggaaggaccacaagttcaagtggcggaaggaccctcaggacaagagggccaagcgatctggatctggagcaacaaacttctcactactcaaacaagcaggtgacgtggaggagaatcccgggcctactagtgccaccatggactggatttggcgcatccttttccttgtcggcgctgctaccggcgcccattccgggcccgaagtgcagctggttgaatctggcggaggactggttcaggctggcggatctctgagactgtcttgtgccgccagcggcagaacctttagcatgggctggtttagacaggcccctggcaaagagagagagttcgtcgccgccatcacatactctggcggcagcccttactacgccgactctgtgaagggcagattcaccatcagccgggacaacgccaagaacaccgtgtacctccagatgaacagcctgaagcctgaggacaccgccgtgtactactgcgccgccaatccaacatacggcagcgactggaacgccgagaattggggccagggaacccaagtgacagtgtctagcggatccggcggcggaggatctggcggaggcggatctgggggcggaggctctttcgaacaagttcagcttcaacagcctggcgctgagctggtcaaacctggcgcttctgtgaagatgagctgcaaagccagcggctacgccttcagcagctactggatcaactggatgaagcagaaacccggccagggactcgaatggatcggccaaatctatcccggcgacggcgacaccaactacaacggcaagttcaagggcagagccacactgaccgccgatacctctagcagcacagcctacatgcagctgagcagcctgaccagcgaagatagcgccgtgtacttctgtgcccggtccatcacaacagtcgtgggctgcgctatggactattggggccagggaacaagcgtgaccgtgtctagtacgcgtatccagaaccctgatcctgccgtgtaccagctgcgggatagcaagagcagcgacaagagcgtgtgtctgttcaccgacttcgacagccagaccaacgtgtcccagagcaaggactccgacgtgtacatcaccgataagtgcgtgctggacatgcggagcatggacttcaagagcaactccgccgtggcctggtccaacaagtccgatttcgcctgcgccaacgccttcaacaacagcattatccccgaggacacattcttcccaagccccgagagcagctgcgacgtgaagctggtggaaaagagcttcgagacagacaccaacctgaacttccagaacctgagcgtgatcggcttcagaatcctgctgctgaaagtggccggctttaacctgctgatgaccctgcggctgtggtccagccgcgccaagagaagcggatctggcgtgaagcagaccctgaatttcgacctgctgaagctggctggcgacgtggaatccaacccaggcccttctagaggccatatgaccgagtacaagcccacggtgcgcctcgccacccgcgacgacgtccccagggccgtacgcaccctcgccgccgcgttcgccgactaccccgccacgcgccacaccgtcgatccggaccgccacatcgagcgggtcaccgagctgcaagaactcttcctcacgcgcgtcgggctcgacatcggcaaggtgtgggtcgcggacgacggcgccgcggtggcggtctggaccacgccggagagcgtcgaagcgggggcggtgttcgccgagatcggcccgcgcatggccgagttgagcggttcccggctggccgcgcagcaacagatggaaggcctcctggcgccgcaccggcccaaggagcccgcgtggttcctggccaccgtcggcgtctcgcccgaccaccagggcaagggtctgggcagcgccgtcgtgctccccggagtggaggcggccgagcgcgccggggtgcccgccttcctggagacctccgcgccccgcaacctccccttctacgagcggctcggcttcaccgtcaccgccgacgtcgaggtgcccgaaggaccgcgcacctggtgcatgacccgcaagcccggtgcctga

SEQ ID NO: 2316 - DNA, 2937 bp, Artificial Sequence
  Synthetic Polynucleotide
atggccttaccagtgaccgccttgctcctgccgctggccttgctgctccacgccgccaggccggcatgcgaagtgcagctgcttgaaagtggcggcggactgattcagcctggcggatctctgagactgagctgtgccgccagcggcttcaccttttctagccacgccatgacctgggtccgacaggcacctggaaaagggcttgaatgggtgtccgccatcagcggctctggcgattacacacactacgccgacagcgtgaagggcagattcaccatcagcagagacaacagcaagaacaccgtgtacctccagatgaacagcctgagagccgaggacagcgccgtgtattattgcgccaaggatgaggatggcggcagcctgcttggacacagaggacaaggcaccctggtcaccgtttcttccggtaccatcggctggctgttgctccaggcccctcggtgggtgttcaaggaggaagaccctattcacctgaggtgtcacagctggaagaacactgctctgcataaggtcacatatttacagaatggcaaaggcaggaagtattttcatcataattctgacttctacattccaaaagccacactcaaagacagcggctcctacttctgcagggggcttgttgggagtaaaaatgtgtcttcagagactgtgaacatcaccatcactcaaggtttggcagtgtcaaccatctcatcattctttccacctggctaccaagtgtccttctgcctggtcatggtgctgctgttcgccgtggataccggcctgtacttcagcgtcaagaccaacatccggtccagcaccagagactggaaggaccacaagttcaagtggcggaaggaccctcaggacaagagggccaagcgatctggatctggagcaacaaacttctcactactcaaacaagcaggtgacgtggaggagaatcccgggcctactagtgccaccatggactggatttggcgcatccttttccttgtcggcgctgctaccggcgcccattccgggcccgaagtgcagctggttgaatctggcggaggactggttcaggctggcggatctctgagactgtcttgtgccgccagcggcagaacctttagcatgggctggtttagacaggcccctggcaaagagagagagttcgtcgccgccatcacatactctggcggcagcccttactacgccgactctgtgaagggcagattcaccatcagccgggacaacgccaagaacaccgtgtacctccagatgaacagcctgaagcctgaggacaccgccgtgtactactgcgccgccaatccaacatacggcagcgactggaacgccgagaattggggccagggaacccaagtgacagtgtctagcggatccggcggcggaggatctggcggaggcggatctgggggcggaggctctttcgaacaagttcagcttcaacagcctggcgctgagctggtcaaacctggcgcttctgtgaagatgagctgcaaagccagcggctacgccttcagcagctactggatcaactggatgaagcagaaacccggccagggactcgaatggatcggccaaatctatcccggcgacggcgacaccaactacaacggcaagttcaagggcagagccacactgaccgccgatacctctagcagcacagcctacatgcagctgagcagcctgaccagcgaagatagcgccgtgtacttctgtgcccggtccatcacaacagtcgtgggctgcgctatggactattggggccagggaacaagcgtgaccgtgtctagtacgcgtatccagaaccctgatcctgccgtgtaccagctgcgggatagcaagagcagcgacaagagcgtgtgtctgttcaccgacttcgacagccagaccaacgtgtcccagagcaaggactccgacgtgtacatcaccgataagtgcgtgctggacatgcggagcatggacttcaagagcaactccgccgtggcctggtccaacaagtccgatttcgcctgcgccaacgccttcaacaacagcattatccccgaggacacattcttcccaagccccgagagcagctgcgacgtgaagctggtggaaaagagcttcgagacagacaccaacctgaacttccagaacctgagcgtgatcggcttcagaatcctgctgctgaaagtggccggctttaacctgctgatgaccctgcggctgtggtccagccgcgccaagagaagcggatctggcgtgaagcagaccctgaatttcgacctgctgaagctggctggcgacgtggaatccaacccaggcccttctagaggccatatgaccgagtacaagcccacggtgcgcctcgccacccgcgacgacgtccccagggccgtacgcaccctcgccgccgcgttcgccgactaccccgccacgcgccacaccgtcgatccggaccgccacatcgagcgggtcaccgagctgcaagaactcttcctcacgcgcgtcgggctcgacatcggcaaggtgtgggtcgcggacgacggcgccgcggtggcggtctggaccacgccggagagcgtcgaagcgggggcggtgttcgccgagatcggcccgcgcatggccgagttgagcggttcccggctggccgcgcagcaacagatggaaggcctcctggcgccgcaccggcccaaggagcccgcgtggttcctggccaccgtcggcgtctcgcccgaccaccagggcaagggtctgggcagcgccgtcgtgctccccggagtggaggcggccgagcgcgccggggtgcccgccttcctggagacctccgcgccccgcaacctccccttctacgagcggctcggcttcaccgtcaccgccgacgtcgaggtgcccgaaggaccgcgcacctggtgcatgacccgcaagcccggtgcctga

SEQ ID NO: 2317 - DNA, 1623 bp, Artificial Sequence
  Synthetic Polynucleotide
atggccttaccagtgaccgccttgctcctgccgctggccttgctgctccacgccgccaggccggcatgcgaagtgcagctgcttgaaagtggcggcggactgattcagcctggcggatctctgagactgagctgtgccgccagcggcttcaccttttctagccacgccatgacctgggtccgacaggcacctggaaaagggcttgaatgggtgtccgccatcagcggctctggcgattacacacactacgccgacagcgtgaagggcagattcaccatcagcagagacaacagcaagaacaccgtgtacctccagatgaacagcctgagagccgaggacagcgccgtgtattattgcgccaaggatgaggatggcggcagcctgcttggacacagaggacaaggcaccctggtcaccgtttcttccggtaccggcggaggcggatctggcggcggaggtagcggtggcggaggatctgaattcatcggctggctgttgctccaggcccctcggtgggtgttcaaggaggaagaccctattcacctgaggtgtcacagctggaagaacactgctctgcataaggtcacatatttacagaatggcaaaggcaggaagtattttcatcataattctgacttctacattccaaaagccacactcaaagacagcggctcctacttctgcagggggcttgttgggagtaaaaatgtgtcttcagagactgtgaacatcaccatcactcaaggtttggcagtgtcaaccatctcatcattctttccacctggctaccaagtgtccttctgcctggtcatggtgctgctgttcgccgtggataccggcctgtacttcagcgtcaagaccaacatccggtccagcaccagagactggaaggaccacaagttcaagtggcggaaggaccctcaggacaagagggccaagcgatctggatctggagcaacaaacttctcactactcaaacaagcaggtgacgtggaggagaatcccgggcctactagaggccatatgaccgagtacaagcccacggtgcgcctcgccacccgcgacgacgtccccagggccgtacgcaccctcgccgccgcgttcgccgactaccccgccacgcgccacaccgtcgatccggaccgccacatcgagcgggtcaccgagctgcaagaactcttcctcacgcgcgtcgggctcgacatcggcaaggtgtgggtcgcggacgacggcgccgcggtggcggtctggaccacgccggagagcgtcgaagcgggggcggtgttcgccgagatcggcccgcgcatggccgagttgagcggttcccggctggccgcgcagcaacagatggaaggcctcctggcgccgcaccggcccaaggagcccgcgtggttcctggccaccgtcggcgtctcgcccgaccaccagggcaagggtctgggcagcgccgtcgtgctccccggagtggaggcggccgagcgcgccggggtgcccgccttcctggagacctccgcgccccgcaacctccccttctacgagcggctcggcttcaccgtcaccgccgacgtcgaggtgcccgaaggaccgcgcacctggtgcatgacccgcaagcccggtgcctga

SEQ ID NO: 2318 - DNA, 1890 bp, Artificial Sequence
  Synthetic Polynucleotide
atggactggatttggcgcatccttttccttgtcggcgctgctaccggcgcccattccgggcccgaagtgcagctggttgaatctggcggaggactggttcaggctggcggatctctgagactgtcttgtgccgccagcggcagaacctttagcatgggctggtttagacaggcccctggcaaagagagagagttcgtcgccgccatcacatactctggcggcagcccttactacgccgactctgtgaagggcagattcaccatcagccgggacaacgccaagaacaccgtgtacctccagatgaacagcctgaagcctgaggacaccgccgtgtactactgcgccgccaatccaacatacggcagcgactggaacgccgagaattggggccagggaacccaagtgacagtgtctagcggatccggcggcggaggatctggcggaggcggatctgggggcggaggctctttcgaaggcatgagaaccgaggacctgcctaaggccgtggtgttcctggaaccccagtggtacagagtgctggaaaaggacagcgtgaccctgaagtgccagggcgcctacagccccgaggacaatagcacccagtggttccacaacgagagcctgatctccagccaggccagcagctacttcatcgacgccgccaccgtggacgacagcggcgagtatagatgccagaccaacctgagcaccctgagcgaccccgtgcagctggaagtgcacatcggatggctgctgctgcaggcccccagatgggtgttcaaagaagaggaccccatccacctgagatgccactcttggaagaacaccgccctgcacaaagtgacctacctgcagaacggcaagggcagaaagtacttccaccacaacagcgacttctacatccccaaggccaccctgaaggactccggctcctacttctgcagaggcctcgtgggcagcaagaacgtgtccagcgagacagtgaacatcaccatcacccagggcctggccgtgtctaccatcagcagctttttcccacccggctaccaggtgtccttctgcctcgtgatggtgctgctgttcgccgtggacaccggcctgtacttcagcgtgaaaacaaacatccggtccagcaccagagactggaaggaccacaagttcaagtggcggaaggacccccaggacaagcgcgccaagagaagcggatctggcgtgaagcagaccctgaatttcgacctgctgaagctggctggcgacgtggaatccaacccaggcccttctagaggccatatgaccgagtacaagcccacggtgcgcctcgccacccgcgacgacgtccccagggccgtacgcaccctcgccgccgcgttcgccgactaccccgccacgcgccacaccgtcgatccggaccgccacatcgagcgggtcaccgagctgcaagaactcttcctcacgcgcgtcgggctcgacatcggcaaggtgtgggtcgcggacgacggcgccgcggtggcggtctggaccacgccggagagcgtcgaagcgggggcggtgttcgccgagatcggcccgcgcatggccgagttgagcggttcccggctggccgcgcagcaacagatggaaggcctcctggcgccgcaccggcccaaggagcccgcgtggttcctggccaccgtcggcgtctcgcccgaccaccagggcaagggtctgggcagcgccgtcgtgctccccggagtggaggcggccgagcgcgccggggtgcccgccttcctggagacctccgcgccccgcaacctccccttctacgagcggctcggcttcaccgtcaccgccgacgtcgaggtgcccgaaggaccgcgcacctggtgcatgacccgcaagcccggtgcctga

SEQ ID NO: 2319 - DNA, 2442 bp, Artificial Sequence
  Synthetic Polynucleotide
atggccttaccagtgaccgccttgctcctgccgctggccttgctgctccacgccgccaggccggacatccagatgacacagagccctagcagcctgtctgccagcgtgggagacagagtgaccatcacatgcaaggccagcgaccacatcaacaactggctggcctggtatcagcagaagcctggacaggcccctaagctgctgatctacggcgctaccacactggaaacaggcgtgcccagcagattttctggcagcggctctggcaccgactacaccctgacaatatccagcctccagcctgaggacttcgccacctactactgtcagcagagctggaacaccccttggacattcggccagggcaccaagctggaaatcaagagactcgagctgtgggtttcacagcctccagagatcagaaccctggaaggcagcagcgccttcctgccttgcagcttcaatgcctctcagggcagactggctatcggcagcgtgacctggttcagagatgaggtggtgcccggcaaagaagtgcggaacggcacccctgagtttagaggaaggctggcccctctggcctccagcagatttctgcacgatcaccaggccgagctgcacatcagagatgtgcgaggacacgacgccagcatctacgtgtgcagagtggaagtgctcggcctcggagttggcacaggcaatggaacaagactggtggtggaaaaagagcaccctcagctcggagccggaacagtgctgcttctgagagccggcttttacgccgtgtcctttctgtctgtggccgtgggcagcaccgtgtactatcagggcaagtgcctgacctggaagggacctagaaggcaactgcctgctgtggtgcctgctcctttgcctcctccatgtggaagctctgcccatctgctgccacctgttccaggcggaagggccaagcgatctggatctggagcaacaaacttctcactactcaaacaagcaggtgacgtggaggagaatcccgggcctactagtatggactggatttggcgcatccttttccttgtcggcgctgctaccggcgcgcattccttcgaacaagttcagcttcaacagcctggcgctgagctggtcaaacctggcgcttctgtgaagatgagctgcaaagccagcggctacgccttcagcagctactggatcaactggatgaagcagaaacccggccagggactcgaatggatcggccaaatctatcccggcgacggcgacaccaactacaacggcaagttcaagggcagagccacactgaccgccgatacctctagcagcacagcctacatgcagctgagcagcctgaccagcgaagatagcgccgtgtacttctgtgcccggtccatcacaacagtcgtgggctgcgctatggactattggggccagggaacaagcgtgaccgtgtctagtacgcgtggcgatattgagaatacctctctggccccagaagatcctacattccccgccgacacatggggaacatatctgctgacaaccgaaaccgggctgcaaaaggaccatgctctgtgggatcataccgctcagaatctgcttcggatggggcttgcattcctggtcctggtggctcttgtctggtttctggtcgaggactggctgtcccggaagagaaccagagaaagagcttccagggccagcacctgggaaggcagacgcagactgaatactcagaccctgcgcgccaagagaagcggatctggcgtgaagcagaccctgaatttcgacctgctgaagctggctggcgacgtggaatccaacccaggcccttctagaggccatatgaccgagtacaagcccacggtgcgcctcgccacccgcgacgacgtccccagggccgtacgcaccctcgccgccgcgttcgccgactaccccgccacgcgccacaccgtcgatccggaccgccacatcgagcgggtcaccgagctgcaagaactcttcctcacgcgcgtcgggctcgacatcggcaaggtgtgggtcgcggacgacggcgccgcggtggcggtctggaccacgccggagagcgtcgaagcgggggcggtgttcgccgagatcggcccgcgcatggccgagttgagcggttcccggctggccgcgcagcaacagatggaaggcctcctggcgccgcaccggcccaaggagcccgcgtggttcctggccaccgtcggcgtctcgcccgaccaccagggcaagggtctgggcagcgccgtcgtgctccccggagtggaggcggccgagcgcgccggggtgcccgccttcctggagacctccgcgccccgcaacctccccttctacgagcggctcggcttcaccgtcaccgccgacgtcgaggtgcccgaaggaccgcgcacctggtgcatgacccgcaagcccggtgcctga

SEQ ID NO: 2320 - DNA, 2946 bp, Artificial Sequence
  Synthetic Polynucleotide
atggccttaccagtgaccgccttgctcctgccgctggccttgctgctccacgccgccaggccggcatgcgaagtgcagctgcttgaaagtggcggcggactgattcagcctggcggatctctgagactgagctgtgccgccagcggcttcaccttttctagccacgccatgacctgggtccgacaggcacctggaaaagggcttgaatgggtgtccgccatcagcggctctggcgattacacacactacgccgacagcgtgaagggcagattcaccatcagcagagacaacagcaagaacaccgtgtacctccagatgaacagcctgagagccgaggacagcgccgtgtattattgcgccaaggatgaggatggcggcagcctgcttggacacagaggacaaggcaccctggtcaccgtttcttccggtaccggcggaggcggatctggcggcggaggtagcggtggcggaggatctgaattcggatctctcgagaagagcgtgcggttctacctggtggtgtctcctgcctctgccagcacacagacaagctggaccccacgcgatctggtgtctagccagactcagacccagagctgtgtgcctcctacagctggtgctagacaggcccctgagagcccttctacaatccccgttccaagccagcctcagaacagcacactcagacctggacctgccgctcctattgctctggtgcctgtgttttgtggcctgctggtggctaagagcctggtgctgtctgccctgcttgtttggtggggagacatctggtggaaaaccatgatggaactgcggagcctggacacccagaaggccacctgtcatctccagcaagtgaccgatctgccctggacctctgtgtcaagccccgtggaaagagagatcctgtaccacaccgtggctcggaccaagatcagcgacgacgatgatgagcacacccttagggccaagcgatctggatctggagcaacaaacttctcactactcaaacaagcaggtgacgtggaggagaatcccgggcctactagtgccaccatggactggatttggcgcatccttttccttgtcggcgctgctaccggcgcccattccgggcccgaagtgcagctggttgaatctggcggaggactggttcaggctggcggatctctgagactgtcttgtgccgccagcggcagaacctttagcatgggctggtttagacaggcccctggcaaagagagagagttcgtcgccgccatcacatactctggcggcagcccttactacgccgactctgtgaagggcagattcaccatcagccgggacaacgccaagaacaccgtgtacctccagatgaacagcctgaagcctgaggacaccgccgtgtactactgcgccgccaatccaacatacggcagcgactggaacgccgagaattggggccagggaacccaagtgacagtgtctagcggatccggcggcggaggatctggcggaggcggatctgggggcggaggctctttcgaaggcatgagaaccgaggacctgcctaaggccgtggtgttcctggaaccccagtggtacagagtgctggaaaaggacagcgtgaccctgaagtgccagggcgcctacagccccgaggacaatagcacccagtggttccacaacgagagcctgatctccagccaggccagcagctacttcatcgacgccgccaccgtggacgacagcggcgagtatagatgccagaccaacctgagcaccctgagcgaccccgtgcagctggaagtgcacatcggatggctgctgctgcaggcccccagatgggtgttcaaagaagaggaccccatccacctgagatgccactcttggaagaacaccgccctgcacaaagtgacctacctgcagaacggcaagggcagaaagtacttccaccacaacagcgacttctacatccccaaggccaccctgaaggactccggctcctacttctgcagaggcctcgtgggcagcaagaacgtgtccagcgagacagtgaacatcaccatcacccagggcctggccgtgtctaccatcagcagctttttcccacccggctaccaggtgtccttctgcctcgtgatggtgctgctgttcgccgtggacaccggcctgtacttcagcgtgaaaacaaacatccggtccagcaccagagactggaaggaccacaagttcaagtggcggaaggacccccaggacaagcgcgccaagagaagcggatctggcgtgaagcagaccctgaatttcgacctgctgaagctggctggcgacgtggaatccaacccaggcccttctagaggccatatgaccgagtacaagcccacggtgcgcctcgccacccgcgacgacgtccccagggccgtacgcaccctcgccgccgcgttcgccgactaccccgccacgcgccacaccgtcgatccggaccgccacatcgagcgggtcaccgagctgcaagaactcttcctcacgcgcgtcgggctcgacatcggcaaggtgtgggtcgcggacgacggcgccgcggtggcggtctggaccacgccggagagcgtcgaagcgggggcggtgttcgccgagatcggcccgcgcatggccgagttgagcggttcccggctggccgcgcagcaacagatggaaggcctcctggcgccgcaccggcccaaggagcccgcgtggttcctggccaccgtcggcgtctcgcccgaccaccagggcaagggtctgggcagcgccgtcgtgctccccggagtggaggcggccgagcgcgccggggtgcccgccttcctggagacctccgcgccccgcaacctccccttctacgagcggctcggcttcaccgtcaccgccgacgtcgaggtgcccgaaggaccgcgcacctggtgcatgacccgcaagcccggtgcctga

SEQ ID NO: 2321 - DNA, 3462 bp, Artificial Sequence
  Synthetic Polynucleotide
atggccttaccagtgaccgccttgctcctgccgctggccttgctgctccacgccgccaggccgctgcctgttctgacacagcctccatccgtgtctgtggcccctggaaagaccgccagaatcacatgcggcggcaacaacatcggcagcaagagcgtgcactggtatcagcagaagcctggacaggctcctgtgctggtggtgtacgacgacagcgatagacctagcggcatccccgagagattcagcggcagcaattccggcaataccgccacactgaccatcagcagagtggaagctggcgacgaggccgactactactgccaagtgtgggacagcagcagcgactacgtggtgtttggcggcggaacaaagctgacagtgcttggacagcctaaggccaatcctaccgtgacactgttccctccaagcagcgaagaactccaggccaacaaggccacacttgtgtgcctgatctccgacttctaccctggggctgtgacagtggcttggaaggccgatggatctcctgtgaaagccggcgtggaaaccaccaagccatccaagcagagcaacaacaaatacgccgccagctcctacctgagcctgacacctgagcagtggaagtcccacagatcctacagctgccaagtgacccacgaaggcagcaccgtggaaaagacagtggcccctacagagtgcagcctcgagcagtctaaagcccaggtgctgcaatctgtggccggacagacactgacagtgcggtgtcagtatcctcctaccggcagcctgtacgagaagaaaggctggtgcaaagaggccagcgcactcgtctgtatcagactggtcaccagcagcaagccccggacaatggcatggaccagcagattcaccatctgggacgatcccgacgccggcttctttaccgtgaccatgaccgacctgagagaagaggacagcggccactactggtgccggatctacagacccagcgacaacagcgtgtccaagagcgtgcggttctacctggtggtgtctcctgcctctgccagcacacagacaagctggaccccacgcgatctggtgtctagccagactcagacccagagctgtgtgcctcctacagctggtgctagacaggcccctgagagcccttctacaatccccgttccaagccagcctcagaacagcacactcagacctggacctgccgctcctattgctctggtgcctgtgttttgtggcctgctggtggctaagagcctggtgctgtctgccctgcttgtttggtggggagacatctggtggaaaaccatgatggaactgcggagcctggacacccagaaggccacctgtcatctccagcaagtgaccgatctgccctggacctctgtgtcaagccccgtggaaagagagatcctgtaccacaccgtggctcggaccaagatcagcgacgacgatgatgagcacacccttagggccaagcgatctggatctggagcaacaaacttctcactactcaaacaagcaggtgacgtggaggagaatcccgggcctactagtatggactggatttggcgcatccttttccttgtcggcgctgctaccggcgcgcattccttcgaagaagttcaactggtgcagagcggagccgaagtgaagaagccaggcgagagcctgaagattagctgcaaaggcagcggctacagcttcaccagctactggatcggctgggtccgacagatgcctggcaaaggactggaatggatgggcatcatctaccccggcgacagcgacaccagatacagccctagctttcagggccaagtgaccatctccgccgacaagagcatcagcacagcctacctccagtggtcctctctgaaggccagcgataccgccatgtactactgcgccagacaagtctggggatggcaaggcggcatgtaccccaggtctaactggtggtacaacctggactcttggggccagggcacactggtcacagtctcttctgcctctacaaagggaccctccgtgtttcctctggctcccagcagcaagtctacaagcggaggaacagccgctctgggctgcctggtcaaggattactttcccgagcctgtgaccgtgtcctggaatagcggagcactgacaagcggcgtgcacacctttccagccgtgctgcaaagcagcggcctgtactctctgagcagcgtggtcacagtgcctagctctagcctgggcacccagacctacatctgcaatgtgaaccacaagcctagcaacaccaaggtggacaagagagtggaacccaagagctgtacgcgtcagagttttgggttgttggaccctaaattgtgctatctgttggacggaatcctgttcatttacggagtgatcctgaccgcattgttcctgcgggttaagttttccagatccgcagacgcacccgcttaccaacaagggcagaaccaactctacaatgaacttaatttggggcggagggaagagtacgacgttctggacaaaaggaggggacgagatcccgagatgggcggaaagcctcagcgaaggaagaatccgcaagaggggctttataacgaactccagaaagataaaatggcagaagcctatagtgagattgggatgaagggagaaaggaggaggggtaaaggtcacgatgggttgtaccaaggattgagcacagccactaaagatacctatgatgcgctccacatgcaggccctgccgccaagacgcgccaagagaagcggatctggcgtgaagcagaccctgaatttcgacctgctgaagctggctggcgacgtggaatccaacccaggcccttctagaggccatatgaccgagtacaagcccacggtgcgcctcgccacccgcgacgacgtccccagggccgtacgcaccctcgccgccgcgttcgccgactaccccgccacgcgccacaccgtcgatccggaccgccacatcgagcgggtcaccgagctgcaagaactcttcctcacgcgcgtcgggctcgacatcggcaaggtgtgggtcgcggacgacggcgccgcggtggcggtctggaccacgccggagagcgtcgaagcgggggcggtgttcgccgagatcggcccgcgcatggccgagttgagcggttcccggctggccgcgcagcaacagatggaaggcctcctggcgccgcaccggcccaaggagcccgcgtggttcctggccaccgtcggcgtctcgcccgaccaccagggcaagggtctgggcagcgccgtcgtgctccccggagtggaggcggccgagcgcgccggggtgcccgccttcctggagacctccgcgccccgcaacctccccttctacgagcggctcggcttcaccgtcaccgccgacgtcgaggtgcccgaaggaccgcgcacctggtgcatgacccgcaagcccggtgcctga

SEQ ID NO: 2322 - DNA, 2544 bp, Artificial Sequence
  Synthetic Polynucleotide
atggccttaccagtgaccgccttgctcctgccgctggccttgctgctccacgccgccaggccggcatgcgaagtgcagctgcttgaaagtggcggcggactgattcagcctggcggatctctgagactgagctgtgccgccagcggcttcaccttttctagccacgccatgacctgggtccgacaggcacctggaaaagggcttgaatgggtgtccgccatcagcggctctggcgattacacacactacgccgacagcgtgaagggcagattcaccatcagcagagacaacagcaagaacaccgtgtacctccagatgaacagcctgagagccgaggacagcgccgtgtattattgcgccaaggatgaggatggcggcagcctgcttggacacagaggacaaggcaccctggtcaccgtttcttccggtaccatcggctggctgttgctccaggcccctcggtgggtgttcaaggaggaagaccctattcacctgaggtgtcacagctggaagaacactgctctgcataaggtcacatatttacagaatggcaaaggcaggaagtattttcatcataattctgacttctacattccaaaagccacactcaaagacagcggctcctacttctgcagggggcttgttgggagtaaaaatgtgtcttcagagactgtgaacatcaccatcactcaaggtttggcagtgtcaaccatctcatcattctttccacctggctaccaagtgtccttctgcctggtcatggtgctgctgttcgccgtggataccggcctgtacttcagcgtcaagaccaacatccggtccagcaccagagactggaaggaccacaagttcaagtggcggaaggaccctcaggacaagagggccaagcgatctggatctggagcaacaaacttctcactactcaaacaagcaggtgacgtggaggagaatcccgggcctactagtgccaccatggactggatttggcgcatccttttccttgtcggcgctgctaccggcgcccattccgggcccgaagtgcagctggttgaatctggcggaggactggttcaggctggcggatctctgagactgtcttgtgccgccagcggcagaacctttagcatgggctggtttagacaggcccctggcaaagagagagagttcgtcgccgccatcacatactctggcggcagcccttactacgccgactctgtgaagggcagattcaccatcagccgggacaacgccaagaacaccgtgtacctccagatgaacagcctgaagcctgaggacaccgccgtgtactactgcgccgccaatccaacatacggcagcgactggaacgccgagaattggggccagggaacccaagtgacagtgtctagcggatccattggatggttgctcttgcaagccccacgctgggttttcaaagaggaagatccaatccatctgcggtgccacagctggaaaaacaccgctctccacaaagtcacatacctgcaaaatggcaaaggacgcaaatacttccatcacaattccgatttttacattccgaaggctaccctgaaagacagcggcagctatttctgccggggactcgtcggctccaagaatgtgtcctccgaaaccgtgaatatcacgattacccaaggactggctgtgcctacaatctctagcttctttccgcctggataccaagtctccttctgtcttgtgatggtcctcctgtttgctgtggacacaggactgtacttttccgtgaaaacgaacatccgcagctccacacgcgattggaaagatcacaagtttaaatggcgcaaagatccccaggacaagcgcgccaagagaagcggatctggcgtgaagcagaccctgaatttcgacctgctgaagctggctggcgacgtggaatccaacccaggcccttctagaggccatatgaccgagtacaagcccacggtgcgcctcgccacccgcgacgacgtccccagggccgtacgcaccctcgccgccgcgttcgccgactaccccgccacgcgccacaccgtcgatccggaccgccacatcgagcgggtcaccgagctgcaagaactcttcctcacgcgcgtcgggctcgacatcggcaaggtgtgggtcgcggacgacggcgccgcggtggcggtctggaccacgccggagagcgtcgaagcgggggcggtgttcgccgagatcggcccgcgcatggccgagttgagcggttcccggctggccgcgcagcaacagatggaaggcctcctggcgccgcaccggcccaaggagcccgcgtggttcctggccaccgtcggcgtctcgcccgaccaccagggcaagggtctgggcagcgccgtcgtgctccccggagtggaggcggccgagcgcgccggggtgcccgccttcctggagacctccgcgccccgcaacctccccttctacgagcggctcggcttcaccgtcaccgccgacgtcgaggtgcccgaaggaccgcgcacctggtgcatgacccgcaagcccggtgcctga

SEQ ID NO: 2323 - DNA, 2925 bp, Artificial Sequence
  Synthetic Polynucleotide
atggccttaccagtgaccgccttgctcctgccgctggccttgctgctccacgccgccaggccgctgcctgttctgacacagcctccatccgtgtctgtggcccctggaaagaccgccagaatcacatgcggcggcaacaacatcggcagcaagagcgtgcactggtatcagcagaagcctggacaggctcctgtgctggtggtgtacgacgacagcgatagacctagcggcatccccgagagattcagcggcagcaattccggcaataccgccacactgaccatcagcagagtggaagctggcgacgaggccgactactactgccaagtgtgggacagcagcagcgactacgtggtgtttggcggcggaacaaagctgacagtgcttggacagcctaaggccaatcctaccgtgacactgttccctccaagcagcgaagaactccaggccaacaaggccacacttgtgtgcctgatctccgacttctaccctggggctgtgacagtggcttggaaggccgatggatctcctgtgaaagccggcgtggaaaccaccaagccatccaagcagagcaacaacaaatacgccgccagctcctacctgagcctgacacctgagcagtggaagtcccacagatcctacagctgccaagtgacccacgaaggcagcaccgtggaaaagacagtggcccctacagagtgcagcctcgaggtggtggaaaaagagcaccctcagctcggagccggaacagtgctgcttctgagagccggcttttacgccgtgtcctttctgtctgtggccgtgggcagcaccgtgtactatcagggcaagtgcctgacctggaagggacctagaaggcaactgcctgctgtggtgcctgctcctttgcctcctccatgtggaagctctgcccatctgctgccacctgttccaggcggaagggccaagcgatctggatctggagcaacaaacttctcactactcaaacaagcaggtgacgtggaggagaatcccgggcctactagtatggactggatttggcgcatccttttccttgtcggcgctgctaccggcgcgcattccttcgaagaagttcaactggtgcagagcggagccgaagtgaagaagccaggcgagagcctgaagattagctgcaaaggcagcggctacagcttcaccagctactggatcggctgggtccgacagatgcctggcaaaggactggaatggatgggcatcatctaccccggcgacagcgacaccagatacagccctagctttcagggccaagtgaccatctccgccgacaagagcatcagcacagcctacctccagtggtcctctctgaaggccagcgataccgccatgtactactgcgccagacaagtctggggatggcaaggcggcatgtaccccaggtctaactggtggtacaacctggactcttggggccagggcacactggtcacagtctcttctgcctctacaaagggaccctccgtgtttcctctggctcccagcagcaagtctacaagcggaggaacagccgctctgggctgcctggtcaaggattactttcccgagcctgtgaccgtgtcctggaatagcggagcactgacaagcggcgtgcacacctttccagccgtgctgcaaagcagcggcctgtactctctgagcagcgtggtcacagtgcctagctctagcctgggcacccagacctacatctgcaatgtgaaccacaagcctagcaacaccaaggtggacaagagagtggaacccaagagctgtacgcgtcagagttttgggttgttggaccctaaattgtgctatctgttggacggaatcctgttcatttacggagtgatcctgaccgcattgttcctgcgggttaagttttccagatccgcagacgcacccgcttaccaacaagggcagaaccaactctacaatgaacttaatttggggcggagggaagagtacgacgttctggacaaaaggaggggacgagatcccgagatgggcggaaagcctcagcgaaggaagaatccgcaagaggggctttataacgaactccagaaagataaaatggcagaagcctatagtgagattgggatgaagggagaaaggaggaggggtaaaggtcacgatgggttgtaccaaggattgagcacagccactaaagatacctatgatgcgctccacatgcaggccctgccgccaagacgcgccaagagaagcggatctggcgtgaagcagaccctgaatttcgacctgctgaagctggctggcgacgtggaatccaacccaggcccttctagaggccatatgaccgagtacaagcccacggtgcgcctcgccacccgcgacgacgtccccagggccgtacgcaccctcgccgccgcgttcgccgactaccccgccacgcgccacaccgtcgatccggaccgccacatcgagcgggtcaccgagctgcaagaactcttcctcacgcgcgtcgggctcgacatcggcaaggtgtgggtcgcggacgacggcgccgcggtggcggtctggaccacgccggagagcgtcgaagcgggggcggtgttcgccgagatcggcccgcgcatggccgagttgagcggttcccggctggccgcgcagcaacagatggaaggcctcctggcgccgcaccggcccaaggagcccgcgtggttcctggccaccgtcggcgtctcgcccgaccaccagggcaagggtctgggcagcgccgtcgtgctccccggagtggaggcggccgagcgcgccggggtgcccgccttcctggagacctccgcgccccgcaacctccccttctacgagcggctcggcttcaccgtcaccgccgacgtcgaggtgcccgaaggaccgcgcacctggtgcatgacccgcaagcccggtgcctga

SEQ ID NO: 2324 - DNA, 3165 bp, Artificial Sequence
  Synthetic Polynucleotide
atggccttaccagtgaccgccttgctcctgccgctggccttgctgctccacgccgccaggccgctgcctgttctgacacagcctccatccgtgtctgtggcccctggaaagaccgccagaatcacatgcggcggcaacaacatcggcagcaagagcgtgcactggtatcagcagaagcctggacaggctcctgtgctggtggtgtacgacgacagcgatagacctagcggcatccccgagagattcagcggcagcaattccggcaataccgccacactgaccatcagcagagtggaagctggcgacgaggccgactactactgccaagtgtgggacagcagcagcgactacgtggtgtttggcggcggaacaaagctgacagtgcttggacagcctaaggccaatcctaccgtgacactgttccctccaagcagcgaagaactccaggccaacaaggccacacttgtgtgcctgatctccgacttctaccctggggctgtgacagtggcttggaaggccgatggatctcctgtgaaagccggcgtggaaaccaccaagccatccaagcagagcaacaacaaatacgccgccagctcctacctgagcctgacacctgagcagtggaagtcccacagatcctacagctgccaagtgacccacgaaggcagcaccgtggaaaagacagtggcccctacagagtgcagcctcgagaagagcgtgcggttctacctggtggtgtctcctgcctctgccagcacacagacaagctggaccccacgcgatctggtgtctagccagactcagacccagagctgtgtgcctcctacagctggtgctagacaggcccctgagagcccttctacaatccccgttccaagccagcctcagaacagcacactcagacctggacctgccgctcctattgctctggtgcctgtgttttgtggcctgctggtggctaagagcctggtgctgtctgccctgcttgtttggtggggagacatctggtggaaaaccatgatggaactgcggagcctggacacccagaaggccacctgtcatctccagcaagtgaccgatctgccctggacctctgtgtcaagccccgtggaaagagagatcctgtaccacaccgtggctcggaccaagatcagcgacgacgatgatgagcacacccttagggccaagcgatctggatctggagcaacaaacttctcactactcaaacaagcaggtgacgtggaggagaatcccgggcctactagtatggactggatttggcgcatccttttccttgtcggcgctgctaccggcgcgcattccttcgaagaagttcaactggtgcagagcggagccgaagtgaagaagccaggcgagagcctgaagattagctgcaaaggcagcggctacagcttcaccagctactggatcggctgggtccgacagatgcctggcaaaggactggaatggatgggcatcatctaccccggcgacagcgacaccagatacagccctagctttcagggccaagtgaccatctccgccgacaagagcatcagcacagcctacctccagtggtcctctctgaaggccagcgataccgccatgtactactgcgccagacaagtctggggatggcaaggcggcatgtaccccaggtctaactggtggtacaacctggactcttggggccagggcacactggtcacagtctcttctgcctctacaaagggaccctccgtgtttcctctggctcccagcagcaagtctacaagcggaggaacagccgctctgggctgcctggtcaaggattactttcccgagcctgtgaccgtgtcctggaatagcggagcactgacaagcggcgtgcacacctttccagccgtgctgcaaagcagcggcctgtactctctgagcagcgtggtcacagtgcctagctctagcctgggcacccagacctacatctgcaatgtgaaccacaagcctagcaacaccaaggtggacaagagagtggaacccaagagctgtacgcgtcagagttttgggttgttggaccctaaattgtgctatctgttggacggaatcctgttcatttacggagtgatcctgaccgcattgttcctgcgggttaagttttccagatccgcagacgcacccgcttaccaacaagggcagaaccaactctacaatgaacttaatttggggcggagggaagagtacgacgttctggacaaaaggaggggacgagatcccgagatgggcggaaagcctcagcgaaggaagaatccgcaagaggggctttataacgaactccagaaagataaaatggcagaagcctatagtgagattgggatgaagggagaaaggaggaggggtaaaggtcacgatgggttgtaccaaggattgagcacagccactaaagatacctatgatgcgctccacatgcaggccctgccgccaagacgcgccaagagaagcggatctggcgtgaagcagaccctgaatttcgacctgctgaagctggctggcgacgtggaatccaacccaggcccttctagaggccatatgaccgagtacaagcccacggtgcgcctcgccacccgcgacgacgtccccagggccgtacgcaccctcgccgccgcgttcgccgactaccccgccacgcgccacaccgtcgatccggaccgccacatcgagcgggtcaccgagctgcaagaactcttcctcacgcgcgtcgggctcgacatcggcaaggtgtgggtcgcggacgacggcgccgcggtggcggtctggaccacgccggagagcgtcgaagcgggggcggtgttcgccgagatcggcccgcgcatggccgagttgagcggttcccggctggccgcgcagcaacagatggaaggcctcctggcgccgcaccggcccaaggagcccgcgtggttcctggccaccgtcggcgtctcgcccgaccaccagggcaagggtctgggcagcgccgtcgtgctccccggagtggaggcggccgagcgcgccggggtgcccgccttcctggagacctccgcgccccgcaacctccccttctacgagcggctcggcttcaccgtcaccgccgacgtcgaggtgcccgaaggaccgcgcacctggtgcatgacccgcaagcccggtgcctga

SEQ ID NO: 2325 - DNA, 3018 bp, Artificial Sequence
  Synthetic Polynucleotide
atggccttaccagtgaccgccttgctcctgccgctggccttgctgctccacgccgccaggccggcatgcctgtgggtttcacagcctccagagatcagaaccctggaaggcagcagcgccttcctgccttgcagcttcaatgcctctcagggcagactggctatcggcagcgtgacctggttcagagatgaggtggtgcccggcaaagaagtgcggaacggcacccctgagtttagaggaaggctggcccctctggcctccagcagatttctgcacgatcaccaggccgagctgcacatcagagatgtgcgaggacacgacgccagcatctacgtgtgcagagtggaagtgctcggcctcggagttggcacaggcaatggaacaagactggtggtggaaaaagagcaccctcagctcggactcgaggacctgaagaacgtgttcccacctgaggtggccgtgttcgagcctagcgaggccgagatcagccacacccagaaagccaccctcgtgtgcctggctaccggcttctaccccgaccatgtggaactgtcttggtgggtcaacggcaaagaggtgcacagcggcgtgtgtaccgacccccagccactgaaagaacagcccgccctgaacgacagccggtactgcctgagcagcagactgagagtgtccgccaccttctggcagaacccccggaaccacttcagatgccaggtgcagttctacggcctgagcgagaacgacgagtggacccaggacagagccaagcccgtgacccagatcgtgtctgccgaagcctggggcagagccgattgcggctttaccagcgagagctaccagcagggcgtgctgagcgccaccatcctgtacgagatcctgctgggcaaggccaccctgtacgccgtgctggtgtctgccctggtgctgatggctatggtcaagcggaaggacagccggggaagggccaagcgatctggatctggagcaacaaacttctcactactcaaacaagcaggtgacgtggaggagaatcccgggcctactagtgccaccatggactggatttggcgcatccttttccttgtcggcgctgctaccggcgcccattccgggcccgaagtgcagctggttgaatctggcggaggactggttcaggctggcggatctctgagactgtcttgtgccgccagcggcagaacctttagcatgggctggtttagacaggcccctggcaaagagagagagttcgtcgccgccatcacatactctggcggcagcccttactacgccgactctgtgaagggcagattcaccatcagccgggacaacgccaagaacaccgtgtacctccagatgaacagcctgaagcctgaggacaccgccgtgtactactgcgccgccaatccaacatacggcagcgactggaacgccgagaattggggccagggaacccaagtgacagtgtctagcggatccggcggcggaggatctggcggaggcggatctgggggcggaggctctttcgaacaagttcagcttcaacagcctggcgctgagctggtcaaacctggcgcttctgtgaagatgagctgcaaagccagcggctacgccttcagcagctactggatcaactggatgaagcagaaacccggccagggactcgaatggatcggccaaatctatcccggcgacggcgacaccaactacaacggcaagttcaagggcagagccacactgaccgccgatacctctagcagcacagcctacatgcagctgagcagcctgaccagcgaagatagcgccgtgtacttctgtgcccggtccatcacaacagtcgtgggctgcgctatggactattggggccagggaacaagcgtgaccgtgtctagtacgcgtatccagaaccctgatcctgccgtgtaccagctgcgggatagcaagagcagcgacaagagcgtgtgtctgttcaccgacttcgacagccagaccaacgtgtcccagagcaaggactccgacgtgtacatcaccgataagtgcgtgctggacatgcggagcatggacttcaagagcaactccgccgtggcctggtccaacaagtccgatttcgcctgcgccaacgccttcaacaacagcattatccccgaggacacattcttcccaagccccgagagcagctgcgacgtgaagctggtggaaaagagcttcgagacagacaccaacctgaacttccagaacctgagcgtgatcggcttcagaatcctgctgctgaaagtggccggctttaacctgctgatgaccctgcggctgtggtccagccgcgccaagagaagcggatctggcgtgaagcagaccctgaatttcgacctgctgaagctggctggcgacgtggaatccaacccaggcccttctagaggccatatgaccgagtacaagcccacggtgcgcctcgccacccgcgacgacgtccccagggccgtacgcaccctcgccgccgcgttcgccgactaccccgccacgcgccacaccgtcgatccggaccgccacatcgagcgggtcaccgagctgcaagaactcttcctcacgcgcgtcgggctcgacatcggcaaggtgtgggtcgcggacgacggcgccgcggtggcggtctggaccacgccggagagcgtcgaagcgggggcggtgttcgccgagatcggcccgcgcatggccgagttgagcggttcccggctggccgcgcagcaacagatggaaggcctcctggcgccgcaccggcccaaggagcccgcgtggttcctggccaccgtcggcgtctcgcccgaccaccagggcaagggtctgggcagcgccgtcgtgctccccggagtggaggcggccgagcgcgccggggtgcccgccttcctggagacctccgcgccccgcaacctccccttctacgagcggctcggcttcaccgtcaccgccgacgtcgaggtgcccgaaggaccgcgcacctggtgcatgacccgcaagcccggtgcctga

SEQ ID NO: 2326 - DNA, 3768 bp, Artificial Sequence
  Synthetic Polynucleotide
atggccttaccagtgaccgccttgctcctgccgctggccttgctgctccacgccgccaggccgctgcctgttctgacacagcctccatccgtgtctgtggcccctggaaagaccgccagaatcacatgcggcggcaacaacatcggcagcaagagcgtgcactggtatcagcagaagcctggacaggctcctgtgctggtggtgtacgacgacagcgatagacctagcggcatccccgagagattcagcggcagcaattccggcaataccgccacactgaccatcagcagagtggaagctggcgacgaggccgactactactgccaagtgtgggacagcagcagcgactacgtggtgtttggcggcggaacaaagctgacagtgcttggacagcctaaggccaatcctaccgtgacactgttccctccaagcagcgaagaactccaggccaacaaggccacacttgtgtgcctgatctccgacttctaccctggggctgtgacagtggcttggaaggccgatggatctcctgtgaaagccggcgtggaaaccaccaagccatccaagcagagcaacaacaaatacgccgccagctcctacctgagcctgacacctgagcagtggaagtcccacagatcctacagctgccaagtgacccacgaaggcagcaccgtggaaaagacagtggcccctacagagtgcagcggatccgcaaagcccaccacgactccagcgccgcgaccaccaacaccggcgcccactatcgcgtcgcagcccctgtccctgagaccagaggcgtgtagaccagcggctggaggcgcagtgcacacgagggggctggacttcgcctgtgacagcaacctgtttgtggcctcttggatcgccgtgatgattatcttcagaatcggaatggccgtggctatcttctgctgcttcttcttcccatcctggcggcggaagcggaaagagaagcagtctgagacaagccccaaagagttcctgaccatctacgaggacgtgaaggacctgaaaacccggcggaaccacgaacaagagcagacctttcctggcggaggcagcaccatctacagcatgatccagagccagagcagcgcccctacaagccaagagcctgcctacacactgtactccctgatccagcctagcagaaagagcggcagccggaagagaaatcacagccccagcttcaacagcacgatctacgaagtgatcggcaagagccagccaaaggctcagaaccctgccagactgagccggaaagagctggaaaacttcgacgtgtacagcactagtagagtgaagttcagcagaagcgccgacgcccctgcctaccagcagggacagaaccaactgtacaacgagctgaacctgggcagacgggaagagtacgacgtgctggacaagcggagaggcagggaccctgagatgggcggaaagccccagcggagaaagaacccccaggaaggactgtataacgaactccagaaagacaagatggccgaagcctacagcgagatcggcatgaagggcgagcggagaagaggcaagggccacgatggcctgtaccagggcctgagcaccgccaccaaggacacctatgacgccctgcacatgcaggccctgcctccaagaagggccaagcgatctggatctggagcaacaaacttctcactactcaaacaagcaggtgacgtggaggagaatcccgggcctatggactggatttggcgcatccttttccttgtcggcgctgctaccggcgcgcattccttcgaagaagttcaactggtgcagagcggagccgaagtgaagaagccaggcgagagcctgaagattagctgcaaaggcagcggctacagcttcaccagctactggatcggctgggtccgacagatgcctggcaaaggactggaatggatgggcatcatctaccccggcgacagcgacaccagatacagccctagctttcagggccaagtgaccatctccgccgacaagagcatcagcacagcctacctccagtggtcctctctgaaggccagcgataccgccatgtactactgcgccagacaagtctggggatggcaaggcggcatgtaccccaggtctaactggtggtacaacctggactcttggggccagggcacactggtcacagtctcttctgcctctacaaagggaccctccgtgtttcctctggctcccagcagcaagtctacaagcggaggaacagccgctctgggctgcctggtcaaggattactttcccgagcctgtgaccgtgtcctggaatagcggagcactgacaagcggcgtgcacacctttccagccgtgctgcaaagcagcggcctgtactctctgagcagcgtggtcacagtgcctagctctagcctgggcacccagacctacatctgcaatgtgaaccacaagcctagcaacaccaaggtggacaagagagtggaacccaagagctgtggtaccacaacgccgggcgaaaggagttccttgccggccttttaccccggcacaagcggaagctgtagtgggtgtggaagcctcagcctcccacttcttgcgggcctcgtcgcggcagatgcagtagcttcacttcttattgtaggcgcggtatttctctgtgctcgaccaaggaggtcacccgctcaggaggatggtaaggtgtatataaatatgccaggacgcggaagctctagacgggttaagttttccagatccgcagacgcacccgcttaccaacaagggcagaaccaactctacaatgaacttaatttggggcggagggaagagtacgacgttctggacaaaaggaggggacgagatcccgagatgggcggaaagcctcagcgaaggaagaatccgcaagaggggctttataacgaactccagaaagataaaatggcagaagcctatagtgagattgggatgaagggagaaaggaggaggggtaaaggtcacgatgggttgtaccaaggattgagcacagccactaaagatacctatgatgcgctccacatgcaggccctgccgccaagacgcgccaagagaagcggatctggcgtgaagcagaccctgaatttcgacctgctgaagctggctggcgacgtggaatccaacccaggccctggccatatgaccgagtacaagcccacggtgcgcctcgccacccgcgacgacgtccccagggccgtacgcaccctcgccgccgcgttcgccgactaccccgccacgcgccacaccgtcgatccggaccgccacatcgagcgggtcaccgagctgcaagaactcttcctcacgcgcgtcgggctcgacatcggcaaggtgtgggtcgcggacgacggcgccgcggtggcggtctggaccacgccggagagcgtcgaagcgggggcggtgttcgccgagatcggcccgcgcatggccgagttgagcggttcccggctggccgcgcagcaacagatggaaggcctcctggcgccgcaccggcccaaggagcccgcgtggttcctggccaccgtcggcgtctcgcccgaccaccagggcaagggtctgggcagcgccgtcgtgctccccggagtggaggcggccgagcgcgccggggtgcccgccttcctggagacctccgcgccccgcaacctccccttctacgagcggctcggcttcaccgtcaccgccgacgtcgaggtgcccgaaggaccgcgcacctggtgcatgacccgcaagcccggtgcctga

SEQ ID NO: 2327 - DNA, 2658 bp, Artificial Sequence
  Synthetic Polynucleotide
atggccttaccagtgaccgccttgctcctgccgctggccttgctgctccacgccgccaggccggacatccagatgacacagagccctagcagcctgtctgccagcgtgggagacagagtgaccatcacatgcaaggccagcgaccacatcaacaactggctggcctggtatcagcagaagcctggacaggcccctaagctgctgatctacggcgctaccacactggaaacaggcgtgcccagcagattttctggcagcggctctggcaccgactacaccctgacaatatccagcctccagcctgaggacttcgccacctactactgtcagcagagctggaacaccccttggacattcggccagggcaccaagctggaaatcaagagactcgagcagtctaaagcccaggtgctgcaatctgtggccggacagacactgacagtgcggtgtcagtatcctcctaccggcagcctgtacgagaagaaaggctggtgcaaagaggccagcgcactcgtctgtatcagactggtcaccagcagcaagccccggacaatggcatggaccagcagattcaccatctgggacgatcccgacgccggcttctttaccgtgaccatgaccgacctgagagaagaggacagcggccactactggtgccggatctacagacccagcgacaacagcgtgtccaagagcgtgcggttctacctggtggtgtctcctgcctctgccagcacacagacaagctggaccccacgcgatctggtgtctagccagactcagacccagagctgtgtgcctcctacagctggtgctagacaggcccctgagagcccttctacaatccccgttccaagccagcctcagaacagcacactcagacctggacctgccgctcctattgctctggtgcctgtgttttgtggcctgctggtggctaagagcctggtgctgtctgccctgcttgtttggtggggagacatctggtggaaaaccatgatggaactgcggagcctggacacccagaaggccacctgtcatctccagcaagtgaccgatctgccctggacctctgtgtcaagccccgtggaaagagagatcctgtaccacaccgtggctcggaccaagatcagcgacgacgatgatgagcacacccttagggccaagcgatctggatctggagcaacaaacttctcactactcaaacaagcaggtgacgtggaggagaatcccgggcctactagtatggactggatttggcgcatccttttccttgtcggcgctgctaccggcgcgcattccttcgaacaagttcagcttcaacagcctggcgctgagctggtcaaacctggcgcttctgtgaagatgagctgcaaagccagcggctacgccttcagcagctactggatcaactggatgaagcagaaacccggccagggactcgaatggatcggccaaatctatcccggcgacggcgacaccaactacaacggcaagttcaagggcagagccacactgaccgccgatacctctagcagcacagcctacatgcagctgagcagcctgaccagcgaagatagcgccgtgtacttctgtgcccggtccatcacaacagtcgtgggctgcgctatggactattggggccagggaacaagcgtgaccgtgtctagtacgcgtggcgatattgagaatacctctctggccccagaagatcctacattccccgccgacacatggggaacatatctgctgacaaccgaaaccgggctgcaaaaggaccatgctctgtgggatcataccgctcagaatctgcttcggatggggcttgcattcctggtcctggtggctcttgtctggtttctggtcgaggactggctgtcccggaagagaaccagagaaagagcttccagggccagcacctgggaaggcagacgcagactgaatactcagaccctgcgcgccaagagaagcggatctggcgtgaagcagaccctgaatttcgacctgctgaagctggctggcgacgtggaatccaacccaggcccttctagaggccatatgaccgagtacaagcccacggtgcgcctcgccacccgcgacgacgtccccagggccgtacgcaccctcgccgccgcgttcgccgactaccccgccacgcgccacaccgtcgatccggaccgccacatcgagcgggtcaccgagctgcaagaactcttcctcacgcgcgtcgggctcgacatcggcaaggtgtgggtcgcggacgacggcgccgcggtggcggtctggaccacgccggagagcgtcgaagcgggggcggtgttcgccgagatcggcccgcgcatggccgagttgagcggttcccggctggccgcgcagcaacagatggaaggcctcctggcgccgcaccggcccaaggagcccgcgtggttcctggccaccgtcggcgtctcgcccgaccaccagggcaagggtctgggcagcgccgtcgtgctccccggagtggaggcggccgagcgcgccggggtgcccgccttcctggagacctccgcgccccgcaacctccccttctacgagcggctcggcttcaccgtcaccgccgacgtcgaggtgcccgaaggaccgcgcacctggtgcatgacccgcaagcccggtgcctga

SEQ ID NO: 2328 - DNA, 3246 bp, Artificial Sequence
  Synthetic Polynucleotide
atggccttaccagtgaccgccttgctcctgccgctggccttgctgctccacgccgccaggccgctgcctgttctgacacagcctccatccgtgtctgtggcccctggaaagaccgccagaatcacatgcggcggcaacaacatcggcagcaagagcgtgcactggtatcagcagaagcctggacaggctcctgtgctggtggtgtacgacgacagcgatagacctagcggcatccccgagagattcagcggcagcaattccggcaataccgccacactgaccatcagcagagtggaagctggcgacgaggccgactactactgccaagtgtgggacagcagcagcgactacgtggtgtttggcggcggaacaaagctgacagtgcttggacagcctaaggccaatcctaccgtgacactgttccctccaagcagcgaagaactccaggccaacaaggccacacttgtgtgcctgatctccgacttctaccctggggctgtgacagtggcttggaaggccgatggatctcctgtgaaagccggcgtggaaaccaccaagccatccaagcagagcaacaacaaatacgccgccagctcctacctgagcctgacacctgagcagtggaagtcccacagatcctacagctgccaagtgacccacgaaggcagcaccgtggaaaagacagtggcccctacagagtgcagcctcgagctgtgggtttcacagcctccagagatcagaaccctggaaggcagcagcgccttcctgccttgcagcttcaatgcctctcagggcagactggctatcggcagcgtgacctggttcagagatgaggtggtgcccggcaaagaagtgcggaacggcacccctgagtttagaggaaggctggcccctctggcctccagcagatttctgcacgatcaccaggccgagctgcacatcagagatgtgcgaggacacgacgccagcatctacgtgtgcagagtggaagtgctcggcctcggagttggcacaggcaatggaacaagactggtggtggaaaaagagcaccctcagctcggagccggaacagtgctgcttctgagagccggcttttacgccgtgtcctttctgtctgtggccgtgggcagcaccgtgtactatcagggcaagtgcctgacctggaagggacctagaaggcaactgcctgctgtggtgcctgctcctttgcctcctccatgtggaagctctgcccatctgctgccacctgttccaggcggaagggccaagcgatctggatctggagcaacaaacttctcactactcaaacaagcaggtgacgtggaggagaatcccgggcctactagtatggactggatttggcgcatccttttccttgtcggcgctgctaccggcgcgcattccttcgaagaagttcaactggtgcagagcggagccgaagtgaagaagccaggcgagagcctgaagattagctgcaaaggcagcggctacagcttcaccagctactggatcggctgggtccgacagatgcctggcaaaggactggaatggatgggcatcatctaccccggcgacagcgacaccagatacagccctagctttcagggccaagtgaccatctccgccgacaagagcatcagcacagcctacctccagtggtcctctctgaaggccagcgataccgccatgtactactgcgccagacaagtctggggatggcaaggcggcatgtaccccaggtctaactggtggtacaacctggactcttggggccagggcacactggtcacagtctcttctgcctctacaaagggaccctccgtgtttcctctggctcccagcagcaagtctacaagcggaggaacagccgctctgggctgcctggtcaaggattactttcccgagcctgtgaccgtgtcctggaatagcggagcactgacaagcggcgtgcacacctttccagccgtgctgcaaagcagcggcctgtactctctgagcagcgtggtcacagtgcctagctctagcctgggcacccagacctacatctgcaatgtgaaccacaagcctagcaacaccaaggtggacaagagagtggaacccaagagctgtacgcgtcagagttttgggttgttggaccctaaattgtgctatctgttggacggaatcctgttcatttacggagtgatcctgaccgcattgttcctgcgggttaagttttccagatccgcagacgcacccgcttaccaacaagggcagaaccaactctacaatgaacttaatttggggcggagggaagagtacgacgttctggacaaaaggaggggacgagatcccgagatgggcggaaagcctcagcgaaggaagaatccgcaagaggggctttataacgaactccagaaagataaaatggcagaagcctatagtgagattgggatgaagggagaaaggaggaggggtaaaggtcacgatgggttgtaccaaggattgagcacagccactaaagatacctatgatgcgctccacatgcaggccctgccgccaagacgcgccaagagaagcggatctggcgtgaagcagaccctgaatttcgacctgctgaagctggctggcgacgtggaatccaacccaggcccttctagaggccatatgaccgagtacaagcccacggtgcgcctcgccacccgcgacgacgtccccagggccgtacgcaccctcgccgccgcgttcgccgactaccccgccacgcgccacaccgtcgatccggaccgccacatcgagcgggtcaccgagctgcaagaactcttcctcacgcgcgtcgggctcgacatcggcaaggtgtgggtcgcggacgacggcgccgcggtggcggtctggaccacgccggagagcgtcgaagcgggggcggtgttcgccgagatcggcccgcgcatggccgagttgagcggttcccggctggccgcgcagcaacagatggaaggcctcctggcgccgcaccggcccaaggagcccgcgtggttcctggccaccgtcggcgtctcgcccgaccaccagggcaagggtctgggcagcgccgtcgtgctccccggagtggaggcggccgagcgcgccggggtgcccgccttcctggagacctccgcgccccgcaacctccccttctacgagcggctcggcttcaccgtcaccgccgacgtcgaggtgcccgaaggaccgcgcacctggtgcatgacccgcaagcccggtgcctga

SEQ ID NO: 2329 - DNA, 1404 bp, Artificial Sequence
  Synthetic Polynucleotide
atggccttaccagtgaccgccttgctcctgccgctggccttgctgctccacgccgccaggccggaagtgcagctggttgaatctggcggaggactggttcaggctggcggatctctgagactgtcttgtgccgccagcggcagaacctttagcatgggctggtttagacaggcccctggcaaagagagagagttcgtcgccgccatcacatactctggcggcagcccttactacgccgactctgtgaagggcagattcaccatcagccgggacaacgccaagaacaccgtgtacctccagatgaacagcctgaagcctgaggacaccgccgtgtactactgcgccgccaatccaacatacggcagcgactggaacgccgagaattggggccagggaacccaagtgacagtgtctagcacgcgtcaggtggtggataccaccaaggccgtgattaccctccagcctccttgggtgtccgtgttccaagaggaaaccgtgacactgcactgcgaggtgctgcatctgcctggctctagcagcacccagtggtttctgaatggcaccgccacacagaccagcacacccagctacagaatcaccagcgccagcgtgaacgacagcggcgagtacagatgccagagaggactgagcggcagaagcgaccccattcagctggaaatccacagaggctggctgctgctccaggtgtccagcagagtgtttacagagggcgagcccctggctctgagatgtcacgcctggaaggacaagctggtgtacaacgtgctgtactaccggaacggcaaagccttcaagttcttccactggaacagcaacctgaccatcctcaagaccaacatcagccacaacggcacctaccactgtagcggcatgggcaagcacagatacacaagcgccggcatcagcgtgaccgtgaaagagctgtttcccgctcctgtgctgaacgcctctgtgacaagtccactgctggaaggcaaccttgtgaccctgagctgcgagacaaagctgctgctgcaaagacctggcctccagctgtacttcagcttctacatgggcagcaagaccctgcggggcagaaataccagctccgagtaccagatcctgaccgccagaagagaggacagcggcctgtattggtgcgaagccgccaccgaggatggcaatgtgctgaagagaagccccgagctggaactccaggtgctgggactgcaactgcctacacctgtgtggttccacgtgtaccaagtctccttctgtcttgtgatggtcctcctgtttgctgtggacacaggactgtacttttccgtgaaaacgaacatccgcagctccacacgcgattggaaagatcacaagtttaaatggcgcaaagatccccaggacaag

SEQ ID NO: 2330 - DNA, 53 bp, Artificial Sequence
  Synthetic Polynucleotide
ggggggggggggggggggggggggggggggggggggggggggggggggggggg

SEQ ID NO: 2331 - DNA, 53 bp, Artificial Sequence; identical to SEQ ID NO: 2330
  Synthetic Polynucleotide

SEQ ID NO: 2332 - DNA, 53 bp, Artificial Sequence; identical to SEQ ID NO: 2330
  Synthetic Polynucleotide

SEQ ID NO: 2333 - DNA, 53 bp, Artificial Sequence; identical to SEQ ID NO: 2330
  Synthetic Polynucleotide

SEQ ID NO: 2334 - DNA, 53 bp, Artificial Sequence; identical to SEQ ID NO: 2330
  Synthetic Polynucleotide

SEQ ID NO: 2335 - DNA, 53 bp, Artificial Sequence; identical to SEQ ID NO: 2330
  Synthetic Polynucleotide

SEQ ID NO: 2336 - DNA, 53 bp, Artificial Sequence; identical to SEQ ID NO: 2330
  Synthetic Polynucleotide

SEQ ID NO: 2337 - DNA, 53 bp, Artificial Sequence; identical to SEQ ID NO: 2330
  Synthetic Polynucleotide

SEQ ID NO: 2338 - DNA, 53 bp, Artificial Sequence; identical to SEQ ID NO: 2330
  Synthetic Polynucleotide

SEQ ID NO: 2339 - DNA, 53 bp, Artificial Sequence; identical to SEQ ID NO: 2330
  Synthetic Polynucleotide

SEQ ID NO: 2340 - DNA, 53 bp, Artificial Sequence; identical to SEQ ID NO: 2330
  Synthetic Polynucleotide

SEQ ID NO: 2341 - DNA, 53 bp, Artificial Sequence; identical to SEQ ID NO: 2330
  Synthetic Polynucleotide

SEQ ID NO: 2342 - DNA, 53 bp, Artificial Sequence; identical to SEQ ID NO: 2330
  Synthetic Polynucleotide

SEQ ID NO: 2343 - DNA, 53 bp, Artificial Sequence; identical to SEQ ID NO: 2330
  Synthetic Polynucleotide

SEQ ID NO: 2344 - DNA, 53 bp, Artificial Sequence; identical to SEQ ID NO: 2330
  Synthetic Polynucleotide

SEQ ID NO: 2345 - DNA, 53 bp, Artificial Sequence; identical to SEQ ID NO: 2330
  Synthetic Polynucleotide

SEQ ID NO: 2346 - DNA, 53 bp, Artificial Sequence; identical to SEQ ID NO: 2330
  Synthetic Polynucleotide

SEQ ID NO: 2347 - DNA, 53 bp, Artificial Sequence; identical to SEQ ID NO: 2330
  Synthetic Polynucleotide

SEQ ID NO: 2348 - DNA, 53 bp, Artificial Sequence; identical to SEQ ID NO: 2330
  Synthetic Polynucleotide

SEQ ID NO: 2349 - DNA, 53 bp, Artificial Sequence; identical to SEQ ID NO: 2330
  Synthetic Polynucleotide

SEQ ID NO: 2350 - DNA, 53 bp, Artificial Sequence; identical to SEQ ID NO: 2330
  Synthetic Polynucleotide

SEQ ID NO: 2351 - DNA, 53 bp, Artificial Sequence; identical to SEQ ID NO: 2330
  Synthetic Polynucleotide

SEQ ID NO: 2352 - DNA, 53 bp, Artificial Sequence; identical to SEQ ID NO: 2330
  Synthetic Polynucleotide

SEQ ID NO: 2353 - DNA, 53 bp, Artificial Sequence; identical to SEQ ID NO: 2330
  Synthetic Polynucleotide

SEQ ID NO: 2354 - DNA, 53 bp, Artificial Sequence; identical to SEQ ID NO: 2330
  Synthetic Polynucleotide

SEQ ID NO: 2355 - DNA, 53 bp, Artificial Sequence; identical to SEQ ID NO: 2330
  Synthetic Polynucleotide

SEQ ID NO: 2356 - DNA, 53 bp, Artificial Sequence; identical to SEQ ID NO: 2330
  Synthetic Polynucleotide

SEQ ID NO: 2357 - DNA, 53 bp, Artificial Sequence; identical to SEQ ID NO: 2330
  Synthetic Polynucleotide

SEQ ID NO: 2358 - DNA, 53 bp, Artificial Sequence; identical to SEQ ID NO: 2330
  Synthetic Polynucleotide

SEQ ID NO: 2359 - DNA, 53 bp, Artificial Sequence; identical to SEQ ID NO: 2330
  Synthetic Polynucleotide

SEQ ID NO: 2360 - DNA, 53 bp, Artificial Sequence; identical to SEQ ID NO: 2330
  Synthetic Polynucleotide

SEQ ID NO: 2361 - DNA, 53 bp, Artificial Sequence; identical to SEQ ID NO: 2330
  Synthetic Polynucleotide

SEQ ID NO: 2362 - DNA, 53 bp, Artificial Sequence; identical to SEQ ID NO: 2330
  Synthetic Polynucleotide

SEQ ID NO: 2363 - DNA, 53 bp, Artificial Sequence; identical to SEQ ID NO: 2330
  Synthetic Polynucleotide

SEQ ID NO: 2364 - DNA, 53 bp, Artificial Sequence; identical to SEQ ID NO: 2330
  Synthetic Polynucleotide

SEQ ID NO: 2365 - DNA, 53 bp, Artificial Sequence; identical to SEQ ID NO: 2330
  Synthetic Polynucleotide

SEQ ID NO: 2366 - DNA, 53 bp, Artificial Sequence; identical to SEQ ID NO: 2330
  Synthetic Polynucleotide

SEQ ID NO: 2367 - DNA, 53 bp, Artificial Sequence; identical to SEQ ID NO: 2330
  Synthetic Polynucleotide

SEQ ID NO: 2368 - DNA, 53 bp, Artificial Sequence; identical to SEQ ID NO: 2330
  Synthetic Polynucleotide

SEQ ID NO: 2369 - DNA, 53 bp, Artificial Sequence; identical to SEQ ID NO: 2330
  Synthetic Polynucleotide

SEQ ID NO: 2370 - DNA, 53 bp, Artificial Sequence; identical to SEQ ID NO: 2330
  Synthetic Polynucleotide

SEQ ID NO: 2371 - DNA, 53 bp, Artificial Sequence; identical to SEQ ID NO: 2330
  Synthetic Polynucleotide

SEQ ID NO: 2372 - DNA, 53 bp, Artificial Sequence; identical to SEQ ID NO: 2330
  Synthetic Polynucleotide

SEQ ID NO: 2373 - DNA, 53 bp, Artificial Sequence; identical to SEQ ID NO: 2330
  Synthetic Polynucleotide

SEQ ID NO: 2374 - DNA, 53 bp, Artificial Sequence; identical to SEQ ID NO: 2330
  Synthetic Polynucleotide

SEQ ID NO: 2375 - DNA, 53 bp, Artificial Sequence; identical to SEQ ID NO: 2330
  Synthetic Polynucleotide

SEQ ID NO: 2376 - DNA, 53 bp, Artificial Sequence; identical to SEQ ID NO: 2330
  Synthetic Polynucleotide

SEQ ID NO: 2377 - DNA, 53 bp, Artificial Sequence; identical to SEQ ID NO: 2330
  Synthetic Polynucleotide

SEQ ID NO: 2378 - DNA, 53 bp, Artificial Sequence; identical to SEQ ID NO: 2330
  Synthetic Polynucleotide

SEQ ID NO: 2379 - DNA, 53 bp, Artificial Sequence; identical to SEQ ID NO: 2330
  Synthetic Polynucleotide

SEQ ID NO: 2380 - DNA, 53 bp, Artificial Sequence; identical to SEQ ID NO: 2330
  Synthetic Polynucleotide

SEQ ID NO: 2381 - DNA, 53 bp, Artificial Sequence; identical to SEQ ID NO: 2330
  Synthetic Polynucleotide

SEQ ID NO: 2382 - DNA, 53 bp, Artificial Sequence; identical to SEQ ID NO: 2330
  Synthetic Polynucleotide

SEQ ID NO: 2383 - DNA, 53 bp, Artificial Sequence; identical to SEQ ID NO: 2330
  Synthetic Polynucleotide

SEQ ID NO: 2384 - DNA, 53 bp, Artificial Sequence; identical to SEQ ID NO: 2330
  Synthetic Polynucleotide

SEQ ID NO: 2385 - DNA, 53 bp, Artificial Sequence; identical to SEQ ID NO: 2330
  Synthetic Polynucleotide

SEQ ID NO: 2386 - DNA, 53 bp, Artificial Sequence; identical to SEQ ID NO: 2330
  Synthetic Polynucleotide

SEQ ID NO: 2387 - DNA, 53 bp, Artificial Sequence; identical to SEQ ID NO: 2330
  Synthetic Polynucleotide

SEQ ID NO: 2388 - DNA, 53 bp, Artificial Sequence; identical to SEQ ID NO: 2330
  Synthetic Polynucleotide

SEQ ID NO: 2389 - DNA, 53 bp, Artificial Sequence; identical to SEQ ID NO: 2330
  Synthetic Polynucleotide

SEQ ID NO: 2390 - DNA, 53 bp, Artificial Sequence; identical to SEQ ID NO: 2330
  Synthetic Polynucleotide

SEQ ID NO: 2391 - DNA, 53 bp, Artificial Sequence; identical to SEQ ID NO: 2330
  Synthetic Polynucleotide

SEQ ID NO: 2392 - DNA, 53 bp, Artificial Sequence; identical to SEQ ID NO: 2330
  Synthetic Polynucleotide

SEQ ID NO: 2393 - DNA, 53 bp, Artificial Sequence; identical to SEQ ID NO: 2330
  Synthetic Polynucleotide

SEQ ID NO: 2394 - DNA, 53 bp, Artificial Sequence; identical to SEQ ID NO: 2330
  Synthetic Polynucleotide

SEQ ID NO: 2395 - DNA, 53 bp, Artificial Sequence; identical to SEQ ID NO: 2330
  Synthetic Polynucleotide

SEQ ID NO: 2396 - DNA, 53 bp, Artificial Sequence; identical to SEQ ID NO: 2330
  Synthetic Polynucleotide

SEQ ID NO: 2397 - DNA, 53 bp, Artificial Sequence; identical to SEQ ID NO: 2330
  Synthetic Polynucleotide

SEQ ID NO: 2398 - DNA, 53 bp, Artificial Sequence; identical to SEQ ID NO: 2330
  Synthetic Polynucleotide

SEQ ID NO: 2399 - DNA, 53 bp, Artificial Sequence; identical to SEQ ID NO: 2330
  Synthetic Polynucleotide

SEQ ID NO: 2400 - DNA, 53 bp, Artificial Sequence; identical to SEQ ID NO: 2330
  Synthetic Polynucleotide

SEQ ID NO: 2401 - DNA, 53 bp, Artificial Sequence; identical to SEQ ID NO: 2330
  Synthetic Polynucleotide

SEQ ID NO: 2402 - DNA, 53 bp, Artificial Sequence; identical to SEQ ID NO: 2330
  Synthetic Polynucleotide

SEQ ID NO: 2403 - DNA, 53 bp, Artificial Sequence; identical to SEQ ID NO: 2330
  Synthetic Polynucleotide

SEQ ID NO: 2404 - DNA, 53 bp, Artificial Sequence; identical to SEQ ID NO: 2330
  Synthetic Polynucleotide

SEQ ID NO: 2405 - DNA, 53 bp, Artificial Sequence; identical to SEQ ID NO: 2330
  Synthetic Polynucleotide

SEQ ID NO: 2406 - DNA, 53 bp, Artificial Sequence; identical to SEQ ID NO: 2330
  Synthetic Polynucleotide

SEQ ID NO: 2407 - DNA, 53 bp, Artificial Sequence; identical to SEQ ID NO: 2330
  Synthetic Polynucleotide

SEQ ID NO: 2408 - DNA, 53 bp, Artificial Sequence; identical to SEQ ID NO: 2330
  Synthetic Polynucleotide

SEQ ID NO: 2409 - DNA, 53 bp, Artificial Sequence; identical to SEQ ID NO: 2330
  Synthetic Polynucleotide

SEQ ID NO: 2410 - DNA, 53 bp, Artificial Sequence; identical to SEQ ID NO: 2330
  Synthetic Polynucleotide

SEQ ID NO: 2411 - DNA, 53 bp, Artificial Sequence; identical to SEQ ID NO: 2330
  Synthetic Polynucleotide

SEQ ID NO: 2412 - DNA, 53 bp, Artificial Sequence; identical to SEQ ID NO: 2330
  Synthetic Polynucleotide

SEQ ID NO: 2413 - DNA, 53 bp, Artificial Sequence; identical to SEQ ID NO: 2330
  Synthetic Polynucleotide

SEQ ID NO: 2414 - DNA, 53 bp, Artificial Sequence; identical to SEQ ID NO: 2330
  Synthetic Polynucleotide

SEQ ID NO: 2415 - DNA, 53 bp, Artificial Sequence; identical to SEQ ID NO: 2330
  Synthetic Polynucleotide

SEQ ID NO: 2416 - DNA, 53 bp, Artificial Sequence; identical to SEQ ID NO: 2330
  Synthetic Polynucleotide

SEQ ID NO: 2417 - DNA, 53 bp, Artificial Sequence; identical to SEQ ID NO: 2330
  Synthetic Polynucleotide

SEQ ID NO: 2418 - DNA, 53 bp, Artificial Sequence; identical to SEQ ID NO: 2330
  Synthetic Polynucleotide

SEQ ID NO: 2419 - DNA, 53 bp, Artificial Sequence; identical to SEQ ID NO: 2330
  Synthetic Polynucleotide

SEQ ID NO: 2420 - DNA, 53 bp, Artificial Sequence; identical to SEQ ID NO: 2330
  Synthetic Polynucleotide

SEQ ID NO: 2421 - DNA, 53 bp, Artificial Sequence; identical to SEQ ID NO: 2330
  Synthetic Polynucleotide

SEQ ID NO: 2422 - DNA, 53 bp, Artificial Sequence; identical to SEQ ID NO: 2330
  Synthetic Polynucleotide

SEQ ID NO: 2423 - DNA, 53 bp, Artificial Sequence; identical to SEQ ID NO: 2330
  Synthetic Polynucleotide

SEQ ID NO: 2424 - DNA, 53 bp, Artificial Sequence; identical to SEQ ID NO: 2330
  Synthetic Polynucleotide

SEQ ID NO: 2425 - protein, 21 aa, Artificial Sequence
  Synthetic Polypeptide
MALPVTALLLPLALLLHAARP

SEQ ID NO: 2426 - protein, 21 aa, Artificial Sequence
  Synthetic Polypeptide
MALPVTALLLPLALLLHAARP

SEQ ID NO: 2427 - protein, 19 aa, Artificial Sequence
  Synthetic Polypeptide
MDWIWRILFLVGAATGAHS

SEQ ID NO: 2428 - protein, 19 aa, Artificial Sequence
  Synthetic Polypeptide
MDWIWRILFLVGAATGAHS

SEQ ID NO: 2429 - protein, 20 aa, Artificial Sequence
  Synthetic Polypeptide
MACPGFLWALVISTCLEFSM

SEQ ID NO: 2430 - protein, 19 aa, Artificial Sequence
  Synthetic Polypeptide
MTIRLLCYMGFYFLGAGLM

SEQ ID NO: 2431 - protein, 15 aa, Artificial Sequence
  Synthetic Polypeptide
GGGGSGGGGSGGGGS

SEQ ID NO: 2432 - protein, 15 aa, Artificial Sequence
  Synthetic Polypeptide
GGGGSGGGGSGGGGS

SEQ ID NO: 2433 - protein, 15 aa, Artificial Sequence
  Synthetic Polypeptide
GGGGSGGGGSGGGGS

SEQ ID NO: 2434 - protein, 15 aa, Artificial Sequence
  Synthetic Polypeptide
GGGGSGGGGSGGGGS

SEQ ID NO: 2435 - protein, 15 aa, Artificial Sequence
  Synthetic Polypeptide
GGGGSGGGGSGGGGS

SEQ ID NO: 2436 - protein, 15 aa, Artificial Sequence
  Synthetic Polypeptide
GGGGSGGGGSGGGGS

SEQ ID NO: 2437 - protein, 35 aa, Artificial Sequence
  Synthetic Polypeptide
GGSGSGGGGSGGGGSGSGGSGSGGSGSGGSGSGGS

SEQ ID NO: 2438 - protein, 35 aa, Artificial Sequence
  Synthetic Polypeptide
GGGGSGGGGSGGGGSGSGGSGSGGSGSGGSGSGGS

SEQ ID NO: 2439 - protein, 25 aa, Artificial Sequence
  Synthetic Polypeptide
SSADDAKKDAAKKDDAKKDDAKKDG

SEQ ID NO: 2440 - protein, 111 aa, Artificial Sequence
  Synthetic Polypeptide
DVQMIQTPDSLAVSLGQRATISCRASESVDNYGISFMHWYQQKPGQSPKLLIYRASNLESGIPARFSGSGSRTDFTLTINPVETDDVATYYCQQNNKDPPTFGGGTKLEIK

SEQ ID NO: 2441 - protein, 107 aa, Artificial Sequence
  Synthetic Polypeptide
DVQMIQTPSSLSASLGDRVTISCRASQDIGNYLNWYQQKPDGTVKLLIYYTSRLHSGVPSRFSGSGSGTEYSLTISNLEQEDIATYFCQQGSALPPTFGGGTKLEIN

SEQ ID NO: 2442 - protein, 112 aa, Artificial Sequence
  Synthetic Polypeptide
DIVLTQSPATLSLSPGDRATISCRASESVTILGSHLIYWYQQKPGQPPRLLIQLASNVQTGVPARFSGSGSRTDFTLTISSVEPEDFAVYYCLQSRTIPRTFGQGTKLEIKR

SEQ ID NO: 2443 - protein, 108 aa, Artificial Sequence
  Synthetic Polypeptide
DIQMTQSPSSLSASVGDRVTITCSASQDISNYLNWYQQKPGKAPKLLIYYTSNLHSGVPSRFSGSGSGTDFTLTISSLQPEDFATYYCQQYRKLPWTFGQGTKLEIKR

SEQ ID NO: 2444 - protein, 114 aa, Artificial Sequence
  Synthetic Polypeptide
DIVMTQSPDSLAVSLGERATINCESSQSLLNSGNQKNYLTWYQQKPGQPPKPLIYWASTRESGVPDRFSGSGSGTDFTLTISSLQAEDVAVYYCQNDYSYPYTFGQGTKLEIKR

SEQ ID NO: 2445 - protein, 107 aa, Artificial Sequence
  Synthetic Polypeptide
DIQMTQSTSSLSASLGDRVTISCSASQGINNYLNWYQQKPDGTVELLIYYTSTLQSGVPSRFSGSGSGTDYSLTISNLEPEDIGTYYCQQYSKLPRTFGGGTKLEIK

SEQ ID NO: 2446 - protein, 106 aa, Artificial Sequence
  Synthetic Polypeptide
DIQMTQSPASLSVSVGETVTITCRASENIYSNLAWYQQKQGKSPQLLVYAATNLADGVPSRFSGSGSGTQYSLKINSLQSEDFGSYYCQHFWGTWTFGGGTTLEIK

SEQ ID NO: 2447 - protein, 107 aa, Artificial Sequence
  Synthetic Polypeptide
EIVLTQSPATLSLSPGERATLSCSASSSVSYMHWYQQKPGQAPRLLIYDTSKLASGIPARFSGSGSGTDFTLTISSLEPEDVAVYYCFQGSVYPFTFGQGTKLEIKR

SEQ ID NO: 2448 - protein, 107 aa, Artificial Sequence
  Synthetic Polypeptide
DIQMTQTTSSLSASLGDRVTISCRASQDISKYLNWYQQKPDGTVKLLIYHTSRLHSGVPSRFSGSGSGTDYSLTISNLEQEDIATYFCQQGNTLPYTFGGGTKLEIT

SEQ ID NO: 2449 - protein, 107 aa, Artificial Sequence
  Synthetic Polypeptide
EIVMTQSPATLSLSPGERATLSCRASQDISKYLNWYQQKPGQAPRLLIYHTSRLHSGIPARFSGSGSGTDYTLTISSLQPEDFAVYFCQQGNTLPYTFGQGTKLEIK

SEQ ID NO: 2450 - protein, 107 aa, Artificial Sequence
  Synthetic Polypeptide
EIVLTQSPATLSLSPGERATLSCRASQSVSSYLAWYQQKPGQAPRLLIYDASNRATGIPARFSGSGSGTDFTLTISSLEPEDFAVYYCQQRSNWPITFGQGTRLEIK

SEQ ID NO: 2451 - protein, 113 aa, Artificial Sequence
  Synthetic Polypeptide
DIVMTQTPLSLPVTPGEPASISCRSSKSLLHSNGITYLYWYLQKPGQSPQLLIYQMSNLVSGVPDRFSGSGSGTDFTLKISRVEAEDVGVYYCAQNLELPYTFGGGTKVEIKR

SEQ ID NO: 2452 - protein, 113 aa, Artificial Sequence
  Synthetic Polypeptide
DIQMTQSPSSLSASVGDRVTITCRSSQSIVHSVGNTFLEWYQQKPGKAPKLLIYKVSNRFSGVPSRFSGSGSGTDFTLTISSLQPEDFATYYCFQGSQFPYTFGQGTKVEIKR

SEQ ID NO: 2453 - protein, 110 aa, Artificial Sequence
  Synthetic Polypeptide
EIVLTQSPGTLSLSPGERATLSCRASQSVGGYLAWYQQKPGQAPRLLIYDASNRATGIPARFSGSGSGTDFTLTISSLEPEDFAVYYCQQRNNWPPMYTFGQGTKLEIKR

SEQ ID NO: 2454 - protein, 112 aa, Artificial Sequence
  Synthetic Polypeptide
DIQMTQSPATIENTSLSASVGDRVTITCRASQGISSWLTWYQQKPEKAPKSLIYAASSLQSGVPSRFSGSGSGTDFTLTISSLQPEDFATYYCQQYDSYPITFGQGTRLEIK

SEQ ID NO: 2455 - protein, 112 aa, Artificial Sequence
  Synthetic Polypeptide
DEIVLTQSPDSLAVSLGERATINCKASQSVDFDGDSYLNWYQQKPGQPPKVLIYAASTLQSGVPSRFSGSGSGTDFTLTINSLEAEDAATYYCQQSNEDPWTFGGGTKVEIK

SEQ ID NO: 2456 - protein, 107 aa, Artificial Sequence
  Synthetic Polypeptide
DIQMTQSPSSLSASVGDRVTITCRASQGISSWLAWYQQKPEKAPKSLIYAASSLQSGVPSRFSGSGSGTDFTLTISSLQPEDFATYYCQQYNSYPPTFGGGTKVEIK

SEQ ID NO: 2457 - protein, 112 aa, Artificial Sequence
  Synthetic Polypeptide
DVVMTQSPLSLPVTLGQPASISCRSSQSIVHSDGNTYLEWYQQRPGQSPRRLIYKVSNRFSGVPDRFSGSGSGTDFTLKISRVEAEDVGVYYCFQGSHAPWTFGGGTKVEIK

SEQ ID NO: 2458 - protein, 106 aa, Artificial Sequence
  Synthetic Polypeptide
QIVLTQSPALMSASPGEKVTMTCSASSSVRYMYWYQQKPRSSPKPWIHLTSNLASGVPARFSGSGSGTSYSLTISSMEAEDAATYYCQQWSSHPFTFGSGTKLEIK

SEQ ID NO: 2459 - protein, 113 aa, Artificial Sequence
  Synthetic Polypeptide
EIVLTQSPGSLAVSPGERVTMSCKSSQSVFFSSSQKNYLAWYQQIPGQSPRLLIYWASTRESGVPDRFTGSGSGTDFTLTISSVQPEDLAIYYCHQYLSSRTFGQGTKLEIKR

SEQ ID NO: 2460 - protein, 114 aa, Artificial Sequence
  Synthetic Polypeptide
DDIVMTQSPDSLTVSLGERTTINCKSSQSVLDSSKNKNSLAWYQQKPGQPPKLLLSWASTRESGIPDRFSGSGSGTDFTLTIDSLQPEDSATYYCQQSAHFPITFGQGTRLEIK

SEQ ID NO: 2461 - protein, 113 aa, Artificial Sequence
  Synthetic Polypeptide
DVLLTQSPLSLPVTLGQPASISCRSSQTIVHSNGNTYLEWFQQRPGQSPRLLIYQVSNRFSGVPDRFSGSGSGTDFTLKISRVEAEDVGVYYCFQGSHVPRTFGGGTKVEIKR

SEQ ID NO: 2462 - protein, 108 aa, Artificial Sequence
  Synthetic Polypeptide
HIVLTQSPSSLSASLGDRVTISCRASQDISTYLNWYQQKPDGTVKLLIFYTSRLHAGVPSRFSGSGSGTHHSLTISNLEQEDIATYFCQQGNSLPFTFGSGTKLEIKR

SEQ ID NO: 2463 - protein, 109 aa, Artificial Sequence
  Synthetic Polypeptide
DHIVLTQSPSSLSASLGDRVTISCRASQDISTYLNWYQQKPDGTVKLLIFYTSRLHAGVPSRFSGSGSGTHHSLTISNLEQEDIATYFCQQGNSLPFTFGSGTKLEIKR

SEQ ID NO: 2464 - protein, 112 aa, Artificial Sequence
  Synthetic Polypeptide
DIVMTQSPDSLAVSLGERATINCRASKSVSTSGYSFMHWYQQKPGQPPKLLIYLASNLESGVPDRFSGSGSGTDFTLTISSLQAEDVAVYYCQHSREVPWTFGQGTKVEIKR

SEQ ID NO: 2465 - protein, 113 aa, Artificial Sequence
  Synthetic Polypeptide
DIVMTQTPLTLSVTIGQPASISCKSSQSLLDSDGKTYLNWLLQRPGQSPERLIYLVSKLDSGVPDRFTGSGSGTDFTLKISRVEAEDLGVYCCWQGTHFPYTFGGGTKVEIKG

SEQ ID NO: 2466 - protein, 113 aa, Artificial Sequence
  Synthetic Polypeptide
DDIQLTQSPSSLSASVGDRVTITCKASQSVDYEGDSFLNWYQQKPGKAPKLLIYAASNLESGVPSRFSGSGSGTDFTLTISSLQPEDFATYYCQQSNEDPLTFGQGTKVEIKR

SEQ ID NO: 2467 - protein, 114 aa, Artificial Sequence
  Synthetic Polypeptide
DIVMSQSPSSLAVSVGEKVTMSCKSSQSLLHSSNQKNYLAWYQQKPGQSPKVLIYWASTRESGVPDRFTGSGSGTDFTLTITSVKSEDLAVYYCQQYYSYPWTFGGGTRLEIKR

SEQ ID NO: 2468 - protein, 109 aa, Artificial Sequence
  Synthetic Polypeptide
EIVLTQSPGTLSLSPGERATLSCRASQSVSSSYLAWYQQKPGQAPRLLIYGTSSRATGIPDRFSGSGSGTDFTLTISRLEPEDFAVYYCQQYGSSPFTFGGGTKVEIKR

SEQ ID NO: 2469 - protein, 108 aa, Artificial Sequence
  Synthetic Polypeptide
DIQMTQSPSSLSASVGDRVTITCRASQSISLWLNWYQQKPGKAPKLLIYAASTLQSGVPSRFSGSGSGTDFTLTISSLQPEDFATYYCQQYYTSPYTFGQGTKVEIKR

SEQ ID NO: 2470 - protein, 109 aa, Artificial Sequence
  Synthetic Polypeptide
DIQMTQSPSSLSASVGDRVTITCRASQSISSYLNWYQQKPGKAPKLLIYAVSTLQSGVPSRFSGSGSGTDFTLTISSLQPEDFATYYCQQSGTFPPTTFGQGTKVEIKR

SEQ ID NO: 2471 - protein, 106 aa, Artificial Sequence
  Synthetic Polypeptide
QSPSSLAVSAGEKVTMSCKSSQSLLNSRTRKNYLAWYQQKPGQSPKLLIYWASTRESGVPDRFTGSGSGTDFTLTISSVQAEDLAVYYCKQSNLYTFGGGTKLEIK

SEQ ID NO: 2472 - protein, 104 aa, Artificial Sequence
  Synthetic Polypeptide
MTQSPKFLLVSAGDRVTLTCKASQSVNNDVYWYQQEPGQSPKLLIYWASTRESGVPDRFTGSGSGTDFTLTISSVQAEDLAVYYCKQSYNLYTFGGGTKLEIKR

SEQ ID NO: 2473 - protein, 107 aa, Artificial Sequence
  Synthetic Polypeptide
DIQMTQSPSSLSASLGERVSLTCRATQELSGYLSWLQQKPDGTIKRLIYAASTLDSGVPKRFSGNRSGSDYSLTISSLESEDFADYYCLQYAIYPYTFGGGTKLEIK

SEQ ID NO: 2474 - protein, 112 aa, Artificial Sequence
  Synthetic Polypeptide
DTIVLTQSPASLAVSLGQRATISCRASESVDSYGNSFMHWYQQKPGQPPKLLIYLASNLESGVPARFSGSGSRTDFTLTIDPVEADDAATYYCQQNNYDPWTFGGGTKLEIK

SEQ ID NO: 2475 - protein, 108 aa, Artificial Sequence
  Synthetic Polypeptide
DIQMTQSPSSLSASVGDRVTITCKASQDVGIAVAWYQQKPGKVPKLLIYWASTRHTGVPDRFSGSGSGTDFTLTISSLQPEDVATYYCQQYSSYPYTFGQGTKVEIKR

SEQ ID NO: 2476 - protein, 107 aa, Artificial Sequence
  Synthetic Polypeptide
DIVMTQSQKSMSTSVGDRVSITCKASQDVITGVAWYQQKPGQSPKLLIYSASYRYTGVPDRFTGSGSGTDFTFTISNVQAEDLAVYYCQQHYSTPLTFGAGTKLELK

SEQ ID NO: 2477 - protein, 113 aa, Artificial Sequence
  Synthetic Polypeptide
QSVLTQPPSVSGAPGQRVTISCTGSGSNIGAPYDVSWYQQLPGTAPKLLIYHNNKRPSGVPDRFSGSKSGTSASLAITGLQAEDEADYYCQSYDSSSISTIFGGGTKLTVLGA

SEQ ID NO: 2478 - protein, 113 aa, Artificial Sequence
  Synthetic Polypeptide
QSVLTQPPSVSGAPGQRVTISCTGSGSNIGAPYDVSWYQQLPGTAPKLLIYHNNKRPSGVPDRFSGSKSGTSASLAITGLQAEDEADYYCATVEAGLSGSVFGGGTKLTVLGA

SEQ ID NO: 2479 - protein, 107 aa, Artificial Sequence
  Synthetic Polypeptide
DIQMTQSPSSLSASVGDRVTITCSASSSVSYMYWYQQKPGKAPKLLIYLTSNLASGVPSRFSGSGSGTDFTLTISSLQPEDFATYYCQQWRSNPFTFGQGTKLEIKR

SEQ ID NO: 2480 - protein, 108 aa, Artificial Sequence
  Synthetic Polypeptide
EIVMTQSPATLSVSPGERATLSCKASQSVSNDVVWYQQKPGQAPRLLIYYASNRYTGIPARFSGSGSGTEFTLTISSLQSEDFAVYYCQQDYTSPWTFGQGTKLEIKR

SEQ ID NO: 2481 - protein, 107 aa, Artificial Sequence
  Synthetic Polypeptide
DILLTQSPVILSVSPGERVSFSCRASQSIGTNIHWYQQRTNGSPRLLIKYASESISGIPSRFSGSGSGTDFTLSINSVESEDIADYYCQQNNNWPTTFGAGTKLELK

SEQ ID NO: 2482 - protein, 112 aa, Artificial Sequence
  Synthetic Polypeptide
DVVMTQSPDSLAVSLGERATINCKSSQSLLDSDGKTYLNWLQQKPGQPPKRLISLVSKLDSGVPDRFSGSGSGTDFTLTISSLQAEDVAVYYCWQGTHFPGTFGGGTKVEIK

SEQ ID NO: 2483 - protein, 107 aa, Artificial Sequence
  Synthetic Polypeptide
ELQMTQSPSSLSASVGDRVTITCRASQSISSYLNWYQQKPGQPPKLLIYWASTRESGVPDRFSGSESGTNYTLTISSLQPEDFATYFCQQSDSLPITFGQGTRLDIQ

SEQ ID NO: 2484 - protein, 113 aa, Artificial Sequence
  Synthetic Polypeptide
ELVMTQSPSSLTVTAGEKVTMSCKSSQSLLNSGNQKNYLTWYQQKPGQPPKLLIYWASTRESGVPDRFTGSGSGTDFTLTISSVQAEDLAVYYCQNDYSYPLTFGAGTKLEIK

SEQ ID NO: 2485 - protein, 107 aa, Artificial Sequence
  Synthetic Polypeptide
DIQMTQSPSSLSASVGDRVTITCRASQSISSYLNWYQQKPGKAPKLLIYAASSLQSGVPSRFSGSGSGTDFTLTISSLQPEDLATYYCQQSYSTPFTFGPGTKVDIK

SEQ ID NO: 2486 - protein, 103 aa, Artificial Sequence
  Synthetic Polypeptide
YIHVTQSPSSLSVSIGDRVTINCQTSQGVGSDLHWYQHKPGRAPKLLIHHASSVEDGVPSRFSGTGFHTSFNLTINDLQADDIGTYYCQVLQSFGRGSRLDTK

SEQ ID NO: 2487 - protein, 112 aa, Artificial Sequence
  Synthetic Polypeptide
DIVLTQSPLSLAVSLGQPAIISCKASQSVSFAGTSLMHWYHQKPGQQPRLLIYRASNLEAGVPDRFSGSGSKTDFTLTISPVEAEDAATYYCQQSREYPYTFGGGTKLEIKR

SEQ ID NO: 2488 - protein, 113 aa, Artificial Sequence
  Synthetic Polypeptide
DVVMTQTPLSLPVTPGEPASISCRSSQSLVHRNGNTYLHWYLQKPGQSPKLLIHKVSNRFSGVPDRFSGSGSGTDFTLKISRVEAEDLGVYFCSQSTHVPPLTFGAGTKLELK

SEQ ID NO: 2489 - protein, 105 aa, Artificial Sequence
  Synthetic Polypeptide
EIVMTQTPATLSVSAGERVTITCKASQSVSNDVTWYQQKPGQAPRLLIYSASNRYSGVPARFSGSGYGTEFTFTISSVQSEDFAVYFCQQDYSSFGQGTKLEIKR

SEQ ID NO: 2490 - protein, 108 aa, Artificial Sequence
  Synthetic Polypeptide
DIQMTQTASSLPASLGDRVTISCSASQDISNYLNWYQQKPDGTVKLLIFYSSNLHSGVPSRFSGGGSGTDYSLTISNLEPEDIATYFCHQYSKLPWTFGGGTKLEIKR

SEQ ID NO: 2491 - protein, 111 aa, Artificial Sequence
  Synthetic Polypeptide
QFVLTQSPSASAALGASAKLTCTLSSAHKTYTIDWYQQQKGKAPRYLIQVKSDGTYTKATGVPDRFSGSSSGADRYLIIPSVQADDEADYYCGTDYTGGYVFGGGTQLTVT

SEQ ID NO: 2492 - protein, 107 aa, Artificial Sequence; identical to SEQ ID NO: 2456
  Synthetic Polypeptide

SEQ ID NO: 2493 - protein, 111 aa, Artificial Sequence
  Synthetic Polypeptide
QSVVTQPPSMSAAPGQQVTISCSGGNSNIERNYVSWYLQLPGTAPKLVIFDNDRRPSGIPDRFSGSKSGTSATLGITGLQTGDEADYYCGTWDSSLRGWVFGGGTKLTVLG

SEQ ID NO: 2494 - protein, 111 aa, Artificial Sequence
  Synthetic Polypeptide
QSVLTQPPSASGTPGQRVTISCSGSRSNVGGNYVFWYQQVPGATPKLLIYRSNQRPSGVPDRFAGSKSGSSASLAISGLRSEDEADYYCATWDDSLSGFVFGTGTKVTVLG

SEQ ID NO: 2495 - protein, 107 aa, Artificial Sequence
  Synthetic Polypeptide
DIQMTQSPSSLSASVGDRVTITCRASQDVNTAVAWYQQKPGKAPKLLIYSASFLESGVPSRFSGSRSGTDFTLTISSLQPEDFATYYCQQHYTTPPTFGQTKVEIKR

SEQ ID NO: 2496 - protein, 105 aa, Artificial Sequence
  Synthetic Polypeptide
QSALTQPPSASGSPGQSITISCTGTSNNFVSWYQQHAGKAPKLVIYDVNKRPSGVPDRFSGSKSGNTASLTVSGLQTDDEAVYYCGSLVGNWDVIFGGGTKLTVL

SEQ ID NO: 2497 - protein, 107 aa, Artificial Sequence
  Synthetic Polypeptide
ELVLTQSPGTLSLSAGERATLSCRASQSVSSGSLAWYQQKPGQAPRLLIYGASTRATGIPDRFSGSGSGTDFTLTIGRLEPEDLAVYYCQQYGTSPYTFGQGTKLEI

SEQ ID NO: 2498 - protein, 97 aa, Artificial Sequence
  Synthetic Polypeptide
DIQMTQSPSSLSASVGDRVTITCQASQDINNYLNWYQQKPGKAPKLLIYDASNLQTGVPSRFSGSGSGTDFTFTIEDIATYYCQQYTFGPGTKVDIK

SEQ ID NO: 2499 - protein, 109 aa, Artificial Sequence
  Synthetic Polypeptide
DIQMTQSPSSLSASVGDRVTITCTASLSVSSTYLHWYQQKPGSSPKLWIYSTSNLASGVPSRFSGSGSGTSYTLTISSLQPEDFATYYCHQYHRSPLTFGGGTKVEIKR

SEQ ID NO: 2500 - protein, 107 aa, Artificial Sequence
  Synthetic Polypeptide
DIQMTQSPSSLSASVGDRVTITCKASQDVGTAVAWYQQKPGKAPKLLIYSASYRSTGVPSRFSGSGSGTDFTLTISSLQPEDFATYYCQHHYSAPWTFGGGTKVEIK

SEQ ID NO: 2501 - protein, 108 aa, Artificial Sequence
  Synthetic Polypeptide
DIQMTQSFSSLSASVGDRVTITCRASQDISNYLNWYQQKPGKAPKLLIYYTSRLHSGVPSRFSGSGSGTDYTLTISSLQPEDFATYFCQQGNTLPWTFGGGTKLEIKR

SEQ ID NO: 2502 - protein, 107 aa, Artificial Sequence
  Synthetic Polypeptide
DIQMTQSPPSLSASVGGKVTITCKASQDIDRYMAWYQDKPGKGPKLLIHDTSTLQPGIPSRFSGSGSGRDYSFSISNLEPEDIATYYCLQYDNLWTFGGGTKLEIKR

SEQ ID NO: 2503 - protein, 107 aa, Artificial Sequence
  Synthetic Polypeptide
DIQMTQSPASLSASVGETVTITCRVSGNIHNYLAWYQQKQGKSPQLLVYNAKTLADGVPSRFSGSGSGTQYSLKINSLQPEDFGSYYCQHFWSNPYTFGGGTKLEIK

SEQ ID NO: 2504 - protein, 107 aa, Artificial Sequence
  Synthetic Polypeptide
DIQMTQSPASLSASVGETVTIICRASVNIYSYLAWYQQKQGKSPQLLVYNAKILAEGVPSRFSGSGSGTQFSLKINSLQPEDFGSYYCQHHYGTFTFGSGTKLEIKR

SEQ ID NO: 2505 - protein, 107 aa, Artificial Sequence
  Synthetic Polypeptide
DIVMTQSHKFMSTSVGDRVSVTCKASQNVGNNVAWYQQKPGQSPKVLIYSASYRYSGVPDRFTGSGSGTDFTLTISNVQSEDLAEYFCQQYNTYPFTFGSGTKLEIK

SEQ ID NO: 2506 - protein, 108 aa, Artificial Sequence
  Synthetic Polypeptide
DIQMTQSSSSFSVSLGDRVTITCKASEDIYIRLAWYQQKPGNAPRLLISAATSLETGIPSRFSGSGSGEDYTLTITSLQTEDVATYYCQQYWTTPWTFGGGTKLEIKR

SEQ ID NO: 2507 - protein, 107 aa, Artificial Sequence
  Synthetic Polypeptide
DIQMTQSSSSFSVSLGDRVTITCMASEDIYIRLAWYQQKPGNAPRLLISAATSLETGVPSRFSGSGSGKDYTLSITSLQTEDVGTYYCQQYWSSPWTFGGGTKLEIN

SEQ ID NO: 2508 - protein, 107 aa, Artificial Sequence; identical to SEQ ID NO: 2507
  Synthetic Polypeptide

SEQ ID NO: 2509 - protein, 106 aa, Artificial Sequence
  Synthetic Polypeptide
QIVLTQSPAIMSASPGEKVTISCSASSSVSYMYWYQQKPGSSPKPWIYRTSNLASGVPARFSGSGSGTSYSLTISNMEAEDAAAYYCQQYHSYPTTFGGGTKLEVK

SEQ ID NO: 2510 - protein, 108 aa, Artificial Sequence
  Synthetic Polypeptide
DIQMTQSPSSLSASVGDRVTITCRASQSISSYLNWYQQKPGKAPKLLIYDASNLETGVPSRFSGSGSGTDFTFTISSLQPEDIATYYCQQYDNLPLTFGGGTKVDIKR

SEQ ID NO: 2511 - protein, 113 aa, Artificial Sequence
  Synthetic Polypeptide
DVVMTQSPLSLPVSLGDQASISCRSSQRLVHSNGNTYLHWYLQKPGQSPKLLIYRVSNRFPGVPDRFSGSGSGTDFTLKISRVEAEDLGIYFCSQSTHVPYTFGGGTKLEIKR

SEQ ID NO: 2512 - protein, 109 aa, Artificial Sequence
  Synthetic Polypeptide
SYELTQPPSVSVSPGQTATISCSGDQLGGKYGHWYQKKPGQSPVLVLYQDRKRPAGIPERFSGSSSGNTITLTISGTQAVDEADYYCQAWDTNLGGVFGGGTKVTVLGQ

SEQ ID NO: 2513 - protein, 113 aa, Artificial Sequence
  Synthetic Polypeptide
NFMLTQPHSVSESPGKTVTISCTRSSGSIASKYVQWYQQRPGSSPTTVIYEDNQRPSGVPDRFSGSIDTSSNSASLTISGLRTEDEADYYCHSYDSNNHSVFGGGTKVTVLGQ

SEQ ID NO: 2514 - protein, 108 aa, Artificial Sequence
  Synthetic Polypeptide
DIQMNQSPSSLSASLGDTITITCHASQNINVWLSWYQQKPGNIPKLLIYKASNLHTGVPSRFSGSGSGTGFTITISSLQPEDIATYYCQQGQSYPWTFGGGTKLEIKR

SEQ ID NO: 2515 - protein, 108 aa, Artificial Sequence
  Synthetic Polypeptide
DILLTQSPAILSVSPGERVSFSCRASQNIGTSIHWYQQRTNGSPRLLIKYASESVSGIPSRFSGSGSGTDFTLSINSVESEDIADYYCQHTNSWPTTFGGGTKLEIKR

SEQ ID NO: 2516 - protein, 113 aa, Artificial Sequence
  Synthetic Polypeptide
DIVMTQSPDSLAVSLGERATINCKSSQSLLNSGDQKNYLTWYQQKPGQPPKLLIYWASTRESGVPDRFSGSGSGTDFTLTISSLQAEDVAVYYCQNDYSYPLTFGQGTKVEIK

SEQ ID NO: 2517 - protein, 107 aa, Artificial Sequence
  Synthetic Polypeptide
DIQMTQSPSSLSASVGDRVTITCKASQDVSIAVAWYQQKPGKAPKVLIYSASYRYTGVPDRFSGSGSGTDFTFTISSLQPEDIAVYYCQQHYITPLTFGGGTKVEIK

SEQ ID NO: 2518 - protein, 110 aa, Artificial Sequence
  Synthetic Polypeptide
QAVVTQPPSASGTPGQRVTISCSGSSSNIGSNTVNWYQQVPGTAPKLLIYSNNQRPSGVPDRFSGSKSGTSASLAISGLQSEDEADYYCAAWDDSLNGWVFGGGTKLTVL

SEQ ID NO: 2519 - protein, 107 aa, Artificial Sequence
  Synthetic Polypeptide
DIQMTQSPSTLSASVGDRVTITCRASQNINKWLAWYQQRPGKAPQLLIYKASSLESGVPSRFSGSGSGTEYTLTISSLQPDDFATYYCQQYNSYATFGQGTKVEIKR

SEQ ID NO: 2520 - protein, 109 aa, Artificial Sequence
  Synthetic Polypeptide
QSVVTQPPSVSVAPGKTARITCGRNNIGSKSVHWYQQKPGQAPVLVVYDDSDRPSGIPERFSGSNSGNTATLTISRVEAGDEADYYCQVWDSSSDHVVFGGGTKLTVLG

SEQ ID NO: 2521 - protein, 111 aa, Artificial Sequence
  Synthetic Polypeptide
DIVLTQSPASLAVSLGQRATISCRASESVDNYGNTFMHWYQQKPGQPPKLLIYRASNLESGIPARFSGSGSRTDFTLTINPVEADDVATYYCQQSNEDPPTFGAGTKLELK

SEQ ID NO: 2522 - protein, 108 aa, Artificial Sequence
  Synthetic Polypeptide
EIVLTQSPGTLSLSPGERATLSCRASQSVSNTYLAWYHQRPGQAPRLLIYGASSRATGIPDRFSGSGSGTDFALTISSLEPEDFAVYYCQQYSNSWTFGQGTKVEIKR

SEQ ID NO: 2523 - protein, 108 aa, Artificial Sequence
  Synthetic Polypeptide
ELTQDPAVSVALGQTVRITCQGDSLRSNYANWYQQKPGQAPVLVIYGQNNRPSGIPDRFSGSSSGNTASLTITGAQAADEADYYCDSRVSTGNHVVFGGGTKLTVLGQ

SEQ ID NO: 2524 - protein, 106 aa, Artificial Sequence
  Synthetic Polypeptide
DIQMTQSPSSLSASVGDRVTITCSATSSISYMHWYQQKPGKAPKGWIYDTSKLAHGVPSRFSGSGSGTDFTLTISSLQPEDFATYYCHQRRSYPFTFGQGTKVEIK

SEQ ID NO: 2525 - protein, 108 aa, Artificial Sequence
  Synthetic Polypeptide
DIQMTQSPSSLSASVGDRVTITCKASQGFNKYVAWYQQKPGKAPKLLIYYTSTLQPGVPSRFSGSGSGRDYTLTISSLQPEDFATYYCLQYGNLLYAFGQGTKVEIKR

SEQ ID NO: 2526 - protein, 107 aa, Artificial Sequence
  Synthetic Polypeptide
DIQMTQSPSSLSASVGDRVTITCRASQDIRYYLNWYQQKPGKAPKLLIYVASSLQSGVPSRFSGSGSGTEFTLTVSSLQPEDFATYYCLQVYSTPRTFGQGTKVEIK

SEQ ID NO: 2527 - protein, 107 aa, Artificial Sequence
  Synthetic Polypeptide
EIVMTPSSATLSVSPGERATLSCRASQSVSRNLAWYQQKPGQAPRLLIYGASTRATGIPARFSGSGSGTEFTLTISSLQSEDFAVYYCHQYSNWMCSFGQGTKLEIK

SEQ ID NO: 2528 - protein, 108 aa, Artificial Sequence
  Synthetic Polypeptide
DIQMTQSPSSLSASVGDRVTITCKASKNIRSYLAWYQQKPGKAPKLLIYSGSTLHSGVPSRFSGSGSGTDFTLTISSLQPEDFATYYCQQHHEYPLTFGQGTKVEIKR

SEQ ID NO: 2529 - protein, 110 aa, Artificial Sequence
  Synthetic Polypeptide
QSVVTQPPSVSAAPGQKVTISCSGSSSNIGNNYVSWYQQLPGTAPKLLIYDNNKRPSGIPDRFSGSKSGTSATLGITGLQTGDEADYYCGTWDGSLYTMLFGGGTKLTVL

SEQ ID NO: 2530 - protein, 113 aa, Artificial Sequence
  Synthetic Polypeptide
QSVLTQPPSVSGAPGQRVTISCTGSSSNIGAGYDVHWYQQLPGTAPKLLIFGNSNRPSGVPDRFSGFKSGTSASLAITGLQAEDEADYFCQSYDSSLSGSGVFGTGTKVTVLG

SEQ ID NO: 2531 - protein, 114 aa, Artificial Sequence
  Synthetic Polypeptide
LPVLTQPPSASGTPGQRVTISCSGRSSNIGSNSVNWYRQLPGAAPKLLIYSNNQRPPGVPVRFSGSKSGTSASLAISGLQSEDEATYYCATWDDNLNVHYVFGTGTKVTVLGSR

SEQ ID NO: 2532 - protein, 111 aa, Artificial Sequence
  Synthetic Polypeptide
DIVLTQSPASLAVSLGERATINCRASESVSVIGAHLIHWYQQKPGQPPKLLIYLASNLETGVPARFSGSGSGTDFTLTISSLQAEDAAIYYCLQSRIFPRTFGQGTKLEIK

SEQ ID NO: 2533 - protein, 112 aa, Artificial Sequence
  Synthetic Polypeptide
DIVLTQSPATLSLSPGDRATLSCRASESVTILGSHLIYWYQQKPGQAPRLLIQLASNVQTGIPARFSGSGSRTDFTLTISSLEPEDFAVYYCLQSRTIPRTFGQGTKLEIKR

SEQ ID NO: 2534 - protein, 113 aa, Artificial Sequence
  Synthetic Polypeptide
DFVMTQSPDSLAVSLGERVTMSCKSSQSLLNSGNQKNYLTWYQQKPGQPPKLLIYWASTRESGVPDRFSGSGSGTDFTLTISSLQAEDVAVYYCQNDYSYPYTFGQGTKLEIK

SEQ ID NO: 2535 - protein, 113 aa, Artificial Sequence; identical to SEQ ID NO: 2534
  Synthetic Polypeptide

SEQ ID NO: 2536 - protein, 108 aa, Artificial Sequence
  Synthetic Polypeptide
DVQITQSPSYLAASPGETITINCRASKSISKDLAWYQEKPGKTNKLLIYSGSTLQSGIPSRFSGSGSGTDFTLTISSLEPEDFAMYYCQQHNKYPYTFGGGTKLEIKR

SEQ ID NO: 2537 - protein, 106 aa, Artificial Sequence
  Synthetic Polypeptide
EIVLTQSPTSMTASPGEQVTITCRASSSINYMHWYQQKPGASPRPWIYETSKLASGVPDRFSGSASGTSYSLTINNMEAEDAATYYCQQWNYPSWTFGGGTKLELK

SEQ ID NO: 2538 - protein, 113 aa, Artificial Sequence
  Synthetic Polypeptide
DIVMTQSPSSLAVSEGETVTINCKSSQSFLSSGDGKNYVAWYQYKPGQSPKLLIYWASTRQSGVPDRFIGSGSGTDFTLTISTVQAEDLAIYYCQQYYDTPLTFGSGTKLEIK

SEQ ID NO: 2539 - protein, 113 aa, Artificial Sequence
  Synthetic Polypeptide
DVLMTQTPVSLPVSLGGQVSISCRSSQSLVHSDGDTYLHWYLQKPGQSPQLLIYRVSNRFSGVPDRFSGSGSGTDFTLKISRVEPEDLGLYYCLQTTHFPPWTFGGGTKLEMK

SEQ ID NO: 2540 - protein, 111 aa, Artificial Sequence
  Synthetic Polypeptide
EIVLTQSPDFQSVTPKEKVTITCRASESVDTFGISFMNWFQQKPDQSPKLLIHAASNQGSGVPSRFSGSGSGTDFTLTINSLEAEDAATYYCQQSKEVPFTFGGGTKVEIK

SEQ ID NO: 2541 - protein, 107 aa, Artificial Sequence
  Synthetic Polypeptide
AIQLTQSPSSLSASVGDRVTITCRASQGISSAQQKPGKAPKLLILAWYSSLESGVPSRFSGYDASGSGTDFTLTISSLQPEDFATYYCQQFNSYPYTFGQGTKLEIK

SEQ ID NO: 2542 - protein, 112 aa, Artificial Sequence
  Synthetic Polypeptide
DIVMTQSPATLSLSPGERATLSCRSSKSLQNVNGNTYLYWFQQKPGQSPQLLIYRMSNLNSGVPDRFSGSGSGTEFTLTISSLEPEDFAVYYCMQHLEYPITFGAGTKLEIK

SEQ ID NO: 2543 - protein, 108 aa, Artificial Sequence
  Synthetic Polypeptide
DIQMTQSPSSLSASVGDRVTITCKASDHINNWLAWYQQKPGQAPKLLIYGATTLETGVPSRFSGSGSGTDYTLTISSLQPEDFATYYCQQSWNTPWTFGQGTKLEIKR

SEQ ID NO: 2544 - protein, 111 aa, Artificial Sequence
  Synthetic Polypeptide
QIVLSQSPAILSASPGEKVTMTCRASSSVSYMHWYQQKPGSSPKPWIYATSNLASGVPARFSGSGSGTSYSFTISRVEAEDAATYYCQQWTFNPPTFGGGTRLEIKRTVAA

SEQ ID NO: 2545 - protein, 107 aa, Artificial Sequence; identical to SEQ ID NO: 2450
  Synthetic Polypeptide

SEQ ID NO: 2546 - protein, 107 aa, Artificial Sequence
  Synthetic Polypeptide
DIQMTQSPSSLSASVGDRVTINCKASQDINSYLSWFQQKPGKAPKTLIYRANRLVDGVPSRFSGSGSGQDYTLTISSLQPEDFATYYCLQYDEFPLTFGGGTKVEIK

SEQ ID NO: 2547 - protein, 112 aa, Artificial Sequence
  Synthetic Polypeptide
DIVMTQTPLSLSVTPGQPASISCKSSQSLLDGDGKTYLNWLLQKPGQSPQRLIYLVSKLDSGVPDRFSGSGSGTDFTLKISRVEAEDVGVYYCWQGTHFPRTFGQGTKLEIK

SEQ ID NO: 2548 - protein, 106 aa, Artificial Sequence
  Synthetic Polypeptide
DIQMTQSPSSLSASVGDRVTITCKASQDVSTAVAWFQQKPGKAPKLLIYSPSYRYTGVPSRFSGSGSGTDFTLTISSLQPEDFTYYCQQLYSTPYTFGQGTKVEIK

SEQ ID NO: 2549 - protein, 111 aa, Artificial Sequence
  Synthetic Polypeptide
DIQMTQSPSSLSASVGDRVTITCRASQSVSTSSYNYMHWYQQKPGKPPKLLIKYASNLESGVPSRFSGSGSGTDFTLTISSLQPEDFATYYCQHSWEIPLTFGQGTKVEIK

SEQ ID NO: 2550 - protein, 108 aa, Artificial Sequence
  Synthetic Polypeptide
EIVLTQSPATLSASPGERVTLTCRASSNVISSYVHWYQQKPGSSPRLFLYSTSNLASGVPSRFSGSGSGTDFTFTISSLEAEDAATYYCQQYSGYPLTFGQGTRLEIK

SEQ ID NO: 2551 - protein, 108 aa, Artificial Sequence
  Synthetic Polypeptide
EIVLTQSPATLSLSPGERATLSCRASSNVISSYVHWYQQKPGQAPRLLIYSTSNLASGIPARFSGSGSGTDFTLTISSLEPEDFAVYYCQQYSGYPLTFGQGTRLEIK

SEQ ID NO: 2552 - protein, 112 aa, Artificial Sequence
  Synthetic Polypeptide
DVVMTQTPLSLPVSLGDQASISCRSSQSLVHSNGNTYLRWYLQKPGQSPKVLIYKVSNRVSGVPDRFSGSGSGTDFTLKINRVEAEDLGVYFCSQSTHVPWTFGGGTKLEIK

SEQ ID NO: 2553 - protein, 110 aa, Artificial Sequence [sequence omitted]

SEQ ID NO: 2554 - protein, 113 aa, Artificial Sequence
  Synthetic Polypeptide
QSVVTQPPSVSGAPGQRVTISCTGSSSNIGAGYDVHWYQQLPGTAPKLLIYGNSNRPSGVPDRFSGSKSGTSASLAITGLQAEDEADYYCQSYDSSLSGSYVFGTGTKLTVLG

SEQ ID NO: 2555 - protein, 111 aa, Artificial Sequence
  Synthetic Polypeptide
QSVVTQPASVSGSPGQSITISCTGTSSDVGGYNYVSWYQQHPGKAPKLMIYDVSKRPSGVSNRFSGSKSGNTASLTISGLQAEDEADYYCSSYTSSSTLVFGGGTKLTVLG

SEQ ID NO: 2556 - protein, 108 aa, Artificial Sequence
  Synthetic Polypeptide
DVVMTQSPSSLSASVGDRVTITCQSSLDISHYLNWYQQKPGKAPKLLIYDASNLETGVPSRFSGSGSGTHFTFTISSLQPEDFATYYCQQYDNLPLTFGGGTKLEIKR

SEQ ID NO: 2557 - protein, 124 aa, Artificial Sequence
  Synthetic Polypeptide
DVMLTQTPLSLPVSLGDQASISCRSSQSILHSTGDTYLEWYLQKPGQSPKLLINKVSNRLSGVPDRFSGSGSGTDFTLKISRVEAEDLGVYYCFQGSHVPWTFGGGTKLEIKRADAAPTVSIFP

SEQ ID NO: 2558 - protein, 108 aa, Artificial Sequence
  Synthetic Polypeptide
LPVLTQPPSVSVAPGKTARITCGGNNIGSKSVHWYQQKPGQAPVLVVYDDSDRPSGIPERFSGSNSGNTATLTISRVEAGDEADYYCQVWDSSSDYVVFGGGTKLTVL

SEQ ID NO: 2559 - protein, 111 aa, Artificial Sequence
  Synthetic Polypeptide
ELVMTQSPASLAVSLGQRATISCRASESVDSYGKSFMHWYQLKPGQPPKLLIYRASNLESGVPARFSGSGSRTDFTLTIDPVEADDAATYYCQQNNEDPWTFGGGTKLEIK

SEQ ID NO: 2560 - protein, 112 aa, Artificial Sequence; identical to SEQ ID NO: 2533
  Synthetic Polypeptide

SEQ ID NO: 2561 - protein, 112 aa, Artificial Sequence; identical to SEQ ID NO: 2442
  Synthetic Polypeptide

SEQ ID NO: 2562 - protein, 107 aa, Artificial Sequence
  Synthetic Polypeptide
DVVMTQSPSSLSASVGDRVTITCMASEDIYIRLAWYQQKPGNAPKLLIYAATSLETGVPSRFSGSGSGTDFTLTISSLQPEDFATYYCQQYWSSPWTFGGGTKVEIK

SEQ ID NO: 2563 - protein, 106 aa, Artificial Sequence
  Synthetic Polypeptide
SSELTQDPAVSVALGQTVRITCQGDSLRSYYASWYQQKPGQAPVLVIYGKNNRPSGIPDRFSGSSSGNTASLTITGAQAEDEADYYCNSRDSSGWVFGGGTKLTVL

SEQ ID NO: 2564 - protein, 112 aa, Artificial Sequence
  Synthetic Polypeptide
QSALTQPASVSGSPGQSITISCTGTSSDVGGYNYVSWYQQHPGKAPKLMIYDVSNRPSGVSNRFSGSKSGNTASLTISGLQAEDEADYYCSSYTSSSTLVYVFGTGTKVTVL

SEQ ID NO: 2565 - protein, 110 aa, Artificial Sequence
  Synthetic Polypeptide
QSVLTQPRSVSGSPGQSVTISCTGTSSDVGGYNYVSWYQQHPGEAPKLIIYDADKRPSGISNRFSSGKSGNTASLTISGLQVEDEADYYCCSYAGGSTWVFGGGTKVTVL

SEQ ID NO: 2566 - protein, 112 aa, Artificial Sequence
  Synthetic Polypeptide
QSALTQPASVSGSPGQSITISCTGTSSDVGGYNYVSWYQQHPGKAPKVIISEVNNRPSGVSHRFSGSKSGNTASLTISGLQAEDEADYFCSSYTSGRTLYVFGTGSKVTVLG

SEQ ID NO: 2567 - protein, 111 aa, Artificial Sequence
  Synthetic Polypeptide
QSALTQPASASGSPGQSVTISCTGTSSDVGGYNYVSWYQQHPGKAPKLMIYDVSNRPSGVSNRFSGSKSGNTASLTISGLQAEDEADYYCSSYTSSSTLYVFGTGTQLTVL

SEQ ID NO: 2568 - protein, 109 aa, Artificial Sequence
  Synthetic Polypeptide
EIVLTQSPATLSLSPGERATLSCSASSSVSYMYWYQQKPGQAPRLLIYRTSNLASGIPARFSGSGSGTDFTLTISSLEPEDFAVYYCQQYHSYPTTFGQGTKVEIKRTV

SEQ ID NO: 2569 - protein, 107 aa, Artificial Sequence
  Synthetic Polypeptide
DVVMTQSPSSLSASVGDRVTITCKASEDIYIRLAWYQQKPGKAPKLLIYAATSLETGVPSRFSGSGSGTDFTLTISSLQPEDFATYYCQQYWTTPWTFGGGTKVEIK

SEQ ID NO: 2570 - protein, 108 aa, Artificial Sequence
  Synthetic Polypeptide
DIQLTQSPSFLSASVGDRVTITCRASQGISTDLNWYQQKPGKAPKLLIYAASNLESGVPSRFSGSGSGTEFTLTISSLQPEDFATYYCQQSYNWPYTFGGGTKVEIKR

SEQ ID NO: 2571 - protein, 108 aa, Artificial Sequence
  Synthetic Polypeptide
DIQLTQSPSFLSASVGDRVTITCSLSLGISTWRDWFPPRLGRGLEPLTYAASTLQSGVPSRFSGSGSGTEFTLTISSLQPEDFATYYCQQLNSYPLTFGGGTKVEIKR

SEQ ID NO: 2572 - protein, 108 aa, Artificial Sequence
  Synthetic Polypeptide
DIQMTQTTSSLSASLGDRVTISCRASQDISNYLNWYQQKPDGTVKLLIYYTSILHSGVPSRFSGSGSGTDYSLTISNLEQEDFATYFCQQGNTLPWTFGGGTKLEIKA

SEQ ID NO: 2573 - protein, 116 aa, Artificial Sequence
  Synthetic Polypeptide
DIVMTQSPDSLAVSLGERATINCKSSQSLLYRSNQKNYLAWYQQKPGQPPKLLIYWASTRESGVPDRFSGSGSGTDFTLTISSLQAEDVAVYYCQQYYNYPRTFGQGTKVEIKRTV

SEQ ID NO: 2574 - protein, 113 aa, Artificial Sequence
  Synthetic Polypeptide
DVVMTQSPLSLPVTLGQPASISCRSSQSLLHSSGNTYLEWYQQRPGQSPRPLIYKISTRFSGVPDRFSGSGSGTDFTLKISRVEAEDVGVYYCFQGSHVPYTFGGGTKVEIKR

SEQ ID NO: 2575 - protein, 109 aa, Artificial Sequence
  Synthetic Polypeptide
DIQMTQSPSSLSASVGDRVTITCRASENIYSNLAWYQQKPGKAPKLLIYAATNLADGVPSRFSGSGSGTDFTLTISSLQPEDFATYYCQHFWGTPTFGQGTKVEIKRTV

SEQ ID NO: 2576 - protein, 113 aa, Artificial Sequence
  Synthetic Polypeptide
DFVMTQSPLSLPVTPGEPASISCRSSQSIVHSNGNTYLEWYLQKPGQSPQLLIYKVSNRFSGVPDRFSGSGSGTDFTLKISRVEAEDVGVYYCFQGSHVPLTFGQGTKLEIKR

SEQ ID NO: 2577 - protein, 106 aa, Artificial Sequence
  Synthetic Polypeptide
DIQLTQSPSFLSASVGDRVTITCSARSSISFMYWYQQKPGKAPKLLIYDTSNLASGVPSRFSGSGSGTEFTLTISSLEAEDAATYYCQQWSSYPLTFGQGTKLEIK

SEQ ID NO: 2578 - protein, 112 aa, Artificial Sequence
  Synthetic Polypeptide
QLVLTQSPSASASLGSSVKLTCTLSSGHKTDTIDWYQQQPGKAPRYLMKLEGSGSYNKGSGVPDRFSGSSSGADWYLTISSLQSEDEADYYCGTDYPGNYLFGGGTQLTVLG

SEQ ID NO: 2579 - protein, 111 aa, Artificial Sequence
  Synthetic Polypeptide
DIVLTQSPPSLAMSLGKRATISCRASESVTILGSHLIHWYQQKPGQPPTLLIQLASNVQTGVPARFSGSGSRTDFTLTIDPVEEDDVAVYYCLQSRTIPRTFGGGTKLEIK

SEQ ID NO: 2580 - protein, 108 aa, Artificial Sequence
  Synthetic Polypeptide
DIQLTQSPSSLSASVGDRVSFTCQASQDINNFLNWYQQKPGKAPKLLIYDASNLETGVPSRFSGSGSGTDFTFTISSLQPEDIATYYCQQYGNLPFTFGGGTKVEIKR

SEQ ID NO: 2581 - protein, 108 aa, Artificial Sequence; identical to SEQ ID NO: 2580
  Synthetic Polypeptide

SEQ ID NO: 2582 - protein, 108 aa, Artificial Sequence
  Synthetic Polypeptide
DIQMTQSPSSLSASLGDRVTITCRASQGIRNDLGWYQQKPGKAPKRLIYASSTLQSGVPSRFSGSGSGTEFTLTISSLQPEDFATYYCLQHNNFPWTFGQGTKVEIKR

SEQ ID NO: 2583 - protein, 109 aa, Artificial Sequence
  Synthetic Polypeptide
EIVLTQSPDTLSLSPGEKATLSCRASQSVSSSFLAWYQQKPGQAPSLLIYVASRRAAGIPDRFSGSGSGTDFTLTISRLEPEDFGMFYCQHYGRTPFTFGPGTKVDIKR

SEQ ID NO: 2584 - protein, 108 aa, Artificial Sequence
  Synthetic Polypeptide
DIQLTQSPSFLSASVGDRVTITCRASQGISSYLAWYQQKPGKAPKLLIYAASTLQSGVPSRFSGSGSGTEFTLTISSLQPEDFATYYCQQVNSYPLTFGGGTKVEIKR

SEQ ID NO: 2585 - protein, 112 aa, Artificial Sequence
  Synthetic Polypeptide
QSALTQPRSVSGSPGHSVTISCTGTSSDVGDYNYVSWYQQRPGKVPKLLIYDVSKRPSGVPDRFSGSKSGNTASLTISGLQAEDEAIYFCASYAGNYNVVFGGGTKLTVLGQ

SEQ ID NO: 2586 - protein, 108 aa, Artificial Sequence
  Synthetic Polypeptide
DIQMTQSPSSLSASVGDRVTITCSASQGINNYLNWYQQKPGKAPKLLIHYTSGLHAGVPSRFSGSGSGTDYTLTISSLQPEDVATYYCQQYSILPWTFGGGTKVEIKR

SEQ ID NO: 2587 - protein, 113 aa, Artificial Sequence
  Synthetic Polypeptide
DIQMTQSPSSLSASVGDRVTITCKSSQSVLYSSNQKNYLAWFQQKPGKAPKLLIYWASTRESGVPSRFSGSGSGTDFTLTISSLQPEDFATYFCHQYLSSYTFGQGTKVEIKR

SEQ ID NO: 2588 - protein, 108 aa, Artificial Sequence
  Synthetic Polypeptide
DIQMTQSPSSLSASVGDRVTITCRASQDISNYLNWYQQKPGKAPKLLIYYTSRLHSGVPSRFSGSGSGTDFTLTISSLQPEDFATYYCQQGNTLPYTFGQGTKVEIKR

SEQ ID NO: 2589 - protein, 109 aa, Artificial Sequence
  Synthetic Polypeptide
DIQMTQSPSSLSASVGDRVTITCTASSRVSSSYLHWFQQKPGKAPKLLIYSTSNLASGVPSRFSGSGSGTDFTLTISSLQPEDFATYYCHQYHRSPYTFGQGTKVEIKR

SEQ ID NO: 2590 - protein, 106 aa, Artificial Sequence
  Synthetic Polypeptide
DIQMTQSPSSLSASVGDRVTITCSASSSVTYMYWYQQKPGKAPKLLIYDTSNLASGVPSRFSGSGSGTDYTLTISSLQPEDFATYYCQQWSNYPLTFGQGTKVEIK

SEQ ID NO: 2591 - protein, 107 aa, Artificial Sequence
  Synthetic Polypeptide
EIVLTQSPSSLSASVGDRVTITCRASENIYSYLAWYQQKPGKAPKLLIYNTKTLGEGVPSRFSGSGSGTDFTLTISSLQPEDFATYYCQHHYGTPFTFGPGTKVDIK

SEQ ID NO: 2592 - protein, 107 aa, Artificial Sequence
  Synthetic Polypeptide
QIVLTQSPAIMSASPGEKVTMTCSASSSVSYMHWYQQKSGTSPKRWIYDTSKLASGVPDRFSGSGSGTSYFLTINNMEAEDAATYYCQQWNINPLTFGAGTKLELKR

SEQ ID NO: 2593 - protein, 108 aa, Artificial Sequence
  Synthetic Polypeptide
DIQMTQSSAYLSVSLGGRVTITCKASDHINNWLAWYQHKPGNAPRLLISGATTLETGVPSRFSGSGSGKDYTLSITSLQTEDVATYYCQQSWNTPWTFGGGTKLEIKR

SEQ ID NO: 2594 - protein, 108 aa, Artificial Sequence
  Synthetic Polypeptide
EIVLTQSPGTLSLSPGEGATLSCRAGQSVRSSYLGWYQQKPGQAPRLLIYGASSRATGIPDRFSGSGSGTDFTLTISRLEPEDFAVYYCQQYGYSPPTFGGGTKLEIK

SEQ ID NO: 2595 - protein, 111 aa, Artificial Sequence; identical to SEQ ID NO: 2579
  Synthetic Polypeptide

SEQ ID NO: 2596 - protein, 107 aa, Artificial Sequence
  Synthetic Polypeptide
EIVLTQSPATLSLSPGERATLSCRASQSVSSYLAWYQQKPGQAPRLLIYDASNRATGIPARFSGSGSGTDFTLTISSLEPEDFAVYYCQQRSNWPRTFGQGTKVEIK

SEQ ID NO: 2597 - protein, 109 aa, Artificial Sequence
  Synthetic Polypeptide
EIVLTQSPGTLSLSPGERATLSCRASQSVSSSYLAWYQQKPGQAPRLLIYGASSRATGIPDRFSGSGSGTDFTLTISRLEPEDFAVYYCQQYHHSPLTFGGGTKVEIKR

SEQ ID NO: 2598 - protein, 108 aa, Artificial Sequence
  Synthetic Polypeptide
EIVLTQSPGTLSLSPGERATLSCRASQSVSSDYLAWYQQKPGQAPRLLIYGASRRATGIPDRFSGSGSGTDFTLTISRLEPEDFAVYYCQQYVSYWTFGGGTKVEIKR

SEQ ID NO: 2599 - protein, 109 aa, Artificial Sequence
  Synthetic Polypeptide
DIQMTQSPSSLSASVGDRVTITCRASQDVNTAVAWYQQKPGKAPKLLIYSASFLYSGVPSRFSGSRSGTDFTLTISSLQPEDFATYYCQQHYTTPPTFGQGTKVEIKRT

SEQ ID NO: 2600 - protein, 107 aa, Artificial Sequence
  Synthetic Polypeptide
DIQMTQSPSSVSASVGDRVTITCRASQGITRWLAWYQQKPGKAPKLLIYAASVLQSGVPSRFSGSGSGTDFTLTISSLQPEDFATYYCQQSNSFPRTFGQGTKVEIK

SEQ ID NO: 2601 - protein, 107 aa, Artificial Sequence
  Synthetic Polypeptide
DIQMTQSPSSVSASVGDRVTITCRASQDISRWLAWYQQKPGKAPKLLISAASRLQSGVPSRFSGSGSGTDFTLTISSLQPEDFAIYYCQQAKSFPRTFGQGTKVEIK

SEQ ID NO: 2602 - protein, 112 aa, Artificial Sequence
  Synthetic Polypeptide
DTVMTQTPLSSHVTLGQPASISCRSSQSLVHSDGNTYLSWLQQRPGQPPRLLIYRISRRFSGVPDRFSGSGAGTDFTLEISRVEAEDVGVYYCMQSTHVPRTFGQGTKVEIK

SEQ ID NO: 2603 - protein, 107 aa, Artificial Sequence
  Synthetic Polypeptide
DIQLTQSPSFLSASVGDRVTITCWASQGINNYLAWYQQKPGKAPKLLIYAASTLQTGVPSRFSGSGSGTEFTLTISSLQPEDFATYYCQQLNSYPLTFGGGTKVEIK

SEQ ID NO: 2604 - protein, 108 aa, Artificial Sequence
  Synthetic Polypeptide
EIVLTQSPGTLSLSPGERATLSCRASQSVNKNYLAWYQQKPGQAPRLLIYGASSRATGIPDRFSGSGSGTDFTLTISRLEPEDFAVYYCQQYDRSPLTFGGGTKVEIK

SEQ ID NO: 2605 - protein, 112 aa, Artificial Sequence
  Synthetic Polypeptide
DVVMTQTPLSLPVTLGQPASISCRSSQSLVYRDGNTYLSWFQQRPGQSPRRLIYKVSNWQSGVPDRFSGGGSGTDFTLKISRVEAEDVGVYYCMQGTHWPPTFGQGTKVEIK

SEQ ID NO: 2606 - protein, 106 aa, Artificial Sequence
  Synthetic Polypeptide
IVMTQTPKFLLVSAGDRVTITCKASQSVNNDVSWFQQKPGQSPTLLIYYASNRYTGVPDRFTGSGYGTDFTFTISTVQAEDLAVYFCQQDYSSPYTFGGGTKLEIK

SEQ ID NO: 2607 - protein, 106 aa, Artificial Sequence
  Synthetic Polypeptide
DIQMTQSPSSLSASVGDRVTITCRASQSINNYLNWYQQKPGKAPTLLIYAASSLQSGVPSRFSGSRSGTDFTLTISSLQPEDFAAYFCQQTYSNPTFGQGTKVEVK

SEQ ID NO: 2608 - protein, 108 aa, Artificial Sequence
  Synthetic Polypeptide
SYELTQPPSVSVSPGQTASITCSGDKLGDKYASWYQQKPGQSPVLVIYQDNRRPSGIPERFSGSNSGNTATLTISGTQAMDEADYYCQAWDSDTYVFGTGTKVTVLGQ

SEQ ID NO: 2609 - protein, 107 aa, Artificial Sequence
  Synthetic Polypeptide
DIQMTQSPSSLSASVGDRVTITCRASQSISSYLNWYQQKPGKAPKLLIYAASSLQSGVPSRFSGSGSGTDFTLTISSLQPEDFATYYCQQSYITPLTFGGGTKVEIK

SEQ ID NO: 2610 - protein, 113 aa, Artificial Sequence
  Synthetic Polypeptide
DIVLTQSPASLAVSLGQGATISCRASKSVSTSGYTYMHWYQQKPGQPPKLLIYLASNLESGVPARFSGSGSGTDFTLNIHPVEEEDAATYYCQHSGELPPSFGGGTKLEIKRA

SEQ ID NO: 2611 - protein, 112 aa, Artificial Sequence
  Synthetic Polypeptide
DIQMTQSPSSLSASVGDRVTITCSASQGIRNYLNWYQQKPGKVPKLLIYYTSRLHSGVPSRFSGSGSGTDFTLTISSLQPEDVATYYCQQYGKLPYTFGQGTKLEIKRTVAA

SEQ ID NO: 2612 - protein, 116 aa, Artificial Sequence
  Synthetic Polypeptide
DIVMTQSPDSLAVSLGERATINCRAGESVDIFGVGFLHWYQQKPGQPPKLLIYRASNLESGVPDRFSGSGSGTDFTLTIRPLQAEDVAVYYCQQTNEDPYTFGQGTKLEIKRTVAA

SEQ ID NO: 2613 - protein, 112 aa, Artificial Sequence
  Synthetic Polypeptide
DIVLTQSPATLSLSPGERATLSCRASQNIVFNLAWYQQKPGQAPRLLIYDASNRATGVPARFSGSGSGTDFTLTISSLEPEDFAVYYCQQKKSMPLTFGQGTKVEIKRTVAA

SEQ ID NO: 2614 - protein, 113 aa, Artificial Sequence
  Synthetic Polypeptide
QTVVTQEPSLTVSPGGTVTLTCGSSTGAVTTSNYANWVQQKPGQAPRGLIGGTNKRAPGTPARFSGSLLGGKAALTLSGVQPEDEAEYYCALWYSNLWVFGGGTKLTVLTVAA

SEQ ID NO: 2615 - protein, 114 aa, Artificial Sequence
  Synthetic Polypeptide
EIVLTQSPGTLSLSPGERATLSCRASQSVSSSYLAWYQQKPGQAPRLLIYGASSRATGIPDRFSGSGSGTDFTLTISRLEPEDFAVYYCQQYTNEHYYTFGQGTKVEIKRTVAA

SEQ ID NO: 2616 - protein, 113 aa, Artificial Sequence
  Synthetic Polypeptide
EIVLTQSPATLSLSPGERATLSCSVSSSISSSNLHWYQQKPGQAPRLLIYGTSNLASGIPARFSGSGSGTDFTLTISSLEPEDFAVYYCQQWSSYPHTFGGGTKVEIKRTVAA

SEQ ID NO: 2617 - protein, 112 aa, Artificial Sequence
  Synthetic Polypeptide
DIQMTQSPSSLSASVGDRVTITCKAGQNVGTSVAWYQQKPGKAPKLLIYSASYRYSGVPSRFSGSGSGTDFTLTISSLQPEDFATYYCQQYITYPYTFGQGTKVEIKRTVAA

SEQ ID NO: 2618 - protein, 112 aa, Artificial Sequence
  Synthetic Polypeptide
DIQMTQSPSSLSASVGDRVTITCSASQDIGNFLNWYQQKPGKAPKLLIYYTSSLYSGVPSRFSGSGSGTDFTLTISSLQPEDFATYYCQQYSKLPLTFGQGTKLEIKRTVAA

SEQ ID NO: 2619 - protein, 112 aa, Artificial Sequence
  Synthetic Polypeptide
DVQVTQSPSSLSASVGDRVTITCRSSQSLANSYGNTFLSWYLHKPGKAPQLLIYGISNRFSGVPDRFSGSGSGTDFTLTISSLQPEDFATYYCLQGTHQPYTFGQGTKVEIK

SEQ ID NO: 2620 - protein, 107 aa, Artificial Sequence
  Synthetic Polypeptide
DIQMTQSPSSLSASVGDRVTITCRASQDISNYLNWYQQKPGKAVKLLIYYTSILHSGVPSRFSGSGSGTDYTLTISSLQPEDFATYFCQQGNTLPWTFGGGTKVEIK

SEQ ID NO: 2621 - protein, 108 aa, Artificial Sequence
  Synthetic Polypeptide
DIVMTQSQRFMTTSVGDRVSVTCKASQSVDSNVAWYQQKPRQSPKALIFSASLRFSGVPARFTGSGSGTDFTLTISNLQSEDLAEYFCQQYNNYPLTFGAGTKLELKR

SEQ ID NO: 2622 - protein, 108 aa, Artificial Sequence
  Synthetic Polypeptide
DIQMTQSPSSLSASVGDRVTITCRASQDISNYLNWYQQKPGKAPKLLIYYTSILHSGVPSRFSGSGSGTDFTLTISSLQPEDFATYYCQQGNTLPWTFGQGTKVEIKR

SEQ ID NO: 2623 - protein, 108 aa, Artificial Sequence
  Synthetic Polypeptide
DIQMTQSPSSLSASVGDRVTITCKASDHINNWLAWYQQKPGKAPKLLIYGATTLETGVPSRFSGSGSGTDFTLTISSLQPEDFATYYCQQSWNTPWTFGQGTKVEIKR

SEQ ID NO: 2624 - protein, 108 aa, Artificial Sequence
  Synthetic Polypeptide
SYVLTQPPSVSVAPGQTARITCGGNNIGSKSVHWYQQPPGQAPVVVVYDDSDRPSGIPERFSGSNSGNTATLTISRVEAGDEAVYYCQVWDSSSDHVVFGGGTKLTVL

SEQ ID NO: 2625 - protein, 108 aa, Artificial Sequence
  Synthetic Polypeptide
DIQMTQSPSSLSASVGDRVTITCMASEDIYIRLAWYQQKPGKAPKLLIYAATSLETGVPSRFSGSGSGTDFTLTISSLQPEDFATYYCQQYWSSPWTFGQGTKVEIKR

SEQ ID NO: 2626 - protein, 112 aa, Artificial Sequence
  Synthetic Polypeptide
DIQMTQSPSSVSASVGDRVTITCRASESVDNYGISFMNWYQQKPGKAPKLLISAASNRATGVPSRFSGSGSGTDFTLTISSLQPEDFAIYYCQQSKEVPWTFGQGTKVEIKR

SEQ ID NO: 2627 - protein, 112 aa, Artificial Sequence
  Synthetic Polypeptide
DIQLTQSPSSLSASVGDRVTITCRASKSVSTSGYSYMHWYQQKPGKAPKLLIYLVSNLESGVPSRFSGSGSGTDFTLTISSLQPEDFATYYCQQFSELPWTFGQGTKVEIKR

SEQ ID NO: 2628 - protein, 109 aa, Artificial Sequence
  Synthetic Polypeptide
DIQMTQSPSSVSASVGDRVTITCRASQFISSSYLSWYQQKPGKAPKLLISGSSSRATGVPSRFSGSGSGTDFTLTISSLQPEDFAIYYCQQLYSSPMTFGQGTKVEIKR

SEQ ID NO: 2629 - protein, 108 aa, Artificial Sequence; identical to SEQ ID NO: 2624
  Synthetic Polypeptide

SEQ ID NO: 2630 - protein, 108 aa, Artificial Sequence; identical to SEQ ID NO: 2624
  Synthetic Polypeptide

SEQ ID NO: 2631 - protein, 108 aa, Artificial Sequence; identical to SEQ ID NO: 2624
  Synthetic Polypeptide

SEQ ID NO: 2632 - protein, 108 aa, Artificial Sequence; identical to SEQ ID NO: 2624
  Synthetic Polypeptide

SEQ ID NO: 2633 - protein, 108 aa, Artificial Sequence; identical to SEQ ID NO: 2624
  Synthetic Polypeptide

SEQ ID NO: 2634 - protein, 108 aa, Artificial Sequence; identical to SEQ ID NO: 2624
  Synthetic Polypeptide

SEQ ID NO: 2635 - protein, 108 aa, Artificial Sequence; identical to SEQ ID NO: 2624
  Synthetic Polypeptide

SEQ ID NO: 2636 - protein, 108 aa, Artificial Sequence
  Synthetic Polypeptide
SYVLTQPPSVSVAPGQTARITCGGKNIGSKSVHWYQQPPGQAPVVVVYDDSDRPSGIPERFSGSNSGNTATLTISRVEAGDEAVYYCQVWDSSSDHVVFGGGTKLTVL

SEQ ID NO: 2637 - protein, 108 aa, Artificial Sequence
  Synthetic Polypeptide
SYVLTQPPSVSVAPGQTARITCGGNNLGSKSVHWYQQPPGQAPVVVVYDDSDRPSGIPERFSGSNSGNTATLTISRVEAGDEAVYYCQVWDSSSDHVVFGGGTKLTVL

SEQ ID NO: 2638 - protein, 108 aa, Artificial Sequence
  Synthetic Polypeptide
SYVLTQPPSVSVAPGQTARITCGGNNIGGKSVHWYQQPPGQAPVVVVYDDSDRPSGIPERFSGSNSGNTATLTISRVEAGDEAVYYCQVWDSSSDHVVFGGGTKLTVL

SEQ ID NO: 2639 - protein, 108 aa, Artificial Sequence
  Synthetic Polypeptide
SYVLTQPPSVSVAPGQTARITCGGNNIGSKTVHWYQQPPGQAPVVVVYDDSDRPSGIPERFSGSNSGNTATLTISRVEAGDEAVYYCQVWDSSSDHVVFGGGTKLTVL

SEQ ID NO: 2640 - protein, 108 aa, Artificial Sequence; identical to SEQ ID NO: 2636
  Synthetic Polypeptide

SEQ ID NO: 2641 - protein, 108 aa, Artificial Sequence; identical to SEQ ID NO: 2637
  Synthetic Polypeptide

SEQ ID NO: 2642 - protein, 108 aa, Artificial Sequence; identical to SEQ ID NO: 2638
  Synthetic Polypeptide

SEQ ID NO: 2643 - protein, 107 aa, Artificial Sequence
  Synthetic Polypeptide
EIVLTQSPATLSLSPGERATLSCRASQSVSSYLAWYQQKPGQAPRLLIYDASNRATGIPARFSGSGSGTDFTLTISSLEPEDFAVYYCQQRSNWPLTFGQGTKVEIK

SEQ ID NO: 2644 - protein, 113 aa, Artificial Sequence
  Synthetic Polypeptide
DIVMTQSPDSLAVSLGERATINCKSSQSVLYSSNNKNYLAWYQQKPGQPPKLLIYWASTRESGVPDRFSGSGSGTDFTLTISSLQAEDVAVYYCQQYYSTPLTFGQGTKVEIK

SEQ ID NO: 2645 - protein, 108 aa, Artificial Sequence
  Synthetic Polypeptide
DIQMTQSPSSLSASVGDRVTITCRASQSINKWLNWYQQKPGKAPKLLIYAASSLQSGVPSRFSGSGSGTDFTLTISSLQPEDFATYYCQQDYNFPYTFGQGTKVEIKR

SEQ ID NO: 2646 - protein, 106 aa, Artificial Sequence [sequence omitted]

SEQ ID NO: 2647 - protein, 107 aa, Artificial Sequence
  Synthetic Polypeptide
DIQLTQSHKFLSTSVGDRVSITCKASQDVYNAVAWYQQKPGQSPKLLIYSASSRYTGVPSRFTGSGSGPDFTFTISSVQAEDLAVYFCQQHFRTPFTFGSGTKLEIK

SEQ ID NO: 2648 - protein, 106 aa, Artificial Sequence
  Synthetic Polypeptide
DIQLTQSPSSLSASVGDRVTITCKASQDVGTSVAWYQQKPGKAPKLLIYWTSTRHTGVPSRFSGSGSGTDFTFTISSLQPEDIATYYCQQYSLYRSFGQGTKVEIK

SEQ ID NO: 2649 - protein, 105 aa, Artificial Sequence
  Synthetic Polypeptide
DIQLTQSPSSLSASVGDRVTITCSTSSSVSYMHWYQQKPGKAPKLLIYSTSNLASGVPSRFSGSGSGTDFTFTISSLQPEDIATYYCHQWSSYPTFGQGTKVEIK

SEQ ID NO: 2650 - protein, 109 aa, Artificial Sequence
  Synthetic Polypeptide
DIQMTQSPSSLSASVGDRVTITCRASQDVNTAVAWYQQKPGKAPKLLIYSASFLYSGVPSRFSGSRSGTDFTLTISSLQPEDFATYYCQQAYTTPPTFGQGTKVEIKRT

SEQ ID NO: 2651 - protein, 111 aa, Artificial Sequence
  Synthetic Polypeptide
EIVLTQSPGTLSLSPGERATLSCRASQSVSSDYLAWYQQKPGQAPRLLIYGASSRATGIPDRFSGSGSGTDFTLTISRLPEDFAVYYCQQYVSYWTFGGGTKVEIKRTVAA

SEQ ID NO: 2652 - protein, 109 aa, Artificial Sequence
  Synthetic Polypeptide
SYELIQPPSAAVTLGNTVSLTCVGDELPKRYAYWYQQKPDQSIVRVIYEDSVRPPGISDRFSGSSSGTTATLTIRDAQNEDEADYYCQSTYGDDKLYIFGGGTKLTVLG

SEQ ID NO: 2653 - protein, 109 aa, Artificial Sequence
  Synthetic Polypeptide
SVIELTQSPKFMSTSVGDRVNVTYKASQNVGTNVAWFQQKPGQSPKVLIYSASYRYSGVPDRFTGSGSGTDFTLTISNVQSEDLAEYFCQQYHTYPLTFGGGTKLEIKR

SEQ ID NO: 2654 - protein, 108 aa, Artificial Sequence
  Synthetic Polypeptide
DIQMTQSPSSVSASVGDRVTITCRASQSVSSYLNWYQQKPGKAPKLLIYAASSLQSGVPSRFSGSGSGTDFTLTISSLQPEDFATYYCQQSYSTPWTFGQGTKLEIKR

SEQ ID NO: 2655 - protein, 111 aa, Artificial Sequence
  Synthetic Polypeptide
QSALTQPRSVSGSPGQSVTISCTGTSSDVGSYNYVSWYQQSPGKAPKLMIYDVSNRPSGVSNRFSGSKSGNTASLTISGLQSEDEADYYCTSYGSYDIPVIFGGGTKVEIK

SEQ ID NO: 2656 - protein, 108 aa, Artificial Sequence
  Synthetic Polypeptide
DVVMTQSPSSLSASVGDRVTITCKASQSVSSYLNWYQQKPGKAPKLLIYAASSLETGVPSRFSGSGSGTDFTLTISSLQPEDFATYYCQQSYSTPWTFGQGTKVEIKR

SEQ ID NO: 2657 - protein, 108 aa, Artificial Sequence
  Synthetic Polypeptide
DIQMTQSPSSVSASVGDRVTITCRASQSISSYLNWYQQKPGKAPKLLIYAASSLQSGVPSRFSGSGSGTDFTLTISSLQPEDFATYYCQQSYSTPWTFGQGTKVEIKR

SEQ ID NO: 2658 - protein, 107 aa, Artificial Sequence
  Synthetic Polypeptide
DTVLTQSPALAVSPGERVTISCKASESVSTRMHWYRQKPGQQPKLLIYKTSNLASGVPARFSGSGSGTDFTLTIDPVEADDTATYFCQQSWNGPLTFGSGTKLEIKR

SEQ ID NO: 2659 - protein, 114 aa, Artificial Sequence
  Synthetic Polypeptide
DLVMTQSPFSLAVSEGEMVTIKCKSSQSLLSSRHQKNFLAWYRQKPGQSPKLLIYHASTRQSGVPDRFIGSGSGTDFTLTISDVQAEDLADYYCLQHYTSPYTFGAGTKLELKR

SEQ ID NO: 2660 - protein, 109 aa, Artificial Sequence [sequence omitted]

SEQ ID NO: 2661 - protein, 107 aa, Artificial Sequence
  Synthetic Polypeptide
ELQMTQSPSSLSASVGDRVAITCRASQSISSHLNWYQQKPGKAPKLLIYAASSLQSGVPSRFSGSGSGTDFTLTISSLQPEDFATYYCQQSYSTPYTFGQGTKLEIK

SEQ ID NO: 2662 - protein, 108 aa, Artificial Sequence
  Synthetic Polypeptide
DIVMTQSHKFMSTSVGDRVSIICKASQDVGTAVDWYQQKPGQSPKLLIYWASTRHTGVPDRFTGSGSGTDFTLAITNVQSEDLADYFCQQYNSYPLTFGAGTKLEIKR

SEQ ID NO: 2663 - protein, 108 aa, Artificial Sequence
  Synthetic Polypeptide
DIQMTQSPSSLSASVGDRVTITCKASQDVGTAVDWYQQKPGKAPKLLIYWASTRHTGVPSRFSGSGSGTDFTLTISSLQPEDFATYYCQQYNSYPLTFGQGTKVEIKR

SEQ ID NO: 2664 - protein, 110 aa, Artificial Sequence
  Synthetic Polypeptide
DIQMTQSPSSLSASVGDRVTITCKASQDVGTAVDWYQQKPGKAPKLLISWASTRHTGVPSRFSGSGSGTDFTLTISSLQPEDFATYFCQQYNSYPLTFGQGTKVEIKRTV

SEQ ID NO: 2665 - protein, 108 aa, Artificial Sequence; identical to SEQ ID NO: 2663
  Synthetic Polypeptide

SEQ ID NO: 2666 - protein, 108 aa, Artificial Sequence; identical to SEQ ID NO: 2662
  Synthetic Polypeptide

SEQ ID NO: 2667 - protein, 107 aa, Artificial Sequence
  Synthetic Polypeptide
EIVLTQSPATLSLSPGERATLSCSATSSVSYIHWYQQKPGQAPRLLIYSTSNLASGIPARFSGSGSGTDFTLTIGRLEPEDFAVYYCQQRSSSPFTFGQGTKVEIKR

SEQ ID NO: 2668 - protein, 106 aa, Artificial Sequence
  Synthetic Polypeptide
QIVLTQSPAIMSASPGEEVTLTCSATSSVSYIHWFQQRPGTSPKLWIYSTSNLASGVPVRFSGSGYGTSYSLTISRMEAEDAATYYCQQRSSSPFTFGSGTKLEIK

SEQ ID NO: 2669 - protein, 113 aa, Artificial Sequence
  Synthetic Polypeptide
DIVLTQSPASLAVSPGQRATITCRASKSVSTSGYSYMHWYQQKPGQPPKLLIYLASNLESGVPARFSGSGSGTDFTLTINPVEANDTANYYCQHSRELPFTFGGGTKVEIKRT

SEQ ID NO: 2670 - protein, 108 aa, Artificial Sequence
  Synthetic Polypeptide
DIQMTQSPSSLSVSVGDRVTITCKASQNVRTVVAWYQQKPGLAPKTLIYLASNRHTGVPSRFSGSGSGTDFTFTISSLQPEDIATYFCQQHWSYPLTFGQGTKVEVKR

SEQ ID NO: 2671 - protein, 113 aa, Artificial Sequence
  Synthetic Polypeptide
DIQMTQSPSSLSASVGDRVTITCKSSQSLLYSSNQKNYLAWFQQKPGKAPKLLIYWASTRESGVPSRFSGSGSGTDFTLTISSLQPEDFATYFCHQYLSSYTFGQGTKVEIKR

SEQ ID NO: 2672 - protein, 113 aa, Artificial Sequence; identical to SEQ ID NO: 2587
  Synthetic Polypeptide

SEQ ID NO: 2673 - protein, 115 aa, Artificial Sequence
  Synthetic Polypeptide
EVQLVESGGGLVQPGGSLRLSCAASGYTFTTYWMHWVRQAPGKGLEWVGYIRPSTGYTEYNQKFKDRFTISADTSKNTAYLQMNSLRAEDTAVYYCARSRWLLDYWGQGTLVTVS

SEQ ID NO: 2674 - protein, 108 aa, Artificial Sequence; identical to SEQ ID NO: 2588
  Synthetic Polypeptide

SEQ ID NO: 2675 - protein, 108 aa, Artificial Sequence
  Synthetic Polypeptide
DIQMTQSPSSLSASVGDRVTITCRASQDISSYLNWYQQKPGKAPKLLIYYTSRLHSGVPSRFSGSGSGTDFTLTISSLQPEDFATYYCQQGNTLPYTFGQGTKVEIKR

SEQ ID NO: 2676 - protein, 108 aa, Artificial Sequence
  Synthetic Polypeptide
DIQMTQSPSSLSASVGDRVTITCRASQDISNYLNWYQQKPGKAPKLLIYYTSRLHSGVPSRFSGSGSGTDFTLTISSLQPEDFATYYCQQGNTLPWTFGQGTKVEIKR

SEQ ID NO: 2677 - protein, 5 aa, Artificial Sequence
  Synthetic Polypeptide
GGGGG

SEQ ID NO: 2678 - protein, 5 aa, Artificial Sequence
  Synthetic Polypeptide
GGGGG

SEQ ID NO: 2679 - protein, 5 aa, Artificial Sequence
  Synthetic Polypeptide
GGGGG

SEQ ID NO: 2680 - protein, 5 aa, Artificial Sequence
  Synthetic Polypeptide
GGGGG

SEQ ID NO: 2681 - protein, 5 aa, Artificial Sequence
  Synthetic Polypeptide
GGGGG

SEQ ID NO: 2682 - protein, 125 aa, Artificial Sequence
  Synthetic Polypeptide
GGGGSQVQLQQSGAELVKPGASVKISCKASGYAFSSYWMNWVKQRPGKGLEWIGQIYPGDGDTTYNGKFKGKATLTADKSSSTVYMQLNSLTSEDSAVYFCVRYYYGSSGYFDYWGQGTTLTVSS

SEQ ID NO: 2683 - protein, 120 aa, Artificial Sequence
  Synthetic Polypeptide
ALQLQQSGAELVRPGASVTLSCKASGYTFTDYEMHWVKQTPVHGLEWIGAIDPETGGTAYNQKFEGKAILTADKSSSTAYMELRSLTSEDSPVYYCARRRYYGSSSFDYWGQGTTLTVSS

SEQ ID NO: 2684 - protein, 117 aa, Artificial Sequence
  Synthetic Polypeptide
QVQLVQSGPEVKKPGESVKISCKASGYTFRHYSMNWVKQAPGQGLKWMGRINTESGVPIYADDFKGRFSFTVDTSASTAYLEISSLTSEDTAVYFCSNDYLYSLDFWGQGTTLTVSS

SEQ ID NO: 2685 - protein, 121 aa, Artificial Sequence
  Synthetic Polypeptide
QVQLVQSGAEVKKPGSSVKVSCKASGGTFSNYWMHWVRQAPGQGLEWMGATYRGHSDTYYNQKFKGRVTITADKSTSTAYMELSSLRSEDTAVYYCARGAIYDGYDVLDNWGQGTLVTVSS

SEQ ID NO: 2686 - protein, 120 aa, Artificial Sequence [sequence omitted]

SEQ ID NO: 2687 - protein, 122 aa, Artificial Sequence
  Synthetic Polypeptide
QVQLQQSGSELMMPGASVKISCKATGYTFSNYWIEWVKQRPGHGLEWIGEILPGTGRTIYNEKFKGKATFTADISSNTVQMQLSSLTSEDSAVYYCARRDYYGNFYYAMDYWGQGTSVTVSS

SEQ ID NO: 2688 - protein, 118 aa, Artificial Sequence
  Synthetic Polypeptide
EVQLQQSGPELVKPGASVKMSCKASGYTFTDYYMKWMKQSHGKSLEWIGDINPNNGGTTYNQKFKGKATLTVDKSSSTAYMQLNSLTSEDSAVYYCARDYGYGYFDYWGQGTTLTVSS

SEQ ID NO: 2689 - protein, 120 aa, Artificial Sequence
  Synthetic Polypeptide
QVQLQESGPGLVKPSQTLSLTCTVSGGSISTSGMGVGWIRQHPGKGLEWIGHIWWDDDKRYNPALKSRVTISVDTSKNQFSLKLSSVTAADTAVYYCARMELWSYYFDYWGQGTLVTVSS

SEQ ID NO: 2690 - protein, 120 aa, Artificial Sequence
  Synthetic Polypeptide
EVKLQESGPGLVAPSQSLSVTCTVSGVSLPDYGVSWIRQPPRKGLEWLGVIWGSETTYYNSALKSRLTIIKDNSKSQVFLKMNSLQTDDTAIYYCAKHYYYGGSYAMDYWGQGTSVTVSS

SEQ ID NO: 2691 - protein, 120 aa, Artificial Sequence
  Synthetic Polypeptide
QVQLQESGPGLVKPSETLSLTCTVSGVSLPDYGVSWIRQPPGKGLEWIGVIWGSETTYYNSSLKSRVTISKDNSKNQVSLKLSSVTAADTAVYYCAKHYYYGGSYAMDYWGQGTLVTVSS

SEQ ID NO: 2692 - protein, 122 aa, Artificial Sequence
  Synthetic Polypeptide
EVQLVESGGGLVQPGRSLRLSCAASGFTFNDYAMHWVRQAPGKGLEWVSTISWNSGSIGYADSVKGRFTISRDNAKKSLYLQMNSLRAEDTALYYCAKDIQYGNYYYGMDVWGQGTTVTVSS

SEQ ID NO: 2693 - protein, 119 aa, Artificial Sequence
  Synthetic Polypeptide
QVQLVQSGAEVKKPGSSVKVSCKASGYAFSYSWINWVRQAPGQGLEWMGRIFPGDGDTDYNGKFKGRVTITADKSTSTAYMELSSLRSEDTAVYYCARNVFDGYWLVYWGQGTLVTVSS

SEQ ID NO: 2694 - protein, 120 aa, Artificial Sequence
  Synthetic Polypeptide
EVQLVESGGGLVQPGGSLRLSCAASGYEFSRSWMNWVRQAPGKGLEWVGRIYPGDGDTNYSGKFKGRFTISADTSKNTAYLQMNSLRAEDTAVYYCARDGSSWDWYFDVWGQGTLVTVSS

SEQ ID NO: 2695 - protein, 117 aa, Artificial Sequence
  Synthetic Polypeptide
QVQLVQSGAEVKKPGSSVKVSCKASGGTFSSYAISWVRQAPGQGLEWMGGIIPILGTANYAQKFQGRVTITADESTSTAYMELSSLRSEDTAVYYCARWGGGAFDIWGQGTMVTVSS

SEQ ID NO: 2696 - protein, 112 aa, Artificial Sequence
  Synthetic Polypeptide
QVQLQQWGAGLLKPSETLSLTCAVYGGSFSAYYWSWIRQPPGKGLEWIGDINHGGGTNYNPSLKSRVTISVDTSKNQFSLKLNSVTAADTAVYYCASLTAYWGQGSLVTVSS

SEQ ID NO: 2697 - protein, 117 aa, Artificial Sequence
  Synthetic Polypeptide
QVQLVQSGAEVKKPGASVKVSCKVSGYTFTDYYITWVRQAPGQALEWMGWIYPGSGNTKYSQKFQGRFVFSVDTSASTAYLQLSSLKAEDTAVYYCANYGNYWFAYWGQGTLVTVSS

SEQ ID NO: 2698 - protein, 119 aa, Artificial Sequence
  Synthetic Polypeptide
EVQLVQSGGGLVHPGGSLRLSCAGSGFAFSSSTMHWIRQAPGKGLEWISLIGSGGGIYYGDSVKGRFTISRDNAKNSLYLQMNSLRAEDMAVYYCVRGYFDWVDYFDYWGQGTLVTVSS

SEQ ID NO: 2699 - protein, 120 aa, Artificial Sequence
  Synthetic Polypeptide
EVQLVESGGGLVQPGGSLRLSCAASGFTFSSYGMHWVRQAPGKGLEWVAYITTRSSTIYYADSVKGRFTISRDNAKNSLYLQMNSLRAEDTAVYYCTREPLTGYYAMDYWGQGTSVTVSS

SEQ ID NO: 2700 - protein, 116 aa, Artificial Sequence
  Synthetic Polypeptide
DVQLQESGPGLVKPSQSLSLTCTVTGFSITSDYSWNWIRQFPGNKLEWMGYISYSGHTSYNPSLESRISITRDTSKNQFFLQLNSVTTEDTATYYCTRGNWDVVYWGQGTLVTVSA

SEQ ID NO: 2701 - protein, 118 aa, Artificial Sequence
  Synthetic Polypeptide
QVQLQQPGAEVVKPGASVKMSCKASGYTFTSYYIHWIKQTPGQGLEWVGVIYPGNDDISYNQKFQGKATLTADKSSTTAYMQLSSLTSEDSAVYYCAREVRLRYFDVWGQGTTVTVSS

SEQ ID NO: 2702 - protein, 122 aa, Artificial Sequence
  Synthetic Polypeptide
QVQLVQSGAEVKKPGASVKVSCKASGYTFTNYGMNWVKQAPGQGLKWMGWINTYTGEPTYADDFKGRVTMTSDTSTSTAYLELHNLRSDDTAVYYCARWSWSDGYYVYFDYWGQGTTVTVSS

SEQ ID NO: 2703 - protein, 122 aa, Artificial Sequence
  Synthetic Polypeptide
QIQLVQSGSELKKPGASVKVSCKASGYTFTNYGMNWVRQAPGQGLKWMGWINTNTGEPKYAEEFKGRFALSLDTSVSTAYLQINSLKAEDTAVYFCARGYGNYARGAWLAYWGQGTLVTVSS

SEQ ID NO: 2704 - protein, 121 aa, Artificial Sequence
  Synthetic Polypeptide
QVQLKESGPELEKPGASVKISCKASGYSFTAYSMNWVKQNNGMSLEWIGSIDPYYGDTKYAQKFKGKATLTVDKASSTAYLQLKSLTSEDSAVYYCARRMITTGDWYFDVWGAGTTVTVSS

SEQ ID NO: 2705 - protein, 121 aa, Artificial Sequence; identical to SEQ ID NO: 2704
  Synthetic Polypeptide

SEQ ID NO: 2706 - protein, 118 aa, Artificial Sequence
  Synthetic Polypeptide
QVQLVQSGAEVKKPGASVKVSCKASGYTFTNYGMNWVRQAPGQGLEWMGWINTYTGEPTYADAFKGRFAFSLDTSTSTAYLQINSLRSDDTAVYYCARDYGDYGMDYWGQGTTVTVSS

SEQ ID NO: 2707 - protein, 113 aa, Artificial Sequence
  Synthetic Polypeptide
QVQLQQPGAELVRPGASVKLSCKASGYTFTSYWMNWVKQRPGQGLEWIGMIDPSDSETHYNHIFKDKATLTVDKSSSTAYLQLSSLTSEDSAVYYCARNLYLWGQGTSVTVSS

SEQ ID NO: 2708 - protein, 117 aa, Artificial Sequence [sequence omitted]

SEQ ID NO: 2709 - protein, 123 aa, Artificial Sequence
  Synthetic Polypeptide
EVQLQQSVAELVKPGASVKMSCKVSGYTLTDHTIHWMKQRPEQGLEWIGYIYPRDGITGYNEKFKGKATLTADTSSSTAYMQLNSLTSEDSAVYFCARWGYSYRNYAYYYDYWGQGTTLTVSS

SEQ ID NO: 2710 - protein, 125 aa, Artificial Sequence
  Synthetic Polypeptide
QVQLQESGPGLAKPSETLSLTCTVSGDSITSYYWSWIRQPPGKGLEWIGYIYYSGSTNYNPSLKSRVTISVDTSKNQFSLKLSSVTAADTAVYYCARDQRRIAAAGTHFYGMDVWGQGTTVTVSS

SEQ ID NO: 2711 - protein, 116 aa, Artificial Sequence
  Synthetic Polypeptide
QVQLLESGGGLVQPGGSLRLSCAASGFTFSSYAMSWVRQAPGKGLEWVSVIRSSGSSTYYADSVKGRFTISRDNSKNTLYLQMNSLRAEDTAVYYCARGGGYFDYWGQGTLVTVSS

SEQ ID NO: 2712 - protein, 118 aa, Artificial Sequence
  Synthetic Polypeptide
QVQLLESGGGLVQPGGSLRLSCAASGFTFSSHGMHWVRQAPGKGLEWVSVISGSGSNTGYADSVKGRFTISRDNSKNTLYLQMNSLRAEDTAVYYCARQWGSYAFDSWGQGTLVTVSS

SEQ ID NO: 2713 - protein, 118 aa, Artificial Sequence
  Synthetic Polypeptide
QVQLEESGPELVKPGASVKLSCKASGYTFTEYIIHWVKQRSGQGLEWIGWFYPGSGSIKYNEKFKDKATLTADKSSSTVYMELSGLTSEDSAVYFCARHDGYSYFDYWGQGTTLTVSS

SEQ ID NO: 2714 - protein, 115 aa, Artificial Sequence
  Synthetic Polypeptide
ESGRGLVQPGGSRKLSCAASGFTFSTSGMHWVRQAPEKGLEWVAYISSGSTTIYHADTVKGRFTISRDNPKNTLFLQMTSLRSEDTAMYYCCARSGQFGNYFDYWGQGTTLTVSS

SEQ ID NO: 2715 - protein, 120 aa, Artificial Sequence
  Synthetic Polypeptide
EVQLQQSGPELVKPGASVKMSCKASGYTFTSYFIHWVKQKPGQGLEWIGFINPYNDGSKYNEKFKGKATLTSDKSSSTAYMELSSLTSEDSAVYYCTRDDGYYGYAMDYWGQGTSVTVSS

SEQ ID NO: 2716 - protein, 120 aa, Artificial Sequence
  Synthetic Polypeptide
EVQLQQSGPELVKPGASVKMSCKASGYTFTSYVMHWVKQKPGQGLEWIGYINPYNDGTKYNEKFKGKATLTSDTSSSTAYMELNSLTSEDSAVYFCARPIYFDNDYFDYWGQGTTLKVSS

SEQ ID NO: 2717 - protein, 119 aa, Artificial Sequence
  Synthetic Polypeptide
EVQLVESGGGLVQPGGSLRLSCAASGFDFSRYWMSWVRQAPGKGLEWIGEINPDSSTINYAPSLKDKFIISRDNAKNSLYLQMNSLRAEDTAVYYCARPDGNYWYFDVWGQGTLVTVSS

SEQ ID NO: 2718 - protein, 120 aa, Artificial Sequence
  Synthetic Polypeptide
QVQLQQPGAELVRPGASVKLSCKASGYSFTTYWMNWVKQRPGQGLEWIGMIHPSDSETRLNQKFKDKATLTVDKSSSTAYMQLSSPTSEDSAVYYCARSTMIATRAMDYWGQGTSVTVSS

SEQ ID NO: 2719 - protein, 120 aa, Artificial Sequence
  Synthetic Polypeptide
QVQLVQSGAEVKKPGASVKVSCKVSGYTLTELSIHWVRQAPGKGLEWMGGFDPEENEIVYAQRFQGRVTMTEDTSTDTAYMELSSLRSEDTAVYYCAIVGSFSGIAYRPWGQGTMVTVSS

SEQ ID NO: 2720 - protein, 120 aa, Artificial Sequence
  Synthetic Polypeptide
QVQLVQSGAEVKKPGASVKVSCKVSGYTLTELSIHWVRQAPGKGLEWMGGFDPEENEIVYAQRFQGRVTMTEDTSTDTAYMELSSLRSEDTAVYYCAIVGSFSPLTLGLWGQGTMVTVSS

SEQ ID NO: 2721 - protein, 124 aa, Artificial Sequence
  Synthetic Polypeptide
QITLKESGPTLVKPTQTLTLTCTFSGFSLSTSGMGVGWIRQPPGKALEWLAHIWWDDVKRYSPSLKSRLTITKDTSKNQVVLTMTNMDPVDTATYYCARIVSFDNDVVSAMDYWGQGTLVTVSS

SEQ ID NO: 2722 - protein, 118 aa, Artificial Sequence
  Synthetic Polypeptide
QVQLVQSGAEVKKPGASVKVSCKASGYTFTNYGMNWVRQAPGQGLEWMGWINTYTGEPTYADDFKGRVTMTTDTSTSTAYMELRSLRSDDTAVYYCARIGDSSPSDYWGQGTLVTVSS

SEQ ID NO: 2723 - protein, 119 aa, Artificial Sequence
  Synthetic Polypeptide
QVQLKQSGPGLVQPSQSLSITCTVSGFSLTNYGVHWVRQSPGKGLEWLGVIWSGGNTDYNTPFTSRLSINKDNSKSQVFFKMNSLQSNDTAIYYCARALTYYDYEFAYWGQGTLVTVSA

SEQ ID NO: 2724 - protein, 114 aa, Artificial Sequence
  Synthetic Polypeptide
EIQLVQSGAEVKKPGESLRISCKGSGFNIEDYYIHWVRQMPGKGLEWMGRIDPENDETKYGPIFQGHVTISADTSINTVYLQWSSLKASDTAMYYCAFRGGVYWGQGTTVTVSS

SEQ ID NO: 2725 - protein, 127 aa, Artificial Sequence
  Synthetic Polypeptide
EVQLLESGGGVVQPGRSLRLSCAASGFTFSSYGMHWVRQAPGKGLEWVAVISYDGSNKYYADSVKGRFTISRDNSKNTLYLQMNSLRAEDTAVYYCAKDMGWGSGWRPYYYYGMDVWGQGTTVTVSS

SEQ ID NO: 2726 - protein, 120 aa, Artificial Sequence
  Synthetic Polypeptide
EVQLLEQSGAELVRPGTSVKISCKASGYAFTNYWLGWVKQRPGHGLEWIGDIFPGSGNIHYNEKFKGKATLTADKSSSTAYMQLSSLTFEDSAVYFCARLRNWDEPMDYWGQGTTVTVSS

SEQ ID NO: 2727 - protein, 124 aa, Artificial Sequence
  Synthetic Polypeptide
VHEVQLVQSGAEVKKPGSSVKVSCKASGGTFSSYAISWVRQAPGQGLEWMGGIIPIFGTANYAQKFQGRVTITADKSTSTAYMELSSLRSEDTAVYYCATFALFGFREQAFDIWGQGTTVTVSS

SEQ ID NO: 2728 - protein, 122 aa, Artificial Sequence [sequence omitted]

SEQ ID NO: 2729 - protein, 118 aa, Artificial Sequence
  Synthetic Polypeptide
QVQLVQSGAEVVKPGASVKISCKASGYTFTGYFMNWVKQSPGQSLEWIGRIHPYDGDTFYNQKFQGKATLTVDKSSNTAHMELLSLTSEDFAVYYCTRYDGSRAMDYWGQGTTVTVSS

SEQ ID NO: 2730 - protein, 113 aa, Artificial Sequence
  Synthetic Polypeptide
EVQLVQSGAEVEKPGASVKISCKASGSSFTGYNMNWVRQNIGKSLEWIGAIDPYYGGTSYNQKFKGRATLTVDKSTSTAYMHLKSLRSEDTAVYYCVSGMEYWGQGTSVTVSS

SEQ ID NO: 2731 - protein, 121 aa, Artificial Sequence
  Synthetic Polypeptide
QVQLVESGPGVVQPGRSLRISCAVSGFSVTNYGVHWVRQPPGKGLEWLGVIWAGGITNYNSAFMSRLTISKDNSKNTVYLQMNSLRAEDTAMYYCASRGGHYGYALDYWGQGTLVTVSSTR

SEQ ID NO: 2732 - protein, 119 aa, Artificial Sequence
  Synthetic Polypeptide
EVTLVESGGDFVKPGGSLKVSCAASGFAFSHYAMSWVRQTPAKRLEWVAYISSGGSGTYYSDSVKGRFTISRDNAKNTLYLQMRSLRSEDSAMYFCTRVKLGTYYFDSWGQGTTLTVSS

SEQ ID NO: 2733 - protein, 118 aa, Artificial Sequence
  Synthetic Polypeptide
EQLKESGGGLFKPTDTLTLTCTVSGFSLSYYGVNWVRQAPGNGLEWIGTIGGSGDTYYASWAKSRSTIIRNTNENTVTLKMTSLTAADTATYFCVRYANIGYEYFNVWGPGTLVTVSS

SEQ ID NO: 2734 - protein, 121 aa, Artificial Sequence
  Synthetic Polypeptide
EVQLVESGGGLVQPGESLRLSCVASGFTFSRYKMNWVRQAPGKGLEWVSYISRSGRDIYYADSVKGRFTISRDNAKNSLYLQMNSLRDEDTAVYYCAGTVTTYYYFGMDVWGHGTTVTVSS

SEQ ID NO: 2735 - protein, 116 aa, Artificial Sequence
  Synthetic Polypeptide
EVQLVESGGGLIQPGGSLRLSCAASGFTFSNYAMNWVRQAPGKGLEWVSTINGRGSSTIYADSVKGRFTISRDNSKNTLYLQMNSLRAEDTATYYCARYISRGLGDSWGQGTLVTV

SEQ ID NO: 2736 - protein, 117 aa, Artificial Sequence
  Synthetic Polypeptide
EVQLVESGGGLVKPGGSLRLSCAASGFTFSDYYMSWIRQAPGKGLEWVSYISSSGSTIYYADSVKGRFTISRDNAKNSLYLQMNSLRAEDTAVYYCARGYGKAYDQWGQGTLVTVSS

SEQ ID NO: 2737 - protein, 120 aa, Artificial Sequence
  Synthetic Polypeptide
EVQLVESGGGLVQPGGSLRLSCAASGFNIKDTYIHWVRQAPGKGLEWVARIYPTNGYTRYADSVKGRFTISADTSKNTAYLQMNSLRAEDTAVYYCSRWGGDGFYAMDVWGQGTLVTVSS

SEQ ID NO: 2738 - protein, 135 aa, Artificial Sequence
  Synthetic Polypeptide
QPQLQESGPTLVEASETLSLTCAVSGDSTAACNSFWGWVRQPPGKGLEWVGSLSHCASYWNRGWTYHNPSLKSRLTLALDTPKNLVFLKLNSVTAADTATYYCARFGGEVLRYTDWPKPAWVDLWGRGTLVTVSS

SEQ ID NO: 2739 - protein, 128 aa, Artificial Sequence
  Synthetic Polypeptide
LEQSGAEVKKPGSSVQVSCKASGGTFSMYGFNWVRQAPGHGLEWMGGIIPIFGTSNYAQKFRGRVTFTADQATSTAYMELTNLRSDDTAVYYCARDFGPDWEDGDSYDGSGRGFFDFWGQGTLVTVSS

SEQ ID NO: 2740 - protein, 118 aa, Artificial Sequence
  Synthetic Polypeptide
EVQLLESGGGLVQPGGSLRLSCAASGFTFSWYSMTWVRQAPGKGLEWVSSIVPWGDFTQYADSVKGRFTISRDNSKNTLYLQMNSLRAEDTAVYYCAKGPGWGSFDLWGRGTLVTVSS

SEQ ID NO: 2741 - protein, 116 aa, Artificial Sequence
  Synthetic Polypeptide
EVQLVESGGGLVQPGGSLRLSCAASGFSLTKYGVHWVRQAPGKGLEWVGVKWAGGSTDYNSALMSRFTISKDNAKNSLYLQMNSLRAEDTAVYYCARDHRDAMDYWGQGTLVTVSS

SEQ ID NO: 2742 - protein, 122 aa, Artificial Sequence
  Synthetic Polypeptide
EVQLVESGGGLVQPGGSLRLSCAASGFTFSRNGMSWVRQAPGKGLEWVATVSSGGSYIYYADSVKGRFTISRDNAKNSLYLQMNSLRAEDTAVYYCARQGTTALATRFFDVWGQGTLVTVSS

SEQ ID NO: 2743 - protein, 117 aa, Artificial Sequence
  Synthetic Polypeptide
EVQLVQSGGGLVQSGGSLRLSCRASGYTFTRYWMLWVRQRPGKGLEWVAEINPRNDRTNYNEKFKTRFTISVDRSKNTLYLQMDSLRAEDTAVYFCALGGGYAMDYWGQGTLVTVSS

SEQ ID NO: 2744 - protein, 118 aa, Artificial Sequence
  Synthetic Polypeptide
QVQLVQSGAELVKPGASVKMSCKASGYIFTNYNIHWVKKSPGQGLEWIGAIYPGNGDAPYSQKFQDRATLTADTSSSTTYMELSSLTSEDSAVYYCVRANWDVAFAYWGQGTLVSVSS

SEQ ID NO: 2745 - protein, 119 aa, Artificial Sequence
  Synthetic Polypeptide
QVQLQQSGASVKVSCKASELVRPGTGYAFTNYLIEWVKQRPGQGLEWIGVINPGSGGTNYNEKFKGKATLTADKSSSTAYMQLSSLTSDDSAVYFCARYRSYDWYFDVWGAGTTVTVSS

SEQ ID NO: 2746 - protein, 119 aa, Artificial Sequence
  Synthetic Polypeptide
QVQLKESGPGLVAPSQSLSITCTISGFSLTSYGVHWVRQPPGKGLEWLVVIWSDGSTTYNSALKSRLSISKDNSKSQVFLKMNSLQTDDTAIYYCASHYGSTLAFASWGHGTLVTVSAA

SEQ ID NO: 2747 - protein, 127 aa, Artificial Sequence
  Synthetic Polypeptide
EVQLEESGGGLVQPGGSMKLSCVASGFTFSNYWMNWVRQSPEKGLEWVAEIRFKSHNYATHFAESVKGRFTISRDDSKSSVYLQMNNLRAEDTGIYYCTRRIGNSDYDWWYFDVWGAGTSVTVSSAS

SEQ ID NO: 2748 - protein, 118 aa, Artificial Sequence
  Synthetic Polypeptide
DVQLQESGPGLVKPSQSLSLTCTVTGYSITIDYTWNWIRQFPGNKLEWMGYITYSGSTDYNPSLKSRSSITRDTSMNQFFLQLNSVTTEDTATYYCARLGRRYALDYWGQGTSVTVSS

SEQ ID NO: 2749 - protein, 118 aa, Artificial Sequence
  Synthetic Polypeptide
DVQLQESGPGLVKPSQSLSLTCTVTGYSITSDYTWNWIRQFPGNKLEWMGYITYSGSTSYNPSLKSRNSITRDTSKNQFFLQLNSVTTEDTATYYCARLGRRYTMDYWGQGTSVTVSS

SEQ ID NO: 2750 - protein, 118 aa, Artificial Sequence; identical to SEQ ID NO: 2749
  Synthetic Polypeptide

SEQ ID NO: 2751 - protein, 120 aa, Artificial Sequence
  Synthetic Polypeptide
EVQLVESGGGLVQPKGSLKLSCAASGFSFNTYAMNWVRQAPGKGLEWIAHIRSKSNNFATYYADSVKDRFSISRDASENILFLQMNNLKTEDTAMYYCVRQGGDFPMDYWGQGTSVTVSS

SEQ ID NO: 2752 - protein, 120 aa, Artificial Sequence
  Synthetic Polypeptide
QVQLVESGGGVVQPGRSLRLSCAASGFTFSSYAMHWVRQAPGKGLEWVAVISYDGSNKYYADSVKGRFTISRDNSKNTLYLQMNSLRAEDTAVYYCARAHNSSSWSFDYWGQGTLVTVSS

SEQ ID NO: 2753 - protein, 124 aa, Artificial Sequence
  Synthetic Polypeptide
EVRLQQSGPDLIKPGASVKMSCKASGYTFTGYVMHWVKQRPGQGLEWIGFINPYNDDIQSNERFRGKATLTSDKSSTTAYMELSSLTSEDSAVYYCARGAGYNFDGAYRFFDFWGQGTTLTVSS

SEQ ID NO: 2754 - protein, 119 aa, Artificial Sequence
  Synthetic Polypeptide
QVQLVESGAEVKKPGASVKVSCKASGYTFTGYYMHWVRQAPGQGLEWMGRINPNSGGTNYAQKFQGRVTMTRDTSISTAYMELSRLRSDDTAVYYCASPRGRGSAFDIWGQGTLVTVSS

SEQ ID NO: 2755 - protein, 118 aa, Artificial Sequence
  Synthetic Polypeptide
EVQLVESGGGVVQPGGSLRLSCAASGFTFSSYAMSWVRQAPGKGLEWVSAISGSGGSTYYADSVKGRFSISRDNSKNTLYLQMNSLRAEDTAVYYCARTRSSGAFDIWGQGTLVTVSS

SEQ ID NO: 2756 - protein, 119 aa, Artificial Sequence
  Synthetic Polypeptide
EVQLQQSGPELVKPGASVKISCKASGYSFTGYFMNWVKQSHGKSLEYIGRFNPYNGETLYNQKFKGKATLTVDKSSSTVHMELLSVTSEDSAVYYCGRSGNDDAMDYWGQGTSVTVSSA

SEQ ID NO: 2757 - protein, 116 aa, Artificial Sequence
  Synthetic Polypeptide
QVQLQQSDAELVKPGASVKISCKASGYTFTDHAIHWVKQKPEQGLEWIGYFSPGNGDIKYNEKFKGKATLTADKSSSTAYMQLNSLTSEDSAVYFCKRSYGNYDYWGQGTTLTVSS

SEQ ID NO: 2758 - protein, 116 aa, Artificial Sequence
  Synthetic Polypeptide
QVQLVQSGAEVKKTGSSVKVSCKASGYTFTDHAIHVWRQAPGQALEWMGHFSPGNTDIKYNDKFKGRVTLTVDRSMSTAYMELSSLRSEDTAMYYCKTSTFFFDYWGQGTMVTVSS

SEQ ID NO: 2759 - protein, 121 aa, Artificial Sequence
  Synthetic Polypeptide
QIQLVQSGHEVKKPGASVKVSCKASGYTFTNYGMNWVRQAPGQGLEWMGWINTKTGEPTYAEEFKGRFVFSLETSASTAYLQISSLKAEDTAMYFCGRGGYGSSYWYFDVWGQGTTVTVSS

SEQ ID NO: 2760 - protein, 121 aa, Artificial Sequence
  Synthetic Polypeptide
QMQLVQSGAEVKEPGESLRISCKGSGYSFTNFWISWVRQMPGKGLEWMGRVDPGYSYSTYSPSFQGHVTISADKSTSTAYLQWNSLKASDTAMYYCARVQYSGYYDWFDPWGQGTLVTVSS

SEQ ID NO: 2761 - protein, 118 aa, Artificial Sequence
  Synthetic Polypeptide
QVQLVQSGAEVKKPGESLKISCKGSGYNFSNKWIGWVRQLPGRGLEWIAIIYPGYSDITYSPSFQGRVTISADTSINTAYLHWHSLKASDTAMYYCVRHTALAGFDYWGLGTLVTVSS

SEQ ID NO: 2762 - protein, 121 aa, Artificial Sequence
  Synthetic Polypeptide
EVQLVQSGGGVMRPGGSLRLSCAASGFTFDDYGMSWVRQAPGKGLEWVSGINWNGGSTGYADSVRGRFTISRDNAKNSLYLQMNSLRAEDTALYYCARERGYGYHDPHDYWGQGTLVTVSS

SEQ ID NO: 2763 - protein, 118 aa, Artificial Sequence
  Synthetic Polypeptide
QIQLVQSGPELKKPGETVKISCKASGYIFTNYGMNWVKQAPGKSFKWMGWINTYTGESTYSADFKGRFAFSLETSASTAYLHINDLKNEDTATYFCARSGGYDPMDYWGQGTSVTVSS

SEQ ID NO: 2764 - protein, 119 aa, Artificial Sequence
  Synthetic Polypeptide
QVQLVESGGGVVQPGRSLRLSCAASGFTFSSYDMHWVRQAPGKGLEWVAVISYDGTNEYYADSVKGRFTISRDTSKNTLYLQMNSLRAEDTAVYYCARERYFDWSFDYWGQGTLVSVSS

SEQ ID NO: 2765 - protein, 118 aa, Artificial Sequence
  Synthetic Polypeptide
EVQLVQSGAEVKKPGASVKVSCKASGYTFTSYAMHWVRQAPGQRLEWMGWINAGNGNTKYSQKFQGRVTITRDTSASTAYMELSSLRSEDTAVYYCARDISYGSFDYWGQGTLVTVSS

SEQ ID NO: 2766 - protein, 116 aa, Artificial Sequence
  Synthetic Polypeptide
EVQLVQSGAEVKKPGASVKVSCKASGYTFTNFWIHWVRQAPGQGLEWIGEIDPSDSYTNYNQKFKGRVTITRDTSTSTAYLELSSLRSEDTAVYYCAREITTVDYWGQGTLVTVSS

SEQ ID NO: 2767 - protein, 121 aa, Artificial Sequence
  Synthetic Polypeptide
EVQLVQSGAEVKKPGASVKVSCKASGYTFTSYWIGWVRQAPGQGLEWIGDIYPGGGYTNYNEKFKGRVTITRDTSTSTAYLELSSLRSEDTAVYYCARLDGSSYRGAMDSWGQGTLVTVSS

SEQ ID NO: 2768 - protein, 118 aa, Artificial Sequence
  Synthetic Polypeptide
EVQLVESGGGLAKPGGSLRLSCAASGFRFTFNNYYMDWVRQAPGQGLEWVSRISSSGDPTWYADSVKGRFTISRENAKNTLFLQMNSLRAEDTAVYYCASLTTGSDSWGQGVLVTVSS

SEQ ID NO: 2769 - protein, 120 aa, Artificial Sequence
  Synthetic Polypeptide
EVQLLESGGGLVQPGGSLRLSCAASGFTFSRYAMNWVRQAPGKGLEWVSGISGSGGRTYYADSVKGRFTISRDNSKNTLYLQMNSLRAEDTAVYYCAKDRDFWSGPFDYWGQGTLVTVSS

SEQ ID NO: 2770 - protein, 124 aa, Artificial Sequence
  Synthetic Polypeptide
QVQLQESGPGLVKPSETLSLTCTVSGYTITSGYDWSWIRQPPGKGLEWIGYINYGGSTNYKPSLGSRVTISVDTSKNQFSLKLSSVTAADTAVYYCARYNEYKSYIYDWYFDFWGQGTLVTVSS

SEQ ID NO: 2771 - protein, 124 aa, Artificial Sequence
  Synthetic Polypeptide
EVQLVESGGGLVKPGGSLRLSCAASGFTFSNAWMSWVRQAPGKGLEWVGFIRSKAYGGTTEYAASVKGRFTISRDDSKSIAYLQMNNLKTEDTAVYYCARDGLYSSSWYDSDYWGQGTLVTVSS

SEQ ID NO: 2772 - protein, 126 aa, Artificial Sequence
  Synthetic Polypeptide
QMQLVQSGGGLVQPGRSLRLSCAASGFTFDDYAMHWVRQAPGKGLEWVSGISWNSGSIGYADSVKGRFTISRDNAKNSLYLQMNSLRAEDTALYYCAKDIHSGSYYGLLYYAMDVWGQGTTVTVSS

SEQ ID NO: 2773 - protein, 125 aa, Artificial Sequence
  Synthetic Polypeptide
LEMAQVQLVQSGAEVKKPGSSVKVSCKASGGTFSSYAISWVRQAPGQGLEWMGRIIPILGIANYAQKFQGRVTITADKSTSTAYMELSSLRSEDTAVYYCARGGYYSHDMWSEDWGQGTLVTVSS

SEQ ID NO: 2774 - protein, 117 aa, Artificial Sequence
  Synthetic Polypeptide
QVQLVQSGSELKKPGESVKISCKASGYTFTDYSINWVKQAPGQGLKWMGWINTETREPAYAYDFRGRFVFSLDTSASTAYLQISSLKAEDTAVYFCALDYSYAMDYWGQGTLVTVSS

SEQ ID NO: 2775 - protein, 117 aa, Artificial Sequence
  Synthetic Polypeptide
QVQLVQSGSELKKPGESVKISCKASGYTFTHYSMNWVRQAPGQGLEWMGRINTETGEPLYADDFKGRFVFSLDTSASTAYLQISSLKAEDTAVYYCSNDYLYSLDYWGQGTLVTVSS

SEQ ID NO: 2776 - protein, 120 aa, Artificial Sequence
  Synthetic Polypeptide
EVQLVQSGAELKKPGASVKVSCKASGYTFTDYYMKWVRQAPGQGLEWIGDIIPSNGATFYNQKFKGRVTITVDKSTSTAYMELSSLRSEDTAVYYCARSHLLRASWFAYWGQGTLVTVSS

SEQ ID NO: 2777 - protein, 120 aa, Artificial Sequence
  Synthetic Polypeptide
QVQLVQSGAELKKPGASVKVSCKASGYTFTDYYMKWVRQAPGQGLEWIGDIIPSNGATFYNQKFKGRVTITVDKSTSTAYMELSSLRSEDTAVYYCARSHLLRASWFAYWGQGTLVTVSS

SEQ ID NO: 2778 - protein, 115 aa, Artificial Sequence
  Synthetic Polypeptide
QVQLQQPGAELVRPGASVKLSCKASGYTFTSYWMNWVKQRPDQGLEWIGRIDPYDSETHYNQKFKDKAILTVDKSSSTAYMQLSSLTSEDSAVYYCARGNWDDYWGQGTTLTVSS

SEQ ID NO: 2779 - protein, 119 aa, Artificial Sequence
  Synthetic Polypeptide
EVQLVESGGGLVQPGRSLKLSCAASGFTFSDYNMAWVRQAPKKGLEWVATILYDGGRTYYRGSVKGRFTISRDNAKSTLYLRMDSLRSEDTATYYCATHSRGTDYFDYWGQGVMVTVSS

SEQ ID NO: 2780 - protein, 121 aa, Artificial Sequence
  Synthetic Polypeptide
EVKLQESGPSLVQSSQTLSLTCTVSGFSLTSYHIHWVRQTPGKGLEWMGVMWSDGDTSYNSALKSRLSISRDTSQSQVFLKMNSLQTEDTATYYCARGYYSSYLYLWFAYWGQGTLVTVSS

SEQ ID NO: 2781 - protein, 125 aa, Artificial Sequence
  Synthetic Polypeptide
QVQLQQSGPELRRPGSSVRLSCKASGYRIKDFLIHWIKNRPEHGLEWIGWIDPEDGETKYAQKFQTKATLTADTSSNTAYMQLSSLTSEDTATYFCARWGDVYYGLMRGHVMDAWGQGTSVTVSS

SEQ ID NO: 2782 - protein, 121 aa, Artificial Sequence
  Synthetic Polypeptide
EVQLVESGGGLVQPGGSLRLSCAASGFTFSSSWMNWVRQAPGKGLEWVGRIYPGDGDTNYNGKFKGRFTISRDDSKNSLYLQMNSLKTEDTAVYYCARSGFITTVLDFDYWGQGTLVTVSS

SEQ ID NO: 2783 - protein, 121 aa, Artificial Sequence
  Synthetic Polypeptide
EVQLVQSGAEVKKPGESLKISCKGSGYSFSSSWIGWVRQMPGKGLEWMGIIYPDDSDTRYSPSFQGQVTISADKSIRTAYLQWSSLKASDTAMYYCARHVTMIWGVIIDFWGQGTLVTVSS

SEQ ID NO: 2784 - protein, 121 aa, Artificial Sequence
  Synthetic Polypeptide
EVQLVESGGGLVKPGGSLKLSCAASGYTFTSYVMHWVRQAPGKGLEWIGYINPYNDGTKYNEKFQGRVTISSDKSISTAYMELSSLRSEDTAMYYCARGTYYYGTRVFDYWGQGTLVTVSS

SEQ ID NO: 2785 - protein, 121 aa, Artificial Sequence
  Synthetic Polypeptide
QVQLQQPGAELVKPGASVKMSCKASGYAFSSYWINWMKQKPGQGLEWIGQIYPGDGDTNYNGKFKGRATLTADTSSSTAYMQLSSLTSEDSAVYFCARSITTVVGCAMDYWGQGTSVTVSS

SEQ ID NO: 2786 - protein, 120 aa, Artificial Sequence
  Synthetic Polypeptide
QVQLVQSGAEVKKPGASVKVSCKASGYTFTSYNMHWVRQAPGQRLEWMGGIYPGNGDTSYNQKFKGRVTITRDTSASTAYMELSSLRSEDTAVYYCARYDYNYAMDYWGQGTLVTVSSAS

SEQ ID NO: 2787 - protein, 122 aa, Artificial Sequence
  Synthetic Polypeptide
EVQLVESGGGLVQPDRSLRLSCAASGFTFHDYAMHWVRQAPGKGLEWVSTISWNSGTIGYADSVKGRFTISRDNAKNSLYLQMNSLRAEDTALYYCAKDIQYGNYYYGMDVWGQGTTVTVSS

SEQ ID NO: 2788 - protein, 117 aa, Artificial Sequence
  Synthetic Polypeptide
QVQLVQSGAEVKKPGASVKVSCKASGYTFTNYDINWVRQAPGQGLEWIGWIYPGDGSTKYNEKFKAKATLTADTSTSTAYMELRSLRSDDTAVYYCASGYEDAMDYWGQGTTVTVSS

SEQ ID NO: 2789 - protein, 114 aa, Artificial Sequence
  Synthetic Polypeptide
QVQLVQSGAEVKKPGASVKVSCKASGYTFKDTYIHWVRQAPGQGLEWMGRIDPANGNTKYDPKFQGRVTMTRDTSISTAYMELSRLRSDDTAVYYCARRGGVDWGQGTLVTVSS

SEQ ID NO: 2790 - protein, 121 aa, Artificial Sequence
  Synthetic Polypeptide
EVQLVQSGAEVKKPGASVKVSCKASGYTFTDYYLDVVVRQAPGQGLEWIGRVNPYNGGTIYNQKFKGRVTLTRDTSTSTAYLELSSLRSEDTAVYYCARDHYRYDPLLDYWGQGTLVTVSS

SEQ ID NO: 2791 - protein, 122 aa, Artificial Sequence
  Synthetic Polypeptide
EVQLVQSGAEVKKPGASVKVSCKASGYSFTDYYMHWVRQAPGQGLEWIGRINPYNGAAFYSQNFKDRVTLTVDTSTSTAYLELSSLRSEDTAVYYCAIERGADLEGYAMDYWGQGTLVTVSS

SEQ ID NO: 2792 - protein, 123 aa, Artificial Sequence
  Synthetic Polypeptide
QVQLQESGPGLVKPSETLSLTCAVSGYSITSAYYWNWIRQPPGKGLEWIGYISYDGRNNYNPSLKNRITINPDTSKNQFSLQLNSVTPEDTAVYYCAREGDYDVGNYYAMDYWGQGTLVTVSS

SEQ ID NO: 2793 - protein, 123 aa, Artificial Sequence
  Synthetic Polypeptide
EVQLVESGGGLVQPGRSLRLSCAASGYSITSAYYWNWVRQAPGKGLEWVSYISYDGRNNYNPSLKNRFTISRDNAKKSLYLQMNSLRAEDTALYYCAKEGDYDVGNYYAMDYWGQGTTVTVSS

SEQ ID NO: 2794 - protein, 118 aa, Artificial Sequence
  Synthetic Polypeptide
GVKLDETGGGLVQPGGAMKLSCVTSGFTFGHYWMNWVRQSPEKGLEWVAQFRNKPYNYETYYSDSVKGRFTISRDDSKSSVYLQMNNLRVEDTGIYYCTGASYGMEYLGQGTSVTVST

SEQ ID NO: 2795 - protein, 126 aa, Artificial Sequence [sequence omitted]

SEQ ID NO: 2796 - protein, 114 aa, Artificial Sequence
  Synthetic Polypeptide
EVQLVETGGNLVQPGASLRLSCAASGFSFSGTAMHWVRQAPGKGLEWVSTISSTGRSTYYRDSVKGRFTISRDNSKNTLYLQMNSLRGEDTAVYYCARVSFDYWGQGTLVTVSS

SEQ ID NO: 2797 - protein, 118 aa, Artificial Sequence
  Synthetic Polypeptide
EVQLVESGGAFVQPGGSLRLSCAASGFTFSSYAMTWVRQAPGKGLEWVSTISGRGRSTFYADSVKGRFTISRDNSKNTLYLQMNSLRAEDTAVYYCARYYHAGAFDLWGQGTLVTVSS

SEQ ID NO: 2798 - protein, 123 aa, Artificial Sequence
  Synthetic Polypeptide
QVQLVQSGGGVVQPGGSLRVSCAASGVTLSDYGMHWVRQAPGKGLEWVAFIRNDGSDKYYADSVKGRFTISRDNSEKTVSLQMSSLRAEDTAVYYCAKNGESGPLDYWYLDLWGRGTLVTVSS

SEQ ID NO: 2799 - protein, 114 aa, Artificial Sequence
  Synthetic Polypeptide
QVKLQQSGPSLVKPGASVKMSCKASGYTFTDFYMKWVKQSHGKSLEWIGDINPNIGDTFYNQKFKGKATLTVDKSSSTAYMQLNSLTSEDSAVYFCSVGYFDVWGAGTTVTVSS

SEQ ID NO: 2800 - protein, 130 aa, Artificial Sequence
  Synthetic Polypeptide
EVQLVQSGAEVKKPGESLKISCKGSGYSFTSYWIGWVRQMPGKGLEWMGIIYPGDSDTRYSPSFQGQVTISADKSISTAYLQWSSLKASDTAMYYCARQVWGWQGGMYPRSNWWYNLDSWGQGTLVTVSS

SEQ ID NO: 2801 - protein, 120 aa, Artificial Sequence
  Synthetic Polypeptide
EVQLEQSGPELVKPGASVKMSCKASGYTFTNYYMKWVKQSHGKSLEWIGDLNPNNGDTFYNQKFKGKATLTVDKSSNTAYMQLNSLTSEDSAVYYCARTGRYEENAMDYWGQGTSVTVSS

SEQ ID NO: 2802 - protein, 117 aa, Artificial Sequence; identical to SEQ ID NO: 2775
  Synthetic Polypeptide

SEQ ID NO: 2803 - protein, 117 aa, Artificial Sequence; identical to SEQ ID NO: 2684
  Synthetic Polypeptide

SEQ ID NO: 2804 - protein, 118 aa, Artificial Sequence
  Synthetic Polypeptide
QVQLQESGPGLVKPSQTLSLTCTVSGYSITSDYTWNWIRQPPGNGLEWIGYITYSGSTSYNPSLKSRVLISVDTSKNQVSLKLSSVTAADTAVYYCARLGRRYTMDYWGQGTTVTVSS

SEQ ID NO: 2805 - protein, 124 aa, Artificial Sequence
  Synthetic Polypeptide
EVQLVESGGGLVQPGRSLRLSCAASGFTFDDYAMHWVRQAPGKGLEWVSGISWNSGSIGYADSVKGRFTISRDNAKNSLYLQMNSLRAEDTALYYCAKDKGGGYYDFWSGSDYWGQGTLVTVSS

SEQ ID NO: 2806 - protein, 127 aa, Artificial Sequence
  Synthetic Polypeptide
EVQLQQSGPGLVKPSQTLSLTCAISGDSVLSNSDTWNWIRQSPSRGLEWLGRTYHRSTWYDDYASSVRGRVSINVDTSKNQYSLQLNAVTPEDTGVYYCARDRLQDGNSWSDAFDVWGQGTMVTVSS

SEQ ID NO: 2807 - protein, 122 aa, Artificial Sequence
  Synthetic Polypeptide
QVQLVQSGAEVKKPGASVKVSCKASGYTFTSYDINWVRQATGQGLEWMGWMNPNSGNTGYAQKFQGRVTMTRNTSISTAYMELSSLRSEDTAVYYCARGDSNYWSYYGMDVWGQGTLVTVSS

SEQ ID NO: 2808 - protein, 127 aa, Artificial Sequence
  Synthetic Polypeptide
EVQLQQSGPGLVKPSQTLSLTCAISGDSVSSNSAAWNWIRQSPSRGLEWLGRTYYRSKWYSDYAVSVKSRITINPDTSKNQFSLQLNSVTPEDTAVYYCARDPYDFWSGYPDAFDIWGQGTMVTVSS

SEQ ID NO: 2809 - protein, 127 aa, Artificial Sequence
  Synthetic Polypeptide
EVQLQQSGPGLVKPSQTLSLTCAISGDSMLSNSDTWNWIRQSPSRGLEWLGRTYHRSTWYDDYASSVRGRVSINVDTSKNQYSLQLNAVTPEDTGVYYCARVRLQDGNSWSDAFDVWGQGTMVTVSS

SEQ ID NO: 2810 - protein, 120 aa, Artificial Sequence
  Synthetic Polypeptide
EVQLVESGGGLVQPGGSLRLSCAASGFSFNTYAMNWVRQAPGKGLEWVSHIRSKSNNFATYYADSVKDRFTISRDNAKNSLYLQMNSLRAEDTAVYYCARQGGDFPMDYWGQGTLVTVSS

SEQ ID NO: 2811 - protein, 118 aa, Artificial Sequence
  Synthetic Polypeptide
QVQLQESGPGLVKPSQTLSLTCTVSGYSITIDYTWNWIRQPPGKGLEWIGYITYSGSTDYNPSLKSRVLISVDTSKNQVSLKLSSVTAADTAVYYCARLGRRYALDYWGQGTTVTVSS

SEQ ID NO: 2812 - protein, 122 aa, Artificial Sequence
  Synthetic Polypeptide
EVQLVESGGGLVKPGGSLRLSCAASGFTFSNFEMNWVRQAPGKGLEWVSGISSNGRYINYADSVKGRFTISRDNAKNSLYLQMNSLRAEDTAVYYCARVVDFDQDYNGFDYWGQGTLVTVSS

SEQ ID NO: 2813 - protein, 120 aa, Artificial Sequence
  Synthetic Polypeptide
EVQLVESGGGLVKPGGSLRLSCAASGFTFSTYGMSWVRQAPGKGLEWVAYINNGSGYIYYADSVKGRFTISRDNAKNSLYLQMNSLRAEDTAVYYCARGQWWSGGDFDYWGQGTLVTVSS

SEQ ID NO: 2814 - protein, 122 aa, Artificial Sequence
  Synthetic Polypeptide
EVQLVESGGGLVKPGGSLKLSCAASGFAFSIYDMSWVRQTPEKRLEWVAYISSGGGTYYPDTVKGRFTISRDNAKNTLYLQMSSLKSEDTAMYYCARHSGYGTHWGVLFAYWGQGTLVTVSA

SEQ ID NO: 2815 - protein, 124 aa, Artificial Sequence
  Synthetic Polypeptide
EVQLLESGGGLVQPGGSLRLSCAASGYSITSDYAWNWVRQAPGKGLEWVSYISNSGSTSYNPSLKSRFTISRDNSKNTLYLQMNSLRAEDTAVYYCAKERNYDYDDYYYAMDYWGQGTLVTVSS

SEQ ID NO: 2816 - protein, 120 aa, Artificial Sequence
  Synthetic Polypeptide
QVQLVQSGAEVKKPGASVKVSCKASGLTIEDYYMHWVRQAPGQGLEWMGWIDPENGDTEYGPKFQGRVTMTRDTSINTAYMELSRLRSDDTAVYYCAVHNAHYGTWFAYWGQGTLVTVSS

SEQ ID NO: 2817 - protein, 116 aa, Artificial Sequence
  Synthetic Polypeptide
EVQLVESGGGLVQPGGSLRLSCAASGFSLTNYGVHWVRQAPGKGLEWVSVIWSGGSTDYNAAFISRFTISADTSKNTAYLQMNSLRAEDTAVYYCARELIHAMDNWGQGTLVTVSS

SEQ ID NO: 2818 - protein, 119 aa, Artificial Sequence
  Synthetic Polypeptide
EVQLVESGAEVKKPGASVKVSCKASGYTFTSYWIHWVRQAPGQGLEWMGENDPSNGRTNYNEKFKNRVTLTVDTSISTAYMELSRLRSDDTAVYYCARGPNYFYSMDYWGQGTMVTVSS

SEQ ID NO: 2819 - protein, 119 aa, Artificial Sequence
  Synthetic Polypeptide
QVQLVQSGAEVKKPGASVKVSCKASGYTFTGSWMNWVRQAPGQGLEWIGRIYPGDGETNYNGKFKDRVTITADKSTSTAYMELSSLRSEDTAVYYCARIYGNNVYFDVWGQGTTVTVSS

SEQ ID NO: 2820 - protein, 121 aa, Artificial Sequence
  Synthetic Polypeptide
QEQLVESGGGLVQPGGSLRLSCAASGFTFSDYYMSWIRQAPGKGLEWVATIYPSSGKTYYADSAKGRLTISSDNAKDSLYLQMNSLRAEDTAVYYCTRDSYADDAALFDIWGQGTTVTVSS

SEQ ID NO: 2821 - protein, 117 aa, Artificial Sequence
  Synthetic Polypeptide
QIQLVQSGPELKKPGETVKISCKASGYTFTDYSINWVKRAPGKGLKWMGWINTETREPAYAYDFRGRFAFSLETSASTAYLQINNLKYEDTATYFCALDYSYAMDYWGQGTSVTVSS

SEQ ID NO: 2822 - protein, 124 aa, Artificial Sequence
  Synthetic Polypeptide
QVQLQESGPGLVKPSQTLSLTCTVSGGSISSGGFYWSWIRQHPGKGLEWIGYIHHSGSTHYNPSLKSRVTISIDTSKNLFSLRLSSVTAADTAVYYCASLVYCGGDCYSGFDYWGQGTLVTVSS

SEQ ID NO: 2823 - protein, 122 aa, Artificial Sequence
  Synthetic Polypeptide
QVQLQESGPGLVKPSETLSLTCTVSGGSISSYYWSWIRQPPGKGLEWIGYIYYSGSTNYNPSLKSRVTISVDTSKNQFSLKLSSVTAADTAVYYCVSLVYCGGDCYSGFDYWGQGTLVTVSS

SEQ ID NO: 2824 - protein, 127 aa, Artificial Sequence
  Synthetic Polypeptide
QVTLKESGPVLVKPTETLTLTCTVSGFSLINARMGVSWIRQPPGKALEWLAHIFSNAEKSYRTSLKSRLTISKDTSKSQVVLTMTNMDPVDTATYYCARIPGYGGNGDYHYYGMDVWGQGTTVTVSS

SEQ ID NO: 2825 - protein, 120 aa, Artificial Sequence
  Synthetic Polypeptide
QIQLVESGGGVVQPGRSLRLSCVASGFTFKNYGMHWVRQAPGKGLEWVAVIWYDGSNEYYGDPVKGRFTISRDNSKNMLYLQMNSLRADDTAVYYCARSGIAVAGAFDYWGQGTLVTVSS

SEQ ID NO: 2826 - protein, 122 aa, Artificial Sequence
  Synthetic Polypeptide
QLQLQESGPGLVKPSETLSLTCTVSGGSISSSTYYWGWIRQPPGKGLEWIGSIYFTGSTDYNPSLKSRVSISVDTSKNQFSLKLSSVTAADTAVYYCAKEDDSSGYYSFDYWGQGNLVTVSS

SEQ ID NO: 2827 - protein, 121 aa, Artificial Sequence
  Synthetic Polypeptide
QVQLVQSGSELKKPGASVKVSCKASGYTFNTYAMNWVRQAPGQGLEWMGWINTNTGNPTYAQGFTGRFVFSLDTSVSTAYLQISSLKAEDTAVYYCARRYFDWLLGAFDIWGQGTMVTVSS

SEQ ID NO: 2828 - protein, 117 aa, Artificial Sequence
  Synthetic Polypeptide
QVQLVQSGAEVKKPGSSVKVSCKASGYAFSSSWMNWVRQAPGQGLEWMGRIYPGDGNTHYAQKFQGRVTLTADKSTSTAYMELSSLRSEDTAVYYCGEGYLDPMDYWGQGTLVTVSS

SEQ ID NO: 2829 - protein, 115 aa, Artificial Sequence; identical to SEQ ID NO: 2673
  Synthetic Polypeptide

SEQ ID NO: 2830 - protein, 117 aa, Artificial Sequence
  Synthetic Polypeptide
EVQLVESGGGLVQPGGSLRLSCAASGFTFSDYFMSWVRQAPGKGLEWVATISNGGTYTYYPDSVKGRFTISRDNSKNTLYLQMNSLRAEDTAVYYCARFDGYIFDYWGQGTLVTVSS

SEQ ID NO: 2831 - protein, 123 aa, Artificial Sequence
  Synthetic Polypeptide
EVQLVESGGGLVQPGGSLRLSCAASGYAFSNSWINWVRQAPGKGLEWVGQIYPGDYDTNYNGKFKGRFTISRDKSKNTAYLQMNSLRAEDTAVYYCARGGSIYYGNLGFFDVWGQGTLVTVSS

SEQ ID NO: 2832 - protein, 116 aa, Artificial Sequence
  Synthetic Polypeptide
QVQLVQSGAEVKKPGASVKVSCKASGYSFIEYTINWVRQAPGQGLEWIGNIDPYYGTTYYNQMFTGRATLTVDTSISTAYMELSRLRSDDTAVYYCARGSAWFPYWGQGTLVTVSS

SEQ ID NO: 2833 - protein, 115 aa, Artificial Sequence
  Synthetic Polypeptide
QVQLVQSGAEVKKPGASVKVSCKASGYTFSDYWVHWVRQAPGQGLEWMGAIDGSDTFNDYSQKFKGRVTMTRDTSISTAYMELSRLRSDDTAVYYCARGGLLQYWGQGTLVTVSS

SEQ ID NO: 2834 - protein, 119 aa, Artificial Sequence
  Synthetic Polypeptide
QVQLQQSGPELVKPGASVKISCKASGYAFSSSWMNWVKQRPGKGLEWIGRIYPGDEDTNYSGKFKDKATLTADKSSTTAYMQLSSLTSEDSAVYFCARSLLYGDYLDYWGQGTTLTVSS

SEQ ID NO: 2835 - protein, 121 aa, Artificial Sequence
  Synthetic Polypeptide
QVQLQQSGAELVRPGSSVKISCKASGYAFSSYWVNWMKQRPGQGLEWIGQIYPGDGDTNYNGKFKGRATVTADKSSSTSYMQFSSLTSEDSAVYFCARSITTVVGCAMDYWGQGTSVTVSS

SEQ ID NO: 2836 - protein, 120 aa, Artificial Sequence
  Synthetic Polypeptide
EVQLLESGGGLVQPGGSLRLSCAASGFTFSSYAMSWVRQAPGKGLEWVSVISGSGGRPNYADSVKGRFTISRDNSKNTLYLQMNSLRDEDTAVYYCAKVDYSNYLFFDYWGQGTLVTVSS

SEQ ID NO: 2837 - protein, 117 aa, Artificial Sequence; identical to SEQ ID NO: 2821
  Synthetic Polypeptide

SEQ ID NO: 2838 - protein, 121 aa, Artificial Sequence
  Synthetic Polypeptide
QVQLVQSGAEVKKPGASVKVSCKASGYTFTNYGISWVRQAPGQGLEWMGWLSAYSGNTIYAQKLQGRVTMTTDTSTTTAYMELRSLRSDDTAVYYCARDRIVVRPDYFDYWGQGTLVTVSS

SEQ ID NO: 2839 - protein, 117 aa, Artificial Sequence
  Synthetic Polypeptide
EVQLVESGGGLVQPGGSLRLSCAASGFTFSGRSMNWVRQAPGKGLEWVSYISSDSRTIYYADSVKGRFTISRDNAKNSLYLQMNSLRAEDTAVYYCARGGHGYFDLWGRGTLVTVSS

SEQ ID NO: 2840 - protein, 121 aa, Artificial Sequence
  Synthetic Polypeptide
QVQLVESGGGVVQPGRSLRLSCAASGFTFSSYGMHWVRQAPGKGLEWVAGIWWDGSNEKYADSVKGRFTISRDNSKNTLYLQMNSLRAEDTAVYYCAKEAPYYAKDYMDVWGKGTTVTVSS

SEQ ID NO: 2841 - protein, 120 aa, Artificial Sequence
  Synthetic Polypeptide
EVQLVESGGGLVQPGGSLRLSCAASGFNIKDTYIHWVRQAPGKGLEWVARIYPTNGYTRYADSVKGRFTISADTSKNTAYLQMNSLRAEDTAVYYCSRWGGWGFYAMDYWGQGTLVTVSS

SEQ ID NO: 2842 - protein, 117 aa, Artificial Sequence
  Synthetic Polypeptide
QVQLVESGGGLVKPGGSLRLSCAASGFTFSDYYMTWIRQAPGKGLEWISYISSSGSTIYYADSVKGRFTISRDNAKNSLYLQMNSLRAEDTAVYYCARDRNSHFDYWGQGTLVTVSS

SEQ ID NO: 2843 - protein, 117 aa, Artificial Sequence
  Synthetic Polypeptide
QVQLVESGGGLVKPGGSLRLSCAASGFTFSDHYMSWIRQAPGKGLEWFSYISSSGGIIYYADSVKGRFTISRDNAKNSLYLQMNSLRAEDTAVYYCARDVGSHFDYWGQGTLVTVSS

SEQ ID NO: 2844 - protein, 124 aa, Artificial Sequence
  Synthetic Polypeptide
QVQLVESGGGVVQSGRSLRLSCAASGFTFRNYGMHWVRQAPGKGLEWVAVIWYDGSDKYYADSVRGRFTISRDNSKNTLYLQMNSLRAEDTAVYYCARDGYDILTGNPRDFDYWGQGTLVTVSS

SEQ ID NO: 2845 - protein, 122 aa, Artificial Sequence
  Synthetic Polypeptide
EVQLVESGGGLVQPGGSLRLSCAASGFPFSSYDMHWVRQATGKGLEWVSAIGTAGATYYPGSVKGRFTISRENAKNSLYLQMNSLRAGDTAVYYCARGDYVWGTYRPLFDYWGQGTLVTVSS

SEQ ID NO: 2846 - protein, 118 aa, Artificial Sequence
  Synthetic Polypeptide
QVQLQESGPGLVKPSETLSLTCTVSGASISSFYWSWIRQPPGKGLEWIGYIYYSGTTNYNPSLKSRVTISVDTSKNQFSLKLSSVTAADTAVYYCARIAVAGFFFDYWGQGTLVTVSS

SEQ ID NO: 2847 - protein, 123 aa, Artificial Sequence
  Synthetic Polypeptide
QVQLVQSGAEVKKPGASVKVSCKASGYTFTNYYMHWVRQAPGLGLEWMGIINPSDGSTSYAQKFQGRVTMTRDTSTNTVYMDLSSLRSEDTAVYYCARGGNSAFYSYYDMDVWGQGTTVTVSS

SEQ ID NO: 2848 - protein, 116 aa, Artificial Sequence
  Synthetic Polypeptide
QVQLQQSGPELVKPGASVRISCKASGYTFTTYYIHWVKQRPGQGLEWIGWIYPGNVNTNYNEKFKGKATLTADKSSSTAYMQLTSLTSEDSAVYFCARGVYYFDYWGQGTILTVSS

SEQ ID NO: 2849 - protein, 119 aa, Artificial Sequence
  Synthetic Polypeptide
QVQLQESGPGLVKPSQTLSLTCTVSGGSINNNNYYWTWIRQHPGKGLEWIGYIYYSGSTFYNPSLKSRVTISVDTSKTQFSLKLSSVTAADTAVYYCAREDTMTGLDVWGQGTTVTVSS

SEQ ID NO: 2850 - protein, 122 aa, Artificial Sequence
  Synthetic Polypeptide
EVQLVQSGAEVKKPGASVKVSCKASGDTFKRYYVHWVRQAPGQGLEWMGIINPSGVSTTYAQKFQGRVTMTRDTSTSTVYMELSSLRSEDTAVYYCAEVRGSGFNYFGMDVWGQGTLVTVSS

SEQ ID NO: 2851 - protein, 122 aa, Artificial Sequence
  Synthetic Polypeptide
EVQLLESGGGLVQPGGSLRLSCAASGFTFSSYAMSWVRQAPGKGLEVVVSAISGGGGRTYYADSVKGRFTISRDNSKNTLYLQMNSLRAEDTAVYYCAREEMAFRAYRFDIWGQGTLVTVSS

SEQ ID NO: 2852 - protein, 124 aa, Artificial Sequence
  Synthetic Polypeptide
EVQLVESGGDLVKPGGSLKLSCAVSGFTFSSYGMSWVRQTPDKRLEWVATVSSGGTYTYYPDSVKGRFTISRDNAKNTLYLQMSSLKSEDSAMYYCARHRGNYYATYYYAMDYWGQGTSVTVSS

SEQ ID NO: 2853 - protein, 119 aa, Artificial Sequence
  Synthetic Polypeptide
EVQLVESGGGLVQPGGSLRLSCAASGFTFSDAWMDWVRQAPGKGLEWVGEIRSKVNNHETYYAESVKGRFTISRDDSKNSLYLQMNSLKTEDTAVYYCARNDYFDYWGQGTTVTVSSAS

SEQ ID NO: 2854 - protein, 123 aa, Artificial Sequence
  Synthetic Polypeptide
EVQLQESGAEVKKPGSSVKVSCKASGFNIKDTYMHWVRQAPGQGLEWMGRIDPANGNSKYVPKFQGRVTITADESTSTAYMELSSLRSEDTAVYYCAPFGYYVSDYAMAYWGQGTTVTVSSAS

SEQ ID NO: 2855 - protein, 120 aa, Artificial Sequence
  Synthetic Polypeptide
QVQLVQSGAEVKKPGSSVKVSCKASGGTFSSYAISWVRQAPGQGLEWMGLIIPRYGKARYAQKFQGRVTITADESTSTAYMELSSLRSEDTAVYYCARNWPYYYMDFWGQGTLVTVSSAS

SEQ ID NO: 2856 - protein, 122 aa, Artificial Sequence
  Synthetic Polypeptide
EVQLVESGGGLVKPGGSLRLSCAASGFTFSNAWMSWVRQAPGKGLEWVGRIKSKTEGGTTDYAAPVKGRFTISRDDSKNTLYLQMNSLKTEDTAVYYCTTPYEWSWYDYWGQGTLVTVSSAS

SEQ ID NO: 2857 - protein, 121 aa, Artificial Sequence
  Synthetic Polypeptide
QVQLVQSGAEVKKPGASVKVSCKASGYTFTSYYMHWVRQAPGQGLEWMGIINPSGGSTSYAQKFQGRVTMTHDTSTSTVYMELSSLRSEDTAVYYCARSFFTGFHLDYWGQGTLVTVSSAS

SEQ ID NO: 2858 - protein, 128 aa, Artificial Sequence
  Synthetic Polypeptide
QVQLVQSGAEVKKPGASVKVSCKASGYTFTNYLIEWVRQAPGQGLEWMGLINPGSGGTNYNEKFKGRVTMTTDTSTSTAYMELRSLRSDDTAVYYCARRSPLGSWIYYAYDGVAYWGQGTLVTVSSAS

SEQ ID NO: 2859 - protein, 114 aa, Artificial Sequence
  Synthetic Polypeptide
EVQLVESGGGLVQPGGSLRLSCAASGFTFSRYWMSWVRQAPGKGLEWVAEINPDSSTIQYTPSLKARFTLSVDRSKNTLYLQMNSLRAEDTAVYYCARPAYWGQGTLVTVSSAS

SEQ ID NO: 2860 - protein, 121 aa, Artificial Sequence
  Synthetic Polypeptide
QVQLVQSGAEVKKPGASVKVSCKASGYTFTGYNIHWVRQAPGQRLEWMGAIYPGNGDTSYKQKFRGRVTITRDTSASTAYMELSSLRSEDTAVYYCARGETARATFAYWGQGTLVTVSSAS

SEQ ID NO: 2861 - protein, 121 aa, Artificial Sequence
  Synthetic Polypeptide
EVQLVQSGAEVKKPGASVKVSCKASGYRFTNYWIHWVRQAPGQGLEWIGGINPGNNYATYRRKFQGRVTMTADTSTSTVYMELSSLRSEDTAVYYCTREGYGNYGAWFAYWGQGTLVTVSS

SEQ ID NO: 2862 - protein, 125 aa, Artificial Sequence
  Synthetic Polypeptide
EVQLVESGGGLVKPGGSLKLSCAASGFAFSIYDMSWVRQAPGKGLEWVAYISSGGGTTYYPDTVKGRFTISRDNAKNTLYLQMSSLRAEDTAMYYCARHSGYGSSYGVLFAYWGQGTLVTVSSTR

SEQ ID NO: 2863 - protein, 120 aa, Artificial Sequence
  Synthetic Polypeptide
QVQLQQSGGGLVQPGGSLKLSCAASGIDFSRYWMSWVRRAPGKGLEWIGEINPDSSTINYAPSLKDKFIISRDNAKNTLYLQMSKVRSEDTALYYCASLYYDYGDAMDYWGQGTSVTVSS

SEQ ID NO: 2864 - protein, 122 aa, Artificial Sequence
  Synthetic Polypeptide
EVQLVESGGGLVQPGGSLRLSCAASGFAFSIYDMSWVRQAPGKGLEWVAYISSGGGTYYPDTVKGRFTISRDNSKNTLYLQMNSLRAEDTAVYYCARHSGYGTHWGVLFAYWGQGTLVTVSS

SEQ ID NO: 2865 - protein, 121 aa, Artificial Sequence
  Synthetic Polypeptide
EVQLVESGGGLVQPGGSLRLSCAASGYAFSSYWVNWVRQAPGKGLEWVAQIYPGDGDTNYNGKFKGRFTISRDNSKNTLYLQMNSLRAEDTAVYYCARSITTVVGCAMDYWGQGTLVTVSS

SEQ ID NO: 2866 - protein, 122 aa, Artificial Sequence
  Synthetic Polypeptide
QLQLQESGPGLVKPSETLSLTCTVSGGSISSGSYFWGWIRQPPGKGLEWIGSIYYSGITYYNPSLKSRVTISVDTSKNQFSLKLSSVTAADTAVYYCARHDGAVAGLFDYWGQGTLVTVSSA

SEQ ID NO: 2867 - protein, 118 aa, Artificial Sequence; identical to SEQ ID NO: 2804
  Synthetic Polypeptide

SEQ ID NO: 2868 - protein, 118 aa, Artificial Sequence
  Synthetic Polypeptide
QVQLVESGGGLVKPGGSLRLSCAASGDSITSGYWNWIRQAPGKGLEWFSYISYSGSTYYNPSLKSRFTISRDNAKNSLYLQMNSLRAEDTAVYYCARPNYPFYAMDYWGQGTLVTVSS

SEQ ID NO: 2869 - protein, 118 aa, Artificial Sequence
  Synthetic Polypeptide
EVQLVESGGGVVQPGRSLRLSCAASGFSLSTSGMGVGWVRQAPGKGLEWVAHIWWDDDKYYADSVKGRFTISRDNSKNTLYLQMNSLRAEDTAVYYCARSFGYGLDYWGQGTLVTVSS

SEQ ID NO: 2870 - protein, 124 aa, Artificial Sequence
  Synthetic Polypeptide
QVQLVESGGGLVKPGGSLRLSCAASGDSVSSNSAAWGWIRQAPGKGLEWFSRIYYRSKWYNSYAVSVKSRFTISRDNAKNSLYLQMNSLRAEDTAVYYCARYDWVPKIGVFDSWGQGTLVTVSS

SEQ ID NO: 2871 - protein, 122 aa, Artificial Sequence
  Synthetic Polypeptide
QLQLQESGPGLVKPSETLSLTCTVSGGSISSSSYFWGWIRQPPGKGLEWIGSIYYSGITYYNPSLKSRVTISVDTSKNQFSLKLSSVTAADTAVYYCARHDGAVAGLFDYWGQGTLVTVSSA

SEQ ID NO: 2872 - protein, 122 aa, Artificial Sequence
  Synthetic Polypeptide
QLQLQESGPGLVKPSETLSLTCTVSGGSISSGSYIWGWIRQPPGKGLEWIGSIYYSGITYYNPSLKSRVTISVDTSKNQFSLKLSSVTAADTAVYYCARHDGAVAGLFDYWGQGTLVTVSSA

SEQ ID NO: 2873 - protein, 122 aa, Artificial Sequence
  Synthetic Polypeptide
QLQLQESGPGLVKPSETLSLTCTVSGGSISSGSYFWGWIRQPPGKGLEWIGSIYYSGITYYNPSLKSRVTISVDTSKNQFSLKLSSVTAADTAVYYCARHDGAMAGLFDYWGQGTLVTVSSA

SEQ ID NO: 2874 - protein, 122 aa, Artificial Sequence
  Synthetic Polypeptide
QLQLQESGPGLVKPSETLSLTCTVSGGSISSGSYFWGWIRQPPGKGLEWIGSIYYSGSTYYNPSLKSRVTISVDTSKNQFSLKLSSVTAADTAVYYCARHDGAVAGLFDYWGQGTLVTVSSA

SEQ ID NO: 2875 - protein, 122 aa, Artificial Sequence
  Synthetic Polypeptide
QLQLQESGPGLVKPSETLSLTCTVSGGSISSGSYFWGWIRQPPGKGLEWIGSIYYSGISYYNPSLKSRVTISVDTSKNQFSLKLSSVTAADTAVYYCARHDGAVAGLFDYWGQGTLVTVSSA

SEQ ID NO: 2876 - protein, 122 aa, Artificial Sequence
  Synthetic Polypeptide
QLQLQESGPGLVKPSETLSLTCTVSGGSISSGSYFWGWIRQPPGKGLEWIGSIYYSGITYYNPGLKSRVTISVDTSKNQFSLKLSSVTAADTAVYYCARHDGAVAGLFDYWGQGTLVTVSSA

SEQ ID NO: 2877 - protein, 122 aa, Artificial Sequence
  Synthetic Polypeptide
QLQLQESGPGLVKPSETLSLTCTVSGGSISSGSYFWGWIRQPPGKGLEWIGSIYYSGITYYNPTLKSRVTISVDTSKNQFSLKLSSVTAADTAVYYCARHDGAVAGLFDYWGQGTLVTVSSA

SEQ ID NO: 2878 - protein, 122 aa, Artificial Sequence; identical to SEQ ID NO: 2866
  Synthetic Polypeptide

SEQ ID NO: 2879 - protein, 122 aa, Artificial Sequence; identical to SEQ ID NO: 2866
  Synthetic Polypeptide

SEQ ID NO: 2880 - protein, 122 aa, Artificial Sequence; identical to SEQ ID NO: 2866
  Synthetic Polypeptide

SEQ ID NO: 2881 - protein, 122 aa, Artificial Sequence; identical to SEQ ID NO: 2866
  Synthetic Polypeptide

SEQ ID NO: 2882 - protein, 122 aa, Artificial Sequence; identical to SEQ ID NO: 2871
  Synthetic Polypeptide

SEQ ID NO: 2883 - protein, 122 aa, Artificial Sequence; identical to SEQ ID NO: 2871
  Synthetic Polypeptide

SEQ ID NO: 2884 - protein, 122 aa, Artificial Sequence; identical to SEQ ID NO: 2871
  Synthetic Polypeptide

SEQ ID NO: 2885 - protein, 120 aa, Artificial Sequence
  Synthetic Polypeptide
QVQLVQSGAEVKKPGSSVKVSCKASGGTFSTYAIHWVRQAPGQGLEWMGRIIPIEGRAYYAQKFQGRVTITADESTSTAYMELSSLRSEDTAVYYCARGRYSYRYWFDYWGQGTLVTVSS

SEQ ID NO: 2886 - protein, 122 aa, Artificial Sequence
  Synthetic Polypeptide
EVQLVQSGAEVKKPGESLKISCKGSGYSFTSYWIGWVRQMPGKGLEWMGIIYPGDSDTRYSPSFQGQVTISADKSISTAYLQWSSLKASDTAMYYCARDVGRWAPGGFLDYWGQGTLVTVSS

SEQ ID NO: 2887 - protein, 118 aa, Artificial Sequence
  Synthetic Polypeptide
QVQLVQSGAEVKKPGSSVKVSCKASGGTFSSYGISWVRQAPGQGLEWMGWISAIFGTANYAQKFQGRVTITADESTSTAYMELSSLRSEDTAVYYCARGVASWYLDYWGQGTLVTVSS

SEQ ID NO: 2888 - protein, 120 aa, Artificial Sequence
  Synthetic Polypeptide
QVQLQQPGAELVKPGASVKMSCKASGYTFTSYNMHWVKQTPGRGLEWIGAIYPGNGDTSYNQKFKGKATLTADKSSSTAYMQLSSLTSEDSAVYYCARSTYYGGDWYFNVWGAGTTVTVS

SEQ ID NO: 2889 - protein, 119 aa, Artificial Sequence
  Synthetic Polypeptide
QVQLQQSGPELKKPGETVKISCKASGYPFTNYGMNWVKQAPGQGLKWMGWINTSTGESTFADDFKGRFDFSLETSANTAYLQINNLKSEDMATYFCARWEVYHGYVPYWGQGTTVTVSS

SEQ ID NO: 2890 - protein, 119 aa, Artificial Sequence
  Synthetic Polypeptide
EVQLVESGGGVVQPGRSLRLSCSASGFDFTTYWMSWVRQAPGKGLEWIGEIHPDSSTINYAPSLKDRFTISRDNAKNTLFLQMDSLRPEDTGVYFCASLYFGFPWFAYWGQGTPVTVSS

SEQ ID NO: 2891 - protein, 124 aa, Artificial Sequence
  Synthetic Polypeptide
GVHSQVQLQESGPGLVRPSQTLSLTCTVSGFTISSGYSWHWVRQPPGRGLEWIGYIQYSGITNYNPSLKSRVTMLVDTSKNQFSLRLSSVTAADTAVYYCAREDYDYHWYFDVWGQGTTVTVSS

SEQ ID NO: 2892 - protein, 120 aa, Artificial Sequence
  Synthetic Polypeptide
EVQLVESGGGLVQPGGSLRLSCAASGFNIKDTYIHWVRQAPGKGLEWVARIYPTNGYTRYADSVKGRFTISADTSKNTAYLQMNSLRAEDTAVYYCSRWGGAGAYAMDVWGQGTLVTVSS

SEQ ID NO: 2893 - protein, 121 aa, Artificial Sequence
  Synthetic Polypeptide
QVQLVESGGGVVQPGRSLRLSCAASGFTFSSYAMHWVRQAPGKGLEWVAVISYDGSNKYYADSVKGRFTISRDNSKNTLYLQMNSLRAEDTAVYYCAKEAPYYAKDYMDVWGKGTTVTVSS

SEQ ID NO: 2894 - protein, 122 aa, Artificial Sequence
  Synthetic Polypeptide
EVQLVETGGGLVQPGKSLELTCATSGFTFNTAWMHWVRQSPDKRLEWIARIKDTSNNYATDYVESMKGRFTISRDDSKGSVNLQMNSLKEEDTATYYCTTDFYDGTYYWNYWGQGVMVTVSS

SEQ ID NO: 2895 - protein, 126 aa, Artificial Sequence
  Synthetic Polypeptide
RMAQVQLQQSGAELARPGASVKMSCKASGYTFTTYTIHWVRRRPGHDLEWIGYINPSSGCSDYNQNFKGKTTLTADKSSNTAYMQLNSLTSEDSAVYYCARRADYGNYEYTWFAYWGQGTTVTVSS

SEQ ID NO: 2896 - protein, 118 aa, Artificial Sequence
  Synthetic Polypeptide
EVQLVESGGGLVQPGRSLRLSCAASGFTFDDYGMHWVRQAPGKGLEWVSGISWNSGSIGYADSAKGRFTISRDNSKNTLYLQMNSLRAEDTAVYYCAKRGNSNSFDYWGQGTLVTVSS

SEQ ID NO: 2897 - protein, 122 aa, Artificial Sequence
  Synthetic Polypeptide
QMQLVQSGAEVKKPGSSVKVSCKASGGTFSSYAISWVRQAPGQGLEWMGGIIPIFGTANYAQKFQGRVTITADKSTSTAYMELSSLRSDDTAVYYCARDELWATNYYYMDVWGKGTLVTVSS

SEQ ID NO: 2898 - protein, 118 aa, Artificial Sequence
  Synthetic Polypeptide
EVQLVESGGGLVRPGGSLRLSCAASGFTFDDYGMSWVRQAPGKGLEWVSGISWNSGSIGYADSVKGRFTISRDNAKNSLYLQMNSLRAEDTALYYCAKRGNSNSFDYWGQGTTVTVSS

SEQ ID NO: 2899 - protein, 118 aa, Artificial Sequence
  Synthetic Polypeptide
EVQLVESGGGLVQPGRSLRLSCAASGFTFDDYAMHWVRQAPGKGLEWVSGISWNSGSIGYADSAKGRFTISRDNSKNTLYLQMNSLRAEDTAVYYCAKRGNSNSFDYWGQGTLVTVSS

SEQ ID NO: 2900 - protein, 119 aa, Artificial Sequence
  Synthetic Polypeptide
QVQLKESGPGLVQPSQTLSLTCTVSGLSLTSNGVSWIRQPPGKGLEWLGVIWSNGGTDYNSAIKSRLSFSRDTSKSQVFLKMNSLQTEDTAMYFCARPRYNSGYFFDYWGQGVMVTVSS

SEQ ID NO: 2901 - protein, 124 aa, Artificial Sequence
  Synthetic Polypeptide
QVQLKESGPGLVQPSQTLSLTCTVSGFSLTSYHVHWVRQPPGKGLEWMGVMWSDGDTLYNSALKSRLSISRDTSKSQVLLQMDSLQSEDTATYYCARLQVFGYPGIRDYVMDAWGQGASVTVSS

SEQ ID NO: 2902 - protein, 130 aa, Artificial Sequence [sequence omitted]

SEQ ID NO: 2903 - protein, 120 aa, Artificial Sequence
  Synthetic Polypeptide
EVQLVESGGGLVQPGGSLRLSCAASGFTFSSYWMSWVRQAPGKGLEWVANIKQDGSEKYYVDSVKGRFTISRDNAKNSLYLRMNSLRAEDTAVYYCARAWGYSSYYFDYWGQGTLVTVSP

SEQ ID NO: 2904 - protein, 115 aa, Artificial Sequence
  Synthetic Polypeptide
EVQLQQSGPELVKPGTSVRISCKTSGYTFTEYTIHWVKQSHGKSLEWIGNINPNNGGTTYNQKFEDKATLTVDKSSSTAYMELRSLTSEDSAVYYCAAGWNFDYWGQGTTLTVSS

SEQ ID NO: 2905 - protein, 115 aa, Artificial Sequence
  Synthetic Polypeptide
EVQLVESGGGLVQPGGSLRLSCAASGYTFTEYTIHWVRQAPGKGLEWVANINPNNGGTTYNQKFEDRFTISRDNSKNTLYLQMNSLRAEDTAVYYCARGWNFDYWGQGTLVTVSS

SEQ ID NO: 2906 - protein, 115 aa, Artificial Sequence
  Synthetic Polypeptide
QVQLVQSGAEVKKPGESVKVSCKASGYTFTEYTIHWVRQAPGQGLEWMGNINPNNGGTTYNQKFEDRVTITADKSTSTAYMELSSLRSEDTAVYYCARGWNFDYWGQGTTVTVSS

SEQ ID NO: 2907 - protein, 115 aa, Artificial Sequence; identical to SEQ ID NO: 2904
  Synthetic Polypeptide

SEQ ID NO: 2908 - protein, 115 aa, Artificial Sequence; identical to SEQ ID NO: 2905
  Synthetic Polypeptide

SEQ ID NO: 2909 - protein, 122 aa, Artificial Sequence
  Synthetic Polypeptide
EVQLVESGGGLVKPEGSLRLSCAASGFTFSRYGMSWVRQAPGKGLEWVSTISGGGTYIYYPDSVKGRFTISRDNAKNSLFLQMNSLRAEDTAVYYCARDNYGRNYDYGMDYWGQGTLVTVSS

SEQ ID NO: 2910 - protein, 122 aa, Artificial Sequence
  Synthetic Polypeptide
EVKVVESGGDLVKPGGSLKLSCVVSGFTFSRYGMSWVRQTPGKRLEWVATISGGGTYIYYPDSVKGRFTISRDNAKNTLYLQMSSLKSEDTAMYHCTRDNYGRNYDYGMDYWGQGTSVTVSS

SEQ ID NO: 2911 - protein, 121 aa, Artificial Sequence
  Synthetic Polypeptide
EVQLVESGGGLVKPGGSLRLSCAASGFTFSGYAMSWVRQAPGKGLEWVSTISSGGTYIYYPDSVKGRFTISRDNAKNSLYLQMNSLRAEDTAVYYCARLGGDNYYEYFDVWGKGTTVTVSS

SEQ ID NO: 2912 - protein, 117 aa, Artificial Sequence
  Synthetic Polypeptide
EVQLLESGGGLVQPGGSLRLSCAASGFAFSTYDMSWVRQAPGKGLEWVATISSGGSYTYYLDSVKGRFTISRDSSKNTLYLQMNSLQAEDSAIYYCAPTTVVPFAYWGQGTLVTVSS

SEQ ID NO: 2913 - protein, 116 aa, Artificial Sequence
  Synthetic Polypeptide
EVQLVESGGGLVQPGGSLRLSCAASGYTFTSYWLHWVRQAPGKGLEWVGYIRPSTGYTEYNQKFKDRFTISADTSKNTAYLQMNSLRAEDTAVYYCARSRWLLDYWGQGTLVTVSS

SEQ ID NO: 2914 - protein, 115 aa, Artificial Sequence
  Synthetic Polypeptide
EVQLVESGGGLVQPGGSLRLSCAASGFTFTTYWMHWVRQAPGKGLEWVGYIRPSTGYTEYNQKFKDRFTISADTSKNTAYLQMNSLRAEDTAVYYCARSRWLLDYWGQGTLVTVS

SEQ ID NO: 2915 - protein, 113 aa, Artificial Sequence; identical to SEQ ID NO: 2671
  Synthetic Polypeptide

SEQ ID NO: 2916 - protein, 117 aa, Artificial Sequence
  Synthetic Polypeptide
EVQLVESGGGLVQPGGSLRLSCAASGYTFSDYFMSWVRQAPGKGLEWVATISNGGTYTYYPDSVKGRFTISRDNSKNTLYLQMNSLRAEDTAVYYCARFDGYIFDYWGQGTLVTVSS

SEQ ID NO: 2917 - protein, 117 aa, Artificial Sequence; identical to SEQ ID NO: 2830
  Synthetic Polypeptide

SEQ ID NO: 2918 - protein, 117 aa, Artificial Sequence; identical to SEQ ID NO: 2830
  Synthetic Polypeptide

SEQ ID NO: 2919 - protein, 5 aa, Artificial Sequence
  Synthetic Polypeptide
GGGGG

SEQ ID NO: 2920 - protein, 5 aa, Artificial Sequence
  Synthetic Polypeptide
GGGGG

SEQ ID NO: 2921 - protein, 5 aa, Artificial Sequence
  Synthetic Polypeptide
GGGGG

SEQ ID NO: 2922 - protein, 5 aa, Artificial Sequence
  Synthetic Polypeptide
GGGGG

SEQ ID NO: 2923 - protein, 5 aa, Artificial Sequence
  Synthetic Polypeptide
GGGGG

SEQ ID NO: 2924 - protein, 251 aa, Artificial Sequence
  Synthetic Polypeptide
DVQMIQTPDSLAVSLGQRATISCRASESVDNYGISFMHWYQQKPGQSPKLLIYRASNLESGIPARFSGSGSRTDFTLTINPVETDDVATYYCQQNNKDPPTFGGGTKLEIKGGGGSGGGGSGGGGSGGGGSQVQLQQSGAELVKPGASVKISCKASGYAFSSYWMNWVKQRPGKGLEWIGQIYPGDGDTTYNGKFKGKATLTADKSSSTVYMQLNSLTSEDSAVYFCVRYYYGSSGYFDYWGQGTTLTVSS

SEQ ID NO: 2925 - protein, 242 aa, Artificial Sequence
  Synthetic Polypeptide
DVQMIQTPSSLSASLGDRVTISCRASQDIGNYLNWYQQKPDGTVKLLIYYTSRLHSGVPSRFSGSGSGTEYSLTISNLEQEDIATYFCQQGSALPPTFGGGTKLEINGGGGSGGGGSGGGGSALQLQQSGAELVRPGASVTLSCKASGYTFTDYEMHWVKQTPVHGLEWIGAIDPETGGTAYNQKFEGKAILTADKSSSTAYMELRSLTSEDSPVYYCARRRYYGSSSFDYWGQGTTLTVSS

SEQ ID NO: 2926 - protein, 244 aa, Artificial Sequence
  Synthetic Polypeptide
DIVLTQSPATLSLSPGDRATISCRASESVTILGSHLIYWYQQKPGQPPRLLIQLASNVQTGVPARFSGSGSRTDFTLTISSVEPEDFAVYYCLQSRTIPRTFGQGTKLEIKRGGGGSGGGGSGGGGSQVQLVQSGPEVKKPGESVKISCKASGYTFRHYSMNWVKQAPGQGLKWMGRINTESGVPIYADDFKGRFSFTVDTSASTAYLEISSLTSEDTAVYFCSNDYLYSLDFWGQGTTLTVSS

SEQ ID NO: 2927 - protein, 244 aa, Artificial Sequence
  Synthetic Polypeptide
DIQMTQSPSSLSASVGDRVTITCSASQDISNYLNWYQQKPGKAPKLLIYYTSNLHSGVPSRFSGSGSGTDFTLTISSLQPEDFATYYCQQYRKLPWTFGQGTKLEIKRGGGGSGGGGSGGGGSQVQLVQSGAEVKKPGSSVKVSCKASGGTFSNYWMHWVRQAPGQGLEWMGATYRGHSDTYYNQKFKGRVTITADKSTSTAYMELSSLRSEDTAVYYCARGAIYDGYDVLDNWGQGTLVTVSS

SEQ ID NO: 2928 - protein, 249 aa, Artificial Sequence
  Synthetic Polypeptide
DIVMTQSPDSLAVSLGERATINCESSQSLLNSGNQKNYLTWYQQKPGQPPKPLIYWASTRESGVPDRFSGSGSGTDFTLTISSLQAEDVAVYYCQNDYSYPYTFGQGTKLEIKRGGGGSGGGGSGGGGSEVQLVQSGAEVKKPGESLKISCKGSGYSFTDYYMKWARQMPGKGLEWMGDIIPSNGATFYNQKFKGQVTISADKSISTTYLQWSSLKASDTAMYYCARSHLLRASWFAYWGQGTMVTVSS

SEQ ID NO: 2929 - protein, 244 aa, Artificial Sequence
  Synthetic Polypeptide
DIQMTQSTSSLSASLGDRVTISCSASQGINNYLNWYQQKPDGTVELLIYYTSTLQSGVPSRFSGSGSGTDYSLTISNLEPEDIGTYYCQQYSKLPRTFGGGTKLEIKGGGGSGGGGSGGGGSQVQLQQSGSELMMPGASVKISCKATGYTFSNYWIEWVKQRPGHGLEWIGEILPGTGRTIYNEKFKGKATFTADISSNTVQMQLSSLTSEDSAVYYCARRDYYGNFYYAMDYWGQGTSVTVSS

SEQ ID NO: 2930 - protein, 239 aa, Artificial Sequence
  Synthetic Polypeptide
DIQMTQSPASLSVSVGETVTITCRASENIYSNLAWYQQKQGKSPQLLVYAATNLADGVPSRFSGSGSGTQYSLKINSLQSEDFGSYYCQHFWGTWTFGGGTTLEIKGGGGSGGGGSGGGGSEVQLQQSGPELVKPGASVKMSCKASGYTFTDYYMKWMKQSHGKSLEWIGDINPNNGGTTYNQKFKGKATLTVDKSSSTAYMQLNSLTSEDSAVYYCARDYGYGYFDYWGQGTTLTVSS

SEQ ID NO: 2931 - protein, 243 aa, Artificial Sequence
  Synthetic Polypeptide
DEIVLTQSPATLSLSPGERATLSCSASSSVSYMHWYQQKPGQAPRLLIYDTSKLASGIPARFSGSGSGTDFTLTISSLEPEDVAVYYCFQGSVYPFTFGQGTKLEIKRGGGGSGGGGSGGGGSQVQLQESGPGLVKPSQTLSLTCTVSGGSISTSGMGVGWIRQHPGKGLEWIGHIWWDDDKRYNPALKSRVTISVDTSKNQFSLKLSSVTAADTAVYYCARMELWSYYFDYWGQGTLVTVSS

SEQ ID NO: 2932 - protein, 242 aa, Artificial Sequence
  Synthetic Polypeptide
DIQMTQTTSSLSASLGDRVTISCRASQDISKYLNWYQQKPDGTVKLLIYHTSRLHSGVPSRFSGSGSGTDYSLTISNLEQEDIATYFCQQGNTLPYTFGGGTKLEITGGGGSGGGGSGGGGSEVKLQESGPGLVAPSQSLSVTCTVSGVSLPDYGVSWIRQPPRKGLEWLGVIWGSETTYYNSALKSRLTIIKDNSKSQVFLKMNSLQTDDTAIYYCAKHYYYGGSYAMDYWGQGTSVTVSS

SEQ ID NO: 2933 - protein, 242 aa, Artificial Sequence
  Synthetic Polypeptide
EIVMTQSPATLSLSPGERATLSCRASQDISKYLNWYQQKPGQAPRLLIYHTSRLHSGIPARFSGSGSGTDYTLTISSLQPEDFAVYFCQQGNTLPYTFGQGTKLEIKGGGGSGGGGSGGGGSQVQLQESGPGLVKPSETLSLTCTVSGVSLPDYGVSWIRQPPGKGLEWIGVIWGSETTYYNSSLKSRVTISKDNSKNQVSLKLSSVTAADTAVYYCAKHYYYGGSYAMDYWGQGTLVTVSS

SEQ ID NO: 2934 - protein, 244 aa, Artificial Sequence
  Synthetic Polypeptide
EIVLTQSPATLSLSPGERATLSCRASQSVSSYLAWYQQKPGQAPRLLIYDASNRATGIPARFSGSGSGTDFTLTISSLEPEDFAVYYCQQRSNWPITFGQGTRLEIKGGGGSGGGGSGGGGSEVQLVESGGGLVQPGRSLRLSCAASGFTFNDYAMHWVRQAPGKGLEWVSTISWNSGSIGYADSVKGRFTISRDNAKKSLYLQMNSLRAEDTALYYCAKDIQYGNYYYGMDVWGQGTTVTVSS

SEQ ID NO: 2935 - protein, 247 aa, Artificial Sequence
  Synthetic Polypeptide
DIVMTQTPLSLPVTPGEPASISCRSSKSLLHSNGITYLYWYLQKPGQSPQLLIYQMSNLVSGVPDRFSGSGSGTDFTLKISRVEAEDVGVYYCAQNLELPYTFGGGTKVEIKRGGGGSGGGGSGGGGSQVQLVQSGAEVKKPGSSVKVSCKASGYAFSYSWINWVRQAPGQGLEWMGRIFPGDGDTDYNGKFKGRVTITADKSTSTAYMELSSLRSEDTAVYYCARNVFDGYWLVYWGQGTLVTVSS

SEQ ID NO: 2936 - protein, 248 aa, Artificial Sequence
  Synthetic Polypeptide
DIQMTQSPSSLSASVGDRVTITCRSSQSIVHSVGNTFLEWYQQKPGKAPKLLIYKVSNRFSGVPSRFSGSGSGTDFTLTISSLQPEDFATYYCFQGSQFPYTFGQGTKVEIKRGGGGSGGGGSGGGGSEVQLVESGGGLVQPGGSLRLSCAASGYEFSRSWMNWVRQAPGKGLEWVGRIYPGDGDTNYSGKFKGRFTISADTSKNTAYLQMNSLRAEDTAVYYCARDGSSWDWYFDVWGQGTLVTVSS

SEQ ID NO: 2937 - protein, 242 aa, Artificial Sequence
  Synthetic Polypeptide
EIVLTQSPGTLSLSPGERATLSCRASQSVGGYLAWYQQKPGQAPRLLIYDASNRATGIPARFSGSGSGTDFTLTISSLEPEDFAVYYCQQRNNWPPMYTFGQGTKLEIKRGGGGSGGGGSGGGGSQVQLVQSGAEVKKPGSSVKVSCKASGGTFSSYAISWVRQAPGQGLEWMGGIIPILGTANYAQKFQGRVTITADESTSTAYMELSSLRSEDTAVYYCARWGGGAFDIWGQGTMVTVSS

SEQ ID NO: 2938 - protein, 239 aa, Artificial Sequence
  Synthetic Polypeptide
DIQMTQSPATIENTSLSASVGDRVTITCRASQGISSWLTWYQQKPEKAPKSLIYAASSLQSGVPSRFSGSGSGTDFTLTISSLQPEDFATYYCQQYDSYPITFGQGTRLEIKGGGGSGGGGSGGGGSQVQLQQWGAGLLKPSETLSLTCAVYGGSFSAYYWSWIRQPPGKGLEWIGDINHGGGTNYNPSLKSRVTISVDTSKNQFSLKLNSVTAADTAVYYCASLTAYWGQGSLVTVSS

SEQ ID NO: 2939 - protein, 243 aa, Artificial Sequence
  Synthetic Polypeptide
EIVLTQSPDSLAVSLGERATINCKASQSVDFDGDSYLNWYQQKPGQPPKVLIYAASTLQSGVPSRFSGSGSGTDFTLTINSLEAEDAATYYCQQSNEDPWTFGGGTKVEIKGGGGSGGGGSGGGGSQVQLVQSGAEVKKPGASVKVSCKVSGYTFTDYYITWVRQAPGQALEWMGWIYPGSGNTKYSQKFQGRFVFSVDTSASTAYLQLSSLKAEDTAVYYCANYGNYWFAYWGQGTLVTVSS

SEQ ID NO: 2940 - protein, 241 aa, Artificial Sequence
  Synthetic Polypeptide
DIQMTQSPSSLSASVGDRVTITCRASQGISSWLAWYQQKPEKAPKSLIYAASSLQSGVPSRFSGSGSGTDFTLTISSLQPEDFATYYCQQYNSYPPTFGGGTKVEIKGGGGSGGGGSGGGGSEVQLVQSGGGLVHPGGSLRLSCAGSGFAFSSSTMHWIRQAPGKGLEWISLIGSGGGIYYGDSVKGRFTISRDNAKNSLYLQMNSLRAEDMAVYYCVRGYFDWVDYFDYWGQGTLVTVSS

SEQ ID NO: 2941 - protein, 247 aa, Artificial Sequence
  Synthetic Polypeptide
DVVMTQSPLSLPVTLGQPASISCRSSQSIVHSDGNTYLEWYQQRPGQSPRRLIYKVSNRFSGVPDRFSGSGSGTDFTLKISRVEAEDVGVYYCFQGSHAPWTFGGGTKVEIKGGGGSGGGGSGGGGSEVQLVESGGGLVQPGGSLRLSCAASGFTFSSYGMHWVRQAPGKGLEWVAYITTRSSTIYYADSVKGRFTISRDNAKNSLYLQMNSLRAEDTAVYYCTREPLTGYYAMDYWGQGTSVTVSS

SEQ ID NO: 2942 - protein, 237 aa, Artificial Sequence
  Synthetic Polypeptide
QIVLTQSPALMSASPGEKVTMTCSASSSVRYMYWYQQKPRSSPKPWIHLTSNLASGVPARFSGSGSGTSYSLTISSMEAEDAATYYCQQWSSHPFTFGSGTKLEIKGGGGSGGGGSGGGGSDVQLQESGPGLVKPSQSLSLTCTVTGFSITSDYSWNWIRQFPGNKLEWMGYISYSGHTSYNPSLESRISITRDTSKNQFFLQLNSVTTEDTATYYCTRGNWDVVYWGQGTLVTVSA

SEQ ID NO: 2943 - protein, 246 aa, Artificial Sequence
  Synthetic Polypeptide
EIVLTQSPGSLAVSPGERVTMSCKSSQSVFFSSSQKNYLAWYQQIPGQSPRLLIYWASTRESGVPDRFTGSGSGTDFTLTISSVQPEDLAIYYCHQYLSSRTFGQGTKLEIKRGGGGSGGGGSGGGGSQVQLQQPGAEVVKPGASVKMSCKASGYTFTSYYIHWIKQTPGQGLEWVGVIYPGNDDISYNQKFQGKATLTADKSSTTAYMQLSSLTSEDSAVYYCAREVRLRYFDVWGQGTTVTVSS

SEQ ID NO: 2944 - protein, 250 aa, Artificial Sequence
  Synthetic Polypeptide
DIVMTQSPDSLTVSLGERTTINCKSSQSVLDSSKNKNSLAWYQQKPGQPPKLLLSWASTRESGIPDRFSGSGSGTDFTLTIDSLQPEDSATYYCQQSAHFPITFGQGTRLEIKGGGGSGGGGSGGGGSQVQLVQSGAEVKKPGASVKVSCKASGYTFTNYGMNWVKQAPGQGLKWMGWINTYTGEPTYADDFKGRVTMTSDTSTSTAYLELHNLRSDDTAVYYCARWSWSDGYYVYFDYWGQGTTVTVSS

SEQ ID NO: 2945 - protein, 250 aa, Artificial Sequence
  Synthetic Polypeptide
DVLLTQSPLSLPVTLGQPASISCRSSQTIVHSNGNTYLEWFQQRPGQSPRLLIYQVSNRFSGVPDRFSGSGSGTDFTLKISRVEAEDVGVYYCFQGSHVPRTFGGGTKVEIKRGGGGSGGGGSGGGGSQIQLVQSGSELKKPGASVKVSCKASGYTFTNYGMNWVRQAPGQGLKWMGWINTNTGEPKYAEEFKGRFALSLDTSVSTAYLQINSLKAEDTAVYFCARGYGNYARGAWLAYWGQGTLVTVSS

SEQ ID NO: 2946 - protein, 245 aa, Artificial Sequence
  Synthetic Polypeptide
DHIVLTQSPSSLSASLGDRVTISCRASQDISTYLNWYQQKPDGTVKLLIFYTSRLHAGVPSRFSGSGSGTHHSLTISNLEQEDIATYFCQQGNSLPFTFGSGTKLEIKRGGGGSGGGGSGGGGSQVQLKESGPELEKPGASVKISCKASGYSFTAYSMNWVKQNNGMSLEWIGSIDPYYGDTKYAQKFKGKATLTVDKASSTAYLQLKSLTSEDSAVYYCARRMITTGDWYFDVWGAGTTVTVSS

SEQ ID NO: 2947 - protein, 245 aa, Artificial Sequence; identical to SEQ ID NO: 2946
  Synthetic Polypeptide

SEQ ID NO: 2948 - protein, 245 aa, Artificial Sequence
  Synthetic Polypeptide
DIVMTQSPDSLAVSLGERATINCRASKSVSTSGYSFMHWYQQKPGQPPKLLIYLASNLESGVPDRFSGSGSGTDFTLTISSLQAEDVAVYYCQHSREVPWTFGQGTKVEIKRGGGGSGGGGSGGGGSQVQLVQSGAEVKKPGASVKVSCKASGYTFTNYGMNWVRQAPGQGLEWMGWINTYTGEPTYADAFKGRFAFSLDTSTSTAYLQINSLRSDDTAVYYCARDYGDYGMDYWGQGTTVTVSS

SEQ ID NO: 2949 - protein, 241 aa, Artificial Sequence
  Synthetic Polypeptide
DIVMTQTPLTLSVTIGQPASISCKSSQSLLDSDGKTYLNWLLQRPGQSPERLIYLVSKLDSGVPDRFTGSGSGTDFTLKISRVEAEDLGVYCCWQGTHFPYTFGGGTKVEIKGGGGGSGGGGSGGGGSQVQLQQPGAELVRPGASVKLSCKASGYTFTSYWMNWVKQRPGQGLEWIGMIDPSDSETHYNHIFKDKATLTVDKSSSTAYLQLSSLTSEDSAVYYCARNLYLWGQGTSVTVSS

SEQ ID NO: 2950 - protein, 244 aa, Artificial Sequence
  Synthetic Polypeptide
DIQLTQSPSSLSASVGDRVTITCKASQSVDYEGDSFLNWYQQKPGKAPKLLIYAASNLESGVPSRFSGSGSGTDFTLTISSLQPEDFATYYCQQSNEDPLTFGQGTKVEIKRGGGGSGGGGSGGGGSEVQLVESGGGLVQPGGSLRLSCAASGYTFSSYWIEWVRQAPGKGLEWIGEILPGGGDTNYNEIFKGRATFSADTSKNTAYLQMNSLRAEDTAVYYCTRRVPIRLDYWGQGTLVTVSS

SEQ ID NO: 2951 - protein, 252 aa, Artificial Sequence
  Synthetic Polypeptide
DIVMSQSPSSLAVSVGEKVTMSCKSSQSLLHSSNQKNYLAWYQQKPGQSPKVLIYWASTRESGVPDRFTGSGSGTDFTLTITSVKSEDLAVYYCQQYYSYPWTFGGGTRLEIKRGGGGSGGGGSGGGGSEVQLQQSVAELVKPGASVKMSCKVSGYTLTDHTIHWMKQRPEQGLEWIGYIYPRDGITGYNEKFKGKATLTADTSSSTAYMQLNSLTSEDSAVYFCARWGYSYRNYAYYYDYWGQGTTLTVSS

SEQ ID NO: 2952 - protein, 249 aa, Artificial Sequence
  Synthetic Polypeptide
EIVLTQSPGTLSLSPGERATLSCRASQSVSSSYLAWYQQKPGQAPRLLIYGTSSRATGIPDRFSGSGSGTDFTLTISRLEPEDFAVYYCQQYGSSPFTFGGGTKVEIKRGGGGSGGGGSGGGGSQVQLQESGPGLAKPSETLSLTCTVSGDSITSYYWSWIRQPPGKGLEWIGYIYYSGSTNYNPSLKSRVTISVDTSKNQFSLKLSSVTAADTAVYYCARDQRRIAAAGTHFYGMDVWGQGTTVTVSS

SEQ ID NO: 2953 - protein, 239 aa, Artificial Sequence
  Synthetic Polypeptide
DIQMTQSPSSLSASVGDRVTITCRASQSISLWLNWYQQKPGKAPKLLIYAASTLQSGVPSRFSGSGSGTDFTLTISSLQPEDFATYYCQQYYTSPYTFGQGTKVEIKRGGGGSGGGGSGGGGSQVQLLESGGGLVQPGGSLRLSCAASGFTFSSYAMSWVRQAPGKGLEWVSVIRSSGSSTYYADSVKGRFTISRDNSKNTLYLQMNSLRAEDTAVYYCARGGGYFDYWGQGTLVTVSS

SEQ ID NO: 2954 - protein, 242 aa, Artificial Sequence
  Synthetic Polypeptide
DIQMTQSPSSLSASVGDRVTITCRASQSISSYLNWYQQKPGKAPKLLIYAVSTLQSGVPSRFSGSGSGTDFTLTISSLQPEDFATYYCQQSGTFPPTTFGQGTKVEIKRGGGGSGGGGSGGGGSQVQLLESGGGLVQPGGSLRLSCAASGFTFSSHGMHWVRQAPGKGLEWVSVISGSGSNTGYADSVKGRFTISRDNSKNTLYLQMNSLRAEDTAVYYCARQWGSYAFDSWGQGTLVTVSS

SEQ ID NO: 2955 - protein, 234 aa, Artificial Sequence
  Synthetic Polypeptide
MTQSPKFLLVSAGDRVTLTCKASQSVNNDVYWYQQEPGQSPKLLIYWASTRESGVPDRFTGSGSGTDFTLTISSVQAEDLAVYYCKQSYNLYTFGGGTKLEIKRGGGGSGGGGSGGGGSESGRGLVQPGGSRKLSCAASGFTFSTSGMHWVRQAPEKGLEWVAYISSGSTTIYHADTVKGRFTISRDNPKNTLFLQMTSLRSEDTAMYYCCARSGQFGNYFDYWGQGTTLTVSS

SEQ ID NO: 2956 - protein, 239 aa, Artificial Sequence
  Synthetic Polypeptide
QSPSSLAVSAGEKVTMSCKSSQSLLNSRTRKNYLAWYQQKPGQSPKLLIYWASTRESGVPDRFTGSGSGTDFTLTISSVQAEDLAVYYCKQSNLYTFGGGTKLEIKGGGGSGGGGSGGGGSQVQLEESGPELVKPGASVKLSCKASGYTFTEYIIHWVKQRSGQGLEWIGWFYPGSGSIKYNEKFKDKATLTADKSSSTVYMELSGLTSEDSAVYFCARHDGYSYFDYWGQGTTLTVSS

SEQ ID NO: 2957 - protein, 242 aa, Artificial Sequence
  Synthetic Polypeptide
DIQMTQSPSSLSASLGERVSLTCRATQELSGYLSWLQQKPDGTIKRLIYAASTLDSGVPKRFSGNRSGSDYSLTISSLESEDFADYYCLQYAIYPYTFGGGTKLEIKGGGGSGGGGSGGGGSEVQLQQSGPELVKPGASVKMSCKASGYTFTSYFIHWVKQKPGQGLEWIGFINPYNDGSKYNEKFKGKATLTSDKSSSTAYMELSSLTSEDSAVYYCTRDDGYYGYAMDYWGQGTSVTVSS

SEQ ID NO: 2958 - protein, 247 aa, Artificial Sequence
  Synthetic Polypeptide
DTIVLTQSPASLAVSLGQRATISCRASESVDSYGNSFMHWYQQKPGQPPKLLIYLASNLESGVPARFSGSGSRTDFTLTIDPVEADDAATYYCQQNNYDPWTFGGGTKLEIKGGGGSGGGGSGGGGSEVQLQQSGPELVKPGASVKMSCKASGYTFTSYVMHWVKQKPGQGLEWIGYINPYNDGTKYNEKFKGKATLTSDTSSSTAYMELNSLTSEDSAVYFCARPIYFDNDYFDYWGQGTTLKVSS

SEQ ID NO: 2959 - protein, 241 aa, Artificial Sequence
  Synthetic Polypeptide
DIQMTQSPSSLSASVGDRVTITCKASQDVGIAVAWYQQKPGKVPKLLIYWASTRHTGVPDRFSGSGSGTDFTLTISSLQPEDVATYYCQQYSSYPYTFGQGTKVEIKGGGGSGGGGSGGGGSEVQLVESGGGLVQPGGSLRLSCAASGFDFSRYWMSWVRQAPGKGLEWIGEINPDSSTINYAPSLKDKFIISRDNAKNSLYLQMNSLRAEDTAVYYCARPDGNYWYFDVWGQGTLVTVSS

SEQ ID NO: 2960 - protein, 242 aa, Artificial Sequence
  Synthetic Polypeptide
DIVMTQSQKSMSTSVGDRVSITCKASQDVITGVAWYQQKPGQSPKLLIYSASYRYTGVPDRFTGSGSGTDFTFTISNVQAEDLAVYYCQQHYSTPLTFGAGTKLELKGGGGSGGGGSGGGGSQVQLQQPGAELVRPGASVKLSCKASGYSFTTYWMNWVKQRPGQGLEWIGMIHPSDSETRLNQKFKDKATLTVDKSSSTAYMQLSSPTSEDSAVYYCARSTMIATRAMDYWGQGTSVTVSS

SEQ ID NO: 2961 - protein, 248 aa, Artificial Sequence
  Synthetic Polypeptide
QSVLTQPPSVSGAPGQRVTISCTGSGSNIGAPYDVSWYQQLPGTAPKLLIYHNNKRPSGVPDRFSGSKSGTSASLAITGLQAEDEADYYCATVEAGLSGSVFGGGTKLTVLGAGGGGSGGGGSGGGGSQVQLVQSGAEVKKPGASVKVSCKVSGYTLTELSIHWVRQAPGKGLEWMGGFDPEENEIVYAQRFQGRVTMTEDTSTDTAYMELSSLRSEDTAVYYCAIVGSFSPLTLGLWGQGTMVTVSS

SEQ ID NO: 2962 - protein, 248 aa, Artificial Sequence
  Synthetic Polypeptide
QSVLTQPPSVSGAPGQRVTISCTGSGSNIGAPYDVSWYQQLPGTAPKLLIYHNNKRPSGVPDRFSGSKSGTSASLAITGLQAEDEADYYCQSYDSSSISTIFGGGTKLTVLGAGGGGSGGGGSGGGGSQVQLVQSGAEVKKPGASVKVSCKVSGYTLTELSIHWVRQAPGKGLEWMGGFDPEENEIVYAQRFQGRVTMTEDTSTDTAYMELSSLRSEDTAVYYCAIVGSFSGIAYRPWGQGTMVTVSS

SEQ ID NO: 2963 - protein, 246 aa, Artificial Sequence
  Synthetic Polypeptide
DIQMTQSPSSLSASVGDRVTITCSASSSVSYMYWYQQKPGKAPKLLIYLTSNLASGVPSRFSGSGSGTDFTLTISSLQPEDFATYYCQQWRSNPFTFGQGTKLEIKRGGGGSGGGGSGGGGSQITLKESGPTLVKPTQTLTLTCTFSGFSLSTSGMGVGWIRQPPGKALEWLAHIWWDDVKRYSPSLKSRLTITKDTSKNQVVLTMTNMDPVDTATYYCARIVSFDNDVVSAMDYWGQGTLVTVSS

SEQ ID NO: 2964 - protein, 241 aa, Artificial Sequence
  Synthetic Polypeptide
EIVMTQSPATLSVSPGERATLSCKASQSVSNDVVWYQQKPGQAPRLLIYYASNRYTGIPARFSGSGSGTEFTLTISSLQSEDFAVYYCQQDYTSPWTFGQGTKLEIKRGGGGSGGGGSGGGGSQVQLVQSGAEVKKPGASVKVSCKASGYTFTNYGMNWVRQAPGQGLEWMGWINTYTGEPTYADDFKGRVTMTTDTSTSTAYMELRSLRSDDTAVYYCARIGDSSPSDYWGQGTLVTVSS

SEQ ID NO: 2965 - protein, 241 aa, Artificial Sequence
  Synthetic Polypeptide
DILLTQSPVILSVSPGERVSFSCRASQSIGTNIHWYQQRTNGSPRLLIKYASESISGIPSRFSGSGSGTDFTLSINSVESEDIADYYCQQNNNWPTTFGAGTKLELKGGGGSGGGGSGGGGSQVQLKQSGPGLVQPSQSLSITCTVSGFSLTNYGVHWVRQSPGKGLEWLGVIWSGGNTDYNTPFTSRLSINKDNSKSQVFFKMNSLQSNDTAIYYCARALTYYDYEFAYWGQGTLVTVSA

SEQ ID NO: 2966 - protein, 241 aa, Artificial Sequence
  Synthetic Polypeptide
EIQLVQSGAEVKKPGESLRISCKGSGFNIEDYYIHWVRQMPGKGLEWMGRIDPENDETKYGPIFQGHVTISADTSINTVYLQWSSLKASDTAMYYCAFRGGVYWGQGTTVTVSSGGGGSGGGGSGGGGSDVVMTQSPDSLAVSLGERATINCKSSQSLLDSDGKTYLNWLQQKPGQPPKRLISLVSKLDSGVPDRFSGSGSGTDFTLTISSLQAEDVAVYYCWQGTHFPGTFGGGTKVEIK

SEQ ID NO: 2967 - protein, 249 aa, Artificial Sequence
  Synthetic Polypeptide
ELQMTQSPSSLSASVGDRVTITCRASQSISSYLNWYQQKPGQPPKLLIYWASTRESGVPDRFSGSESGTNYTLTISSLQPEDFATYFCQQSDSLPITFGQGTRLDIQGGGGSGGGGSGGGGSEVQLLESGGGVVQPGRSLRLSCAASGFTFSSYGMHWVRQAPGKGLEWVAVISYDGSNKYYADSVKGRFTISRDNSKNTLYLQMNSLRAEDTAVYYCAKDMGWGSGWRPYYYYGMDVWGQGTTVTVSS

SEQ ID NO: 2968 - protein, 248 aa, Artificial Sequence
  Synthetic Polypeptide
ELVMTQSPSSLTVTAGEKVTMSCKSSQSLLNSGNQKNYLTWYQQKPGQPPKLLIYWASTRESGVPDRFTGSGSGTDFTLTISSVQAEDLAVYYCQNDYSYPLTFGAGTKLEIKGGGGSGGGGSGGGGSEVQLLEQSGAELVRPGTSVKISCKASGYAFTNYWLGWVKQRPGHGLEWIGDIFPGSGNIHYNEKFKGKATLTADKSSSTAYMQLSSLTFEDSAVYFCARLRNWDEPMDYWGQGTTVTVSS

SEQ ID NO: 2969 - protein, 246 aa, Artificial Sequence
  Synthetic Polypeptide
DIQMTQSPSSLSASVGDRVTITCRASQSISSYLNWYQQKPGKAPKLLIYAASSLQSGVPSRFSGSGSGTDFTLTISSLQPEDLATYYCQQSYSTPFTFGPGTKVDIKGGGGSGGGGSGGGGSVHEVQLVQSGAEVKKPGSSVKVSCKASGGTFSSYAISWVRQAPGQGLEWMGGIIPIFGTANYAQKFQGRVTITADKSTSTAYMELSSLRSEDTAVYYCATFALFGFREQAFDIWGQGTTVTVSS

SEQ ID NO: 2970 - protein, 240 aa, Artificial Sequence
  Synthetic Polypeptide
YIHVTQSPSSLSVSIGDRVTINCQTSQGVGSDLHWYQHKPGRAPKLLIHHASSVEDGVPSRFSGTGFHTSFNLTINDLQADDIGTYYCQVLQSFGRGSRLDTKGGGGSGGGGSGGGGSRAHLVQSGTAMKKPGASVRVSCQTSGYTFTAHILFWFRQAPGRGLEWVGWIKPQYGAVNFGGGFRDRVTLTRDVYREIAYMDIRGLKPDDTAVYYCARDRSYGDSSWALDAWGQGTTVVVSA

SEQ ID NO: 2971 - protein, 245 aa, Artificial Sequence
  Synthetic Polypeptide
DIVLTQSPLSLAVSLGQPAIISCKASQSVSFAGTSLMHWYHQKPGQQPRLLIYRASNLEAGVPDRFSGSGSKTDFTLTISPVEAEDAATYYCQQSREYPYTFGGGTKLEIKRGGGGSGGGGSGGGGSQVQLVQSGAEVVKPGASVKISCKASGYTFTGYFMNWVKQSPGQSLEWIGRIHPYDGDTFYNQKFQGKATLTVDKSSNTAHMELLSLTSEDFAVYYCTRYDGSRAMDYWGQGTTVTVSS

SEQ ID NO: 2972 - protein, 241 aa, Artificial Sequence
  Synthetic Polypeptide
DVVMTQTPLSLPVTPGEPASISCRSSQSLVHRNGNTYLHWYLQKPGQSPKLLIHKVSNRFSGVPDRFSGSGSGTDFTLKISRVEAEDLGVYFCSQSTHVPPLTFGAGTKLELKGGGGSGGGGSGGGGSEVQLVQSGAEVEKPGASVKISCKASGSSFTGYNMNWVRQNIGKSLEWIGAIDPYYGGTSYNQKFKGRATLTVDKSTSTAYMHLKSLRSEDTAVYYCVSGMEYWGQGTSVTVSS

SEQ ID NO: 2973 - protein, 239 aa, Artificial Sequence
  Synthetic Polypeptide
EIVMTQTPATLSVSAGERVTITCKASQSVSNDVTWYQQKPGQAPRLLIYSASNRYSGVPARFSGSGYGTEFTFTISSVQSEDFAVYFCQQDYSSFGQGTKLEIKRGGGGSGGGGSGGGGSQVQLVESGPGVVQPGRSLRISCAVSGFSVTNYGVHWVRQPPGKGLEWLGVIWAGGITNYNSAFMSRLTISKDNSKNTVYLQMNSLRAEDTAMYYCASRGGHYGYALDYWGQGTLVTVSS

SEQ ID NO: 2974 - protein, 242 aa, Artificial Sequence
  Synthetic Polypeptide
DIQMTQTASSLPASLGDRVTISCSASQDISNYLNWYQQKPDGTVKLLIFYSSNLHSGVPSRFSGGGSGTDYSLTISNLEPEDIATYFCHQYSKLPWTFGGGTKLEIKRGGGGSGGGGSGGGGSEVTLVESGGDFVKPGGSLKVSCAASGFAFSHYAMSWVRQTPAKRLEWVAYISSGGSGTYYSDSVKGRFTISRDNAKNTLYLQMRSLRSEDSAMYFCTRVKLGTYYFDSWGQGTTLTVSS

SEQ ID NO: 2975 - protein, 244 aa, Artificial Sequence
  Synthetic Polypeptide
QFVLTQSPSASAALGASAKLTCTLSSAHKTYTIDWYQQQKGKAPRYLIQVKSDGTYTKATGVPDRFSGSSSGADRYLIIPSVQADDEADYYCGTDYTGGYVFGGGTQLTVTGGGGSGGGGSGGGGSEQLKESGGGLFKPTDTLTLTCTVSGFSLSYYGVNWVRQAPGNGLEWIGTIGGSGDTYYASWAKSRSTIIRNTNENTVTLKMTSLTAADTATYFCVRYANIGYEYFNVWGPGTLVTVSS

SEQ ID NO: 2976 - protein, 243 aa, Artificial Sequence
  Synthetic Polypeptide
DIQMTQSPSSLSASVGDRVTITCRASQGISSWLAWYQQKPEKAPKSLIYAASSLQSGVPSRFSGSGSGTDFTLTISSLQPEDFATYYCQQYNSYPPTFGGGTKVEIKGGGGSGGGGSGGGGSEVQLVESGGGLVQPGESLRLSCVASGFTFSRYKMNWVRQAPGKGLEWVSYISRSGRDIYYADSVKGRFTISRDNAKNSLYLQMNSLRDEDTAVYYCAGTVTTYYYFGMDVWGHGTTVTVSS

SEQ ID NO: 2977 - protein, 242 aa, Artificial Sequence
  Synthetic Polypeptide
QSVVTQPPSMSAAPGQQVTISCSGGNSNIERNYVSWYLQLPGTAPKLVIFDNDRRPSGIPDRFSGSKSGTSATLGITGLQTGDEADYYCGTWDSSLRGWVFGGGTKLTVLGGGGGSGGGGSGGGGSEVQLVESGGGLIQPGGSLRLSCAASGFTFSNYAMNWVRQAPGKGLEWVSTINGRGSSTIYADSVKGRFTISRDNSKNTLYLQMNSLRAEDTATYYCARYISRGLGDSWGQGTLVTV

SEQ ID NO: 2978 - protein, 243 aa, Artificial Sequence
  Synthetic Polypeptide
QSVLTQPPSASGTPGQRVTISCSGSRSNVGGNYVFWYQQVPGATPKLLIYRSNQRPSGVPDRFAGSKSGSSASLAISGLRSEDEADYYCATWDDSLSGFVFGTGTKVTVLGGGGGSGGGGSGGGGSEVQLVESGGGLVKPGGSLRLSCAASGFTFSDYYMSWIRQAPGKGLEWVSYISSSGSTIYYADSVKGRFTISRDNAKNSLYLQMNSLRAEDTAVYYCARGYGKAYDQWGQGTLVTVSS

SEQ ID NO: 2979 - protein, 242 aa, Artificial Sequence
  Synthetic Polypeptide
DIQMTQSPSSLSASVGDRVTITCRASQDVNTAVAWYQQKPGKAPKLLIYSASFLESGVPSRFSGSRSGTDFTLTISSLQPEDFATYYCQQHYTTPPTFGQTKVEIKRGGGGSGGGGSGGGGSEVQLVESGGGLVQPGGSLRLSCAASGFNIKDTYIHWVRQAPGKGLEWVARIYPTNGYTRYADSVKGRFTISADTSKNTAYLQMNSLRAEDTAVYYCSRWGGDGFYAMDVWGQGTLVTVSS

SEQ ID NO: 2980 - protein, 255 aa, Artificial Sequence
  Synthetic Polypeptide
QSALTQPPSASGSPGQSITISCTGTSNNFVSWYQQHAGKAPKLVIYDVNKRPSGVPDRFSGSKSGNTASLTVSGLQTDDEAVYYCGSLVGNWDVIFGGGTKLTVLGGGGSGGGGSGGGGSQPQLQESGPTLVEASETLSLTCAVSGDSTAACNSFWGWVRQPPGKGLEWVGSLSHCASYWNRGWTYHNPSLKSRLTLALDTPKNLVFLKLNSVTAADTATYYCARFGGEVLRYTDWPKPAWVDLWGRGTLVTVSS

SEQ ID NO: 2981 - protein, 250 aa, Artificial Sequence
  Synthetic Polypeptide
ELVLTQSPGTLSLSAGERATLSCRASQSVSSGSLAWYQQKPGQAPRLLIYGASTRATGIPDRFSGSGSGTDFTLTIGRLEPEDLAVYYCQQYGTSPYTFGQGTKLEIGGGGSGGGGSGGGGSLEQSGAEVKKPGSSVQVSCKASGGTFSMYGFNWVRQAPGHGLEWMGGIIPIFGTSNYAQKFRGRVTFTADQATSTAYMELTNLRSDDTAVYYCARDFGPDWEDGDSYDGSGRGFFDFWGQGTLVTVSS

SEQ ID NO: 2982 - protein, 230 aa, Artificial Sequence
  Synthetic Polypeptide
DIQMTQSPSSLSASVGDRVTITCQASQDINNYLNWYQQKPGKAPKLLIYDASNLQTGVPSRFSGSGSGTDFTFTIEDIATYYCQQYTFGPGTKVDIKGGGGSGGGGSGGGGSEVQLLESGGGLVQPGGSLRLSCAASGFTFSWYSMTWVRQAPGKGLEWVSSIVPWGDFTQYADSVKGRFTISRDNSKNTLYLQMNSLRAEDTAVYYCAKGPGWGSFDLWGRGTLVTVSS

SEQ ID NO: 2983 - protein, 240 aa, Artificial Sequence
  Synthetic Polypeptide
DIQMTQSPSSLSASVGDRVTITCTASLSVSSTYLHWYQQKPGSSPKLWIYSTSNLASGVPSRFSGSGSGTSYTLTISSLQPEDFATYYCHQYHRSPLTFGGGTKVEIKRGGGGSGGGGSGGGGSEVQLVESGGGLVQPGGSLRLSCAASGFSLTKYGVHWVRQAPGKGLEWVGVKWAGGSTDYNSALMSRFTISKDNAKNSLYLQMNSLRAEDTAVYYCARDHRDAMDYWGQGTLVTVSS

SEQ ID NO: 2984 - protein, 244 aa, Artificial Sequence
  Synthetic Polypeptide
DIQMTQSPSSLSASVGDRVTITCKASQDVGTAVAWYQQKPGKAPKLLIYSASYRSTGVPSRFSGSGSGTDFTLTISSLQPEDFATYYCQHHYSAPWTFGGGTKVEIKGGGGSGGGGSGGGGSEVQLVESGGGLVQPGGSLRLSCAASGFTFSRNGMSWVRQAPGKGLEWVATVSSGGSYIYYADSVKGRFTISRDNAKNSLYLQMNSLRAEDTAVYYCARQGTTALATRFFDVWGQGTLVTVSS

SEQ ID NO: 2985 - protein, 240 aa, Artificial Sequence
  Synthetic Polypeptide
DIQMTQSFSSLSASVGDRVTITCRASQDISNYLNWYQQKPGKAPKLLIYYTSRLHSGVPSRFSGSGSGTDYTLTISSLQPEDFATYFCQQGNTLPWTFGGGTKLEIKRGGGGSGGGGSGGGGSEVQLVQSGGGLVQSGGSLRLSCRASGYTFTRYWMLWVRQRPGKGLEWVAEINPRNDRTNYNEKFKTRFTISVDRSKNTLYLQMDSLRAEDTAVYFCALGGGYAMDYWGQGTLVTVSS

SEQ ID NO: 2986 - protein, 240 aa, Artificial Sequence
  Synthetic Polypeptide
DIQMTQSPPSLSASVGGKVTITCKASQDIDRYMAWYQDKPGKGPKLLIHDTSTLQPGIPSRFSGSGSGRDYSFSISNLEPEDIATYYCLQYDNLWTFGGGTKLEIKRGGGGSGGGGSGGGGSQVQLVQSGAELVKPGASVKMSCKASGYIFTNYNIHWVKKSPGQGLEWIGAIYPGNGDAPYSQKFQDRATLTADTSSSTTYMELSSLTSEDSAVYYCVRANWDVAFAYWGQGTLVSVSS

SEQ ID NO: 2987 - protein, 241 aa, Artificial Sequence
  Synthetic Polypeptide
DIQMTQSPASLSASVGETVTITCRVSGNIHNYLAWYQQKQGKSPQLLVYNAKTLADGVPSRFSGSGSGTQYSLKINSLQPEDFGSYYCQHFWSNPYTFGGGTKLEIKGGGGSGGGGSGGGGSQVQLQQSGASVKVSCKASELVRPGTGYAFTNYLIEWVKQRPGQGLEWIGVINPGSGGTNYNEKFKGKATLTADKSSSTAYMQLSSLTSDDSAVYFCARYRSYDWYFDVWGAGTTVTVSS

SEQ ID NO: 2988 - protein, 241 aa, Artificial Sequence
  Synthetic Polypeptide
DIQMTQSPASLSASVGETVTIICRASVNIYSYLAWYQQKQGKSPQLLVYNAKILAEGVPSRFSGSGSGTQFSLKINSLQPEDFGSYYCQHHYGTFTFGSGTKLEIKRGGGGSGGGGSGGGGSQVQLKESGPGLVAPSQSLSITCTISGFSLTSYGVHWVRQPPGKGLEWLVVIWSDGSTTYNSALKSRLSISKDNSKSQVFLKMNSLQTDDTAIYYCASHYGSTLAFASWGHGTLVTVSAA

SEQ ID NO: 2989 - protein, 249 aa, Artificial Sequence
  Synthetic Polypeptide
DIVMTQSHKFMSTSVGDRVSVTCKASQNVGNNVAWYQQKPGQSPKVLIYSASYRYSGVPDRFTGSGSGTDFTLTISNVQSEDLAEYFCQQYNTYPFTFGSGTKLEIKGGGGSGGGGSGGGGSEVQLEESGGGLVQPGGSMKLSCVASGFTFSNYWMNWVRQSPEKGLEWVAEIRFKSHNYATHFAESVKGRFTISRDDSKSSVYLQMNNLRAEDTGIYYCTRRIGNSDYDWWYFDVWGAGTSVTVSSAS

SEQ ID NO: 2990 - protein, 241 aa, Artificial Sequence
  Synthetic Polypeptide
DIQMTQSSSSFSVSLGDRVTITCKASEDIYIRLAWYQQKPGNAPRLLISAATSLETGIPSRFSGSGSGEDYTLTITSLQTEDVATYYCQQYWTTPWTFGGGTKLEIKRGGGGSGGGGSGGGGSDVQLQESGPGLVKPSQSLSLTCTVTGYSITIDYTWNWIRQFPGNKLEWMGYITYSGSTDYNPSLKSRSSITRDTSMNQFFLQLNSVTTEDTATYYCARLGRRYALDYWGQGTSVTVSS

SEQ ID NO: 2991 - protein, 240 aa, Artificial Sequence
  Synthetic Polypeptide
DVQLQESGPGLVKPSQSLSLTCTVTGYSITSDYTWNWIRQFPGNKLEWMGYITYSGSTSYNPSLKSRNSITRDTSKNQFFLQLNSVTTEDTATYYCARLGRRYTMDYWGQGTSVTVSSGGGGSGGGGSGGGGSDIQMTQSSSSFSVSLGDRVTITCMASEDIYIRLAWYQQKPGNAPRLLISAATSLETGVPSRFSGSGSGKDYTLSITSLQTEDVGTYYCQQYWSSPWTFGGGTKLEIN

SEQ ID NO: 2992 - protein, 240 aa, Artificial Sequence
  Synthetic Polypeptide
DIQMTQSSSSFSVSLGDRVTITCMASEDIYIRLAWYQQKPGNAPRLLISAATSLETGVPSRFSGSGSGKDYTLSITSLQTEDVGTYYCQQYWSSPWTFGGGTKLEINGGGGSGGGGSGGGGSDVQLQESGPGLVKPSQSLSLTCTVTGYSITSDYTWNWIRQFPGNKLEWMGYITYSGSTSYNPSLKSRNSITRDTSKNQFFLQLNSVTTEDTATYYCARLGRRYTMDYWGQGTSVTVSS

SEQ ID NO: 2993 - protein, 242 aa, Artificial Sequence
  Synthetic Polypeptide
DQIVLTQSPAIMSASPGEKVTISCSASSSVSYMYWYQQKPGSSPKPWIYRTSNLASGVPARFSGSGSGTSYSLTISNMEAEDAAAYYCQQYHSYPTTFGGGTKLEVKGGGGSGGGGSGGGGSEVQLVESGGGLVQPKGSLKLSCAASGFSFNTYAMNWVRQAPGKGLEWIAHIRSKSNNFATYYADSVKDRFSISRDASENILFLQMNNLKTEDTAMYYCVRQGGDFPMDYWGQGTSVTVSS

SEQ ID NO: 2994 - protein, 243 aa, Artificial Sequence
  Synthetic Polypeptide
DIQMTQSPSSLSASVGDRVTITCRASQSISSYLNWYQQKPGKAPKLLIYDASNLETGVPSRFSGSGSGTDFTFTISSLQPEDIATYYCQQYDNLPLTFGGGTKVDIKRGGGGSGGGGSGGGGSQVQLVESGGGVVQPGRSLRLSCAASGFTFSSYAMHWVRQAPGKGLEWVAVISYDGSNKYYADSVKGRFTISRDNSKNTLYLQMNSLRAEDTAVYYCARAHNSSSWSFDYWGQGTLVTVSS

SEQ ID NO: 2995 - protein, 252 aa, Artificial Sequence
  Synthetic Polypeptide
DVVMTQSPLSLPVSLGDQASISCRSSQRLVHSNGNTYLHWYLQKPGQSPKLLIYRVSNRFPGVPDRFSGSGSGTDFTLKISRVEAEDLGIYFCSQSTHVPYTFGGGTKLEIKRGGGGSGGGGSGGGGSEVRLQQSGPDLIKPGASVKMSCKASGYTFTGYVMHWVKQRPGQGLEWIGFINPYNDDIQSNERFRGKATLTSDKSSTTAYMELSSLTSEDSAVYYCARGAGYNFDGAYRFFDFWGQGTTLTVSS

SEQ ID NO: 2996 - protein, 243 aa, Artificial Sequence
  Synthetic Polypeptide
SYELTQPPSVSVSPGQTATISCSGDQLGGKYGHWYQKKPGQSPVLVLYQDRKRPAGIPERFSGSSSGNTITLTISGTQAVDEADYYCQAWDTNLGGVFGGGTKVTVLGQGGGGSGGGGSGGGGSQVQLVESGAEVKKPGASVKVSCKASGYTFTGYYMHWVRQAPGQGLEWMGRINPNSGGTNYAQKFQGRVTMTRDTSISTAYMELSRLRSDDTAVYYCASPRGRGSAFDIWGQGTLVTVSS

SEQ ID NO: 2997 - protein, 246 aa, Artificial Sequence
  Synthetic Polypeptide
NFMLTQPHSVSESPGKTVTISCTRSSGSIASKYVQWYQQRPGSSPTTVIYEDNQRPSGVPDRFSGSIDTSSNSASLTISGLRTEDEADYYCHSYDSNNHSVFGGGTKVTVLGQGGGGSGGGGSGGGGSEVQLVESGGGVVQPGGSLRLSCAASGFTFSSYAMSWVRQAPGKGLEWVSAISGSGGSTYYADSVKGRFSISRDNSKNTLYLQMNSLRAEDTAVYYCARTRSSGAFDIWGQGTLVTVSS

SEQ ID NO: 2998 - protein, 242 aa, Artificial Sequence
  Synthetic Polypeptide
DIQMNQSPSSLSASLGDTITITCHASQNINVWLSWYQQKPGNIPKLLIYKASNLHTGVPSRFSGSGSGTGFTITISSLQPEDIATYYCQQGQSYPWTFGGGTKLEIKRGGGGSGGGGSGGGGSEVQLQQSGPELVKPGASVKISCKASGYSFTGYFMNWVKQSHGKSLEYIGRFNPYNGETLYNQKFKGKATLTVDKSSSTVHMELLSVTSEDSAVYYCGRSGNDDAMDYWGQGTSVTVSSA

SEQ ID NO: 2999 - protein, 239 aa, Artificial Sequence
  Synthetic Polypeptide
DILLTQSPAILSVSPGERVSFSCRASQNIGTSIHWYQQRTNGSPRLLIKYASESVSGIPSRFSGSGSGTDFTLSINSVESEDIADYYCQHTNSWPTTFGGGTKLEIKRGGGGSGGGGSGGGGSQVQLQQSDAELVKPGASVKISCKASGYTFTDHAIHWVKQKPEQGLEWIGYFSPGNGDIKYNEKFKGKATLTADKSSSTAYMQLNSLTSEDSAVYFCKRSYGNYDYWGQGTTLTVSS

SEQ ID NO: 3000 - protein, 244 aa, Artificial Sequence
  Synthetic Polypeptide
DIVMTQSPDSLAVSLGERATINCKSSQSLLNSGDQKNYLTWYQQKPGQPPKLLIYWASTRESGVPDRFSGSGSGTDFTLTISSLQAEDVAVYYCQNDYSYPLTFGQGTKVEIKGGGGSGGGGSGGGGSQVQLVQSGAEVKKTGSSVKVSCKASGYTFTDHAIHVWRQAPGQALEWMGHFSPGNTDIKYNDKFKGRVTLTVDRSMSTAYMELSSLRSEDTAMYYCKTSTFFFDYWGQGTMVTVSS

SEQ ID NO: 3001 - protein, 243 aa, Artificial Sequence
  Synthetic Polypeptide
DIQMTQSPSSLSASVGDRVTITCKASQDVSIAVAWYQQKPGKAPKVLIYSASYRYTGVPDRFSGSGSGTDFTFTISSLQPEDIAVYYCQQHYITPLTFGGGTKVEIKGGGGSGGGGSGGGGSQIQLVQSGHEVKKPGASVKVSCKASGYTFTNYGMNWVRQAPGQGLEWMGWINTKTGEPTYAEEFKGRFVFSLETSASTAYLQISSLKAEDTAMYFCGRGGYGSSYWYFDVWGQGTTVTVSS

SEQ ID NO: 3002 - protein, 246 aa, Artificial Sequence
  Synthetic Polypeptide
QAVVTQPPSASGTPGQRVTISCSGSSSNIGSNTVNWYQQVPGTAPKLLIYSNNQRPSGVPDRFSGSKSGTSASLAISGLQSEDEADYYCAAWDDSLNGWVFGGGTKLTVLGGGGSGGGGSGGGGSQMQLVQSGAEVKEPGESLRISCKGSGYSFTNFWISWVRQMPGKGLEWMGRVDPGYSYSTYSPSFQGHVTISADKSTSTAYLQWNSLKASDTAMYYCARVQYSGYYDWFDPWGQGTLVTVSS

SEQ ID NO: 3003 - protein, 240 aa, Artificial Sequence
  Synthetic Polypeptide
DIQMTQSPSTLSASVGDRVTITCRASQNINKWLAWYQQRPGKAPQLLIYKASSLESGVPSRFSGSGSGTEYTLTISSLQPDDFATYYCQQYNSYATFGQGTKVEIKRGGGGSGGGGSGGGGSQVQLVQSGAEVKKPGESLKISCKGSGYNFSNKWIGWVRQLPGRGLEWIAIIYPGYSDITYSPSFQGRVTISADTSINTAYLHWHSLKASDTAMYYCVRHTALAGFDYWGLGTLVTVSS

SEQ ID NO: 3004 - protein, 245 aa, Artificial Sequence
  Synthetic Polypeptide
QSVVTQPPSVSVAPGKTARITCGRNNIGSKSVHWYQQKPGQAPVLVVYDDSDRPSGIPERFSGSNSGNTATLTISRVEAGDEADYYCQVWDSSSDHVVFGGGTKLTVLGGGGGSGGGGSGGGGSEVQLVQSGGGVVRPGGSLRLSCAASGFTFDDYGMSWVRQAPGKGLEWVSGINWNGGSTGYADSVRGRFTISRDNAKNSLYLQMNSLRAEDTALYYCARERGYGYHDPHDYWGQGTLVTVSS

SEQ ID NO: 3005 - protein, 244 aa, Artificial Sequence
  Synthetic Polypeptide
DIVLTQSPASLAVSLGQRATISCRASESVDNYGNTFMHWYQQKPGQPPKLLIYRASNLESGIPARFSGSGSRTDFTLTINPVEADDVATYYCQQSNEDPPTFGAGTKLELKGGGGSGGGGSGGGGSQIQLVQSGPELKKPGETVKISCKASGYIFTNYGMNWVKQAPGKSFKWMGWINTYTGESTYSADFKGRFAFSLETSASTAYLHINDLKNEDTATYFCARSGGYDPMDYWGQGTSVTVSS

SEQ ID NO: 3006 - protein, 242 aa, Artificial Sequence
  Synthetic Polypeptide
EIVLTQSPGTLSLSPGERATLSCRASQSVSNTYLAWYHQRPGQAPRLLIYGASSRATGIPDRFSGSGSGTDFALTISSLEPEDFAVYYCQQYSNSWTFGQGTKVEIKRGGGGSGGGGSGGGGSQVQLVESGGGVVQPGRSLRLSCAASGFTFSSYDMHWVRQAPGKGLEWVAVISYDGTNEYYADSVKGRFTISRDTSKNTLYLQMNSLRAEDTAVYYCARERYFDWSFDYWGQGTLVSVSS

SEQ ID NO: 3007 - protein, 241 aa, Artificial Sequence
  Synthetic Polypeptide
ELTQDPAVSVALGQTVRITCQGDSLRSNYANWYQQKPGQAPVLVIYGQNNRPSGIPDRFSGSSSGNTASLTITGAQAADEADYYCDSRVSTGNHVVFGGGTKLTVLGQGGGGSGGGGSGGGGSEVQLVQSGAEVKKPGASVKVSCKASGYTFTSYAMHWVRQAPGQRLEWMGWINAGNGNTKYSQKFQGRVTITRDTSASTAYMELSSLRSEDTAVYYCARDISYGSFDYWGQGTLVTVSS

SEQ ID NO: 3008 - protein, 237 aa, Artificial Sequence
  Synthetic Polypeptide
DIQMTQSPSSLSASVGDRVTITCSATSSISYMHWYQQKPGKAPKGWIYDTSKLAHGVPSRFSGSGSGTDFTLTISSLQPEDFATYYCHQRRSYPFTFGQGTKVEIKGGGGSGGGGSGGGGSEVQLVQSGAEVKKPGASVKVSCKASGYTFTNFWIHWVRQAPGQGLEWIGEIDPSDSYTNYNQKFKGRVTITRDTSTSTAYLELSSLRSEDTAVYYCAREITTVDYWGQGTLVTVSS

SEQ ID NO: 3009 - protein, 244 aa, Artificial Sequence
  Synthetic Polypeptide
DIQMTQSPSSLSASVGDRVTITCKASQGFNKYVAWYQQKPGKAPKLLIYYTSTLQPGVPSRFSGSGSGRDYTLTISSLQPEDFATYYCLQYGNLLYAFGQGTKVEIKRGGGGSGGGGSGGGGSEVQLVQSGAEVKKPGASVKVSCKASGYTFTSYWIGWVRQAPGQGLEWIGDIYPGGGYTNYNEKFKGRVTITRDTSTSTAYLELSSLRSEDTAVYYCARLDGSSYRGAMDSWGQGTLVTVSS

SEQ ID NO: 3010 - protein, 240 aa, Artificial Sequence
  Synthetic Polypeptide
DIQMTQSPSSLSASVGDRVTITCRASQDIRYYLNWYQQKPGKAPKLLIYVASSLQSGVPSRFSGSGSGTEFTLTVSSLQPEDFATYYCLQVYSTPRTFGQGTKVEIKGGGGSGGGGSGGGGSEVQLVESGGGLAKPGGSLRLSCAASGFRFTFNNYYMDWVRQAPGQGLEWVSRISSSGDPTWYADSVKGRFTISRENAKNTLFLQMNSLRAEDTAVYYCASLTTGSDSWGQGVLVTVSS

SEQ ID NO: 3011 - protein, 241 aa, Artificial Sequence
  Synthetic Polypeptide
EIVMTQSPATLSVSPGERATLSCRASQSVSRNLAWYQQKPGQAPRLLIYGASTRATGIPARFSGSGSGTEFTLTIGSLQSEDFAVYYCQQYKTWPRTFGQGTNVEIKGGGGSGGGGSGGGGSQVQLQQWGAGLLKPSETLSLTCAVFGGSFSGYYWSWIRQPPGKGLEWIGEINHRGNTNDNPSLKSRVTISVDTSKNQFALKLSSVTAADTAVYYCARERGYTYGNFDHWGQGTLVTVSS

SEQ ID NO: 3012 - protein, 247 aa, Artificial Sequence
  Synthetic Polypeptide
DIQMTQSPSSLSASVGDRVTITCKASKNIRSYLAWYQQKPGKAPKLLIYSGSTLHSGVPSRFSGSGSGTDFTLTISSLQPEDFATYYCQQHHEYPLTFGQGTKVEIKRGGGGSGGGGSGGGGSQVQLQESGPGLVKPSETLSLTCTVSGYTITSGYDWSWIRQPPGKGLEWIGYINYGGSTNYKPSLGSRVTISVDTSKNQFSLKLSSVTAADTAVYYCARYNEYKSYIYDWYFDFWGQGTLVTVSS

SEQ ID NO: 3013 - protein, 249 aa, Artificial Sequence
  Synthetic Polypeptide
QSVVTQPPSVSAAPGQKVTISCSGSSSNIGNNYVSWYQQLPGTAPKLLIYDNNKRPSGIPDRFSGSKSGTSATLGITGLQTGDEADYYCGTWDGSLYTMLFGGGTKLTVLGGGGSGGGGSGGGGSEVQLVESGGGLVKPGGSLRLSCAASGFTFSNAWMSWVRQAPGKGLEWVGFIRSKAYGGTTEYAASVKGRFTISRDDSKSIAYLQMNNLKTEDTAVYYCARDGLYSSSWYDSDYWGQGTLVTVSS

SEQ ID NO: 3014 - protein, 254 aa, Artificial Sequence
  Synthetic Polypeptide
QSVLTQPPSVSGAPGQRVTISCTGSSSNIGAGYDVHWYQQLPGTAPKLLIFGNSNRPSGVPDRFSGFKSGTSASLAITGLQAEDEADYFCQSYDSSLSGSGVFGTGTKVTVLGGGGGSGGGGSGGGGSQMQLVQSGGGLVQPGRSLRLSCAASGFTFDDYAMHWVRQAPGKGLEWVSGISWNSGSIGYADSVKGRFTISRDNAKNSLYLQMNSLRAEDTALYYCAKDIHSGSYYGLLYYAMDVWGQGTTVTVSS

SEQ ID NO: 3015 - protein, 254 aa, Artificial Sequence
  Synthetic Polypeptide
LPVLTQPPSASGTPGQRVTISCSGRSSNIGSNSVNWYRQLPGAAPKLLIYSNNQRPPGVPVRFSGSKSGTSASLAISGLQSEDEATYYCATWDDNLNVHYVFGTGTKVTVLGSRGGGGSGGGGSGGGGSLEMAQVQLVQSGAEVKKPGSSVKVSCKASGGTFSSYAISWVRQAPGQGLEWMGRIIPILGIANYAQKFQGRVTITADKSTSTAYMELSSLRSEDTAVYYCARGGYYSHDMWSEDWGQGTLVTVSS

SEQ ID NO: 3016 - protein, 243 aa, Artificial Sequence
  Synthetic Polypeptide
DIVLTQSPASLAVSLGERATINCRASESVSVIGAHLIHWYQQKPGQPPKLLIYLASNLETGVPARFSGSGSGTDFTLTISSLQAEDAAIYYCLQSRIFPRTFGQGTKLEIKGGGGSGGGGSGGGGSQVQLVQSGSELKKPGESVKISCKASGYTFTDYSINWVKQAPGQGLKWMGWINTETREPAYAYDFRGRFVFSLDTSASTAYLQISSLKAEDTAVYFCALDYSYAMDYWGQGTLVTVSS

SEQ ID NO: 3017 - protein, 244 aa, Artificial Sequence
  Synthetic Polypeptide
DIVLTQSPATLSLSPGDRATLSCRASESVTILGSHLIYWYQQKPGQAPRLLIQLASNVQTGIPARFSGSGSRTDFTLTISSLEPEDFAVYYCLQSRTIPRTFGQGTKLEIKRGGGGSGGGGSGGGGSQVQLVQSGSELKKPGESVKISCKASGYTFTHYSMNWVRQAPGQGLEWMGRINTETGEPLYADDFKGRFVFSLDTSASTAYLQISSLKAEDTAVYYCSNDYLYSLDYWGQGTLVTVSS

SEQ ID NO: 3018 - protein, 248 aa, Artificial Sequence
  Synthetic Polypeptide
DFVMTQSPDSLAVSLGERVTMSCKSSQSLLNSGNQKNYLTWYQQKPGQPPKLLIYWASTRESGVPDRFSGSGSGTDFTLTISSLQAEDVAVYYCQNDYSYPYTFGQGTKLEIKGGGGSGGGGSGGGGSEVQLVQSGAELKKPGASVKVSCKASGYTFTDYYMKWVRQAPGQGLEWIGDIIPSNGATFYNQKFKGRVTITVDKSTSTAYMELSSLRSEDTAVYYCARSHLLRASWFAYWGQGTLVTVSS

SEQ ID NO: 3019 - protein, 248 aa, Artificial Sequence
  Synthetic Polypeptide
DFVMTQSPDSLAVSLGERVTMSCKSSQSLLNSGNQKNYLTWYQQKPGQPPKLLIYWASTRESGVPDRFSGSGSGTDFTLTISSLQAEDVAVYYCQNDYSYPYTFGQGTKLEIKGGGGSGGGGSGGGGSQVQLVQSGAELKKPGASVKVSCKASGYTFTDYYMKWVRQAPGQGLEWIGDIIPSNGATFYNQKFKGRVTITVDKSTSTAYMELSSLRSEDTAVYYCARSHLLRASWFAYWGQGTLVTVSS

SEQ ID NO: 3020 - protein, 238 aa, Artificial Sequence
  Synthetic Polypeptide
DVQITQSPSYLAASPGETITINCRASKSISKDLAWYQEKPGKTNKLLIYSGSTLQSGIPSRFSGSGSGTDFTLTISSLEPEDFAMYYCQQHNKYPYTFGGGTKLEIKRGGGGSGGGGSGGGGSQVQLQQPGAELVRPGASVKLSCKASGYTFTSYWMNWVKQRPDQGLEWIGRIDPYDSETHYNQKFKDKAILTVDKSSSTAYMQLSSLTSEDSAVYYCARGNWDDYWGQGTTLTVSS

SEQ ID NO: 3021 - protein, 240 aa, Artificial Sequence
  Synthetic Polypeptide
EIVLTQSPTSMTASPGEQVTITCRASSSINYMHWYQQKPGASPRPWIYETSKLASGVPDRFSGSASGTSYSLTINNMEAEDAATYYCQQWNYPSWTFGGGTKLELKGGGGSGGGGSGGGGSEVQLVESGGGLVQPGRSLKLSCAASGFTFSDYNMAWVRQAPKKGLEWVATILYDGGRTYYRGSVKGRFTISRDNAKSTLYLRMDSLRSEDTATYYCATHSRGTDYFDYWGQGVMVTVSS

SEQ ID NO: 3022 - protein, 249 aa, Artificial Sequence
  Synthetic Polypeptide
DIVMTQSPSSLAVSEGETVTINCKSSQSFLSSGDGKNYVAWYQYKPGQSPKLLIYWASTRQSGVPDRFIGSGSGTDFTLTISTVQAEDLAIYYCQQYYDTPLTFGSGTKLEIKGGGGSGGGGSGGGGSEVKLQESGPSLVQSSQTLSLTCTVSGFSLTSYHIHWVRQTPGKGLEWMGVMWSDGDTSYNSALKSRLSISRDTSQSQVFLKMNSLQTEDTATYYCARGYYSSYLYLWFAYWGQGTLVTVSS

SEQ ID NO: 3023 - protein, 253 aa, Artificial Sequence
  Synthetic Polypeptide
DVLMTQTPVSLPVSLGGQVSISCRSSQSLVHSDGDTYLHWYLQKPGQSPQLLIYRVSNRFSGVPDRFSGSGSGTDFTLKISRVEPEDLGLYYCLQTTHFPPWTFGGGTKLEMKGGGGSGGGGSGGGGSQVQLQQSGPELRRPGSSVRLSCKASGYRIKDFLIHWIKNRPEHGLEWIGWIDPEDGETKYAQKFQTKATLTADTSSNTAYMQLSSLTSEDTATYFCARWGDVYYGLMRGHVMDAWGQGTSVTVSS

SEQ ID NO: 3024 - protein, 249 aa, Artificial Sequence
  Synthetic Polypeptide
DIVMTQAAPSIPVTPGESVSISCRSSKSLLNSNGNTYLYWFLQRPGQSPQLLIYRMSNLASGVPDRFSGSGSGTAFTLRISRVEAEDVGVYYCMQHLEYPFTFGAGTKLELKRGGGGSGGGGSGGGGSEVQLQQSGPELIKPGASVKMSCKASGYTFTSYVMHWVKQKPGQGLEWIGYINPYNDGTKYNEKFKGKATLTSDKSSSTAYMELSSLTSEDSAVYYCARGTYYYGSRVFDYWGQGTTLTVSS

SEQ ID NO: 3025 - protein, 249 aa, Artificial Sequence; identical to SEQ ID NO: 3024
  Synthetic Polypeptide

SEQ ID NO: 3026 - protein, 267 aa, Artificial Sequence
  Synthetic Polypeptide
INIYNAEPANPSEKNSPEFDIVMTQSPATLSLSPGERATLSCRSSKSLQNVNGNTYLYWFQQKPGQSPQLLIYRMSNLNSGVPDRFSGSGSGTEFTLTISSLEPEDFAVYYCMQHLEYPITFGAGTKLEIKGGGGSGGGGSGGGGSEVQLVESGGGLVKPGGSLKLSCAASGYTFTSYVMHWVRQAPGKGLEWIGYINPYNDGTKYNEKFQGRVTISSDKSISTAYMELSSLRSEDTAMYYCARGTYYYGTRVFDYWGQGTLVTVSS

SEQ ID NO: 3027 - protein, 244 aa, Artificial Sequence
  Synthetic Polypeptide
DIQMTQSPSSLSASVGDRVTITCKASDHINNWLAWYQQKPGQAPKLLIYGATTLETGVPSRFSGSGSGTDYTLTISSLQPEDFATYYCQQSWNTPWTFGQGTKLEIKRGGGGSGGGGSGGGGSQVQLQQPGAELVKPGASVKMSCKASGYAFSSYWINWMKQKPGQGLEWIGQIYPGDGDTNYNGKFKGRATLTADTSSSTAYMQLSSLTSEDSAVYFCARSITTVVGCAMDYWGQGTSVTVSS

SEQ ID NO: 3028 - protein, 246 aa, Artificial Sequence
  Synthetic Polypeptide
QIVLSQSPAILSASPGEKVTMTCRASSSVSYMHWYQQKPGSSPKPWIYATSNLASGVPARFSGSGSGTSYSFTISRVEAEDAATYYCQQWTFNPPTFGGGTRLEIKRTVAAGGGGSGGGGSGGGGSQAYLQQSGAELVRPGASVKMSCKASGYTFTSYNMHWVKQTPRQGLEWIGGIYPGNGDTSYNQKFKGKATLTVGKSSSTAYMQLSSLTSEDSAVYFCARYDYNYAMDYWGQGTSVTVSSAS

SEQ ID NO: 3029 - protein, 245 aa, Artificial Sequence
  Synthetic Polypeptide
DEIVLTQSPATLSLSPGERATLSCRASQSVSSYLAWYQQKPGQAPRLLIYDASNRATGIPARFSGSGSGTDFTLTISSLEPEDFAVYYCQQRSNWPITFGQGTRLEIKGGGGSGGGGSGGGGSEVQLVESGGGLVQPDRSLRLSCAASGFTFHDYAMHWVRQAPGKGLEWVSTISWNSGTIGYADSVKGRFTISRDNAKNSLYLQMNSLRAEDTALYYCAKDIQYGNYYYGMDVWGQGTTVTVSS

SEQ ID NO: 3030 - protein, 239 aa, Artificial Sequence
  Synthetic Polypeptide
DIQMTQSPSSLSASVGDRVTINCKASQDINSYLSWFQQKPGKAPKTLIYRANRLVDGVPSRFSGSGSGQDYTLTISSLQPEDFATYYCLQYDEFPLTFGGGTKVEIKGGGGSGGGGSGGGGSQVQLVQSGAEVKKPGASVKVSCKASGYTFTNYDINWVRQAPGQGLEWIGWIYPGDGSTKYNEKFKAKATLTADTSTSTAYMELRSLRSDDTAVYYCASGYEDAMDYWGQGTTVTVSS

SEQ ID NO: 3031 - protein, 241 aa, Artificial Sequence
  Synthetic Polypeptide
DIVMTQTPLSLSVTPGQPASISCKSSQSLLDGDGKTYLNWLLQKPGQSPQRLIYLVSKLDSGVPDRFSGSGSGTDFTLKISRVEAEDVGVYYCWQGTHFPRTFGQGTKLEIKGGGGSGGGGSGGGGSQVQLVQSGAEVKKPGASVKVSCKASGYTFKDTYIHWVRQAPGQGLEWMGRIDPANGNTKYDPKFQGRVTMTRDTSISTAYMELSRLRSDDTAVYYCARRGGVDWGQGTLVTVSS

SEQ ID NO: 3032 - protein, 242 aa, Artificial Sequence
  Synthetic Polypeptide
DIQMTQSPSSLSASVGDRVTITCKASQDVSTAVAWFQQKPGKAPKLLIYSPSYRYTGVPSRFSGSGSGTDFTLTISSLQPEDFTYYCQQLYSTPYTFGQGTKVEIKGGGGSGGGGSGGGGSEVQLVQSGAEVKKPGASVKVSCKASGYTFTDYYLDVVVRQAPGQGLEWIGRVNPYNGGTIYNQKFKGRVTLTRDTSTSTAYLELSSLRSEDTAVYYCARDHYRYDPLLDYWGQGTLVTVSS

SEQ ID NO: 3033 - protein, 248 aa, Artificial Sequence
  Synthetic Polypeptide
DIQMTQSPSSLSASVGDRVTITCRASQSVSTSSYNYMHWYQQKPGKPPKLLIKYASNLESGVPSRFSGSGSGTDFTLTISSLQPEDFATYYCQHSWEIPLTFGQGTKVEIKGGGGSGGGGSGGGGSEVQLVQSGAEVKKPGASVKVSCKASGYSFTDYYMHWVRQAPGQGLEWIGRINPYNGAAFYSQNFKDRVTLTVDTSTSTAYLELSSLRSEDTAVYYCAIERGADLEGYAMDYWGQGTLVTVSS

SEQ ID NO: 3034 - protein, 246 aa, Artificial Sequence
  Synthetic Polypeptide
EIVLTQSPATLSASPGERVTLTCRASSNVISSYVHWYQQKPGSSPRLFLYSTSNLASGVPSRFSGSGSGTDFTFTISSLEAEDAATYYCQQYSGYPLTFGQGTRLEIKGGGGSGGGGSGGGGSQVQLQESGPGLVKPSETLSLTCAVSGYSITSAYYWNWIRQPPGKGLEWIGYISYDGRNNYNPSLKNRITINPDTSKNQFSLQLNSVTPEDTAVYYCAREGDYDVGNYYAMDYWGQGTLVTVSS

SEQ ID NO: 3035 - protein, 246 aa, Artificial Sequence
  Synthetic Polypeptide
EIVLTQSPATLSLSPGERATLSCRASSNVISSYVHWYQQKPGQAPRLLIYSTSNLASGIPARFSGSGSGTDFTLTISSLEPEDFAVYYCQQYSGYPLTFGQGTRLEIKGGGGSGGGGSGGGGSEVQLVESGGGLVQPGRSLRLSCAASGYSITSAYYWNWVRQAPGKGLEWVSYISYDGRNNYNPSLKNRFTISRDNAKKSLYLQMNSLRAEDTALYYCAKEGDYDVGNYYAMDYWGQGTTVTVSS

SEQ ID NO: 3036 - protein, 255 aa, Artificial Sequence
  Synthetic Polypeptide
DVVMTQTPLSLPVSLGDQASISCRSSQSLVHSNGNTYLRWYLQKPGQSPKVLIYKVSNRVSGVPDRFSGSGSGTDFTLKINRVEAEDLGVYFCSQSTHVPWTFGGGTKLEIKSSADDAKKDAAKKDDAKKDDAKKDGGVKLDETGGGLVQPGGAMKLSCVTSGFTFGHYWMNWVRQSPEKGLEWVAQFRNKPYNYETYYSDSVKGRFTISRDDSKSSVYLQMNNLRVEDTGIYYCTGASYGMEYLGQGTSVTVST

SEQ ID NO: 3037 - protein, 251 aa, Artificial Sequence
  Synthetic Polypeptide
QVQLVESGGNLVQPGGSLRLSCAASGFTFGSFSMSWVRQAPGGGLEWVAGLSARSSLTHYADSVKGRFTISRDNAKNSVYLQMNSLRVEDTAVYYCARRSYDSSGYWGHFYSYMDVWGQGTLVTVSGGGGSGGGGSGGGGSSVLTQPSSVSAAPGQKVTISCSGSTSNIGNNYVSWYQQHPGKAPKLMIYDVSKRPSGVPDRFSGSKSGNSASLDISGLQSEDEADYYCAAWDDSLSEFLFGTGTKLTVLG

SEQ ID NO: 3038 - protein, 242 aa, Artificial Sequence
  Synthetic Polypeptide
QSVVTQPPSVSGAPGQRVTISCTGSSSNIGAGYDVHWYQQLPGTAPKLLIYGNSNRPSGVPDRFSGSKSGTSASLAITGLQAEDEADYYCQSYDSSLSGSYVFGTGTKLTVLGGGGGSGGGGSGGGGSEVQLVETGGNLVQPGASLRLSCAASGFSFSGTAMHWVRQAPGKGLEWVSTISSTGRSTYYRDSVKGRFTISRDNSKNTLYLQMNSLRGEDTAVYYCARVSFDYWGQGTLVTVSS

SEQ ID NO: 3039 - protein, 244 aa, Artificial Sequence
  Synthetic Polypeptide
QSVVTQPASVSGSPGQSITISCTGTSSDVGGYNYVSWYQQHPGKAPKLMIYDVSKRPSGVSNRFSGSKSGNTASLTISGLQAEDEADYYCSSYTSSSTLVFGGGTKLTVLGGGGGSGGGGSGGGGSEVQLVESGGAFVQPGGSLRLSCAASGFTFSSYAMTWVRQAPGKGLEWVSTISGRGRSTFYADSVKGRFTISRDNSKNTLYLQMNSLRAEDTAVYYCARYYHAGAFDLWGQGTLVTVSS

SEQ ID NO: 3040 - protein, 246 aa, Artificial Sequence
  Synthetic Polypeptide
DVVMTQSPSSLSASVGDRVTITCQSSLDISHYLNWYQQKPGKAPKLLIYDASNLETGVPSRFSGSGSGTHFTFTISSLQPEDFATYYCQQYDNLPLTFGGGTKLEIKRGGGGSGGGGSGGGGSQVQLVQSGGGVVQPGGSLRVSCAASGVTLSDYGMHWVRQAPGKGLEWVAFIRNDGSDKYYADSVKGRFTISRDNSEKTVSLQMSSLRAEDTAVYYCAKNGESGPLDYWYLDLWGRGTLVTVSS

SEQ ID NO: 3041 - protein, 253 aa, Artificial Sequence
  Synthetic Polypeptide
DVMLTQTPLSLPVSLGDQASISCRSSQSILHSTGDTYLEWYLQKPGQSPKLLINKVSNRLSGVPDRFSGSGSGTDFTLKISRVEAEDLGVYYCFQGSHVPWTFGGGTKLEIKRADAAPTVSIFPGGGGSGGGGSGGGGSQVKLQQSGPSLVKPGASVKMSCKASGYTFTDFYMKWVKQSHGKSLEWIGDINPNIGDTFYNQKFKGKATLTVDKSSSTAYMQLNSLTSEDSAVYFCSVGYFDVWGAGTTVTVSS

SEQ ID NO: 3042 - protein, 253 aa, Artificial Sequence
  Synthetic Polypeptide
LPVLTQPPSVSVAPGKTARITCGGNNIGSKSVHWYQQKPGQAPVLVVYDDSDRPSGIPERFSGSNSGNTATLTISRVEAGDEADYYCQVWDSSSDYVVFGGGTKLTVLGGGGSGGGGSGGGGSEVQLVQSGAEVKKPGESLKISCKGSGYSFTSYWIGWVRQMPGKGLEWMGIIYPGDSDTRYSPSFQGQVTISADKSISTAYLQWSSLKASDTAMYYCARQVWGWQGGMYPRSNWWYNLDSWGQGTLVTVSS

SEQ ID NO: 3043 - protein, 246 aa, Artificial Sequence
  Synthetic Polypeptide
ELVMTQSPASLAVSLGQRATISCRASESVDSYGKSFMHWYQLKPGQPPKLLIYRASNLESGVPARFSGSGSRTDFTLTIDPVEADDAATYYCQQNNEDPWTFGGGTKLEIKGGGGSGGGGSGGGGSEVQLEQSGPELVKPGASVKMSCKASGYTFTNYYMKWVKQSHGKSLEWIGDLNPNNGDTFYNQKFKGKATLTVDKSSNTAYMQLNSLTSEDSAVYYCARTGRYEENAMDYWGQGTSVTVSS

SEQ ID NO: 3044 - protein, 244 aa, Artificial Sequence; identical to SEQ ID NO: 3017
  Synthetic Polypeptide

SEQ ID NO: 3045 - protein, 244 aa, Artificial Sequence; identical to SEQ ID NO: 2926
  Synthetic Polypeptide

SEQ ID NO: 3046 - protein, 240 aa, Artificial Sequence
  Synthetic Polypeptide
DVVMTQSPSSLSASVGDRVTITCMASEDIYIRLAWYQQKPGNAPKLLIYAATSLETGVPSRFSGSGSGTDFTLTISSLQPEDFATYYCQQYWSSPWTFGGGTKVEIKGGGGSGGGGSGGGGSQVQLQESGPGLVKPSQTLSLTCTVSGYSITSDYTWNWIRQPPGNGLEWIGYITYSGSTSYNPSLKSRVLISVDTSKNQVSLKLSSVTAADTAVYYCARLGRRYTMDYWGQGTTVTVSS

SEQ ID NO: 3047 - protein, 245 aa, Artificial Sequence
  Synthetic Polypeptide
EVQLVESGGGLVQPGRSLRLSCAASGFTFDDYAMHWVRQAPGKGLEWVSGISWNSGSIGYADSVKGRFTISRDNAKNSLYLQMNSLRAEDTALYYCAKDKGGGYYDFWSGSDYWGQGTLVTVSSGGGGSGGGGSGGGGSSSELTQDPAVSVALGQTVRITCQGDSLRSYYASWYQQKPGQAPVLVIYGKNNRPSGIPDRFSGSSSGNTASLTITGAQAEDEADYYCNSRDSSGWVFGGGTKLTVL

SEQ ID NO: 3048 - protein, 254 aa, Artificial Sequence
  Synthetic Polypeptide
EVQLQQSGPGLVKPSQTLSLTCAISGDSVLSNSDTWNWIRQSPSRGLEWLGRTYHRSTWYDDYASSVRGRVSINVDTSKNQYSLQLNAVTPEDTGVYYCARDRLQDGNSWSDAFDVWGQGTMVTVSSGGGGSGGGGSGGGGSQSALTQPASVSGSPGQSITISCTGTSSDVGGYNYVSWYQQHPGKAPKLMIYDVSNRPSGVSNRFSGSKSGNTASLTISGLQAEDEADYYCSSYTSSSTLVYVFGTGTKVTVL

SEQ ID NO: 3049 - protein, 252 aa, Artificial Sequence
  Synthetic Polypeptide
QVQLVQSGAEVKKPGASVKVSCKASGYTFTSYDINWVRQATGQGLEWMGWMNPNSGNTGYAQKFQGRVTMTRNTSISTAYMELSSLRSEDTAVYYCARGDSNYWSYYGMDVWGQGTLVTVSSGGGGSGGGGSGGGGSGGGGSQSVLTQPRSVSGSPGQSVTISCTGTSSDVGGYNYVSWYQQHPGEAPKLIIYDADKRPSGISNRFSSGKSGNTASLTISGLQVEDEADYYCCSYAGGSTWVFGGGTKVTVL

SEQ ID NO: 3050 - protein, 254 aa, Artificial Sequence
  Synthetic Polypeptide
EVQLQQSGPGLVKPSQTLSLTCAISGDSVSSNSAAWNWIRQSPSRGLEWLGRTYYRSKWYSDYAVSVKSRITINPDTSKNQFSLQLNSVTPEDTAVYYCARDPYDFWSGYPDAFDIWGQGTMVTVSSGGGGSGGGGSGGGGSQSALTQPASVSGSPGQSITISCTGTSSDVGGYNYVSWYQQHPGKAPKVIISEVNNRPSGVSHRFSGSKSGNTASLTISGLQAEDEADYFCSSYTSGRTLYVFGTGSKVTVLG

SEQ ID NO: 3051 - protein, 253 aa, Artificial Sequence
  Synthetic Polypeptide
EVQLQQSGPGLVKPSQTLSLTCAISGDSMLSNSDTWNWIRQSPSRGLEWLGRTYHRSTWYDDYASSVRGRVSINVDTSKNQYSLQLNAVTPEDTGVYYCARVRLQDGNSWSDAFDVWGQGTMVTVSSGGGGSGGGGSGGGGSQSALTQPASASGSPGQSVTISCTGTSSDVGGYNYVSWYQQHPGKAPKLMIYDVSNRPSGVSNRFSGSKSGNTASLTISGLQAEDEADYYCSSYTSSSTLYVFGTGTQLTVL

SEQ ID NO: 3052 - protein, 244 aa, Artificial Sequence
  Synthetic Polypeptide
EIVLTQSPATLSLSPGERATLSCSASSSVSYMYWYQQKPGQAPRLLIYRTSNLASGIPARFSGSGSGTDFTLTISSLEPEDFAVYYCQQYHSYPTTFGQGTKVEIKRTVGGGGSGGGGSGGGGSEVQLVESGGGLVQPGGSLRLSCAASGFSFNTYAMNWVRQAPGKGLEWVSHIRSKSNNFATYYADSVKDRFTISRDNAKNSLYLQMNSLRAEDTAVYYCARQGGDFPMDYWGQGTLVTVSS

SEQ ID NO: 3053 - protein, 240 aa, Artificial Sequence
  Synthetic Polypeptide
DVVMTQSPSSLSASVGDRVTITCKASEDIYIRLAWYQQKPGKAPKLLIYAATSLETGVPSRFSGSGSGTDFTLTISSLQPEDFATYYCQQYWTTPWTFGGGTKVEIKGGGGSGGGGSGGGGSQVQLQESGPGLVKPSQTLSLTCTVSGYSITIDYTWNWIRQPPGKGLEWIGYITYSGSTDYNPSLKSRVLISVDTSKNQVSLKLSSVTAADTAVYYCARLGRRYALDYWGQGTTVTVSS

SEQ ID NO: 3054 - protein, 245 aa, Artificial Sequence
  Synthetic Polypeptide
DIQLTQSPSFLSASVGDRVTITCRASQGISTDLNWYQQKPGKAPKLLIYAASNLESGVPSRFSGSGSGTEFTLTISSLQPEDFATYYCQQSYNWPYTFGGGTKVEIKRGGGGSGGGGSGGGGSEVQLVESGGGLVKPGGSLRLSCAASGFTFSNFEMNWVRQAPGKGLEWVSGISSNGRYINYADSVKGRFTISRDNAKNSLYLQMNSLRAEDTAVYYCARVVDFDQDYNGFDYWGQGTLVTVSS

SEQ ID NO: 3055 - protein, 243 aa, Artificial Sequence
  Synthetic Polypeptide
DIQLTQSPSFLSASVGDRVTITCSLSLGISTWRDWFPPRLGRGLEPLTYAASTLQSGVPSRFSGSGSGTEFTLTISSLQPEDFATYYCQQLNSYPLTFGGGTKVEIKRGGGGSGGGGSGGGGSEVQLVESGGGLVKPGGSLRLSCAASGFTFSTYGMSWVRQAPGKGLEWVAYINNGSGYIYYADSVKGRFTISRDNAKNSLYLQMNSLRAEDTAVYYCARGQWWSGGDFDYWGQGTLVTVSS

SEQ ID NO: 3056 - protein, 245 aa, Artificial Sequence
  Synthetic Polypeptide
DIQMTQTTSSLSASLGDRVTISCRASQDISNYLNWYQQKPDGTVKLLIYYTSILHSGVPSRFSGSGSGTDYSLTISNLEQEDFATYFCQQGNTLPWTFGGGTKLEIKAGGGGSGGGGSGGGGSEVQLVESGGGLVKPGGSLKLSCAASGFAFSIYDMSWVRQTPEKRLEWVAYISSGGGTYYPDTVKGRFTISRDNAKNTLYLQMSSLKSEDTAMYYCARHSGYGTHWGVLFAYWGQGTLVTVSA

SEQ ID NO: 3057 - protein, 255 aa, Artificial Sequence
  Synthetic Polypeptide
DIVMTQSPDSLAVSLGERATINCKSSQSLLYRSNQKNYLAWYQQKPGQPPKLLIYWASTRESGVPDRFSGSGSGTDFTLTISSLQAEDVAVYYCQQYYNYPRTFGQGTKVEIKRTVGGGGSGGGGSGGGGSEVQLLESGGGLVQPGGSLRLSCAASGYSITSDYAWNWVRQAPGKGLEWVSYISNSGSTSYNPSLKSRFTISRDNSKNTLYLQMNSLRAEDTAVYYCAKERNYDYDDYYYAMDYWGQGTLVTVSS

SEQ ID NO: 3058 - protein, 248 aa, Artificial Sequence
  Synthetic Polypeptide
DVVMTQSPLSLPVTLGQPASISCRSSQSLLHSSGNTYLEWYQQRPGQSPRPLIYKISTRFSGVPDRFSGSGSGTDFTLKISRVEAEDVGVYYCFQGSHVPYTFGGGTKVEIKRGGGGSGGGGSGGGGSQVQLVQSGAEVKKPGASVKVSCKASGLTIEDYYMHWVRQAPGQGLEWMGWIDPENGDTEYGPKFQGRVTMTRDTSINTAYMELSRLRSDDTAVYYCAVHNAHYGTWFAYWGQGTLVTVSS

SEQ ID NO: 3059 - protein, 240 aa, Artificial Sequence
  Synthetic Polypeptide
DIQMTQSPSSLSASVGDRVTITCRASENIYSNLAWYQQKPGKAPKLLIYAATNLADGVPSRFSGSGSGTDFTLTISSLQPEDFATYYCQHFWGTPTFGQGTKVEIKRTVGGGGSGGGGSGGGGSEVQLVESGGGLVQPGGSLRLSCAASGFSLTNYGVHWVRQAPGKGLEWVSVIWSGGSTDYNAAFISRFTISADTSKNTAYLQMNSLRAEDTAVYYCARELIHAMDNWGQGTLVTVSS

SEQ ID NO: 3060 - protein, 247 aa, Artificial Sequence
  Synthetic Polypeptide
DFVMTQSPLSLPVTPGEPASISCRSSQSIVHSNGNTYLEWYLQKPGQSPQLLIYKVSNRFSGVPDRFSGSGSGTDFTLKISRVEAEDVGVYYCFQGSHVPLTFGQGTKLEIKRGGGGSGGGGSGGGGSEVQLVESGAEVKKPGASVKVSCKASGYTFTSYWIHWVRQAPGQGLEWMGENDPSNGRTNYNEKFKNRVTLTVDTSISTAYMELSRLRSDDTAVYYCARGPNYFYSMDYWGQGTMVTVSS

SEQ ID NO: 3061 - protein, 240 aa, Artificial Sequence
  Synthetic Polypeptide
DIQLTQSPSFLSASVGDRVTITCSARSSISFMYWYQQKPGKAPKLLIYDTSNLASGVPSRFSGSGSGTEFTLTISSLEAEDAATYYCQQWSSYPLTFGQGTKLEIKGGGGSGGGGSGGGGSQVQLVQSGAEVKKPGASVKVSCKASGYTFTGSWMNWVRQAPGQGLEWIGRIYPGDGETNYNGKFKDRVTITADKSTSTAYMELSSLRSEDTAVYYCARIYGNNVYFDVWGQGTTVTVSS

SEQ ID NO: 3062 - protein, 248 aa, Artificial Sequence
  Synthetic Polypeptide
QLVLTQSPSASASLGSSVKLTCTLSSGHKTDTIDWYQQQPGKAPRYLMKLEGSGSYNKGSGVPDRFSGSSSGADWYLTISSLQSEDEADYYCGTDYPGNYLFGGGTQLTVLGGGGGSGGGGSGGGGSQEQLVESGGGLVQPGGSLRLSCAASGFTFSDYYMSWIRQAPGKGLEWVATIYPSSGKTYYADSAKGRLTISSDNAKDSLYLQMNSLRAEDTAVYYCTRDSYADDAALFDIWGQGTTVTVSS

SEQ ID NO: 3063 - protein, 243 aa, Artificial Sequence
  Synthetic Polypeptide
DIVLTQSPPSLAMSLGKRATISCRASESVTILGSHLIHWYQQKPGQPPTLLIQLASNVQTGVPARFSGSGSRTDFTLTIDPVEEDDVAVYYCLQSRTIPRTFGGGTKLEIKGGGGSGGGGSGGGGSQIQLVQSGPELKKPGETVKISCKASGYTFTDYSINWVKRAPGKGLKWMGWINTETREPAYAYDFRGRFAFSLETSASTAYLQINNLKYEDTATYFCALDYSYAMDYWGQGTSVTVSS

SEQ ID NO: 3064 - protein, 247 aa, Artificial Sequence
  Synthetic Polypeptide
QVQLQESGPGLVKPSQTLSLTCTVSGGSISSGGFYWSWIRQHPGKGLEWIGYIHHSGSTHYNPSLKSRVTISIDTSKNLFSLRLSSVTAADTAVYYCASLVYCGGDCYSGFDYWGQGTLVTVSSGGGGSGGGGSGGGGSDIQLTQSPSSLSASVGDRVSFTCQASQDINNFLNWYQQKPGKAPKLLIYDASNLETGVPSRFSGSGSGTDFTFTISSLQPEDIATYYCQQYGNLPFTFGGGTKVEIKR

SEQ ID NO: 3065 - protein, 245 aa, Artificial Sequence
  Synthetic Polypeptide
QVQLQESGPGLVKPSETLSLTCTVSGGSISSYYWSWIRQPPGKGLEWIGYIYYSGSTNYNPSLKSRVTISVDTSKNQFSLKLSSVTAADTAVYYCVSLVYCGGDCYSGFDYWGQGTLVTVSSGGGGSGGGGSGGGGSDIQLTQSPSSLSASVGDRVSFTCQASQDINNFLNWYQQKPGKAPKLLIYDASNLETGVPSRFSGSGSGTDFTFTISSLQPEDIATYYCQQYGNLPFTFGGGTKVEIKR

SEQ ID NO: 3066 - protein, 250 aa, Artificial Sequence
  Synthetic Polypeptide
QVTLKESGPVLVKPTETLTLTCTVSGFSLINARMGVSWIRQPPGKALEWLAHIFSNAEKSYRTSLKSRLTISKDTSKSQVVLTMTNMDPVDTATYYCARIPGYGGNGDYHYYGMDVWGQGTTVTVSSGGGGSGGGGSGGGGSDIQMTQSPSSLSASLGDRVTITCRASQGIRNDLGWYQQKPGKAPKRLIYASSTLQSGVPSRFSGSGSGTEFTLTISSLQPEDFATYYCLQHNNFPWTFGQGTKVEIKR

SEQ ID NO: 3067 - protein, 244 aa, Artificial Sequence
  Synthetic Polypeptide
QIQLVESGGGVVQPGRSLRLSCVASGFTFKNYGMHWVRQAPGKGLEWVAVIWYDGSNEYYGDPVKGRFTISRDNSKNMLYLQMNSLRADDTAVYYCARSGIAVAGAFDYWGQGTLVTVSSGGGGSGGGGSGGGGSEIVLTQSPDTLSLSPGEKATLSCRASQSVSSSFLAWYQQKPGQAPSLLIYVASRRAAGIPDRFSGSGSGTDFTLTISRLEPEDFGMFYCQHYGRTPFTFGPGTKVDIKR

SEQ ID NO: 3068 - protein, 245 aa, Artificial Sequence
  Synthetic Polypeptide
DIQLTQSPSFLSASVGDRVTITCRASQGISSYLAWYQQKPGKAPKLLIYAASTLQSGVPSRFSGSGSGTEFTLTISSLQPEDFATYYCQQVNSYPLTFGGGTKVEIKRGGGGSGGGGSGGGGSQLQLQESGPGLVKPSETLSLTCTVSGGSISSSTYYWGWIRQPPGKGLEWIGSIYFTGSTDYNPSLKSRVSISVDTSKNQFSLKLSSVTAADTAVYYCAKEDDSSGYYSFDYWGQGNLVTVSS

SEQ ID NO: 3069 - protein, 248 aa, Artificial Sequence
  Synthetic Polypeptide
QSALTQPRSVSGSPGHSVTISCTGTSSDVGDYNYVSWYQQRPGKVPKLLIYDVSKRPSGVPDRFSGSKSGNTASLTISGLQAEDEAIYFCASYAGNYNVVFGGGTKLTVLGQGGGGSGGGGSGGGGSQVQLVQSGSELKKPGASVKVSCKASGYTFNTYAMNWVRQAPGQGLEWMGWINTNTGNPTYAQGFTGRFVFSLDTSVSTAYLQISSLKAEDTAVYYCARRYFDWLLGAFDIWGQGTMVTVSS

SEQ ID NO: 3070 - protein, 240 aa, Artificial Sequence
  Synthetic Polypeptide
DIQMTQSPSSLSASVGDRVTITCSASQGINNYLNWYQQKPGKAPKLLIHYTSGLHAGVPSRFSGSGSGTDYTLTISSLQPEDVATYYCQQYSILPWTFGGGTKVEIKRGGGGSGGGGSGGGGSQVQLVQSGAEVKKPGSSVKVSCKASGYAFSSSWMNWVRQAPGQGLEWMGRIYPGDGNTHYAQKFQGRVTLTADKSTSTAYMELSSLRSEDTAVYYCGEGYLDPMDYWGQGTLVTVSS

SEQ ID NO: 3071 - protein, 243 aa, Artificial Sequence
  Synthetic Polypeptide
EVQLVESGGGLVQPGGSLRLSCAASGYTFTTYWMHWVRQAPGKGLEWVGYIRPSTGYTEYNQKFKDRFTISADTSKNTAYLQMNSLRAEDTAVYYCARSRWLLDYWGQGTLVTVSGGGGSGGGGSGGGGSDIQMTQSPSSLSASVGDRVTITCKSSQSVLYSSNQKNYLAWFQQKPGKAPKLLIYWASTRESGVPSRFSGSGSGTDFTLTISSLQPEDFATYFCHQYLSSYTFGQGTKVEIKR

SEQ ID NO: 3072 - protein, 240 aa, Artificial Sequence
  Synthetic Polypeptide
DIQMTQSPSSLSASVGDRVTITCRASQDISNYLNWYQQKPGKAPKLLIYYTSRLHSGVPSRFSGSGSGTDFTLTISSLQPEDFATYYCQQGNTLPYTFGQGTKVEIKRGGGGSGGGGSGGGGSEVQLVESGGGLVQPGGSLRLSCAASGFTFSDYFMSWVRQAPGKGLEWVATISNGGTYTYYPDSVKGRFTISRDNSKNTLYLQMNSLRAEDTAVYYCARFDGYIFDYWGQGTLVTVSS

SEQ ID NO: 3073 - protein, 247 aa, Artificial Sequence
  Synthetic Polypeptide
DIQMTQSPSSLSASVGDRVTITCTASSRVSSSYLHWFQQKPGKAPKLLIYSTSNLASGVPSRFSGSGSGTDFTLTISSLQPEDFATYYCHQYHRSPYTFGQGTKVEIKRGGGGSGGGGSGGGGSEVQLVESGGGLVQPGGSLRLSCAASGYAFSNSWINWVRQAPGKGLEWVGQIYPGDYDTNYNGKFKGRFTISRDKSKNTAYLQMNSLRAEDTAVYYCARGGSIYYGNLGFFDVWGQGTLVTVSS

SEQ ID NO: 3074 - protein, 237 aa, Artificial Sequence
  Synthetic Polypeptide
DIQMTQSPSSLSASVGDRVTITCSASSSVTYMYWYQQKPGKAPKLLIYDTSNLASGVPSRFSGSGSGTDYTLTISSLQPEDFATYYCQQWSNYPLTFGQGTKVEIKGGGGSGGGGSGGGGSQVQLVQSGAEVKKPGASVKVSCKASGYSFIEYTINWVRQAPGQGLEWIGNIDPYYGTTYYNQMFTGRATLTVDTSISTAYMELSRLRSDDTAVYYCARGSAWFPYWGQGTLVTVSS

SEQ ID NO: 3075 - protein, 237 aa, Artificial Sequence
  Synthetic Polypeptide
EIVLTQSPSSLSASVGDRVTITCRASENIYSYLAWYQQKPGKAPKLLIYNTKTLGEGVPSRFSGSGSGTDFTLTISSLQPEDFATYYCQHHYGTPFTFGPGTKVDIKGGGGSGGGGSGGGGSQVQLVQSGAEVKKPGASVKVSCKASGYTFSDYWVHWVRQAPGQGLEWMGAIDGSDTFNDYSQKFKGRVTMTRDTSISTAYMELSRLRSDDTAVYYCARGGLLQYWGQGTLVTVSS

SEQ ID NO: 3076 - protein, 241 aa, Artificial Sequence
  Synthetic Polypeptide
QVQLQQSGPELVKPGASVKISCKASGYAFSSSWMNWVKQRPGKGLEWIGRIYPGDEDTNYSGKFKDKATLTADKSSTTAYMQLSSLTSEDSAVYFCARSLLYGDYLDYWGQGTTLTVSSGGGGSGGGGSGGGGSQIVLTQSPAIMSASPGEKVTMTCSASSSVSYMHWYQQKSGTSPKRWIYDTSKLASGVPDRFSGSGSGTSYFLTINNMEAEDAATYYCQQWNINPLTFGAGTKLELKR

SEQ ID NO: 3077 - protein, 244 aa, Artificial Sequence
  Synthetic Polypeptide
DIQMTQSSAYLSVSLGGRVTITCKASDHINNWLAWYQHKPGNAPRLLISGATTLETGVPSRFSGSGSGKDYTLSITSLQTEDVATYYCQQSWNTPWTFGGGTKLEIKRGGGGSGGGGSGGGGSQVQLQQSGAELVRPGSSVKISCKASGYAFSSYWVNWMKQRPGQGLEWIGQIYPGDGDTNYNGKFKGRATVTADKSSSTSYMQFSSLTSEDSAVYFCARSITTVVGCAMDYWGQGTSVTVSS

SEQ ID NO: 3078 - protein, 243 aa, Artificial Sequence
  Synthetic Polypeptide
EVQLLESGGGLVQPGGSLRLSCAASGFTFSSYAMSWVRQAPGKGLEWVSVISGSGGRPNYADSVKGRFTISRDNSKNTLYLQMNSLRDEDTAVYYCAKVDYSNYLFFDYWGQGTLVTVSSGGGGSGGGGSGGGGSEIVLTQSPGTLSLSPGEGATLSCRAGQSVRSSYLGWYQQKPGQAPRLLIYGASSRATGIPDRFSGSGSGTDFTLTISRLEPEDFAVYYCQQYGYSPPTFGGGTKLEIK

SEQ ID NO: 3079 - protein, 246 aa, Artificial Sequence
  Synthetic Polypeptide
DIVLTQSPPSLAMSLGKRATISCRASESVTILGSHLIHWYQQKPGQPPTLLIQLASNVQTGVPARFSGSGSRTDFTLTIDPVEEDDVAVYYCLQSRTIPRTFGGGTKLEIKGSTSGSGKPGSGEGSTKGQIQLVQSGPELKKPGETVKISCKASGYTFTDYSINWVKRAPGKGLKWMGWINTETREPAYAYDFRGRFAFSLETSASTAYLQINNLKYEDTATYFCALDYSYAMDYWGQGTSVTVSS

SEQ ID NO: 3080 - protein, 246 aa, Artificial Sequence
  Synthetic Polypeptide
DIQMTQSPSSLSASVGDRVTITCRASSSVSYMHWYQQKPGKAPKLLIYATSNLASGVPSRFSGSGSGTDFTLTISSLQPEDFATYYCQQWTFNPPTFGQGTKLEIKRTVAAGGGGSGGGGSGGGGSQVQLVQSGAEVKKPGASVKVSCKASGYTFTSYNMHWVRQAPGQRLEWMGGIYPGNGDTSYNQKFKGRVTITRDTSASTAYMELSSLRSEDTAVYYCARYDYNYAMDYWGQGTLVTVSSAS

SEQ ID NO: 3081 - protein, 241 aa, Artificial Sequence
  Synthetic Polypeptide
EIVLTQSPGTLSLSPGERATLSCRASQSVSSSYLAWYQQKPGQAPRLLIYGASSRATGIPDRFSGSGSGTDFTLTISRLEPEDFAVYYCQQYHHSPLTFGGGTKVEIKRGGGGSGGGGSGGGGSEVQLVESGGGLVQPGGSLRLSCAASGFTFSGRSMNWVRQAPGKGLEWVSYISSDSRTIYYADSVKGRFTISRDNAKNSLYLQMNSLRAEDTAVYYCARGGHGYFDLWGRGTLVTVSS

SEQ ID NO: 3082 - protein, 244 aa, Artificial Sequence
  Synthetic Polypeptide
EIVLTQSPGTLSLSPGERATLSCRASQSVSSDYLAWYQQKPGQAPRLLIYGASRRATGIPDRFSGSGSGTDFTLTISRLEPEDFAVYYCQQYVSYWTFGGGTKVEIKRGGGGSGGGGSGGGGSQVQLVESGGGVVQPGRSLRLSCAASGFTFSSYGMHWVRQAPGKGLEWVAGIWWDGSNEKYADSVKGRFTISRDNSKNTLYLQMNSLRAEDTAVYYCAKEAPYYAKDYMDVWGKGTTVTVSS

SEQ ID NO: 3083 - protein, 244 aa, Artificial Sequence
  Synthetic Polypeptide
DIQMTQSPSSLSASVGDRVTITCRASQDVNTAVAWYQQKPGKAPKLLIYSASFLYSGVPSRFSGSRSGTDFTLTISSLQPEDFATYYCQQHYTTPPTFGQGTKVEIKRTGGGGSGGGGSGGGGSEVQLVESGGGLVQPGGSLRLSCAASGFNIKDTYIHWVRQAPGKGLEWVARIYPTNGYTRYADSVKGRFTISADTSKNTAYLQMNSLRAEDTAVYYCSRWGGWGFYAMDYWGQGTLVTVSS

SEQ ID NO: 3084 - protein, 239 aa, Artificial Sequence
  Synthetic Polypeptide
QVQLVESGGGLVKPGGSLRLSCAASGFTFSDYYMTWIRQAPGKGLEWISYISSSGSTIYYADSVKGRFTISRDNAKNSLYLQMNSLRAEDTAVYYCARDRNSHFDYWGQGTLVTVSSGGGGSGGGGSGGGGSDIQMTQSPSSVSASVGDRVTITCRASQGITRWLAWYQQKPGKAPKLLIYAASVLQSGVPSRFSGSGSGTDFTLTISSLQPEDFATYYCQQSNSFPRTFGQGTKVEIK

SEQ ID NO: 3085 - protein, 239 aa, Artificial Sequence
  Synthetic Polypeptide
QVQLVESGGGLVKPGGSLRLSCAASGFTFSDHYMSWIRQAPGKGLEWFSYISSSGGIIYYADSVKGRFTISRDNAKNSLYLQMNSLRAEDTAVYYCARDVGSHFDYWGQGTLVTVSSGGGGSGGGGSGGGGSDIQMTQSPSSVSASVGDRVTITCRASQDISRWLAWYQQKPGKAPKLLISAASRLQSGVPSRFSGSGSGTDFTLTISSLQPEDFAIYYCQQAKSFPRTFGQGTKVEIK

SEQ ID NO: 3086 - protein, 251 aa, Artificial Sequence
  Synthetic Polypeptide
QVQLVESGGGVVQSGRSLRLSCAASGFTFRNYGMHWVRQAPGKGLEWVAVIWYDGSDKYYADSVRGRFTISRDNSKNTLYLQMNSLRAEDTAVYYCARDGYDILTGNPRDFDYWGQGTLVTVSSGGGGSGGGGSGGGGSDTVMTQTPLSSHVTLGQPASISCRSSQSLVHSDGNTYLSWLQQRPGQPPRLLIYRISRRFSGVPDRFSGSGAGTDFTLEISRVEAEDVGVYYCMQSTHVPRTFGQGTKVEIK

SEQ ID NO: 3087 - protein, 244 aa, Artificial Sequence
  Synthetic Polypeptide
EVQLVESGGGLVQPGGSLRLSCAASGFPFSSYDMHWVRQATGKGLEWVSAIGTAGATYYPGSVKGRFTISRENAKNSLYLQMNSLRAGDTAVYYCARGDYVWGTYRPLFDYWGQGTLVTVSSGGGGSGGGGSGGGGSDIQLTQSPSFLSASVGDRVTITCWASQGINNYLAWYQQKPGKAPKLLIYAASTLQTGVPSRFSGSGSGTEFTLTISSLQPEDFATYYCQQLNSYPLTFGGGTKVEIK

SEQ ID NO: 3088 - protein, 241 aa, Artificial Sequence
  Synthetic Polypeptide
QVQLQESGPGLVKPSETLSLTCTVSGASISSFYWSWIRQPPGKGLEWIGYIYYSGTTNYNPSLKSRVTISVDTSKNQFSLKLSSVTAADTAVYYCARIAVAGFFFDYWGQGTLVTVSSGGGGSGGGGSGGGGSEIVLTQSPGTLSLSPGERATLSCRASQSVNKNYLAWYQQKPGQAPRLLIYGASSRATGIPDRFSGSGSGTDFTLTISRLEPEDFAVYYCQQYDRSPLTFGGGTKVEIK

SEQ ID NO: 3089 - protein, 250 aa, Artificial Sequence
  Synthetic Polypeptide
QVQLVQSGAEVKKPGASVKVSCKASGYTFTNYYMHWVRQAPGLGLEWMGIINPSDGSTSYAQKFQGRVTMTRDTSTNTVYMDLSSLRSEDTAVYYCARGGNSAFYSYYDMDVWGQGTTVTVSSGGGGSGGGGSGGGGSDVVMTQTPLSLPVTLGQPASISCRSSQSLVYRDGNTYLSWFQQRPGQSPRRLIYKVSNWQSGVPDRFSGGGSGTDFTLKISRVEAEDVGVYYCMQGTHWPPTFGQGTKVEIK

SEQ ID NO: 3090 - protein, 237 aa, Artificial Sequence
  Synthetic Polypeptide
QVQLQQSGPELVKPGASVRISCKASGYTFTTYYIHWVKQRPGQGLEWIGWIYPGNVNTNYNEKFKGKATLTADKSSSTAYMQLTSLTSEDSAVYFCARGVYYFDYWGQGTILTVSSGGGGSGGGGSGGGGSIVMTQTPKFLLVSAGDRVTITCKASQSVNNDVSWFQQKPGQSPTLLIYYASNRYTGVPDRFTGSGYGTDFTFTISTVQAEDLAVYFCQQDYSSPYTFGGGTKLEIK

SEQ ID NO: 3091 - protein, 240 aa, Artificial Sequence
  Synthetic Polypeptide
QVQLQESGPGLVKPSQTLSLTCTVSGGSINNNNYYWTWIRQHPGKGLEWIGYIYYSGSTFYNPSLKSRVTISVDTSKTQFSLKLSSVTAADTAVYYCAREDTMTGLDVWGQGTTVTVSSGGGGSGGGGSGGGGSDIQMTQSPSSLSASVGDRVTITCRASQSINNYLNWYQQKPGKAPTLLIYAASSLQSGVPSRFSGSRSGTDFTLTISSLQPEDFAAYFCQQTYSNPTFGQGTKVEVK

SEQ ID NO: 3092 - protein, 245 aa, Artificial Sequence
  Synthetic Polypeptide
SYELTQPPSVSVSPGQTASITCSGDKLGDKYASWYQQKPGQSPVLVIYQDNRRPSGIPERFSGSNSGNTATLTISGTQAMDEADYYCQAWDSDTYVFGTGTKVTVLGQGGGGSGGGGSGGGGSEVQLVQSGAEVKKPGASVKVSCKASGDTFKRYYVHWVRQAPGQGLEWMGIINPSGVSTTYAQKFQGRVTMTRDTSTSTVYMELSSLRSEDTAVYYCAEVRGSGFNYFGMDVWGQGTLVTVSS

SEQ ID NO: 3093 - protein, 244 aa, Artificial Sequence
  Synthetic Polypeptide
EVQLLESGGGLVQPGGSLRLSCAASGFTFSSYAMSWVRQAPGKGLEVVVSAISGGGGRTYYADSVKGRFTISRDNSKNTLYLQMNSLRAEDTAVYYCAREEMAFRAYRFDIWGQGTLVTVSSGGGGSGGGGSGGGGSDIQMTQSPSSLSASVGDRVTITCRASQSISSYLNWYQQKPGKAPKLLIYAASSLQSGVPSRFSGSGSGTDFTLTISSLQPEDFATYYCQQSYITPLTFGGGTKVEIK

SEQ ID NO: 3094 - protein, 252 aa, Artificial Sequence
  Synthetic Polypeptide
DIVLTQSPASLAVSLGQGATISCRASKSVSTSGYTYMHWYQQKPGQPPKLLIYLASNLESGVPARFSGSGSGTDFTLNIHPVEEEDAATYYCQHSGELPPSFGGGTKLEIKRAGGGGSGGGGSGGGGSEVQLVESGGDLVKPGGSLKLSCAVSGFTFSSYGMSWVRQTPDKRLEWVATVSSGGTYTYYPDSVKGRFTISRDNAKNTLYLQMSSLKSEDSAMYYCARHRGNYYATYYYAMDYWGQGTSVTVSS

SEQ ID NO: 3095 - protein, 246 aa, Artificial Sequence
  Synthetic Polypeptide
DIQMTQSPSSLSASVGDRVTITCSASQGIRNYLNWYQQKPGKVPKLLIYYTSRLHSGVPSRFSGSGSGTDFTLTISSLQPEDVATYYCQQYGKLPYTFGQGTKLEIKRTVAAGGGGSGGGGSGGGGSEVQLVESGGGLVQPGGSLRLSCAASGFTFSDAWMDWVRQAPGKGLEWVGEIRSKVNNHETYYAESVKGRFTISRDDSKNSLYLQMNSLKTEDTAVYYCARNDYFDYWGQGTTVTVSSAS

SEQ ID NO: 3096 - protein, 254 aa, Artificial Sequence
  Synthetic Polypeptide
EVQLQESGAEVKKPGSSVKVSCKASGFNIKDTYMHWVRQAPGQGLEWMGRIDPANGNSKYVPKFQGRVTITADESTSTAYMELSSLRSEDTAVYYCAPFGYYVSDYAMAYWGQGTTVTVSSASGGGGSGGGGSGGGGSDIVMTQSPDSLAVSLGERATINCRAGESVDIFGVGFLHWYQQKPGQPPKLLIYRASNLESGVPDRFSGSGSGTDFTLTIRPLQAEDVAVYYCQQTNEDPYTFGQGTKLEIKRTVAA

SEQ ID NO: 3097 - protein, 247 aa, Artificial Sequence
  Synthetic Polypeptide
QVQLVQSGAEVKKPGSSVKVSCKASGGTFSSYAISWVRQAPGQGLEWMGLIIPRYGKARYAQKFQGRVTITADESTSTAYMELSSLRSEDTAVYYCARNWPYYYMDFWGQGTLVTVSSASGGGGSGGGGSGGGGSDIVLTQSPATLSLSPGERATLSCRASQNIVFNLAWYQQKPGQAPRLLIYDASNRATGVPARFSGSGSGTDFTLTISSLEPEDFAVYYCQQKKSMPLTFGQGTKVEIKRTVAA

SEQ ID NO: 3098 - protein, 250 aa, Artificial Sequence
  Synthetic Polypeptide
EVQLVESGGGLVKPGGSLRLSCAASGFTFSNAWMSWVRQAPGKGLEWVGRIKSKTEGGTTDYAAPVKGRFTISRDDSKNTLYLQMNSLKTEDTAVYYCTTPYEWSWYDYWGQGTLVTVSSASGGGGSGGGGSGGGGSQTVVTQEPSLTVSPGGTVTLTCGSSTGAVTTSNYANWVQQKPGQAPRGLIGGTNKRAPGTPARFSGSLLGGKAALTLSGVQPEDEAEYYCALWYSNLWVFGGGTKLTVLTVAA

SEQ ID NO: 3099 - protein, 250 aa, Artificial Sequence
  Synthetic Polypeptide
QVQLVQSGAEVKKPGASVKVSCKASGYTFTSYYMHWVRQAPGQGLEWMGIINPSGGSTSYAQKFQGRVTMTHDTSTSTVYMELSSLRSEDTAVYYCARSFFTGFHLDYWGQGTLVTVSSASGGGGSGGGGSGGGGSEIVLTQSPGTLSLSPGERATLSCRASQSVSSSYLAWYQQKPGQAPRLLIYGASSRATGIPDRFSGSGSGTDFTLTISRLEPEDFAVYYCQQYTNEHYYTFGQGTKVEIKRTVAA

SEQ ID NO: 3100 - protein, 256 aa, Artificial Sequence
  Synthetic Polypeptide
EIVLTQSPATLSLSPGERATLSCSVSSSISSSNLHWYQQKPGQAPRLLIYGTSNLASGIPARFSGSGSGTDFTLTISSLEPEDFAVYYCQQWSSYPHTFGGGTKVEIKRTVAAGGGGSGGGGSGGGGSQVQLVQSGAEVKKPGASVKVSCKASGYTFTNYLIEWVRQAPGQGLEWMGLINPGSGGTNYNEKFKGRVTMTTDTSTSTAYMELRSLRSDDTAVYYCARRSPLGSWIYYAYDGVAYWGQGTLVTVSSAS

SEQ ID NO: 3101 - protein, 241 aa, Artificial Sequence
  Synthetic Polypeptide
DIQMTQSPSSLSASVGDRVTITCKAGQNVGTSVAWYQQKPGKAPKLLIYSASYRYSGVPSRFSGSGSGTDFTLTISSLQPEDFATYYCQQYITYPYTFGQGTKVEIKRTVAAGGGGSGGGGSGGGGSEVQLVESGGGLVQPGGSLRLSCAASGFTFSRYWMSWVRQAPGKGLEWVAEINPDSSTIQYTPSLKARFTLSVDRSKNTLYLQMNSLRAEDTAVYYCARPAYWGQGTLVTVSSAS

SEQ ID NO: 3102 - protein, 248 aa, Artificial Sequence
  Synthetic Polypeptide
DIQMTQSPSSLSASVGDRVTITCSASQDIGNFLNWYQQKPGKAPKLLIYYTSSLYSGVPSRFSGSGSGTDFTLTISSLQPEDFATYYCQQYSKLPLTFGQGTKLEIKRTVAAGGGGSGGGGSGGGGSQVQLVQSGAEVKKPGASVKVSCKASGYTFTGYNIHWVRQAPGQRLEWMGAIYPGNGDTSYKQKFRGRVTITRDTSASTAYMELSSLRSEDTAVYYCARGETARATFAYWGQGTLVTVSSAS

SEQ ID NO: 3103 - protein, 112 aa, Artificial Sequence; identical to SEQ ID NO: 2619
  Synthetic Polypeptide

SEQ ID NO: 3104 - protein, 107 aa, Artificial Sequence; identical to SEQ ID NO: 2620
  Synthetic Polypeptide

SEQ ID NO: 3105 - protein, 108 aa, Artificial Sequence; identical to SEQ ID NO: 2621
  Synthetic Polypeptide

SEQ ID NO: 3106 - protein, 108 aa, Artificial Sequence; identical to SEQ ID NO: 2622
  Synthetic Polypeptide

SEQ ID NO: 3107 - protein, 108 aa, Artificial Sequence; identical to SEQ ID NO: 2623
  Synthetic Polypeptide

SEQ ID NO: 3108 - protein, 108 aa, Artificial Sequence; identical to SEQ ID NO: 2624
  Synthetic Polypeptide

SEQ ID NO: 3109 - protein, 108 aa, Artificial Sequence; identical to SEQ ID NO: 2625
  Synthetic Polypeptide

SEQ ID NO: 3110 - protein, 112 aa, Artificial Sequence; identical to SEQ ID NO: 2626
  Synthetic Polypeptide

SEQ ID NO: 3111 - protein, 112 aa, Artificial Sequence; identical to SEQ ID NO: 2627
  Synthetic Polypeptide

SEQ ID NO: 3112 - protein, 109 aa, Artificial Sequence; identical to SEQ ID NO: 2628
  Synthetic Polypeptide

SEQ ID NO: 3113 - protein, 245 aa, Artificial Sequence
  Synthetic Polypeptide
SYVLTQPPSVSVAPGQTARITCGGNNIGSKSVHWYQQPPGQAPVVVVYDDSDRPSGIPERFSGSNSGNTATLTISRVEAGDEAVYYCQVWDSSSDHVVFGGGTKLTVLGGGGSGGGGSGGGGSQLQLQESGPGLVKPSETLSLTCTVSGGSISSSSYFWGWIRQPPGKGLEWIGSIYYSGITYYNPSLKSRVTISVDTSKNQFSLKLSSVTAADTAVYYCARHDGAVAGLFDYWGQGTLVTVSSA

SEQ ID NO: 3114 - protein, 245 aa, Artificial Sequence
  Synthetic Polypeptide
SYVLTQPPSVSVAPGQTARITCGGNNIGSKSVHWYQQPPGQAPVVVVYDDSDRPSGIPERFSGSNSGNTATLTISRVEAGDEAVYYCQVWDSSSDHVVFGGGTKLTVLGGGGSGGGGSGGGGSQLQLQESGPGLVKPSETLSLTCTVSGGSISSGSYIWGWIRQPPGKGLEWIGSIYYSGITYYNPSLKSRVTISVDTSKNQFSLKLSSVTAADTAVYYCARHDGAVAGLFDYWGQGTLVTVSSA

SEQ ID NO: 3115 - protein, 245 aa, Artificial Sequence
  Synthetic Polypeptide
SYVLTQPPSVSVAPGQTARITCGGNNIGSKSVHWYQQPPGQAPVVVVYDDSDRPSGIPERFSGSNSGNTATLTISRVEAGDEAVYYCQVWDSSSDHVVFGGGTKLTVLGGGGSGGGGSGGGGSQLQLQESGPGLVKPSETLSLTCTVSGGSISSGSYFWGWIRQPPGKGLEWIGSIYYSGITYYNPSLKSRVTISVDTSKNQFSLKLSSVTAADTAVYYCARHDGAMAGLFDYWGQGTLVTVSSA

SEQ ID NO: 3116 - protein, 245 aa, Artificial Sequence
  Synthetic Polypeptide
SYVLTQPPSVSVAPGQTARITCGGNNIGSKSVHWYQQPPGQAPVVVVYDDSDRPSGIPERFSGSNSGNTATLTISRVEAGDEAVYYCQVWDSSSDHVVFGGGTKLTVLGGGGSGGGGSGGGGSQLQLQESGPGLVKPSETLSLTCTVSGGSISSGSYFWGWIRQPPGKGLEWIGSIYYSGSTYYNPSLKSRVTISVDTSKNQFSLKLSSVTAADTAVYYCARHDGAVAGLFDYWGQGTLVTVSSA

SEQ ID NO: 3117 - protein, 245 aa, Artificial Sequence
  Synthetic Polypeptide
SYVLTQPPSVSVAPGQTARITCGGNNIGSKSVHWYQQPPGQAPVVVVYDDSDRPSGIPERFSGSNSGNTATLTISRVEAGDEAVYYCQVWDSSSDHVVFGGGTKLTVLGGGGSGGGGSGGGGSQLQLQESGPGLVKPSETLSLTCTVSGGSISSGSYFWGWIRQPPGKGLEWIGSIYYSGISYYNPSLKSRVTISVDTSKNQFSLKLSSVTAADTAVYYCARHDGAVAGLFDYWGQGTLVTVSSA

SEQ ID NO: 3118 - protein, 245 aa, Artificial Sequence
  Synthetic Polypeptide
SYVLTQPPSVSVAPGQTARITCGGNNIGSKSVHWYQQPPGQAPVVVVYDDSDRPSGIPERFSGSNSGNTATLTISRVEAGDEAVYYCQVWDSSSDHVVFGGGTKLTVLGGGGSGGGGSGGGGSQLQLQESGPGLVKPSETLSLTCTVSGGSISSGSYFWGWIRQPPGKGLEWIGSIYYSGITYYNPGLKSRVTISVDTSKNQFSLKLSSVTAADTAVYYCARHDGAVAGLFDYWGQGTLVTVSSA

SEQ ID NO: 3119 - protein, 245 aa, Artificial Sequence
  Synthetic Polypeptide
SYVLTQPPSVSVAPGQTARITCGGNNIGSKSVHWYQQPPGQAPVVVVYDDSDRPSGIPERFSGSNSGNTATLTISRVEAGDEAVYYCQVWDSSSDHVVFGGGTKLTVLGGGGSGGGGSGGGGSQLQLQESGPGLVKPSETLSLTCTVSGGSISSGSYFWGWIRQPPGKGLEWIGSIYYSGITYYNPTLKSRVTISVDTSKNQFSLKLSSVTAADTAVYYCARHDGAVAGLFDYWGQGTLVTVSSA

SEQ ID NO: 3120 - protein, 245 aa, Artificial Sequence
  Synthetic Polypeptide
SYVLTQPPSVSVAPGQTARITCGGKNIGSKSVHWYQQPPGQAPVVVVYDDSDRPSGIPERFSGSNSGNTATLTISRVEAGDEAVYYCQVWDSSSDHVVFGGGTKLTVLGGGGSGGGGSGGGGSQLQLQESGPGLVKPSETLSLTCTVSGGSISSGSYFWGWIRQPPGKGLEWIGSIYYSGITYYNPSLKSRVTISVDTSKNQFSLKLSSVTAADTAVYYCARHDGAVAGLFDYWGQGTLVTVSSA

SEQ ID NO: 3121 - protein, 245 aa, Artificial Sequence
  Synthetic Polypeptide
SYVLTQPPSVSVAPGQTARITCGGNNLGSKSVHWYQQPPGQAPVVVVYDDSDRPSGIPERFSGSNSGNTATLTISRVEAGDEAVYYCQVWDSSSDHVVFGGGTKLTVLGGGGSGGGGSGGGGSQLQLQESGPGLVKPSETLSLTCTVSGGSISSGSYFWGWIRQPPGKGLEWIGSIYYSGITYYNPSLKSRVTISVDTSKNQFSLKLSSVTAADTAVYYCARHDGAVAGLFDYWGQGTLVTVSSA

SEQ ID NO: 3122 - protein, 245 aa, Artificial Sequence
  Synthetic Polypeptide
SYVLTQPPSVSVAPGQTARITCGGNNIGGKSVHWYQQPPGQAPVVVVYDDSDRPSGIPERFSGSNSGNTATLTISRVEAGDEAVYYCQVWDSSSDHVVFGGGTKLTVLGGGGSGGGGSGGGGSQLQLQESGPGLVKPSETLSLTCTVSGGSISSGSYFWGWIRQPPGKGLEWIGSIYYSGITYYNPSLKSRVTISVDTSKNQFSLKLSSVTAADTAVYYCARHDGAVAGLFDYWGQGTLVTVSSA

SEQ ID NO: 3123 - protein, 245 aa, Artificial Sequence
  Synthetic Polypeptide
SYVLTQPPSVSVAPGQTARITCGGNNIGSKTVHWYQQPPGQAPVVVVYDDSDRPSGIPERFSGSNSGNTATLTISRVEAGDEAVYYCQVWDSSSDHVVFGGGTKLTVLGGGGSGGGGSGGGGSQLQLQESGPGLVKPSETLSLTCTVSGGSISSGSYFWGWIRQPPGKGLEWIGSIYYSGITYYNPSLKSRVTISVDTSKNQFSLKLSSVTAADTAVYYCARHDGAVAGLFDYWGQGTLVTVSSA

SEQ ID NO: 3124 - protein, 245 aa, Artificial Sequence
  Synthetic Polypeptide
SYVLTQPPSVSVAPGQTARITCGGKNIGSKSVHWYQQPPGQAPVVVVYDDSDRPSGIPERFSGSNSGNTATLTISRVEAGDEAVYYCQVWDSSSDHVVFGGGTKLTVLGGGGSGGGGSGGGGSQLQLQESGPGLVKPSETLSLTCTVSGGSISSSSYFWGWIRQPPGKGLEWIGSIYYSGITYYNPSLKSRVTISVDTSKNQFSLKLSSVTAADTAVYYCARHDGAVAGLFDYWGQGTLVTVSSA

SEQ ID NO: 3125 - protein, 245 aa, Artificial Sequence
  Synthetic Polypeptide
SYVLTQPPSVSVAPGQTARITCGGNNLGSKSVHWYQQPPGQAPVVVVYDDSDRPSGIPERFSGSNSGNTATLTISRVEAGDEAVYYCQVWDSSSDHVVFGGGTKLTVLGGGGSGGGGSGGGGSQLQLQESGPGLVKPSETLSLTCTVSGGSISSSSYFWGWIRQPPGKGLEWIGSIYYSGITYYNPSLKSRVTISVDTSKNQFSLKLSSVTAADTAVYYCARHDGAVAGLFDYWGQGTLVTVSSA

SEQ ID NO: 3126 - protein, 245 aa, Artificial Sequence
  Synthetic Polypeptide
SYVLTQPPSVSVAPGQTARITCGGNNIGGKSVHWYQQPPGQAPVVVVYDDSDRPSGIPERFSGSNSGNTATLTISRVEAGDEAVYYCQVWDSSSDHVVFGGGTKLTVLGGGGSGGGGSGGGGSQLQLQESGPGLVKPSETLSLTCTVSGGSISSSSYFWGWIRQPPGKGLEWIGSIYYSGITYYNPSLKSRVTISVDTSKNQFSLKLSSVTAADTAVYYCARHDGAVAGLFDYWGQGTLVTVSSA

SEQ ID NO: 3127 - protein, 242 aa, Artificial Sequence
  Synthetic Polypeptide
EIVLTQSPATLSLSPGERATLSCRASQSVSSYLAWYQQKPGQAPRLLIYDASNRATGIPARFSGSGSGTDFTLTISSLEPEDFAVYYCQQRSNWPLTFGQGTKVEIKGGGGSGGGGSGGGGSQVQLVQSGAEVKKPGSSVKVSCKASGGTFSTYAIHWVRQAPGQGLEWMGRIIPIEGRAYYAQKFQGRVTITADESTSTAYMELSSLRSEDTAVYYCARGRYSYRYWFDYWGQGTLVTVSS

SEQ ID NO: 3128 - protein, 250 aa, Artificial Sequence
  Synthetic Polypeptide
DIVMTQSPDSLAVSLGERATINCKSSQSVLYSSNNKNYLAWYQQKPGQPPKLLIYWASTRESGVPDRFSGSGSGTDFTLTISSLQAEDVAVYYCQQYYSTPLTFGQGTKVEIKGGGGSGGGGSGGGGSEVQLVQSGAEVKKPGESLKISCKGSGYSFTSYWIGWVRQMPGKGLEWMGIIYPGDSDTRYSPSFQGQVTISADKSISTAYLQWSSLKASDTAMYYCARDVGRWAPGGFLDYWGQGTLVTVSS

SEQ ID NO: 3129 - protein, 241 aa, Artificial Sequence
  Synthetic Polypeptide
DIQMTQSPSSLSASVGDRVTITCRASQSINKWLNWYQQKPGKAPKLLIYAASSLQSGVPSRFSGSGSGTDFTLTISSLQPEDFATYYCQQDYNFPYTFGQGTKVEIKRGGGGSGGGGSGGGGSQVQLVQSGAEVKKPGSSVKVSCKASGGTFSSYGISWVRQAPGQGLEWMGWISAIFGTANYAQKFQGRVTITADESTSTAYMELSSLRSEDTAVYYCARGVASWYLDYWGQGTLVTVSS

SEQ ID NO: 3130 - protein, 241 aa, Artificial Sequence
  Synthetic Polypeptide
QIVLSQSPAILSASPGEKVTMTCRASSSVSYIHWFQQKPGSSPKPWIYATSNLASGVPVRFSGSGSGTSYSLTISRVEAEDAATYYCQQWTSNPPTFGGGTKLEIKGGGGSGGGGSGGGGSQVQLQQPGAELVKPGASVKMSCKASGYTFTSYNMHWVKQTPGRGLEWIGAIYPGNGDTSYNQKFKGKATLTADKSSSTAYMQLSSLTSEDSAVYYCARSTYYGGDWYFNVWGAGTTVTVS

SEQ ID NO: 3131 - protein, 241 aa, Artificial Sequence
  Synthetic Polypeptide
DIQLTQSHKFLSTSVGDRVSITCKASQDVYNAVAWYQQKPGQSPKLLIYSASSRYTGVPSRFTGSGSGPDFTFTISSVQAEDLAVYFCQQHFRTPFTFGSGTKLEIKGGGGSGGGGSGGGGSQVQLQQSGPELKKPGETVKISCKASGYPFTNYGMNWVKQAPGQGLKWMGWINTSTGESTFADDFKGRFDFSLETSANTAYLQINNLKSEDMATYFCARWEVYHGYVPYWGQGTTVTVSS

SEQ ID NO: 3132 - protein, 240 aa, Artificial Sequence
  Synthetic Polypeptide
DIQLTQSPSSLSASVGDRVTITCKASQDVGTSVAWYQQKPGKAPKLLIYWTSTRHTGVPSRFSGSGSGTDFTFTISSLQPEDIATYYCQQYSLYRSFGQGTKVEIKGGGGSGGGGSGGGGSEVQLVESGGGVVQPGRSLRLSCSASGFDFTTYWMSWVRQAPGKGLEWIGEIHPDSSTINYAPSLKDRFTISRDNAKNTLFLQMDSLRPEDTGVYFCASLYFGFPWFAYWGQGTPVTVSS

SEQ ID NO: 3133 - protein, 244 aa, Artificial Sequence
  Synthetic Polypeptide
DIQLTQSPSSLSASVGDRVTITCSTSSSVSYMHWYQQKPGKAPKLLIYSTSNLASGVPSRFSGSGSGTDFTFTISSLQPEDIATYYCHQWSSYPTFGQGTKVEIKGGGGSGGGGSGGGGSGVHSQVQLQESGPGLVRPSQTLSLTCTVSGFTISSGYSWHWVRQPPGRGLEWIGYIQYSGITNYNPSLKSRVTMLVDTSKNQFSLRLSSVTAADTAVYYCAREDYDYHWYFDVWGQGTTVTVSS

SEQ ID NO: 3134 - protein, 244 aa, Artificial Sequence
  Synthetic Polypeptide
DIQMTQSPSSLSASVGDRVTITCRASQDVNTAVAWYQQKPGKAPKLLIYSASFLYSGVPSRFSGSRSGTDFTLTISSLQPEDFATYYCQQAYTTPPTFGQGTKVEIKRTGGGGSGGGGSGGGGSEVQLVESGGGLVQPGGSLRLSCAASGFNIKDTYIHWVRQAPGKGLEWVARIYPTNGYTRYADSVKGRFTISADTSKNTAYLQMNSLRAEDTAVYYCSRWGGAGAYAMDVWGQGTLVTVSS

SEQ ID NO: 3135 - protein, 247 aa, Artificial Sequence
  Synthetic Polypeptide
EIVLTQSPGTLSLSPGERATLSCRASQSVSSDYLAWYQQKPGQAPRLLIYGASSRATGIPDRFSGSGSGTDFTLTISRLPEDFAVYYCQQYVSYWTFGGGTKVEIKRTVAAGGGGSGGGGSGGGGSQVQLVESGGGVVQPGRSLRLSCAASGFTFSSYAMHWVRQAPGKGLEWVAVISYDGSNKYYADSVKGRFTISRDNSKNTLYLQMNSLRAEDTAVYYCAKEAPYYAKDYMDVWGKGTTVTVSS

SEQ ID NO: 3136 - protein, 246 aa, Artificial Sequence
  Synthetic Polypeptide
SYELIQPPSAAVTLGNTVSLTCVGDELPKRYAYWYQQKPDQSIVRVIYEDSVRPPGISDRFSGSSSGTTATLTIRDAQNEDEADYYCQSTYGDDKLYIFGGGTKLTVLGGGGGSGGGGSGGGGSEVQLVETGGGLVQPGKSLELTCATSGFTFNTAWMHWVRQSPDKRLEWIARIKDTSNNYATDYVESMKGRFTISRDDSKGSVNLQMNSLKEEDTATYYCTTDFYDGTYYWNYWGQGVMVTVSS

SEQ ID NO: 3137 - protein, 250 aa, Artificial Sequence
  Synthetic Polypeptide
SVIELTQSPKFMSTSVGDRVNVTYKASQNVGTNVAWFQQKPGQSPKVLIYSASYRYSGVPDRFTGSGSGTDFTLTISNVQSEDLAEYFCQQYHTYPLTFGGGTKLEIKRGGGGSGGGGSGGGGSRMAQVQLQQSGAELARPGASVKMSCKASGYTFTTYTIHWVRRRPGHDLEWIGYINPSSGCSDYNQNFKGKTTLTADKSSNTAYMQLNSLTSEDSAVYYCARRADYGNYEYTWFAYWGQGTTVTVSS

SEQ ID NO: 3138 - protein, 241 aa, Artificial Sequence
  Synthetic Polypeptide
DIQMTQSPSSVSASVGDRVTITCRASQSVSSYLNWYQQKPGKAPKLLIYAASSLQSGVPSRFSGSGSGTDFTLTISSLQPEDFATYYCQQSYSTPWTFGQGTKLEIKRGGGGSGGGGSGGGGSEVQLVESGGGLVQPGRSLRLSCAASGFTFDDYGMHWVRQAPGKGLEWVSGISWNSGSIGYADSAKGRFTISRDNSKNTLYLQMNSLRAEDTAVYYCAKRGNSNSFDYWGQGTLVTVSS

SEQ ID NO: 3139 - protein, 248 aa, Artificial Sequence
  Synthetic Polypeptide
QSALTQPRSVSGSPGQSVTISCTGTSSDVGSYNYVSWYQQSPGKAPKLMIYDVSNRPSGVSNRFSGSKSGNTASLTISGLQSEDEADYYCTSYGSYDIPVIFGGGTKVEIKGGGGSGGGGSGGGGSQMQLVQSGAEVKKPGSSVKVSCKASGGTFSSYAISWVRQAPGQGLEWMGGIIPIFGTANYAQKFQGRVTITADKSTSTAYMELSSLRSDDTAVYYCARDELWATNYYYMDVWGKGTLVTVSS

SEQ ID NO: 3140 - protein, 241 aa, Artificial Sequence
  Synthetic Polypeptide
DVVMTQSPSSLSASVGDRVTITCKASQSVSSYLNWYQQKPGKAPKLLIYAASSLETGVPSRFSGSGSGTDFTLTISSLQPEDFATYYCQQSYSTPWTFGQGTKVEIKRGGGGSGGGGSGGGGSEVQLVESGGGLVRPGGSLRLSCAASGFTFDDYGMSWVRQAPGKGLEWVSGISWNSGSIGYADSVKGRFTISRDNAKNSLYLQMNSLRAEDTALYYCAKRGNSNSFDYWGQGTTVTVSS

SEQ ID NO: 3141 - protein, 241 aa, Artificial Sequence
  Synthetic Polypeptide
DIQMTQSPSSVSASVGDRVTITCRASQSISSYLNWYQQKPGKAPKLLIYAASSLQSGVPSRFSGSGSGTDFTLTISSLQPEDFATYYCQQSYSTPWTFGQGTKVEIKRGGGGSGGGGSGGGGSEVQLVESGGGLVQPGRSLRLSCAASGFTFDDYAMHWVRQAPGKGLEWVSGISWNSGSIGYADSAKGRFTISRDNSKNTLYLQMNSLRAEDTAVYYCAKRGNSNSFDYWGQGTLVTVSS

SEQ ID NO: 3142 - protein, 241 aa, Artificial Sequence
  Synthetic Polypeptide
DTVLTQSPALAVSPGERVTISCKASESVSTRMHWYRQKPGQQPKLLIYKTSNLASGVPARFSGSGSGTDFTLTIDPVEADDTATYFCQQSWNGPLTFGSGTKLEIKRGGGGSGGGGSGGGGSQVQLKESGPGLVQPSQTLSLTCTVSGLSLTSNGVSWIRQPPGKGLEWLGVIWSNGGTDYNSAIKSRLSFSRDTSKSQVFLKMNSLQTEDTAMYFCARPRYNSGYFFDYWGQGVMVTVSS

SEQ ID NO: 3143 - protein, 253 aa, Artificial Sequence
  Synthetic Polypeptide
DLVMTQSPFSLAVSEGEMVTIKCKSSQSLLSSRHQKNFLAWYRQKPGQSPKLLIYHASTRQSGVPDRFIGSGSGTDFTLTISDVQAEDLADYYCLQHYTSPYTFGAGTKLELKRGGGGSGGGGSGGGGSQVQLKESGPGLVQPSQTLSLTCTVSGFSLTSYHVHWVRQPPGKGLEWMGVMWSDGDTLYNSALKSRLSISRDTSKSQVLLQMDSLQSEDTATYYCARLQVFGYPGIRDYVMDAWGQGASVTVSS

SEQ ID NO: 3144 - protein, 254 aa, Artificial Sequence
  Synthetic Polypeptide
DIQLTQSPSFLSASVGDRVTITCRASQDISSYLAWYQQKPGNAPKLLIYAASLLQSGVPSRFSAFGSGTEFTLTISSLQPEDFATYYCQHLKSYPLFTFGPGTKVDIKRGGGGSGGGGSGGGGSEVQLVESGGRVVRPGGSLRLSCAASGFTFDDYGMSWVRQPPGKGLEFVSGLNWNGDITAFTDSVKGRFTISRDNVKSSLYLQMNSLRADDTAFYYCARVRTWGDYTTGEEIINSWYFDLWGRGTLVTVSS

SEQ ID NO: 3145 - protein, 242 aa, Artificial Sequence
  Synthetic Polypeptide
ELQMTQSPSSLSASVGDRVAITCRASQSISSHLNWYQQKPGKAPKLLIYAASSLQSGVPSRFSGSGSGTDFTLTISSLQPEDFATYYCQQSYSTPYTFGQGTKLEIKGGGGSGGGGSGGGGSEVQLVESGGGLVQPGGSLRLSCAASGFTFSSYWMSWVRQAPGKGLEWVANIKQDGSEKYYVDSVKGRFTISRDNAKNSLYLRMNSLRAEDTAVYYCARAWGYSSYYFDYWGQGTLVTVSP

SEQ ID NO: 3146 - protein, 238 aa, Artificial Sequence
  Synthetic Polypeptide
DIVMTQSHKFMSTSVGDRVSIICKASQDVGTAVDWYQQKPGQSPKLLIYWASTRHTGVPDRFTGSGSGTDFTLAITNVQSEDLADYFCQQYNSYPLTFGAGTKLEIKRGGGGSGGGGSGGGGSEVQLQQSGPELVKPGTSVRISCKTSGYTFTEYTIHWVKQSHGKSLEWIGNINPNNGGTTYNQKFEDKATLTVDKSSSTAYMELRSLTSEDSAVYYCAAGWNFDYWGQGTTLTVSS

SEQ ID NO: 3147 - protein, 238 aa, Artificial Sequence
  Synthetic Polypeptide
DIQMTQSPSSLSASVGDRVTITCKASQDVGTAVDWYQQKPGKAPKLLIYWASTRHTGVPSRFSGSGSGTDFTLTISSLQPEDFATYYCQQYNSYPLTFGQGTKVEIKRGGGGSGGGGSGGGGSEVQLVESGGGLVQPGGSLRLSCAASGYTFTEYTIHWVRQAPGKGLEWVANINPNNGGTTYNQKFEDRFTISRDNSKNTLYLQMNSLRAEDTAVYYCARGWNFDYWGQGTLVTVSS

SEQ ID NO: 3148 - protein, 240 aa, Artificial Sequence
  Synthetic Polypeptide
DIQMTQSPSSLSASVGDRVTITCKASQDVGTAVDWYQQKPGKAPKLLISWASTRHTGVPSRFSGSGSGTDFTLTISSLQPEDFATYFCQQYNSYPLTFGQGTKVEIKRTVGGGGSGGGGSGGGGSQVQLVQSGAEVKKPGESVKVSCKASGYTFTEYTIHWVRQAPGQGLEWMGNINPNNGGTTYNQKFEDRVTITADKSTSTAYMELSSLRSEDTAVYYCARGWNFDYWGQGTTVTVSS

SEQ ID NO: 3149 - protein, 238 aa, Artificial Sequence
  Synthetic Polypeptide
DIQMTQSPSSLSASVGDRVTITCKASQDVGTAVDWYQQKPGKAPKLLIYWASTRHTGVPSRFSGSGSGTDFTLTISSLQPEDFATYYCQQYNSYPLTFGQGTKVEIKRGGGGSGGGGSGGGGSEVQLQQSGPELVKPGTSVRISCKTSGYTFTEYTIHWVKQSHGKSLEWIGNINPNNGGTTYNQKFEDKATLTVDKSSSTAYMELRSLTSEDSAVYYCAAGWNFDYWGQGTTLTVSS

SEQ ID NO: 3150 - protein, 238 aa, Artificial Sequence
  Synthetic Polypeptide
DIVMTQSHKFMSTSVGDRVSIICKASQDVGTAVDWYQQKPGQSPKLLIYWASTRHTGVPDRFTGSGSGTDFTLAITNVQSEDLADYFCQQYNSYPLTFGAGTKLEIKRGGGGSGGGGSGGGGSEVQLVESGGGLVQPGGSLRLSCAASGYTFTEYTIHWVRQAPGKGLEWVANINPNNGGTTYNQKFEDRFTISRDNSKNTLYLQMNSLRAEDTAVYYCARGWNFDYWGQGTLVTVSS

SEQ ID NO: 3151 - protein, 244 aa, Artificial Sequence
  Synthetic Polypeptide
EIVLTQSPATLSLSPGERATLSCSATSSVSYIHWYQQKPGQAPRLLIYSTSNLASGIPARFSGSGSGTDFTLTIGRLEPEDFAVYYCQQRSSSPFTFGQGTKVEIKRGGGGSGGGGSGGGGSEVQLVESGGGLVKPEGSLRLSCAASGFTFSRYGMSWVRQAPGKGLEWVSTISGGGTYIYYPDSVKGRFTISRDNAKNSLFLQMNSLRAEDTAVYYCARDNYGRNYDYGMDYWGQGTLVTVSS

SEQ ID NO: 3152 - protein, 243 aa, Artificial Sequence
  Synthetic Polypeptide
QIVLTQSPAIMSASPGEEVTLTCSATSSVSYIHWFQQRPGTSPKLWIYSTSNLASGVPVRFSGSGYGTSYSLTISRMEAEDAATYYCQQRSSSPFTFGSGTKLEIKGGGGSGGGGSGGGGSEVKVVESGGDLVKPGGSLKLSCVVSGFTFSRYGMSWVRQTPGKRLEWVATISGGGTYIYYPDSVKGRFTISRDNAKNTLYLQMSSLKSEDTAMYHCTRDNYGRNYDYGMDYWGQGTSVTVSS

SEQ ID NO: 3153 - protein, 249 aa, Artificial Sequence
  Synthetic Polypeptide
DIVLTQSPASLAVSPGQRATITCRASKSVSTSGYSYMHWYQQKPGQPPKLLIYLASNLESGVPARFSGSGSGTDFTLTINPVEANDTANYYCQHSRELPFTFGGGTKVEIKRTGGGGSGGGGSGGGGSEVQLVESGGGLVKPGGSLRLSCAASGFTFSGYAMSWVRQAPGKGLEWVSTISSGGTYIYYPDSVKGRFTISRDNAKNSLYLQMNSLRAEDTAVYYCARLGGDNYYEYFDVWGKGTTVTVSS

SEQ ID NO: 3154 - protein, 240 aa, Artificial Sequence
  Synthetic Polypeptide
DIQMTQSPSSLSVSVGDRVTITCKASQNVRTVVAWYQQKPGLAPKTLIYLASNRHTGVPSRFSGSGSGTDFTFTISSLQPEDIATYFCQQHWSYPLTFGQGTKVEVKRGGGGSGGGGSGGGGSEVQLLESGGGLVQPGGSLRLSCAASGFAFSTYDMSWVRQAPGKGLEWVATISSGGSYTYYLDSVKGRFTISRDSSKNTLYLQMNSLQAEDSAIYYCAPTTVVPFAYWGQGTLVTVSS

SEQ ID NO: 3155 - protein, 244 aa, Artificial Sequence
  Synthetic Polypeptide
DIQMTQSPSSLSASVGDRVTITCKSSQSLLYSSNQKNYLAWFQQKPGKAPKLLIYWASTRESGVPSRFSGSGSGTDFTLTISSLQPEDFATYFCHQYLSSYTFGQGTKVEIKRGGGGSGGGGSGGGGSEVQLVESGGGLVQPGGSLRLSCAASGYTFTSYWLHWVRQAPGKGLEWVGYIRPSTGYTEYNQKFKDRFTISADTSKNTAYLQMNSLRAEDTAVYYCARSRWLLDYWGQGTLVTVSS

SEQ ID NO: 3156 - protein, 243 aa, Artificial Sequence
  Synthetic Polypeptide
DIQMTQSPSSLSASVGDRVTITCKSSQSVLYSSNQKNYLAWFQQKPGKAPKLLIYWASTRESGVPSRFSGSGSGTDFTLTISSLQPEDFATYFCHQYLSSYTFGQGTKVEIKRGGGGSGGGGSGGGGSEVQLVESGGGLVQPGGSLRLSCAASGFTFTTYWMHWVRQAPGKGLEWVGYIRPSTGYTEYNQKFKDRFTISADTSKNTAYLQMNSLRAEDTAVYYCARSRWLLDYWGQGTLVTVS

SEQ ID NO: 3157 - protein, 243 aa, Artificial Sequence
  Synthetic Polypeptide
EVQLVESGGGLVQPGGSLRLSCAASGYTFTTYWMHWVRQAPGKGLEWVGYIRPSTGYTEYNQKFKDRFTISADTSKNTAYLQMNSLRAEDTAVYYCARSRWLLDYWGQGTLVTVSGGGGSGGGGSGGGGSDIQMTQSPSSLSASVGDRVTITCKSSQSLLYSSNQKNYLAWFQQKPGKAPKLLIYWASTRESGVPSRFSGSGSGTDFTLTISSLQPEDFATYFCHQYLSSYTFGQGTKVEIKR

SEQ ID NO: 3158 - protein, 240 aa, Artificial Sequence
  Synthetic Polypeptide
DIQMTQSPSSLSASVGDRVTITCRASQDISNYLNWYQQKPGKAPKLLIYYTSRLHSGVPSRFSGSGSGTDFTLTISSLQPEDFATYYCQQGNTLPYTFGQGTKVEIKRGGGGSGGGGSGGGGSEVQLVESGGGLVQPGGSLRLSCAASGYTFSDYFMSWVRQAPGKGLEWVATISNGGTYTYYPDSVKGRFTISRDNSKNTLYLQMNSLRAEDTAVYYCARFDGYIFDYWGQGTLVTVSS

SEQ ID NO: 3159 - protein, 240 aa, Artificial Sequence
  Synthetic Polypeptide
DIQMTQSPSSLSASVGDRVTITCRASQDISSYLNWYQQKPGKAPKLLIYYTSRLHSGVPSRFSGSGSGTDFTLTISSLQPEDFATYYCQQGNTLPYTFGQGTKVEIKRGGGGSGGGGSGGGGSEVQLVESGGGLVQPGGSLRLSCAASGFTFSDYFMSWVRQAPGKGLEWVATISNGGTYTYYPDSVKGRFTISRDNSKNTLYLQMNSLRAEDTAVYYCARFDGYIFDYWGQGTLVTVSS

SEQ ID NO: 3160 - protein, 240 aa, Artificial Sequence
  Synthetic Polypeptide
DIQMTQSPSSLSASVGDRVTITCRASQDISNYLNWYQQKPGKAPKLLIYYTSRLHSGVPSRFSGSGSGTDFTLTISSLQPEDFATYYCQQGNTLPWTFGQGTKVEIKRGGGGSGGGGSGGGGSEVQLVESGGGLVQPGGSLRLSCAASGFTFSDYFMSWVRQAPGKGLEWVATISNGGTYTYYPDSVKGRFTISRDNSKNTLYLQMNSLRAEDTAVYYCARFDGYIFDYWGQGTLVTVSS

SEQ ID NO: 3161 - protein, 245 aa, Artificial Sequence
  Synthetic Polypeptide
SYVLTQPPSVSVAPGQTARITCGGNNIGSKTVHWYQQPPGQAPVVVVYDDSDRPSGIPERFSGSNSGNTATLTISRVEAGDEAVYYCQVWDSSSDHVVFGGGTKLTVLGGGGSGGGGSGGGGSQLQLQESGPGLVKPSETLSLTCTVSGGSISSSSYFWGWIRQPPGKGLEWIGSIYYSGITYYNPSLKSRVTISVDTSKNQFSLKLSSVTAADTAVYYCARHDGAVAGLFDYWGQGTLVTVSSA

SEQ ID NO: 3162 - protein, 245 aa, Artificial Sequence
  Synthetic Polypeptide
SYVLTQPPSVSVAPGQTARITCGGKNIGSKSVHWYQQPPGQAPVVVVYDDSDRPSGIPERFSGSNSGNTATLTISRVEAGDEAVYYCQVWDSSSDHVVFGGGTKLTVLGGGGSGGGGSGGGGSQLQLQESGPGLVKPSETLSLTCTVSGGSISSGSYIWGWIRQPPGKGLEWIGSIYYSGITYYNPSLKSRVTISVDTSKNQFSLKLSSVTAADTAVYYCARHDGAVAGLFDYWGQGTLVTVSSA

SEQ ID NO: 3163 - protein, 245 aa, Artificial Sequence
  Synthetic Polypeptide
SYVLTQPPSVSVAPGQTARITCGGKNIGSKSVHWYQQPPGQAPVVVVYDDSDRPSGIPERFSGSNSGNTATLTISRVEAGDEAVYYCQVWDSSSDHVVFGGGTKLTVLGGGGSGGGGSGGGGSQLQLQESGPGLVKPSETLSLTCTVSGGSISSGSYFWGWIRQPPGKGLEWIGSIYYSGITYYNPSLKSRVTISVDTSKNQFSLKLSSVTAADTAVYYCARHDGAMAGLFDYWGQGTLVTVSSA

SEQ ID NO: 3164 - protein, 245 aa, Artificial Sequence
  Synthetic Polypeptide
SYVLTQPPSVSVAPGQTARITCGGKNIGSKSVHWYQQPPGQAPVVVVYDDSDRPSGIPERFSGSNSGNTATLTISRVEAGDEAVYYCQVWDSSSDHVVFGGGTKLTVLGGGGSGGGGSGGGGSQLQLQESGPGLVKPSETLSLTCTVSGGSISSGSYFWGWIRQPPGKGLEWIGSIYYSGSTYYNPSLKSRVTISVDTSKNQFSLKLSSVTAADTAVYYCARHDGAVAGLFDYWGQGTLVTVSSA

SEQ ID NO: 3165 - protein, 245 aa, Artificial Sequence
  Synthetic Polypeptide
SYVLTQPPSVSVAPGQTARITCGGKNIGSKSVHWYQQPPGQAPVVVVYDDSDRPSGIPERFSGSNSGNTATLTISRVEAGDEAVYYCQVWDSSSDHVVFGGGTKLTVLGGGGSGGGGSGGGGSQLQLQESGPGLVKPSETLSLTCTVSGGSISSGSYFWGWIRQPPGKGLEWIGSIYYSGISYYNPSLKSRVTISVDTSKNQFSLKLSSVTAADTAVYYCARHDGAVAGLFDYWGQGTLVTVSSA

SEQ ID NO: 3166 - protein, 245 aa, Artificial Sequence
  Synthetic Polypeptide
SYVLTQPPSVSVAPGQTARITCGGKNIGSKSVHWYQQPPGQAPVVVVYDDSDRPSGIPERFSGSNSGNTATLTISRVEAGDEAVYYCQVWDSSSDHVVFGGGTKLTVLGGGGSGGGGSGGGGSQLQLQESGPGLVKPSETLSLTCTVSGGSISSGSYFWGWIRQPPGKGLEWIGSIYYSGITYYNPGLKSRVTISVDTSKNQFSLKLSSVTAADTAVYYCARHDGAVAGLFDYWGQGTLVTVSSA

SEQ ID NO: 3167 - protein, 245 aa, Artificial Sequence
  Synthetic Polypeptide
SYVLTQPPSVSVAPGQTARITCGGKNIGSKSVHWYQQPPGQAPVVVVYDDSDRPSGIPERFSGSNSGNTATLTISRVEAGDEAVYYCQVWDSSSDHVVFGGGTKLTVLGGGGSGGGGSGGGGSQLQLQESGPGLVKPSETLSLTCTVSGGSISSGSYFWGWIRQPPGKGLEWIGSIYYSGITYYNPTLKSRVTISVDTSKNQFSLKLSSVTAADTAVYYCARHDGAVAGLFDYWGQGTLVTVSSA

SEQ ID NO: 3168 - protein, 245 aa, Artificial Sequence; identical to SEQ ID NO: 3125
  Synthetic Polypeptide

SEQ ID NO: 3169 - protein, 245 aa, Artificial Sequence
  Synthetic Polypeptide
SYVLTQPPSVSVAPGQTARITCGGNNLGSKSVHWYQQPPGQAPVVVVYDDSDRPSGIPERFSGSNSGNTATLTISRVEAGDEAVYYCQVWDSSSDHVVFGGGTKLTVLGGGGSGGGGSGGGGSQLQLQESGPGLVKPSETLSLTCTVSGGSISSGSYIWGWIRQPPGKGLEWIGSIYYSGITYYNPSLKSRVTISVDTSKNQFSLKLSSVTAADTAVYYCARHDGAVAGLFDYWGQGTLVTVSSA

SEQ ID NO: 3170 - protein, 245 aa, Artificial Sequence
  Synthetic Polypeptide
SYVLTQPPSVSVAPGQTARITCGGNNLGSKSVHWYQQPPGQAPVVVVYDDSDRPSGIPERFSGSNSGNTATLTISRVEAGDEAVYYCQVWDSSSDHVVFGGGTKLTVLGGGGSGGGGSGGGGSQLQLQESGPGLVKPSETLSLTCTVSGGSISSGSYFWGWIRQPPGKGLEWIGSIYYSGITYYNPSLKSRVTISVDTSKNQFSLKLSSVTAADTAVYYCARHDGAMAGLFDYWGQGTLVTVSSA

SEQ ID NO: 3171 - protein, 245 aa, Artificial Sequence
  Synthetic Polypeptide
SYVLTQPPSVSVAPGQTARITCGGNNLGSKSVHWYQQPPGQAPVVVVYDDSDRPSGIPERFSGSNSGNTATLTISRVEAGDEAVYYCQVWDSSSDHVVFGGGTKLTVLGGGGSGGGGSGGGGSQLQLQESGPGLVKPSETLSLTCTVSGGSISSGSYFWGWIRQPPGKGLEWIGSIYYSGSTYYNPSLKSRVTISVDTSKNQFSLKLSSVTAADTAVYYCARHDGAVAGLFDYWGQGTLVTVSSA

SEQ ID NO: 3172 - protein, 245 aa, Artificial Sequence
  Synthetic Polypeptide
SYVLTQPPSVSVAPGQTARITCGGNNLGSKSVHWYQQPPGQAPVVVVYDDSDRPSGIPERFSGSNSGNTATLTISRVEAGDEAVYYCQVWDSSSDHVVFGGGTKLTVLGGGGSGGGGSGGGGSQLQLQESGPGLVKPSETLSLTCTVSGGSISSGSYFWGWIRQPPGKGLEWIGSIYYSGISYYNPSLKSRVTISVDTSKNQFSLKLSSVTAADTAVYYCARHDGAVAGLFDYWGQGTLVTVSSA

SEQ ID NO: 3173 - protein, 245 aa, Artificial Sequence
  Synthetic Polypeptide
SYVLTQPPSVSVAPGQTARITCGGNNLGSKSVHWYQQPPGQAPVVVVYDDSDRPSGIPERFSGSNSGNTATLTISRVEAGDEAVYYCQVWDSSSDHVVFGGGTKLTVLGGGGSGGGGSGGGGSQLQLQESGPGLVKPSETLSLTCTVSGGSISSGSYFWGWIRQPPGKGLEWIGSIYYSGITYYNPGLKSRVTISVDTSKNQFSLKLSSVTAADTAVYYCARHDGAVAGLFDYWGQGTLVTVSSA

SEQ ID NO: 3174 - protein, 245 aa, Artificial Sequence
  Synthetic Polypeptide
SYVLTQPPSVSVAPGQTARITCGGNNLGSKSVHWYQQPPGQAPVVVVYDDSDRPSGIPERFSGSNSGNTATLTISRVEAGDEAVYYCQVWDSSSDHVVFGGGTKLTVLGGGGSGGGGSGGGGSQLQLQESGPGLVKPSETLSLTCTVSGGSISSGSYFWGWIRQPPGKGLEWIGSIYYSGITYYNPTLKSRVTISVDTSKNQFSLKLSSVTAADTAVYYCARHDGAVAGLFDYWGQGTLVTVSSA

SEQ ID NO: 3175 - protein, 245 aa, Artificial Sequence; identical to SEQ ID NO: 3126
  Synthetic Polypeptide

SEQ ID NO: 3176 - protein, 245 aa, Artificial Sequence
  Synthetic Polypeptide
SYVLTQPPSVSVAPGQTARITCGGNNIGGKSVHWYQQPPGQAPVVVVYDDSDRPSGIPERFSGSNSGNTATLTISRVEAGDEAVYYCQVWDSSSDHVVFGGGTKLTVLGGGGSGGGGSGGGGSQLQLQESGPGLVKPSETLSLTCTVSGGSISSGSYIWGWIRQPPGKGLEWIGSIYYSGITYYNPSLKSRVTISVDTSKNQFSLKLSSVTAADTAVYYCARHDGAVAGLFDYWGQGTLVTVSSA

SEQ ID NO: 3177 - protein, 245 aa, Artificial Sequence
  Synthetic Polypeptide
SYVLTQPPSVSVAPGQTARITCGGNNIGGKSVHWYQQPPGQAPVVVVYDDSDRPSGIPERFSGSNSGNTATLTISRVEAGDEAVYYCQVWDSSSDHVVFGGGTKLTVLGGGGSGGGGSGGGGSQLQLQESGPGLVKPSETLSLTCTVSGGSISSGSYFWGWIRQPPGKGLEWIGSIYYSGITYYNPSLKSRVTISVDTSKNQFSLKLSSVTAADTAVYYCARHDGAMAGLFDYWGQGTLVTVSSA

SEQ ID NO: 3178 - protein, 245 aa, Artificial Sequence
  Synthetic Polypeptide
SYVLTQPPSVSVAPGQTARITCGGNNIGGKSVHWYQQPPGQAPVVVVYDDSDRPSGIPERFSGSNSGNTATLTISRVEAGDEAVYYCQVWDSSSDHVVFGGGTKLTVLGGGGSGGGGSGGGGSQLQLQESGPGLVKPSETLSLTCTVSGGSISSGSYFWGWIRQPPGKGLEWIGSIYYSGSTYYNPSLKSRVTISVDTSKNQFSLKLSSVTAADTAVYYCARHDGAVAGLFDYWGQGTLVTVSSA

SEQ ID NO: 3179 - protein, 245 aa, Artificial Sequence
  Synthetic Polypeptide
SYVLTQPPSVSVAPGQTARITCGGNNIGGKSVHWYQQPPGQAPVVVVYDDSDRPSGIPERFSGSNSGNTATLTISRVEAGDEAVYYCQVWDSSSDHVVFGGGTKLTVLGGGGSGGGGSGGGGSQLQLQESGPGLVKPSETLSLTCTVSGGSISSGSYFWGWIRQPPGKGLEWIGSIYYSGISYYNPSLKSRVTISVDTSKNQFSLKLSSVTAADTAVYYCARHDGAVAGLFDYWGQGTLVTVSSA

SEQ ID NO: 3180 - protein, 245 aa, Artificial Sequence
  Synthetic Polypeptide
SYVLTQPPSVSVAPGQTARITCGGNNIGGKSVHWYQQPPGQAPVVVVYDDSDRPSGIPERFSGSNSGNTATLTISRVEAGDEAVYYCQVWDSSSDHVVFGGGTKLTVLGGGGSGGGGSGGGGSQLQLQESGPGLVKPSETLSLTCTVSGGSISSGSYFWGWIRQPPGKGLEWIGSIYYSGITYYNPGLKSRVTISVDTSKNQFSLKLSSVTAADTAVYYCARHDGAVAGLFDYWGQGTLVTVSSA

SEQ ID NO: 3181 - protein, 245 aa, Artificial Sequence
  Synthetic Polypeptide
SYVLTQPPSVSVAPGQTARITCGGNNIGGKSVHWYQQPPGQAPVVVVYDDSDRPSGIPERFSGSNSGNTATLTISRVEAGDEAVYYCQVWDSSSDHVVFGGGTKLTVLGGGGSGGGGSGGGGSQLQLQESGPGLVKPSETLSLTCTVSGGSISSGSYFWGWIRQPPGKGLEWIGSIYYSGITYYNPTLKSRVTISVDTSKNQFSLKLSSVTAADTAVYYCARHDGAVAGLFDYWGQGTLVTVSSA

SEQ ID NO: 3182 - protein, 245 aa, Artificial Sequence; identical to SEQ ID NO: 3161
  Synthetic Polypeptide

SEQ ID NO: 3183 - protein, 245 aa, Artificial Sequence
  Synthetic Polypeptide
SYVLTQPPSVSVAPGQTARITCGGNNIGSKTVHWYQQPPGQAPVVVVYDDSDRPSGIPERFSGSNSGNTATLTISRVEAGDEAVYYCQVWDSSSDHVVFGGGTKLTVLGGGGSGGGGSGGGGSQLQLQESGPGLVKPSETLSLTCTVSGGSISSGSYIWGWIRQPPGKGLEWIGSIYYSGITYYNPSLKSRVTISVDTSKNQFSLKLSSVTAADTAVYYCARHDGAVAGLFDYWGQGTLVTVSSA

SEQ ID NO: 3184 - protein, 245 aa, Artificial Sequence
  Synthetic Polypeptide
SYVLTQPPSVSVAPGQTARITCGGNNIGSKTVHWYQQPPGQAPVVVVYDDSDRPSGIPERFSGSNSGNTATLTISRVEAGDEAVYYCQVWDSSSDHVVFGGGTKLTVLGGGGSGGGGSGGGGSQLQLQESGPGLVKPSETLSLTCTVSGGSISSGSYFWGWIRQPPGKGLEWIGSIYYSGITYYNPSLKSRVTISVDTSKNQFSLKLSSVTAADTAVYYCARHDGAMAGLFDYWGQGTLVTVSSA

SEQ ID NO: 3185 - protein, 245 aa, Artificial Sequence
  Synthetic Polypeptide
SYVLTQPPSVSVAPGQTARITCGGNNIGSKTVHWYQQPPGQAPVVVVYDDSDRPSGIPERFSGSNSGNTATLTISRVEAGDEAVYYCQVWDSSSDHVVFGGGTKLTVLGGGGSGGGGSGGGGSQLQLQESGPGLVKPSETLSLTCTVSGGSISSGSYFWGWIRQPPGKGLEWIGSIYYSGSTYYNPSLKSRVTISVDTSKNQFSLKLSSVTAADTAVYYCARHDGAVAGLFDYWGQGTLVTVSSA

SEQ ID NO: 3186 - protein, 245 aa, Artificial Sequence
  Synthetic Polypeptide
SYVLTQPPSVSVAPGQTARITCGGNNIGSKTVHWYQQPPGQAPVVVVYDDSDRPSGIPERFSGSNSGNTATLTISRVEAGDEAVYYCQVWDSSSDHVVFGGGTKLTVLGGGGSGGGGSGGGGSQLQLQESGPGLVKPSETLSLTCTVSGGSISSGSYFWGWIRQPPGKGLEWIGSIYYSGISYYNPSLKSRVTISVDTSKNQFSLKLSSVTAADTAVYYCARHDGAVAGLFDYWGQGTLVTVSSA

SEQ ID NO: 3187 - protein, 245 aa, Artificial Sequence
  Synthetic Polypeptide
SYVLTQPPSVSVAPGQTARITCGGNNIGSKTVHWYQQPPGQAPVVVVYDDSDRPSGIPERFSGSNSGNTATLTISRVEAGDEAVYYCQVWDSSSDHVVFGGGTKLTVLGGGGSGGGGSGGGGSQLQLQESGPGLVKPSETLSLTCTVSGGSISSGSYFWGWIRQPPGKGLEWIGSIYYSGITYYNPGLKSRVTISVDTSKNQFSLKLSSVTAADTAVYYCARHDGAVAGLFDYWGQGTLVTVSSA

SEQ ID NO: 3188 - protein, 245 aa, Artificial Sequence
  Synthetic Polypeptide
SYVLTQPPSVSVAPGQTARITCGGNNIGSKTVHWYQQPPGQAPVVVVYDDSDRPSGIPERFSGSNSGNTATLTISRVEAGDEAVYYCQVWDSSSDHVVFGGGTKLTVLGGGGSGGGGSGGGGSQLQLQESGPGLVKPSETLSLTCTVSGGSISSGSYFWGWIRQPPGKGLEWIGSIYYSGITYYNPTLKSRVTISVDTSKNQFSLKLSSVTAADTAVYYCARHDGAVAGLFDYWGQGTLVTVSSA

SEQ ID NO: 3189 - protein, 238 aa, Artificial Sequence; identical to SEQ ID NO: 3147
  Synthetic Polypeptide

SEQ ID NO: 3190 - protein, 238 aa, Artificial Sequence
  Synthetic Polypeptide
DIQMTQSPSSLSASVGDRVTITCKASQDVGTAVDWYQQKPGKAPKLLIYWASTRHTGVPSRFSGSGSGTDFTLTISSLQPEDFATYYCQQYNSYPLTFGQGTKVEIKRGGGGSGGGGSGGGGSQVQLVQSGAEVKKPGESVKVSCKASGYTFTEYTIHWVRQAPGQGLEWMGNINPNNGGTTYNQKFEDRVTITADKSTSTAYMELSSLRSEDTAVYYCARGWNFDYWGQGTTVTVSS

SEQ ID NO: 3191 - protein, 238 aa, Artificial Sequence; identical to SEQ ID NO: 3146
  Synthetic Polypeptide

SEQ ID NO: 3192 - protein, 238 aa, Artificial Sequence
  Synthetic Polypeptide
DIVMTQSHKFMSTSVGDRVSIICKASQDVGTAVDWYQQKPGQSPKLLIYWASTRHTGVPDRFTGSGSGTDFTLAITNVQSEDLADYFCQQYNSYPLTFGAGTKLEIKRGGGGSGGGGSGGGGSQVQLVQSGAEVKKPGESVKVSCKASGYTFTEYTIHWVRQAPGQGLEWMGNINPNNGGTTYNQKFEDRVTITADKSTSTAYMELSSLRSEDTAVYYCARGWNFDYWGQGTTVTVSS

SEQ ID NO: 3193 - protein, 240 aa, Artificial Sequence
  Synthetic Polypeptide
DIQMTQSPSSLSASVGDRVTITCKASQDVGTAVDWYQQKPGKAPKLLISWASTRHTGVPSRFSGSGSGTDFTLTISSLQPEDFATYFCQQYNSYPLTFGQGTKVEIKRTVGGGGSGGGGSGGGGSEVQLVESGGGLVQPGGSLRLSCAASGYTFTEYTIHWVRQAPGKGLEWVANINPNNGGTTYNQKFEDRFTISRDNSKNTLYLQMNSLRAEDTAVYYCARGWNFDYWGQGTLVTVSS

SEQ ID NO: 3194 - protein, 240 aa, Artificial Sequence
  Synthetic Polypeptide
DIQMTQSPSSLSASVGDRVTITCKASQDVGTAVDWYQQKPGKAPKLLISWASTRHTGVPSRFSGSGSGTDFTLTISSLQPEDFATYFCQQYNSYPLTFGQGTKVEIKRTVGGGGSGGGGSGGGGSEVQLQQSGPELVKPGTSVRISCKTSGYTFTEYTIHWVKQSHGKSLEWIGNINPNNGGTTYNQKFEDKATLTVDKSSSTAYMELRSLTSEDSAVYYCAAGWNFDYWGQGTTLTVSS

SEQ ID NO: 3195 - protein, 240 aa, Artificial Sequence; identical to SEQ ID NO: 3148
  Synthetic Polypeptide

SEQ ID NO: 3196 - protein, 244 aa, Artificial Sequence; identical to SEQ ID NO: 3155
  Synthetic Polypeptide

SEQ ID NO: 3197 - protein, 243 aa, Artificial Sequence
  Synthetic Polypeptide
DIQMTQSPSSLSASVGDRVTITCKSSQSLLYSSNQKNYLAWFQQKPGKAPKLLIYWASTRESGVPSRFSGSGSGTDFTLTISSLQPEDFATYFCHQYLSSYTFGQGTKVEIKRGGGGSGGGGSGGGGSEVQLVESGGGLVQPGGSLRLSCAASGFTFTTYWMHWVRQAPGKGLEWVGYIRPSTGYTEYNQKFKDRFTISADTSKNTAYLQMNSLRAEDTAVYYCARSRWLLDYWGQGTLVTVS

SEQ ID NO: 3198 - protein, 241 aa, Artificial Sequence
  Synthetic Polypeptide
DIQMTQSPSSLSASVGDRVTITCKSSQSLLYSSNQKNYLAWFQQKPGKAPKLLIYWASTRESGVPSRFSGSGSGTDFTLTISSLQPEDFATYFCHQYLSSYTFGQGTKVEIKRGGGGSGGGGSGGGGSDIQMTQSPSSLSASVGDRVTITCKSSQSLLYSSNQKNYLAWFQQKPGKAPKLLIYWASTRESGVPSRFSGSGSGTDFTLTISSLQPEDFATYFCHQYLSSYTFGQGTKVEIKR

SEQ ID NO: 3199 - protein, 240 aa, Artificial Sequence; identical to SEQ ID NO: 3158
  Synthetic Polypeptide

SEQ ID NO: 3200 - protein, 240 aa, Artificial Sequence; identical to SEQ ID NO: 3072
  Synthetic Polypeptide

SEQ ID NO: 3201 - protein, 240 aa, Artificial Sequence
  Synthetic Polypeptide
DIQMTQSPSSLSASVGDRVTITCRASQDISSYLNWYQQKPGKAPKLLIYYTSRLHSGVPSRFSGSGSGTDFTLTISSLQPEDFATYYCQQGNTLPYTFGQGTKVEIKRGGGGSGGGGSGGGGSEVQLVESGGGLVQPGGSLRLSCAASGYTFSDYFMSWVRQAPGKGLEWVATISNGGTYTYYPDSVKGRFTISRDNSKNTLYLQMNSLRAEDTAVYYCARFDGYIFDYWGQGTLVTVSS

SEQ ID NO: 3202 - protein, 240 aa, Artificial Sequence; identical to SEQ ID NO: 3159
  Synthetic Polypeptide

SEQ ID NO: 3203 - protein, 240 aa, Artificial Sequence
  Synthetic Polypeptide
DIQMTQSPSSLSASVGDRVTITCRASQDISNYLNWYQQKPGKAPKLLIYYTSRLHSGVPSRFSGSGSGTDFTLTISSLQPEDFATYYCQQGNTLPWTFGQGTKVEIKRGGGGSGGGGSGGGGSEVQLVESGGGLVQPGGSLRLSCAASGYTFSDYFMSWVRQAPGKGLEWVATISNGGTYTYYPDSVKGRFTISRDNSKNTLYLQMNSLRAEDTAVYYCARFDGYIFDYWGQGTLVTVSS

SEQ ID NO: 3204 - protein, 240 aa, Artificial Sequence; identical to SEQ ID NO: 3160
  Synthetic Polypeptide

SEQ ID NO: 3205 - protein, 5 aa, Artificial Sequence
  Synthetic Polypeptide
GGGGG

SEQ ID NO: 3206 - protein, 5 aa, Artificial Sequence
  Synthetic Polypeptide
GGGGG

SEQ ID NO: 3207 - protein, 5 aa, Artificial Sequence
  Synthetic Polypeptide
GGGGG

SEQ ID NO: 3208 - protein, 5 aa, Artificial Sequence
  Synthetic Polypeptide
GGGGG

SEQ ID NO: 3209 - protein, 5 aa, Artificial Sequence
  Synthetic Polypeptide
GGGGG

SEQ ID NO: 3210 - protein, 267 aa, Artificial Sequence
  Synthetic Polypeptide
MALPVTALLLPLALLLHAARPEVQLVESGGGLVQPGGSLRLSCAASGFNIKDTCIGWVRRAPGKEEELVAKICKYSGHTRYADSVKGRFTISADTSKNTAYLQMNSLRAEDTAVYYCAAVSVRDGHYNYWGQGTTVTVSSGGGSGGGSEVQLVESGGGLVQPGGSLRLSCAASGFNIKDTCIGWVRRAPGKEEELVADICPYKGSTRYADSVKGRFTISADTSKNTAYLQMNSLRAEDTAVYYCAIVSARDGYYNYWGQGTTVTVSS

SEQ ID NO: 3211 - protein, 140 aa, Artificial Sequence
  Synthetic Polypeptide
MALPVTALLLPLALLLHAARPEVQLVESGGGLVQPGGSLRLSCAASGFNIKDTCIGWVRRAPGKEEELVAKICKYSGHTRYADSVKGRFTISADTSKNTAYLQMNSLRAEDTAVYYCAAVSVRDGHYNYWGQGTTVTVSS

SEQ ID NO: 3212 - protein, 267 aa, Artificial Sequence
  Synthetic Polypeptide
MALPVTALLLPLALLLHAARPEVQLVESGGGLVQPGGSLRLSCTFSGGTFSSYTMGWFRQAPGKEREFVAEVRWGGVTTYSNSLKDRFSISEDSVKNAVYLQMNSLKPEDTAVYYCAAVRQMYMTVVPDYWGQGTLVTVSSSGGGGSFEQLQLQESGPGLVKPSETLSLTCTVSGGSISSGDYYWGWIRQPPGKGLEWIGHIYYSGATYYNPSLKSRVTISVDTSRNQFSLKLSSVTAADTAVYYCTRDDSSNWRSRGQGTLVTVSS

SEQ ID NO: 3213 - protein, 141 aa, Artificial Sequence
  Synthetic Polypeptide
MALPVTALLLPLALLLHAARPEVQLVESGGGLVQPGGSLRLSCTFSGGTFSSYTMGWFRQAPGKEREFVAEVRWGGVTTYSNSLKDRFSISEDSVKNAVYLQMNSLKPEDTAVYYCAAVRQMYMTVVPDYWGQGTLVTVSS

SEQ ID NO: 3214 - protein, 279 aa, Artificial Sequence
  Synthetic Polypeptide
MALPVTALLLPLALLLHAARPEVQLVESGGGVVQPGRSLRLSCAASGFSFSGYGMHWVRQAPGKGLEWVAYISYDGSNKYYADSVKGRFTISRDNSKNTLYLQMNSLRAEDTAVYYCAKDPAWGLRLGESSSYDFDIWGQGTMVTVSSGSGGGGSGGGGSGGGGSFEVQLLESGGGLVQPGGSLRLSCAASGFSFSSYALSWVRQAPGKGLEWVSSIGENDGTTDYADAVKGRFTISRDNSKNTLYLQMNSLRVEDTAVYYCVKDGVHWGQGTLVTVSS

SEQ ID NO: 3215 - protein, 148 aa, Artificial Sequence
  Synthetic Polypeptide
MALPVTALLLPLALLLHAARPEVQLVESGGGVVQPGRSLRLSCAASGFSFSGYGMHWVRQAPGKGLEWVAYISYDGSNKYYADSVKGRFTISRDNSKNTLYLQMNSLRAEDTAVYYCAKDPAWGLRLGESSSYDFDIWGQGTMVTVSS

SEQ ID NO: 3216 - protein, 272 aa, Artificial Sequence
  Synthetic Polypeptide
MDWIWRILFLVGAATGAHSEVQLLESGGGLVQPGGSLRLSCAASGFSFSSYALSWVRQAPGKGLEWVSSIGENDGTTDYADAVKGRFTISRDNSKNTLYLQMNSLRVEDTAVYYCVKDGVHWGQGTLVTVSSGSGGGGSGGGGSFEVQLVESGGGVVQPGRSLRLSCAASGFSFSGYGMHWVRQAPGKGLEWVAYISYDGSNKYYADSVKGRFTISRDNSKNTLYLQMNSLRAEDTAVYYCAKDPAWGLRLGESSSYDFDIWGQGTMVTVSS

SEQ ID NO: 3217 - protein, 132 aa, Artificial Sequence
  Synthetic Polypeptide
MDWIWRILFLVGAATGAHSEVQLLESGGGLVQPGGSLRLSCAASGFSFSSYALSWVRQAPGKGLEWVSSIGENDGTTDYADAVKGRFTISRDNSKNTLYLQMNSLRVEDTAVYYCVKDGVHWGQGTLVTVSS

SEQ ID NO: 3218 - protein, 145 aa, Artificial Sequence
  Synthetic Polypeptide
MALPVTALLLPLALLLHAARPQLQLQESGPGLVKPSETLALTCNVSGGSISSSSYYWGWIRQPPGKRLEWIGSIYYSGSTYFNPSLKSRVTISVDTSKNQFSLKLSSVTAADTAVYYCAGGDYYGPVGQWPSDYRGQGTLVTVSS

SEQ ID NO: 3219 - protein, 275 aa, Artificial Sequence
  Synthetic Polypeptide
MDWIWRILFLVGAATGAHSQLQLQESGPGLVKPSETLSLTCTVSGGSVSSSSYYWGWIRQPPGKRLELIGSIYYGGSTYFNPSLKSRVTISVDTSKNQFSLKLSSVTAADTAVYYCAGGDTYGPVGQWPSDYRGQGTLVTVSSGGGGSGGGSFEVQLLESGGGLVQPGGSLRLSCAASGFIFSIYAMSWVRQAPGKGLEWVSGISGSGVNTYYADSVKGRFIISRDNSRNTVYLQMNSLRADDTAVYHCANGKGWDGNTWYEDYRGQGTLVTVSS

SEQ ID NO: 3220 - protein, 143 aa, Artificial Sequence
  Synthetic Polypeptide
MDWIWRILFLVGAATGAHSQLQLQESGPGLVKPSETLSLTCTVSGGSVSSSSYYWGWIRQPPGKRLELIGSIYYGGSTYFNPSLKSRVTISVDTSKNQFSLKLSSVTAADTAVYYCAGGDTYGPVGQWPSDYRGQGTLVTVSS

SEQ ID NO: 3221 - protein, 142 aa, Artificial Sequence
  Synthetic Polypeptide
MALPVTALLLPLALLLHAARPEVQLLESGGGLVQPGGSLRLSCAASGFTFSSYAMSWVRQAPGKGLEWVSSISGSGDYIYYADSVKGRFTISRDISKNTLYLQMNSLRAEDTAVYYCAKEGTGANSSLADYRGQGTLVTVSS

SEQ ID NO: 3222 - protein, 139 aa, Artificial Sequence
  Synthetic Polypeptide
MALPVTALLLPLALLLHAARPQVQLVESGGGLVQPGGSLRLSCAASGFTFTNHAMSWVRQAPGKGLELVSSISGNGRTTYYADSVKGRFTISRDISKNTLDLQMNSLRAEDTAVYYCAKDGGETLVDSRGQGTLVTVSS

SEQ ID NO: 3223 - protein, 267 aa, Artificial Sequence
  Synthetic Polypeptide
MALPVTALLLPLALLLHAARPQLQLQESGPGLVKPSETLSLTCTVSGDSISSGDYYWGWIRQPPGKGLEWIGHIYYSGVTYYNPSLKSRVTISVDTSRNQFSLKLSSVTAADTAVYYCTREDSSNWRSRGQGTLVTVSSLESGGGGSFEVQLLESGGGLIQPGGSLRLSCAASGFTFSSHAMTWVRQAPGKGLEWVSAISGSGDYTHYADSVKGRFTISRDNSKNTVYLQMNSLRAEDSAVYYCAKDEDGGSLLGHRGQGTLVTVSS

SEQ ID NO: 3224 - protein, 127 aa, Artificial Sequence
  Synthetic Polypeptide
EVQLVESGGGVVQPGRSLRLSCAASGFSFSGYGMHWVRQAPGKGLEWVAYISYDGSNKYYADSVKGRFTISRDNSKNTLYLQMNSLRAEDTAVYYCAKDPAWGLRLGESSSYDFDIWGQGTMVTVSS

SEQ ID NO: 3225 - protein, 113 aa, Artificial Sequence
  Synthetic Polypeptide
EVQLLESGGGLVQPGGSLRLSCAASGFSFSSYALSWVRQAPGKGLEWVSSIGENDGTTDYADAVKGRFTISRDNSKNTLYLQMNSLRVEDTAVYYCVKDGVHWGQGTLVTVSS

SEQ ID NO: 3226 - protein, 113 aa, Artificial Sequence; identical to SEQ ID NO: 3225
  Synthetic Polypeptide

SEQ ID NO: 3227 - protein, 127 aa, Artificial Sequence; identical to SEQ ID NO: 3224
  Synthetic Polypeptide

SEQ ID NO: 3228 - protein, 123 aa, Artificial Sequence
  Synthetic Polypeptide
QVQLVESGGGLVQAGDSVTLSCTASGRTFSSYALAWFRQRPGKEREFVAGLRWGGPTNYADSVKDRFTISGDSAKHTMYLQMNSLKPEDTAVYYCGYNPGGWAVPSQYEYDSWGQGTQVTVSS

SEQ ID NO: 3229 - protein, 118 aa, Artificial Sequence
  Synthetic Polypeptide
QVQLQESGGGLAQAGGSLRLSCAASGRTFSMGWFRQAPGKEREFVAAITYSGGSPYYASSVRGRFTISRDNAKNTVYLQMNSLKPEDTAVYYCAANPTYGSDWNAENWGQGTQVTVSS

SEQ ID NO: 3230 - protein, 116 aa, Artificial Sequence
  Synthetic Polypeptide
EVQLVESGGGLVQPGGSLRLSCAASGFSFSDFWMSWVRQAPGKGLEWVATISQAGSEKDYVDSVKGRFTISRDNAKKSLYLQMNSLRAEDTAVYYCASGVYSFDYRGQGTLVTVSS

SEQ ID NO: 3231 - protein, 116 aa, Artificial Sequence
  Synthetic Polypeptide
EVQLVESGGGLVQPGGSLRLSCAASGFTFSNYWMSWVRQAPGKGQEWVATINQDGSDKDYVDSVKGRFTISRDNAKKSLYLQMNSLRAEDTAVYYCASGVYSFDYRGQGTLVTVSS

SEQ ID NO: 3232 - protein, 116 aa, Artificial Sequence
  Synthetic Polypeptide
EVQLVESGGGLVQPGGSLRLSCAASGIDFSRYWMSWVRQAPGKGLEWVATISQAGSEKDYVDSVKGRFTISRDNAKKSLYLQMNSLRAEDTAVYYCASGVYSFDYRGQGTLVTVSS

SEQ ID NO: 3233 - protein, 116 aa, Artificial Sequence
  Synthetic Polypeptide
EVQLVESGGGLVQPGGSLRLSCAASGIDFSRYWMSWVRQAPGKGQEWVATINQDGSDKDYVDSVKGRFTISRDNAKKSLYLQMNSLRAEDTAVYYCASGVYSFDYRGQGTLVTVSS

SEQ ID NO: 3234 - protein, 120 aa, Artificial Sequence
  Synthetic Polypeptide
EVQLVESGGGLVQPGGSLRLSCTFSGGTFSSYTMGWFRQAPGKEREFVAEVRWGGVTTYSNSLKDRFSISEDSVKNAVYLQMNSLKPEDTAVYYCAAVRQMYMTVVPDYWGQGTLVTVSS

SEQ ID NO: 3235 - protein, 118 aa, Artificial Sequence
  Synthetic Polypeptide
EVQLVESGGGLVQAGGSLRLSCAASGRTFSMGWFRQAPGKEREFVAAITYSGGSPYYADSVKGRFTISRDNAKNTVYLQMNSLKPEDTAVYYCAANPTYGSDWNAENWGQGTQVTVSS

SEQ ID NO: 3236 - protein, 118 aa, Artificial Sequence
  Synthetic Polypeptide
QLQLQESGPGLVKPSETLSLTCTVSGGSISSGDYYWGWIRQPPGKGLEWIGHIYYSGATYYNPSLKSRVTISVDTSRNQFSLKLSSVTAADTAVYYCTRDDSSNWRSRGQGTLVTVSS

SEQ ID NO: 3237 - protein, 118 aa, Artificial Sequence
  Synthetic Polypeptide
QLQLQESGPGLVKPSETLSLTCTVSGDSISSGDYYWGWIRQPPGKGLEWIGHIYYSGVTYYNPSLKSRVTISVDTSRNQFSLKLSSVTAADTAVYYCTREDSSNWRSRGQGTLVTVSS

SEQ ID NO: 3238 - protein, 118 aa, Artificial Sequence
  Synthetic Polypeptide
QLQLQESGPGLVKPSETLSLTCTVSGGSISSGDYYWGWIRQPPGKGLEWIGSISYSGSTYYNPSLKSRVTISVDTSRNQFSLKLSSVTAADTAVYYCTREDSSNWRSRGQGTLVTVSS

SEQ ID NO: 3239 - protein, 124 aa, Artificial Sequence
  Synthetic Polypeptide
QLQLQESGPGLVKPSETLALTCNVSGGSISSSSYYWGWIRQPPGKRLEWIGSIYYSGSTYFNPSLKSRVTISVDTSKNQFSLKLSSVTAADTAVYYCAGGDYYGPVGQWPSDYRGQGTLVTVSS

SEQ ID NO: 3240 - protein, 130 aa, Artificial Sequence
  Synthetic Polypeptide
EVQLLESGGGLVQPGGSLRLSCAASGFIFSSYAMSWVRQAPGKGQEWVSGVSGTGVNTYYADSVKGRFTISRDNSKNTLYLQMNSLRAEDTAVYYCASGKGWDSGSWYEDYRGQGTLVTVSSTRPRLCLL

SEQ ID NO: 3241 - protein, 124 aa, Artificial Sequence
  Synthetic Polypeptide
QLQLQESGPGLVKPSETLSLTCTVSGGSVSSSSYYWGWIRQPPGKRLELIGSIYYGGSTYFNPSLKSRVTISVDTSKNQFSLKLSSVTAADTAVYYCAGGDTYGPVGQWPSDYRGQGTLVTVSS

SEQ ID NO: 3242 - protein, 122 aa, Artificial Sequence
  Synthetic Polypeptide
EVQLLESGGGLVQPGGSLRLSCAASGFIFSIYAMSWVRQAPGKGLEWVSGISGSGVNTYYADSVKGRFIISRDNSRNTVYLQMNSLRADDTAVYHCANGKGWDGNTWYEDYRGQGTLVTVSS

SEQ ID NO: 3243 - protein, 117 aa, Artificial Sequence
  Synthetic Polypeptide
EVQVLESGGGLVQPGGSLRLSCAASGFTFSNFAMSWVRQAPGKGLEWVSTISGSAGTTDYADSVKGRFTISRDNSKKTLYLQMNSLRVEDTAVYYCADGRGPFFDYRGQGTLVTVSS

SEQ ID NO: 3244 - protein, 119 aa, Artificial Sequence
  Synthetic Polypeptide
EVQLVESGGGLVQPGGSLRLSCAASGFNIKDTCIGWVRRAPGKEEELVAKICKYSGHTRYADSVKGRFTISADTSKNTAYLQMNSLRAEDTAVYYCAAVSVRDGHYNYWGQGTTVTVSS

SEQ ID NO: 3245 - protein, 119 aa, Artificial Sequence
  Synthetic Polypeptide
EVQLVESGGGLVQPGGSLRLSCAASGFNIKDTCIGWVRRAPGKEEELVADICPYKGSTRYADSVKGRFTISADTSKNTAYLQMNSLRAEDTAVYYCAIVSARDGYYNYWGQGTTVTVSS

SEQ ID NO: 3246 - protein, 119 aa, Artificial Sequence
  Synthetic Polypeptide
EVQLLESGGGLVQPGGSLRLSCAASGFTFSSYAMSWVRQAPGKGLEWVSAITGSGGSTYYADSVKGRFTISRDNSKNTLYLQMNSLRAEDTAVYYCAKDEDGGSLLGHRGQGTLVTVSS

SEQ ID NO: 3247 - protein, 119 aa, Artificial Sequence
  Synthetic Polypeptide
EVQLLESGGGLIQPGGSLRLSCAASGFTFSSHAMTWVRQAPGKGLEWVSAISSGGSYTYYADSVKGRFTISRDNSKNTLYLQMNSLRAEDTAVYYCAKDEDGGSLLGHRGQGTLVTVSS

SEQ ID NO: 3248 - protein, 119 aa, Artificial Sequence
  Synthetic Polypeptide
EVQLVESGGGLVQPGGSLRLSCAASGFSFSDFWMSWVRQAPGKGLEWVSAISGSGDYTHYADSVKGRFTISRDNSKNTVYLQMNSLRAEDSAVYYCAKDEDGGSLLGHRGQGTLVTVSS

SEQ ID NO: 3249 - protein, 121 aa, Artificial Sequence
  Synthetic Polypeptide
EVQLLESGGGLVQPGGSLRLSCAASGFAFSIYDMSWVRQAPGKGLEWVSSISGSGDYIYYADSVKGRFTISRDISKNTLYLQMNSLRAEDTAVYYCAKEGTGANSSLADYRGQGTLVTVSS

SEQ ID NO: 3250 - protein, 121 aa, Artificial Sequence
  Synthetic Polypeptide
EVQLLESGGGLVQPGGSLRLSCAASGFTFSSYAMSWVRQAPGKGLEWVSSISGSGDYIYYADSVKGRFTISRDISKNTLYLQMNSLRAEDTAVYYCAKEGTGANSSLADYRGQGTLVTVSS

SEQ ID NO: 3251 - protein, 118 aa, Artificial Sequence
  Synthetic Polypeptide
QVQLVESGGGLVQPGGSLRLSCAASGFTFTNHAMSWVRQAPGKGLELVSSISGNGRTTYYADSVKGRFTISRDISKNTLDLQMNSLRAEDTAVYYCAKDGGETLVDSRGQGTLVTVSS

SEQ ID NO: 3252 - protein, 119 aa, Artificial Sequence
  Synthetic Polypeptide
EVQLLESGGGLIQPGGSLRLSCAASGFTFSSHAMTWVRQAPGKGLEWVSAISGSGDYTHYADSVKGRFTISRDNSKNTVYLQMNSLRAEDSAVYYCAKDEDGGSLLGHRGQGTLVTVSS

SEQ ID NO: 3253 - protein, 120 aa, Artificial Sequence
  Synthetic Polypeptide
QVQLQESGGGLVQAGDSLRLSCAASGRAVSSLFMGWFRRAPGKERELVAAISRYSLYTYYADSVKGRFTISADNAKNAVYLQMNSLKPEDTAVYYCASKLEYTSNDYDSWGQGTQVTVSS

SEQ ID NO: 3254 - protein, 120 aa, Artificial Sequence
  Synthetic Polypeptide
EVQLQESGGGLVQPGGSLRLSCAASGRTFSSLFMGWFRQAPGKERELVAAISRYSLYTYYADSVKGRFTISADNAKNAVYLQMNSLKPEDTAVYYCASKLEYTSNDYDSWGQGTQVTVSS

SEQ ID NO: 3255 - protein, 120 aa, Artificial Sequence
  Synthetic Polypeptide
EVQLQESGGGLVQPGGSLRLSCAASGRTFSSLFMGWVRQAPGKGLELVSAISRYSLYTYYADSVKGRFTISRDNAKNTLYLQMNSLRPEDTAVYYCASKLEYTSNDYDSWGQGTLVTVSS

SEQ ID NO: 3256 - protein, 128 aa, Artificial Sequence
  Synthetic Polypeptide
EVQLVESGGGLVQPGGSLRLSCEASGFASDDYIIGWFRQAPGKEREGVSCISSKYANTVYTDSVKGRFRLSRGTAKNTVYLQMSALKPEDTAVYYCAMDSRRVTCPEISTMHRNFDSWGQGTLVTVSS

SEQ ID NO: 3257 - protein, 128 aa, Artificial Sequence
  Synthetic Polypeptide
EVQLVESGGGLVQPGGSLRLSCAASGFASDYYIIGWFRQAPGKEREGVSCISSRYANTNYADSVKGRFTISRDNAKNTVYLQMNSLKPEDTAVYYCAADTRRYTCPDIATMHRNFDSWGQGTLVTVSS

SEQ ID NO: 3258 - protein, 124 aa, Artificial Sequence
  Synthetic Polypeptide
EVQLVESGGSLVQPGGSLRLSCAASGFTFDDYAMSWVRQVPGKGLEWVSSINWSGTHTDYADSVKGRFTISRNNANNTLYLQMNSLKSEDTAVYYCAKNWRDAGTTWFEKSGSAGQGTQVTVSS

SEQ ID NO: 3259 - protein, 118 aa, Artificial Sequence
  Synthetic Polypeptide
EVQLVESGGGLVQAGGSLRLSCAASGITFSINTMGWYRQAPGKQRELVALISSIGDTYYADSVKGRFTISRDNAKNTVYLQMNSLKPEDTAVYYCKRFRTAAQGTDYWGQGTQVTVSS

SEQ ID NO: 3260 - protein, 119 aa, Artificial Sequence
  Synthetic Polypeptide
EVQLVESGGGLVQPGGSLRLSCAASGSIFGFNDMAWYRQAPGKQRELVALISRVGVTSSADSVKGRFTISRVNAKDTVYLQMNSLKPEDTAVYYCYMDQRLDGSTLAYWGQGTQVTVSS

SEQ ID NO: 3261 - protein, 120 aa, Artificial Sequence
  Synthetic Polypeptide
DVQLVESGGGLVQPGGSLRLSCAASGSIGGLNAMAWYRQAPGKERELVAGIFGVGSTRYADSVKGRFTISRDNSKNTVYLQMNSLRPEDTAVYYCRMSSVTRGSSDYWGQGTLVTVSSLE

SEQ ID NO: 3262 - protein, 125 aa, Artificial Sequence
  Synthetic Polypeptide
EVQLVESGGGLVQPGGSLRLSCAASGRTYYLNAMGWFRQAPGKEREFVAAIDWSEGNKDYADSVKGRFTISRDNSKNTVYLQMNSLRPEDTAVYYCAADTPPWGPLIYIESYDSWGQGTLVTVSS

SEQ ID NO: 3263 - protein, 123 aa, Artificial Sequence
  Synthetic Polypeptide
EVQLVESGGGSVQAGGSLRLSCAASGDTYGSYWMGWFRQAPGKEREGVAAINRGGGYTVYADSVKGRFTISRDTAKNTVYLQMNSLRPDDTADYYCAASGVLGGLHEDWFNYWGQGTLVTVSS

SEQ ID NO: 3264 - protein, 122 aa, Artificial Sequence
  Synthetic Polypeptide
VQLVESGGGSVQAGGSLRLSCAASGDTYGSYWMGWFRQAPGQEREAVAAINRGGGYTVYADSVKGRFTISRDNAKNTLYLQMNSLRPDDTADYYCAASGVLGGLHEDWFNYWGQGTLVTVSS

SEQ ID NO: 3265 - protein, 124 aa, Artificial Sequence
  Synthetic Polypeptide
EVQLVESGGGSVQTGGSLRLTCAASGRTSRSYGMGWFRQAPGKEREFVSGISWRGDSTGYADSVKGRFTISRDNAKNTVDLQMNSLKPEDTAIYYCAAAAGSAWYGTLYEYDYWGQGTLVTVSS

SEQ ID NO: 3266 - protein, 124 aa, Artificial Sequence
  Synthetic Polypeptide
EVQLVESGGGSVQAGGSLRLTCAASGSTSRSYGMGWFRQAPGKEREFVSGISWRGDSTGYADSVKGRFTISRDNAKNTVDLQMNSLKPEDTAIYYCAAAAGSTWYGTLYEYDYWGQGTLVTVSS

SEQ ID NO: 3267 - protein, 125 aa, Artificial Sequence
  Synthetic Polypeptide
DVQLVESGGGLVQPGGSLRLSCAASGFILDYYAIGWFRQAPGKEREGVLCIDASDDITYYADSVKGRFTISRDNSKNTVYLQMNSLRPEDTAVYYCATPIGLSSSCLLEYDYDYWGQGTLVTVSS

SEQ ID NO: 3268 - protein, 126 aa, Artificial Sequence
  Synthetic Polypeptide
EVQLVESGGGLVQAGDSLRLSCAASGRAFSRYAMGWFRQAPGKEREFVAAIGWGPSKTNYADSVKGRFTISRDNAKNTVYLQMNTLKPEDTAVYSCAAKFVNTDSTWSRSEMYTYWGQGTLVTVSS

SEQ ID NO: 3269 - protein, 122 aa, Artificial Sequence
  Synthetic Polypeptide
EVQLVESGGGLVQAGGSLRLSCVASGISSSKRNMGWYRQAPGKQRESVATISSGGNKDYTDAVKDRFTISRDTTKNTVYLQMNSLKPEDTAVYYCKIEAGTGWATRRGYTYWGQGTLVTVSS

SEQ ID NO: 3270 - protein, 112 aa, Artificial Sequence
  Synthetic Polypeptide
QVQLVQSGGGLVQPGGSLRLSCAASDFDFAAYEMSWVRQAPGQGLEWVAIISHDGIDKYYTDSVKGRFTISRDNSKNTLYLQMNTLRAEDTATYYCLRLGAVGQGTLVTVSS

SEQ ID NO: 3271 - protein, 120 aa, Artificial Sequence
  Synthetic Polypeptide
QVQLVQSGGGLVQPGGSLRLSCAASDFAFDDYEMSWVRQAPGKALEWIGDINHSGTTIYNPSLKSRVTISRDNSKNTLYLQMNTLRAEDTAIYYCARPHYGDYSDAFDIWGQGTMVTVSS

SEQ ID NO: 3272 - protein, 115 aa, Artificial Sequence [sequence omitted]

SEQ ID NO: 3273 - protein, 116 aa, Artificial Sequence
  Synthetic Polypeptide
EVQLVESGGGLVQAGGSLRLSCAASGSIFSGNVMGWYRRQAPGKEREWVAAIASGGSIYYRDSVKGRFTISRDNAKNTVYLQMNSLKPEDTAVYYCNSHPPTLPYWGLGTQVTVSS

SEQ ID NO: 3274 - protein, 126 aa, Artificial Sequence
  Synthetic Polypeptide
EVQLVESGGGSVQAGGSLRLSCTTSGRALNMYVMGWFRQAPGNEREFVAATSSSGGSTSYPDSVKGRFTISRDNAKNTVYLQMNSLKPEDTAAYRCAASPYVSTPTMNILEEYRYWGLGTQVTVSS

SEQ ID NO: 3275 - protein, 121 aa, Artificial Sequence [sequence omitted]

SEQ ID NO: 3276 - protein, 266 aa, Artificial Sequence
  Synthetic Polypeptide
EVQLVESGGGSVQTGGSLRLTCAASGRTSRSYGMGWFRQAPGKEREFVSGISWRGDSTGYADSVKGRFTISRDNAKNTVDLQMNSLKPEDTAIYYCAAAAGSAWYGTLYEYDYWGQGTLVTVSSLEGGGGSGGGGSGGGGSFEEVQLVESGGGSVQAGGSLRLSCAASGDTYGSYWMGWFRQAPGKEREGVAAINRGGGYTVYADSVKGRFTISRDTAKNTVYLQMNSLRPDDTADYYCAASGVLGGLHEDWFNYWGQGTLVTVSS

SEQ ID NO: 3277 - protein, 285 aa, Artificial Sequence
  Synthetic Polypeptide
EVQLVESGGGSVQAGGSLRLTCAASGSTSRSYGMGWFRQAPGKEREFVSGISWRGDSTGYADSVKGRFTISRDNAKNTVDLQMNSLKPEDTAIYYCAAAAGSTWYGTLYEYDYWGQGTLVTVSSLEGGGGSGGGGSGGGGSGSGGSGSGGSGSGGSGSGGSFEVQLVESGGGSVQAGGSLRLSCAASGDTYGSYWMGWFRQAPGQEREAVAAINRGGGYTVYADSVKGRFTISRDNAKNTLYLQMNSLRPDDTADYYCAASGVLGGLHEDWFNYWGQGTLVTVSS

SEQ ID NO: 3278 - protein, 275 aa, Artificial Sequence
  Synthetic Polypeptide
EVQLVESGGGLVQAGGSLRLSCAASGITFSINTMGWYRQAPGKQRELVALISSIGDTYYADSVKGRFTISRDNAKNTVYLQMNSLKPEDTAVYYCKRFRTAAQGTDYWGQGTQVTVSSLEGGGGSGGGGSGGGGSGSGGSGSGGSGSGGSGSGGSFEVQLVESGGGLVQPGGSLRLSCAASGSIFGFNDMAWYRQAPGKQRELVALISRVGVTSSADSVKGRFTISRVNAKDTVYLQMNSLKPEDTAVYYCYMDQRLDGSTLAYWGQGTQVTVSS

SEQ ID NO: 3279 - protein, 242 aa, Artificial Sequence; identical to SEQ ID NO: 2979
  Synthetic Polypeptide

SEQ ID NO: 3280 - protein, 280 aa, Artificial Sequence
  Synthetic Polypeptide
DVQLVESGGGLVQPGGSLRLSCAASGSIGGLNAMAWYRQAPGKERELVAGIFGVGSTRYADSVKGRFTISRDNSKNTVYLQMNSLRPEDTAVYYCRMSSVTRGSSDYWGQGTLVTVSSLEGGGGSGGGGSGGGGSGSGGSGSGGSGSGGSGSGGSFEVQLVESGGSLVQPGGSLRLSCAASGFTFDDYAMSWVRQVPGKGLEWVSSINWSGTHTDYADSVKGRFTISRNNANNTLYLQMNSLKSEDTAVYYCAKNWRDAGTTWFEKSGSAGQGTQVTVSS

SEQ ID NO: 3281 - protein, 288 aa, Artificial Sequence
  Synthetic Polypeptide
DVQLVESGGGLVQPGGSLRLSCAASGFILDYYAIGWFRQAPGKEREGVLCIDASDDITYYADSVKGRFTISRDNSKNTVYLQMNSLRPEDTAVYYCATPIGLSSSCLLEYDYDYWGQGTLVTVSSLEGGSGSGGGGSGGGGSGSGGSGSGGSGSGGSGSGGSFEVQLVESGGGLVQPGGSLRLSCAASGRTYYLNAMGWFRQAPGKEREFVAAIDWSEGNKDYADSVKGRFTISRDNSKNTVYLQMNSLRPEDTAVYYCAADTPPWGPLIYIESYDSWGQGTLVTVSS

SEQ ID NO: 3282 - protein, 271 aa, Artificial Sequence
  Synthetic Polypeptide
QVQLVQSGGGLVQPGGSLRLSCAASDFDFAAYEMSWVRQAPGQGLEWVAIISHDGIDKYYTDSVKGRFTISRDNSKNTLYLQMNTLRAEDTATYYCLRLGAVGQGTLVTVSSLEGGGGSGGGGSGGGGSGSGGSGSGGSGSGGSGSGGSFEQVQLVQSGGGLVQPGGSLRLSCAASDFAFDDYEMSWVRQAPGKALEWIGDINHSGTTIYNPSLKSRVTISRDNSKNTLYLQMNTLRAEDTAIYYCARPHYGDYSDAFDIWGQGTMVTVSS

SEQ ID NO: 3283 - protein, 119 aa, Artificial Sequence
  Synthetic Polypeptide
QVKLEESGGGLVQAGRSLRLSCAASEHTFSSHVMGWFRQAPGKERESVAVIGWRDISTSYADSVKGRFTISRDNAKKTLYLQMNSLKPEDTAVYYCAARRIDAADFDSWGQGTQVTVSS

SEQ ID NO: 3284 - protein, 118 aa, Artificial Sequence
  Synthetic Polypeptide
EVQLVESGGGLVQAGGSLRLSCAASGRTFTMGWFRQAPGKEREFVAAISLSPTLAYYAESVKGRFTISRDNAKNTVVLQMNSLKPEDTALYYCAADRKSVMSIRPDYWGQGTQVTVSS

SEQ ID NO: 3285 - protein, 252 aa, Artificial Sequence
  Synthetic Polypeptide
QVKLEESGGGLVQAGRSLRLSCAASEHTFSSHVMGWFRQAPGKERESVAVIGWRDISTSYADSVKGRFTISRDNAKKTLYLQMNSLKPEDTAVYYCAARRIDAADFDSWGQGTQVTVSSGGGGSGGGGSGGGGSEVQLVESGGGLVQAGGSLRLSCAASGRTFTMGWFRQAPGKEREFVAAISLSPTLAYYAESVKGRFTISRDNAKNTVVLQMNSLKPEDTALYYCAADRKSVMSIRPDYWGQGTQVTVSS

SEQ ID NO: 3286 - protein, 116 aa, Artificial Sequence
  Synthetic Polypeptide
EVQLVESGGGLVQAGGSLRLSCIATGKVFSIYDMGWYRQAPGKQRELVAEITSSGTTHYDDFVSGRFTISRDNAKNTVYLQMNTLKAEDTAVYYCRANHVFGGSYWGQGTQVTVSS

SEQ ID NO: 3287 - protein, 122 aa, Artificial Sequence
  Synthetic Polypeptide
QVQLVESGGGLVQPGGSLRLSCEASGFTLDYYAIGWFRQAPGKEREGVICISRSDGSTYYADSVKGRFTISRDNAKKTVYLQMISLKPEDTAAYYCAAGADCSGYLRDYEFRGQGTQVTVSS

SEQ ID NO: 3288 - protein, 245 aa, Artificial Sequence
  Synthetic Polypeptide
EVQLVESGGGLVQAGGSLRLSCIATGKVFSIYDMGWYRQAPGKQRELVAEITSSGTTHYDDFVSGRFTISRDNAKNTVYLQMNTLKAEDTAVYYCRANHVFGGSYWGQGTQVTVSSEVAALEKQVQLVESGGGLVQPGGSLRLSCEASGFTLDYYAIGWFRQAPGKEREGVICISRSDGSTYYADSVKGRFTISRDNAKKTVYLQMISLKPEDTAAYYCAAGADCSGYLRDYEFRGQGTQVTVSS

SEQ ID NO: 3289 - protein, 128 aa, Artificial Sequence
  Synthetic Polypeptide
QVKLEESGGRLVQPRGSLRLSCAGSGRTFSTYGMAWFRQAPGKEREFVASKASMNYSGRTYYADSVKGRFTIARDNAKNMVFLQMNNLKPEDTAVYYCAAGTGCSTYGCFDAQIIDYWGKGTLVTVSS

SEQ ID NO: 3290 - protein, 119 aa, Artificial Sequence
  Synthetic Polypeptide
QVKLEESGGGLVQPGESLRLSCSASGSIFKVFRVFAMSWYRQGPGKQRELVASISSGETTTYADSVKGRFTISRDNAKNTAYLQMDSLKPEDTAVYYCNADHTFTGDFWGQGTQVTVSS

SEQ ID NO: 3291 - protein, 254 aa, Artificial Sequence
  Synthetic Polypeptide
QVKLEESGGRLVQPRGSLRLSCAGSGRTFSTYGMAWFRQAPGKEREFVASKASMNYSGRTYYADSVKGRFTIARDNAKNMVFLQMNNLKPEDTAVYYCAAGTGCSTYGCFDAQIIDYWGKGTLVTVSSEVAALEKQVKLEESGGGLVQPGESLRLSCSASGSIFKVFRVFAMSWYRQGPGKQRELVASISSGETTTYADSVKGRFTISRDNAKNTAYLQMDSLKPEDTAVYYCNADHTFTGDFWGQGTQVTVSS

SEQ ID NO: 3292 - protein, 117 aa, Artificial Sequence
  Synthetic Polypeptide
QVKLEESGGELVQPGGPLRLSCAASGNIFSINRMGWYRQAPGKQRAFVASITVRGITNYADSVKGRFTISVDKSKNTIYLQMNALKPEDTAVYYCNAVSSNRDPDYWGQGTQVTVSS

SEQ ID NO: 3293 - protein, 129 aa, Artificial Sequence
  Synthetic Polypeptide
PVQLVESGGGLVQAGDSLRLSCAASGRTFGIGTMGWFRQPPGKEREFVAAIRWSTGGTRYADSVKGRFTISRDNAKLTVDLQMDSLKPEDTAVYYCAADRLSLDLSGRYHYNPAVYDYWGQGTQVTVSS

SEQ ID NO: 3294 - protein, 261 aa, Artificial Sequence
  Synthetic Polypeptide
QVKLEESGGELVQPGGPLRLSCAASGNIFSINRMGWYRQAPGKQRAFVASITVRGITNYADSVKGRFTISVDKSKNTIYLQMNALKPEDTAVYYCNAVSSNRDPDYWGQGTQVTVSSGGGGSGGGGSGGGGSPVQLVESGGGLVQAGDSLRLSCAASGRTFGIGTMGWFRQPPGKEREFVAAIRWSTGGTRYADSVKGRFTISRDNAKLTVDLQMDSLKPEDTAVYYCAADRLSLDLSGRYHYNPAVYDYWGQGTQVTVSS

SEQ ID NO: 3295 - protein, 119 aa, Artificial Sequence
  Synthetic Polypeptide
AVQLVESGGGLVQAGDSLRLTCTASGRAFSTYFMAWFRQAPGKEREFVAGIAWSGGSTAYADSVKGRFTISRDNAKNTVYLQMNSLKSEDTAVYYCASRGIEVEEFGAWGQGTQVTVSS

SEQ ID NO: 3296 - protein, 120 aa, Artificial Sequence
  Synthetic Polypeptide
QVQLVESGGGLVQAGGSLRLSCAASGGTLSKNTVAWFRQAPGKERGFVASITWDGRTTYYADSVKGRFTISRDNAKNTVYLQMNSLKPEDTAVYVCADLGKWPAGPADYWGQGTQVTVSS

SEQ ID NO: 3297 - protein, 5 aa, Artificial Sequence
  Synthetic Polypeptide
GGGGG

SEQ ID NO: 3298 - protein, 5 aa, Artificial Sequence
  Synthetic Polypeptide
GGGGG

SEQ ID NO: 3299 - protein, 5 aa, Artificial Sequence
  Synthetic Polypeptide
GGGGG

SEQ ID NO: 3300 - protein, 5 aa, Artificial Sequence
  Synthetic Polypeptide
GGGGG

SEQ ID NO: 3301 - protein, 5 aa, Artificial Sequence
  Synthetic Polypeptide
GGGGG

SEQ ID NO: 3302 - protein, 5 aa, Artificial Sequence
  Synthetic Polypeptide
GGGGG

SEQ ID NO: 3303 - protein, 5 aa, Artificial Sequence
  Synthetic Polypeptide
GGGGG

SEQ ID NO: 3304 - protein, 5 aa, Artificial Sequence
  Synthetic Polypeptide
GGGGG

SEQ ID NO: 3305 - protein, 5 aa, Artificial Sequence
  Synthetic Polypeptide
GGGGG

SEQ ID NO: 3306 - protein, 5 aa, Artificial Sequence
  Synthetic Polypeptide
GGGGG

SEQ ID NO: 3307 - protein, 5 aa, Artificial Sequence
  Synthetic Polypeptide
GGGGG

SEQ ID NO: 3308 - protein, 5 aa, Artificial Sequence
  Synthetic Polypeptide
GGGGG

SEQ ID NO: 3309 - protein, 5 aa, Artificial Sequence
  Synthetic Polypeptide
GGGGG

SEQ ID NO: 3310 - protein, 5 aa, Artificial Sequence
  Synthetic Polypeptide
GGGGG

SEQ ID NO: 3311 - protein, 5 aa, Artificial Sequence
  Synthetic Polypeptide
GGGGG

SEQ ID NO: 3312 - protein, 5 aa, Artificial Sequence
  Synthetic Polypeptide
GGGGG

SEQ ID NO: 3313 - protein, 5 aa, Artificial Sequence
  Synthetic Polypeptide
GGGGG

SEQ ID NO: 3314 - protein, 5 aa, Artificial Sequence
  Synthetic Polypeptide
GGGGG

SEQ ID NO: 3315 - protein, 5 aa, Artificial Sequence
  Synthetic Polypeptide
GGGGG

SEQ ID NO: 3316 - protein, 5 aa, Artificial Sequence
  Synthetic Polypeptide
GGGGG

SEQ ID NO: 3317 - protein, 5 aa, Artificial Sequence
  Synthetic Polypeptide
GGGGG

SEQ ID NO: 3318 - protein, 5 aa, Artificial Sequence
  Synthetic Polypeptide
GGGGG

SEQ ID NO: 3319 - protein, 5 aa, Artificial Sequence
  Synthetic Polypeptide
GGGGG

SEQ ID NO: 3320 - protein, 5 aa, Artificial Sequence
  Synthetic Polypeptide
GGGGG

SEQ ID NO: 3321 - protein, 5 aa, Artificial Sequence
  Synthetic Polypeptide
GGGGG

SEQ ID NO: 3322 - protein, 5 aa, Artificial Sequence
  Synthetic Polypeptide
GGGGG

SEQ ID NO: 3323 - protein, 5 aa, Artificial Sequence
  Synthetic Polypeptide
GGGGG

SEQ ID NO: 3324 - protein, 5 aa, Artificial Sequence
  Synthetic Polypeptide
GGGGG

SEQ ID NO: 3325 - protein, 5 aa, Artificial Sequence
  Synthetic Polypeptide
GGGGG

SEQ ID NO: 3326 - protein, 142 aa, Artificial Sequence
  Synthetic Polypeptide
MALPVTALLLPLALLLHAARPEVQLVESGGGLVQPGGSLRLSCAASGYAFSSYCVNWVRQAPGKEEEWVAQICPGDGDTNYNGKFKGRFTISRDNSKNTLYLQMNSLRAEDTAVYYCARSITTVVGCAYDYWGQGTLVTVSS

SEQ ID NO: 3327 - protein, 140 aa, Artificial Sequence
  Synthetic Polypeptide
MALPVTALLLPLALLLHAARPEVQLVESGGGLVQPGGSLRLSCAASGFDFSRYCMSWVRQAPGKEEEWIGEICPDSSTINYAPSLKDKFIISRDNAKNSLYLQMNSLRAEDTAVYYCARPDGNYWYYDVWGQGTLVTVSS

SEQ ID NO: 3328 - protein, 277 aa, Artificial Sequence
  Synthetic Polypeptide
MALPVTALLLPLALLLHAARPQVQLVQSGAEVKKPGASVKVSCKASGGTFSNYWMHWVRQAPGQGLEWMGWTYRGHSDTNYAQKFQGRVTMTRDTSISTAYMELSRLRSDDTAVYYCARGAIYDGYDVLDNRGQGTLVTVSSGSGGGGSGGGGSFEVQLLESGGGLVQPGGSLRLSCAASGFTFNSFAMSWVRQAPGKGLEWVSAISGSGGGTYYADSVKGRFTISRDISKNTLYLQMNSLRAEDTAVYYCAKDKILWFGEPVFDYRGQGTLVTVSS

SEQ ID NO: 3329 - protein, 142 aa, Artificial Sequence
  Synthetic Polypeptide
MALPVTALLLPLALLLHAARPQVQLVQSGAEVKKPGASVKVSCKASGGTFSNYWMHWVRQAPGQGLEWMGWTYRGHSDTNYAQKFQGRVTMTRDTSISTAYMELSRLRSDDTAVYYCARGAIYDGYDVLDNRGQGTLVTVSS

SEQ ID NO: 3330 - protein, 141 aa, Artificial Sequence
  Synthetic Polypeptide
MDWIWRILFLVGAATGAHSQVQLVESGGGLVQPGGSLRLSCAASGFTFSNYGMSWVRQAPGKGLELVSSIRSDGSWTYYADSVKGRFTISRDISKNTLDLQMNSLRAEDTAVYYCARRYWSKSHASVTDYRGQGTLVTVSS

SEQ ID NO: 3331 - protein, 277 aa, Artificial Sequence
  Synthetic Polypeptide
MDWIWRILFLVGAATGAHSQVQLVESGGGLVQPGGSLRLSCAASGFTFSNYGMSWVRQAPGKGLELVSSIRSDGSWTYYADSVKGRFTISRDISKNTLDLQMNSLRAEDTAVYYCARRYWSKSHASVTDYRGQGTLVTVSSGSGGGGSGGGGSFEQLQLQESGPGLVKPSETLSLTCTVSGGSVSSGSYYWGWIRQPPGKGLEWIGHISYSGSTYYNPSLKSRVTISVDTSRNQFSLKLSSVTAADTAVYYCARGRGYATSLAFDIRGQGTLVTVSS

SEQ ID NO: 3332 - protein, 142 aa, Artificial Sequence
  Synthetic Polypeptide
MALPVTALLLPLALLLHAARPEVQLVESGGGLVKPGGSLKLSCAASGYTFTSYVMGWVRRAPGKEEELIGYINPYNDGTKYNEKFQGRVTISSDKSISTAYMELSSLRSEDTAMYYCARGTYYYGTRVFDYRGQGTLVTVSS

SEQ ID NO: 3333 - protein, 144 aa, Artificial Sequence
  Synthetic Polypeptide
MALPVTALLLPLALLLHAARPEVQLVESGGGLVKPGGSLKLSCAASGFAFSIYDMGWVRRAPGKEEELVAYISSGGGTTYYPDTVKGRFTISRDNAKNTLYLQMSSLRAEDTAMYYCARHSGYGSSYGVLFAYRGQGTLVTVSS

SEQ ID NO: 3334 - protein, 145 aa, Artificial Sequence
  Synthetic Polypeptide
MALPVTALLLPLALLLHAARPEVQLVESGGGLVQPGRSLRLSCAASGFTFDDYAMGWVRRAPGKEEELVSGISWNSGSIGYADSVKGRFTISRDNAKNSLYLQMNSLRAEDTALYYCAKDKGGGYYDFWSGSDYRGQGTLVTVSS

SEQ ID NO: 3335 - protein, 142 aa, Artificial Sequence
  Synthetic Polypeptide
MALPVTALLLPLALLLHAARPEVQLVESGGGLVQPGGSLRLSCAASGFTFSSYAMGWVRRAPGKEEELVASISGSGDYIRYADSVKGRFTISADTSKNTAYLQMNSLRAEDTAVYYCAKEGTGANSSLADYRGQGTLVTVSS

SEQ ID NO: 3336 - protein, 142 aa, Artificial Sequence
  Synthetic Polypeptide
MALPVTALLLPLALLLHAARPEVQLVESGGGLVQPGGSLRLSCAASGFTFSSYAMTWFRQAPGKGLEWVASISGSGDYIRYEDSVEGRFTVSRDNAKNSVYLQMNSLRAEDTAVYYCAKEGTGANSSLADYWGQGTTVTVSS

SEQ ID NO: 3337 - protein, 142 aa, Artificial Sequence
  Synthetic Polypeptide
MALPVTALLLPLALLLHAARPEVQLVESGGGLVKPGGSLKLSCAASGYTFTSYCMGWVRRAPGKEEELIGYICPYNDGTKYNEKFQGRVTISSDKSISTAYMELSSLRSEDTAMYYCARGTYYYGTRVFDYRGQGTLVTVSS

SEQ ID NO: 3338 - protein, 276 aa, Artificial Sequence
  Synthetic Polypeptide
MALPVTALLLPLALLLHAARPEVQLVESGGGVVQPGRSLRLSCAASGYTFTSYVMGWVRRAPGKEEELIGYINPYNDGTYYADSVKGRFTISRDNSKNTLYLQMNSLRAEDTAVYYCARGTYYYGTRVFDYRGQGTMVTVSSGSGGGGSGGGGSFEVQLVESGGGVVQPGRSLRLSCAASGYTFTSYVMHWVRQAPGKGLEWIGYINPYNDGTYYADSVKGRFTISRDNSKNTLYLQMNSLRAEDTAVYYCARGTYYYGTRVFDYWGQGTMVTVSS

SEQ ID NO: 3339 - protein, 142 aa, Artificial Sequence
  Synthetic Polypeptide
MALPVTALLLPLALLLHAARPEVQLVESGGGVVQPGRSLRLSCAASGYTFTSYVMGWVRRAPGKEEELIGYINPYNDGTYYADSVKGRFTISRDNSKNTLYLQMNSLRAEDTAVYYCARGTYYYGTRVFDYRGQGTMVTVSS

SEQ ID NO: 3340 - protein, 121 aa, Artificial Sequence
  Synthetic Polypeptide
EVQLVESGGGLVKPGGSLKLSCAASGYTFTSYVMGWVRRAPGKEEELIGYINPYNDGTKYNEKFQGRVTISSDKSISTAYMELSSLRSEDTAMYYCARGTYYYGTRVFDYRGQGTLVTVSS

SEQ ID NO: 3341 - protein, 123 aa, Artificial Sequence
  Synthetic Polypeptide
EVQLVESGGGLVKPGGSLKLSCAASGFAFSIYDMGWVRRAPGKEEELVAYISSGGGTTYYPDTVKGRFTISRDNAKNTLYLQMSSLRAEDTAMYYCARHSGYGSSYGVLFAYRGQGTLVTVSS

SEQ ID NO: 3342 - protein, 124 aa, Artificial Sequence
  Synthetic Polypeptide
EVQLVESGGGLVQPGRSLRLSCAASGFTFDDYAMGWVRRAPGKEEELVSGISWNSGSIGYADSVKGRFTISRDNAKNSLYLQMNSLRAEDTALYYCAKDKGGGYYDFWSGSDYRGQGTLVTVSS

SEQ ID NO: 3343 - protein, 121 aa, Artificial Sequence
  Synthetic Polypeptide
EVQLVESGGGLVQPGGSLRLSCAASGFTFSSYAMGWVRRAPGKEEELVASISGSGDYIRYADSVKGRFTISADTSKNTAYLQMNSLRAEDTAVYYCAKEGTGANSSLADYRGQGTLVTVSS

SEQ ID NO: 3344 - protein, 121 aa, Artificial Sequence
  Synthetic Polypeptide
EVQLVESGGGLVQPGGSLRLSCAASGFTFSSYAMTWFRQAPGKGLEWVASISGSGDYIRYEDSVEGRFTVSRDNAKNSVYLQMNSLRAEDTAVYYCAKEGTGANSSLADYWGQGTTVTVSS

SEQ ID NO: 3345 - protein, 121 aa, Artificial Sequence
  Synthetic Polypeptide
EVQLVESGGGLVKPGGSLKLSCAASGYTFTSYCMGWVRRAPGKEEELIGYICPYNDGTKYNEKFQGRVTISSDKSISTAYMELSSLRSEDTAMYYCARGTYYYGTRVFDYRGQGTLVTVSS

SEQ ID NO: 3346 - protein, 121 aa, Artificial Sequence
  Synthetic Polypeptide
EVQLVESGGGVVQPGRSLRLSCAASGYTFTSYVMGWVRRAPGKEEELIGYINPYNDGTYYADSVKGRFTISRDNSKNTLYLQMNSLRAEDTAVYYCARGTYYYGTRVFDYRGQGTMVTVSS

SEQ ID NO: 3347 - protein, 121 aa, Artificial Sequence
  Synthetic Polypeptide
EVQLVESGGGVVQPGRSLRLSCAASGYTFTSYVMHWVRQAPGKGLEWIGYINPYNDGTYYADSVKGRFTISRDNSKNTLYLQMNSLRAEDTAVYYCARGTYYYGTRVFDYWGQGTMVTVSS

SEQ ID NO: 3348 - protein, 119 aa, Artificial Sequence; identical to SEQ ID NO: 3244
  Synthetic Polypeptide

SEQ ID NO: 3349 - protein, 119 aa, Artificial Sequence; identical to SEQ ID NO: 3245
  Synthetic Polypeptide

SEQ ID NO: 3350 - protein, 121 aa, Artificial Sequence
  Synthetic Polypeptide
EVQLVESGGGLVQPGGSLRLSCAASGYAFSSYCVNWVRQAPGKEEEWVAQICPGDGDTNYNGKFKGRFTISRDNSKNTLYLQMNSLRAEDTAVYYCARSITTVVGCAYDYWGQGTLVTVSS

SEQ ID NO: 3351 - protein, 119 aa, Artificial Sequence
  Synthetic Polypeptide
EVQLVESGGGLVQPGGSLRLSCAASGFDFSRYCMSWVRQAPGKEEEWIGEICPDSSTINYAPSLKDKFIISRDNAKNSLYLQMNSLRAEDTAVYYCARPDGNYWYYDVWGQGTLVTVSS

SEQ ID NO: 3352 - protein, 120 aa, Artificial Sequence; identical to SEQ ID NO: 3234
  Synthetic Polypeptide

SEQ ID NO: 3353 - protein, 122 aa, Artificial Sequence
  Synthetic Polypeptide
QLQLQESGPGLVKPSETLSLTCTVSGGSVSSGSYYWGWIRQPPGKGLEWIGHISYSGSTYYNPSLKSRVTISVDTSRNQFSLKLSSVTAADTAVYYCARGRGYATSLAFDIRGQGTLVTVSS

SEQ ID NO: 3354 - protein, 5 aa, Artificial Sequence
  Synthetic Polypeptide
GGGGG

SEQ ID NO: 3355 - protein, 135 aa, Artificial Sequence
  Synthetic Polypeptide
MACPGFLWALVISTCLEFSMAQTVTQSQPEMSVQEAETVTLSCTYDTSESDYYLFWYKQPPSRQMILVIRQEAYKQQNATENRFSVNFQKAAKSFSLKISDSQLGDAAMYFCAYRSAVNARLMFGDGTQLVVKPN

SEQ ID NO: 3356 - protein, 137 aa, Artificial Sequence
  Synthetic Polypeptide
MTIRLLCYMGFYFLGAGLMEADIYQTPRYLVIGTGKKITLECSQTMGHDKMYWYQQDPGMELHLIHYSYGVNSTEKGDLSSESTVSRIRTEHFPLTLESARPSHTSQYLCASSEARGLAEFTDTQYFGPGTRLTVLE

SEQ ID NO: 3357 - protein, 115 aa, Artificial Sequence
  Synthetic Polypeptide
AQTVTQSQPEMSVQEAETVTLSCTYDTSESDYYLFWYKQPPSRQMILVIRQEAYKQQNATENRFSVNFQKAAKSFSLKISDSQLGDAAMYFCAYRSAVNARLMFGDGTQLVVKPN

SEQ ID NO: 3358 - protein, 118 aa, Artificial Sequence
  Synthetic Polypeptide
EADIYQTPRYLVIGTGKKITLECSQTMGHDKMYWYQQDPGMELHLIHYSYGVNSTEKGDLSSESTVSRIRTEHFPLTLESARPSHTSQYLCASSEARGLAEFTDTQYFGPGTRLTVLE

SEQ ID NO: 3359 - protein, 114 aa, Artificial Sequence
  Synthetic Polypeptide
QEVTQIPAALSVPEGENLVLNCSFTDSAIYNLQWFRQDPGKGLTSLLLIQSSQREQTSGRLNASLDKSSGRSTLYIAASQPGDSATYLCAVRPTSGGSYIPTFGRGTSLIVHPY

SEQ ID NO: 3360 - protein, 114 aa, Artificial Sequence
  Synthetic Polypeptide
NAGVTQTPKFQVLKTGQSMTLQCAQDMNHEYMSWYRQDPGMGLRLIHYSVAIQTTDQGEVPNGYNVSRSTIEDFPLRLLSAAPSQTSVYFCASSYLGNTGELFFGEGSRLTVLE

SEQ ID NO: 3361 - protein, 110 aa, Artificial Sequence
  Synthetic Polypeptide
ILNVEQSPQSLHVQEGDSTNFTCSFPSSNFYALHWYRWETAKSPEALFVMTLNGDEKKKGRISATLNTKEGYSYLYIKGSQPEDSATYLCARNTGNQFYFGTGTSLTVIP

SEQ ID NO: 3362 - protein, 113 aa, Artificial Sequence
  Synthetic Polypeptide
GVTQTPKFQVLKTGQSMTLQCAQDMNHEYMSWYRQDPGMGLRLIHYSVGAGITDQGEVPNGYNVSRSTTEDFPLRLLSAAPSQTSVYFCASSFQTGASYGYTFGSGTRLTVLE

SEQ ID NO: 3363 - protein, 120 aa, Artificial Sequence
  Synthetic Polypeptide
AIELVPEHQTVPVSIGVPATLRCSMKGEAIGNYYINWYRKTQGNTMTFIYREKDIYGPGFKDNFQGDIDIAKNLAVLKILAPSERDEGSYYCACDTLGMGGEYTDKLIFGKGTRVTVEPR

SEQ ID NO: 3364 - protein, 126 aa, Artificial Sequence
  Synthetic Polypeptide
AGHLEQPQISSTKTLSKTARLECVVSGITISATSVYWYRERPGEVIQFLVSISYDGTVRKESGIPSGKFEVDRIPETSTSTLTIHNVEKQDIATYYCALWEAQQELGKKIKVFGPGTKLIITDKQL

SEQ ID NO: 3365 - protein, 5 aa, Artificial Sequence
  Synthetic Polypeptide
GGGGG

SEQ ID NO: 3366 - protein, 124 aa, Artificial Sequence
  Synthetic Polypeptide
GSDLGIKLLFAAAKGQDDEVRILLAAGADVNAKDFEGYTPLHVAAYDGHLEIVEVLLKAGADVNAKDSQGRTPLHEAAYSGHLEIVEVLLKAGADVNAQDDAGETPADLAAAWGHEDIAEVLQK

SEQ ID NO: 3367 - protein, 126 aa, Artificial Sequence
  Synthetic Polypeptide
RSDLGKKLLEAARAGQDDEVRILMANGADVNAKDEYGLTPLYLATAHGHLEIVEVLLKNGADVNAVDAIGFTPLHLAAFIGHLEIAEVLLKHGADVNAQDKFGKTAFDISIGNGNEDLAEILQKLN

SEQ ID NO: 3368 - protein, 58 aa, Artificial Sequence
  Synthetic Polypeptide
VDNKFNKERYSAYYEIWQLPNLNVRQKAAFIGSLQDDPSQSANLLAEAKKLNDAQAPK

SEQ ID NO: 3369 - protein, 51 aa, Artificial Sequence
  Synthetic Polypeptide
YAKEMRNAYWEIALLPNLTNQQKRAPIRKLYDDPSQSSELLSEAKKLNDSQ

SEQ ID NO: 3370 - protein, 51 aa, Artificial Sequence
  Synthetic Polypeptide
YAKEMWIAWEEIRNLPNLNGWQMTAFIAKLLDDPSQSSELLSEAKKLNDSQ

SEQ ID NO: 3371 - protein, 89 aa, Artificial Sequence
  Synthetic Polypeptide
LPAPKNLVVSRVTEDSARLSWTAPDAAFDSFAIGYWEWDDDGEAIVLTVPGSERSYDLTGLKPGTEYPVYIAGVKGGQWSFPLSAIFTT

SEQ ID NO: 3372 - protein, 91 aa, Artificial Sequence
  Synthetic Polypeptide
LPAPKNLVVSRVTEDSARLSWAIDEQRDWFESFLIQYQESEKVGEAIVLTVPGSERSYDLTGLKPGTEYTVSIYGVYHVYRSNPLSAIFTT

SEQ ID NO: 3373 - protein, 89 aa, Artificial Sequence
  Synthetic Polypeptide
LPAPKNLVVSRVTEDSARLSWTAPDAAFDSFPIGYWEWDDDGEAIVLTVPGSERSYDLTGLKPGTEYHVYIAGVKGGQWSFPLSAIFTT

SEQ ID NO: 3374 - protein, 94 aa, Artificial Sequence
  Synthetic Polypeptide
LPAPKNLVVSEVTEDSARLSWDDPWAFYESFLIQYQESEKVGEAIVLTVPGSERSYDLTGLKPGTEYTVSIYGVHNVYKDTNMRGLPLSAIFTT

SEQ ID NO: 3375 - protein, 89 aa, Artificial Sequence
  Synthetic Polypeptide
LPAPKNLVVSRVTEDSARLSWTAPDAAFDSFWIRYFEFLGSGEAIVLTVPGSERSYDLTGLKPGTEYVVNIMGVKGGKISPPLSAIFTT

SEQ ID NO: 3376 - protein, 193 aa, Artificial Sequence
  Synthetic Polypeptide
LPAPKNLVVSEVTEDSARLSWDDPWAFYESFLIQYQESEKVGEAIVLTVPGSERSYDLTGLKPGTEYTVSIYGVHNVYKDTNMRGLPLSAIFTTAPAPAPAPAPLPAPKNLVVSRVTEDSARLSWTAPDAAFDSFWIRYFEFLGSGEAIVLTVPGSERSYDLTGLKPGTEYVVNIMGVKGGKISPPLSAIFTT

SEQ ID NO: 3377 - protein, 90 aa, Artificial Sequence
  Synthetic Polypeptide
MLPAPKNLVVSRITEDSARLSWTAPDAAFDSFPIRYIETLIWGEAIWLDVPGSERSYDLTGLKPGTEYAVVITGVKGGRFSSPLVASFTT

SEQ ID NO: 3378 - protein, 597 aa, Artificial Sequence
  Synthetic Polypeptide
STIEEQAKTFLDKFNHEAEDLFYQSSLASWNYNTNITEENVQNMNNAGDKWSAFLKEQSTLAQMYPLQEIQNLTVKLQLQALQQNGSSVLSEDKSKRLNTILNTMSTIYSTGKVCNPDNPQECLLLEPGLNEIMANSLDYNERLWAWESWRSEVGKQLRPLYEEYVVLKNEMARANHYEDYGDYWRGDYEVNGVDGYDYSRGQLIEDVEHTFEEIKPLYEHLHAYVRAKLMNAYPSYISPIGCLPAHLLGDMWGRFWTNLYSLTVPFGQKPNIDVTDAMVDQAWDAQRIFKEAEKFFVSVGLPNMTQGFWENSMLTDPGNVQKAVCHPTAWDLGKGDFRILMCTKVTMDDFLTAHHEMGHIQYDMAYAAQPFLLRNGANEGFHEAVGEIMSLSAATPKHLKSIGLLSPDFQEDNETEINFLLKQALTIVGTLPFTYMLEKWRWMVFKGEIPKDQWMKKWWEMKREIVGVVEPVPHDETYCDPASLFHVSNDYSFIRYYTRTLYQFQFQEALCQAAKHEGPLHKCDISNSTEAGQKLFNMLRLGKSEPWTLALENVVGAKNMNVRPLLNYFEPLFTWLKDQNKNSFVGWSTDWSPYAD

SEQ ID NO: 3379 - protein, 269 aa, Artificial Sequence
  Synthetic Polypeptide
EPLVVKVEEGDNAVLQCLKGTSDGPTQQLTWSRESPLKPFLKLSLGLPGLGIHMRPLAIWLFIFNVSQQMGGFYLCQPGPPSEKAWQPGWTVNVEGSGELFRWNVSDLGGLGCGLKNRSSEGPSSPSGKLMSPKLYVWAKDRPEIWEGEPPCLPPRDSLNQSLSQDLTMAPGSTLWLSCGVPPDSVSRGPLSWTHVHPKGPKSLLSLELKDDRPARDMWVMETGLLLPRATAQDAGKYYCHRGNLTMSFHLEITARPVLWHWLLRTGGW

SEQ ID NO: 3380 - protein, 490 aa, Artificial Sequence
  Synthetic Polypeptide
MPSWALFMVTSCLLLAPQNLAQVSSQDVSLLASDSEPLKCFSRTFEDLTCFWDEEEAAPSGTYQLLYAYPREKPRACPLSSQSMPHFGTRYVCQFPDQEEVRLFFPLHLWVKNVFLNQTRTQRVLFVDSVGLPAPPSIIKAMGGSQPGELQISWEEPAPEISDFLRYELRYGPRDPKNSTGPTVIQLIATETCCPALQRPHSASALDQSPCAQPTMPWQDGPKQTSPSREASALTAEGGSCLISGLQPGNSYWLQLRSEPDGISLGGSWGSWSLPVTVDLPGDAVALGLQCFTLDLKNVTCQWQQQDHASSQGFFYHSRARCCPRDRYPIWENCEEEEKTNPGLQTPQFSRCHFKSRNDSIIHILVEVTTAPGTVHSYLGSPFWIHQAVRLPTPNLHWREISSGHLELEWQHPSSWAAQETCYQLRYTGEGHQDWKVLEPPLGARGGTLELRPRSRYRLQLRARLNGPTYQGPWSSWSDPTRVETATETA

SEQ ID NO: 3381 - protein, 167 aa, Artificial Sequence
  Synthetic Polypeptide
MALPVTALLLPLALLLHAARPGWFLDSPDRPWNPPTFSPALLVVTEGDNATFTCSFSNTSESFVLNWYRMSPSNQTDKLAAFPEDRSQPGQDCRFRVTQLPNGRDFHMSVVRARRNDSGTYLCGAISLAPKAQIKESLRAELRVTERRAEVPTAHPSPSPRPAGQFQ

SEQ ID NO: 3382 - protein, 146 aa, Artificial Sequence
  Synthetic Polypeptide
GWFLDSPDRPWNPPTFSPALLVVTEGDNATFTCSFSNTSESFVLNWYRMSPSNQTDKLAAFPEDRSQPGQDCRFRVTQLPNGRDFHMSVVRARRNDSGTYLCGAISLAPKAQIKESLRAELRVTERRAEVPTAHPSPSPRPAGQFQ

SEQ ID NO: 3383 - protein, 167 aa, Artificial Sequence
  Synthetic Polypeptide
MQIPQAPWPVVWAVLQLGWRPGWFLDSPDRPWNPPTFSPALLVVTEGDNATFTCSFSNTSESFVLNWYRMSPSNQTDKLAAFPEDRSQPGQDCRFRVTQLPNGRDFHMSVVRARRNDSGTYLCGAISLAPKAQIKESLRAELRVTERRAEVPTAHPSPSPRPAGQFQ

SEQ ID NO: 3384 - protein, 162 aa, Artificial Sequence
  Synthetic Polypeptide
MACLGFQRHKAQLNLATRTWPCTLLFFLLFIPVFCKAMHVAQPAVVLASSRGIASFVCEYASPGKATEVRVTVLRQADSQVTEVCAATYMMGNELTFLDDSICTGTSSGNQVNLTIQGLRAMDTGLYICKVELMYPPPYYLGIGNGTQIYVIDPEPCPDSDF

SEQ ID NO: 3385 - protein, 135 aa, Artificial Sequence
  Synthetic Polypeptide
LFNQEVQIPLTESYCGPCPKNWICYKNNCYQFFDESKNWYESQASCMSQNASLLKVYSKEDQDLLKLVKSYHWMGLVHIPTNGSWQWEDGSILSPNLLTIIEMQKGDCALYASSFKGYIENCSTPNTYICMQRTV

SEQ ID NO: 3386 - protein, 208 aa, Artificial Sequence
  Synthetic Polypeptide
MVRGVPFRHLLLVLQLALLPAATQGKKVVLGKKGDTVELTCTASQKKSIQFHWKNSNQIKILGNQGSFLTKGPSKLNDRADSRRSLWDQGNFPLIIKNLKIEDSDTYICEVEDQKEEVQLLVFGLTANSDTHLLQGQSLTLTLESPPGSSPSVQCRSPRGKNIQGGKTLSVSQLELQDSGTWTCTVLQNQKKVEFKIDIVVLAFQKAS

SEQ ID NO: 3387 - protein, 167 aa, Artificial Sequence
  Synthetic Polypeptide
IYQELTQLKAAVERLCHPCPWEWTFFQGNCYFMSNSQRNWHDSITACKEVGAQLVVIKSAEEQNFLQLQSSRSNRFTWMGLSDLNQEGTWQWVDGSPLLPSFKQYWNRGEPNNVGEEDCAEFSGNGWNDDKCNLAKFWICKKSAASCSRDEEQFLSPAPATPNPPPA

SEQ ID NO: 3388 - protein, 192 aa, Artificial Sequence
  Synthetic Polypeptide
GMRTEDLPKAVVFLEPQWYRVLEKDSVTLKCQGAYSPEDNSTQWFHNESLISSQASSYFIDAATVDDSGEYRCQTNLSTLSDPVQLEVHIGWLLLQAPRWVFKEEDPIHLRCHSWKNTALHKVTYLQNGKGRKYFHHNSDFYIPKATLKDSGSYFCRGLVGSKNVSSETVNITITQGLAVSTISSFFPPGYQ

SEQ ID NO: 3389 - protein, 192 aa, Artificial Sequence; identical to SEQ ID NO: 3388
  Synthetic Polypeptide

SEQ ID NO: 3390 - protein, 274 aa, Artificial Sequence
  Synthetic Polypeptide
ARKRTQPTFGFTVNWKFSESTTVFTGQCFIDRNGKEVLKTMWLLRSSVNDIGDDWKATRVGINIFTRLRTQKEGGSGGSARKCSLTGKWTNDLGSNMTIGAVNSRGEFTGTYITAVTATSNEIKESPLHGTQNTINKSGGSTTVFTGQCFIDRNGKEVLKTMWLLRSSVNDIGDDWKATRVGINIFTRLRTQKEGGSGGSARKCSLTGKWTNDLGSNMTIGAVNSRGEFTGTYITAVTATSNEIKESPLHGTQNTINKRTQPTFGFTVNWKFSE

SEQ ID NO: 3391 - protein, 566 aa, Artificial Sequence
  Synthetic Polypeptide
EWVKFAKPCREGEDNSKRNPIAKITSDYQATQKITYRISGVGIDQPPFGIFVVDKNTGDINITAIVDREETPSFLITCRALNAQGLDVEKPLILTVKILDINDNPPVFSQQIFMGEIEENSASNSLVMILNATDADEPNHLNSKIAFKIVSQEPAGTPMFLLSRNTGEVRTLTNSLDREQASSYRLVVSGADKDGEGLSTQCECNIKVKDVNDNFPMFRDSQYSARIEENILSSELLRFQVTDLDEEYTDNWLAVYFFTSGNEGNWFEIQTDPRTNEGILKVVKALDYEQLQSVKLSIAVKNKAEFHQSVISRYRVQSTPVTIQVINVREGIAFRPASKTFTVQKGISSKKLVDYILGTYQAIDEDTNKAASNVKYVMGRNDGGYLMIDSKTAEIKFVKNMNRDSTFIVNKTITAEVLAIDEYTGKTSTGTVYVRVPDFNDNCPTAVLEKDAVCSSSPSVVVSARTLNNRYTGPYTFALEDQPVKLPAVWSITTLNATSALLRAQEQIPPGVYHISLVLTDSQNNRCEMPRSLTLEVCQCDNRGICGTSYPTTSPGTRYGRPHSGR

SEQ ID NO: 3392 - protein, 156 aa, Artificial Sequence
  Synthetic Polypeptide
MALPVTALLLPLALLLHAARPLFNQEVQIPLTESYCGPCPKNWICYKNNCYQFFDESKNWYESQASCMSQNASLLKVYSKEDQDLLKLVKSYHWMGLVHIPTNGSWQWEDGSILSPNLLTIIEMQKGDCALYASSFKGYIENCSTPNTYICMQRTV

SEQ ID NO: 3393 - protein, 307 aa, Artificial Sequence
  Synthetic Polypeptide
MALPVTALLLPLALLLHAARPLFNQEVQIPLTESYCGPCPKNWICYKNNCYQFFDESKNWYESQASCMSQNASLLKVYSKEDQDLLKLVKSYHWMGLVHIPTNGSWQWEDGSILSPNLLTIIEMQKGDCALYASSFKGYIENCSTPNTYICMQRTVGGGGSGGGGSGGGGSDLFNQEVQIPLTESYCGPCPKNWICYKNNCYQFFDESKNWYESQASCMSQNASLLKVYSKEDQDLLKLVKSYHWMGLVHIPTNGSWQWEDGSILSPNLLTIIEMQKGDCALYASSFKGYIENCSTPNTYICMQRTV

SEQ ID NO: 3394 - protein, 135 aa, Artificial Sequence; identical to SEQ ID NO: 3385
  Synthetic Polypeptide

SEQ ID NO: 3395 - protein, 223 aa, Artificial Sequence
  Synthetic Polypeptide
RVQPTESIVRFPNITNLCPFGEVFNATRFASVYAWNRKRISNCVADYSVLYNSASFSTFKCYGVSPTKLNDLCFTNVYADSFVIRGDEVRQIAPGQTGKIADYNYKLPDDFTGCVIAWNSNNLDSKVGGNYNYLYRLFRKSNLKPFERDISTEIYQAGSTPCNGVEGFNCYFPLQSYGFQPTNGVGYQPYRVVVLSFELLHAPATVCGPKKSTNLVKNKCVNF

SEQ ID NO: 3396 - protein, 187 aa, Artificial Sequence
  Synthetic Polypeptide
MELTELLLVVMLLLTARLTLSSPAPPACDLRVLSKLLRDSHVLHSRLSQCPEVHPLPTPVLLPAVDFSLGEWKTQMEETKAQDILGAVTLLLEGVMAARGQLGPTCLSSLLGQLSGQVRLLLGALQSLLGTQLPPQGRTTAHKDPNAIFLSFQHLLRGKVRFLMLVGGSTLCVRRAPPTTAVPSRTS

SEQ ID NO: 3397 - protein, 187 aa, Artificial Sequence
  Synthetic Polypeptide
MELTDLLLAAMLLAVARLTLSSPVAPACDPRLLNKLLRDSHLLHSRLSQCPDVDPLSIPVLLPAVDFSLGEWKTQTEQSKAQDILGAVSLLLEGVMAARGQLEPSCLSSLLGQLSGQVRLLLGALQGLLGTQLPLQGRTTAHKDPNALFLSLQQLLRGKVRFLLLVEGPTLCVRRTLPTTAVPSSTS

SEQ ID NO: 3398 - protein, 92 aa, Artificial Sequence
  Synthetic Polypeptide
APDVQDCPECTLQENPFFSQPGAPILQCMGCCFSRAYPTPLRSKKTMLVQKNVTSESTCCVAKSYNRVTVMGGFKVENHTACHCSTCYYHKS

SEQ ID NO: 3399 - protein, 165 aa, Artificial Sequence
  Synthetic Polypeptide
MEMFQGLLLLLLLSMGGTWASREMLRPRCRPINATLAVEKEGCPVCITVNTTICAGYCPTMTRVLQGVLPALPQVVCNYRDVRFESIRLPGCPRGVNPVVSYAVALSCQCALCRRSTTDCGGPKDHPLTCDDPRFQASSSSKAPPPSLPSPSRLPGPSDTPILPQ

SEQ ID NO: 3400 - protein, 111 aa, Artificial Sequence
  Synthetic Polypeptide
NSCELTNITIAIEKEECRFCISINTTWCAGYCYTRDLVYKDPARPKIQKTCTFKELVYETVRVPGCAHHADSLYTYPVATQCHCGKCDSDSTDCTVRGLGPSYCSFGEMKE

SEQ ID NO: 3401 - protein, 141 aa, Artificial Sequence
  Synthetic Polypeptide
MEMLQGLLLLLLLSMGGAWASREPLRPWCHPINAILAVEKEGCPVCITVNTTICAGYCPTMMRVLQAVLPPLPQVVCTYRDVRFESIRLPGCPRGVDPVVSFPVALSCRCGPCRRSTSDCGGPKDHPLTCDHPQLSGLLFL

SEQ ID NO: 3402 - protein, 138 aa, Artificial Sequence
  Synthetic Polypeptide
MTALFLMSMLFGLACGQAMSFCIPTEYTMHIERRECAYCLTINTTICAGYCMTRDINGKLFLPKYALSQDVCTYRDFIYRTVEIPGCPLHVAPYFSYPVALSCKCGKCNTDYSDCIHEAIKTNYCTKPQKSYLVGFSV

SEQ ID NO: 3403 - protein, 272 aa, Artificial Sequence
  Synthetic Polypeptide
MEMFQGLLLLLLLSMGGTWASREMLRPRCRPINATLAVEKEGCPVCITVNTTICAGYCPTMTRVLQGVLPALPQVVCNYRDVRFESIRLPGCPRGVNPVVSYAVALSCQCALCRRSTTDCGGPKDHPLTCDDPRFQASSSSKAPPPSLPSPSRLPGPSDTPILPQGGGGSGGGGSGGGGSAPDVQDCPECTLQENPFFSQPGAPILQCMGCCFSRAYPTPLRSKKTMLVQKNVTSESTCCVAKSYNRVTVMGGFKVENHTACHCSTCYYHKS

SEQ ID NO: 3404 - protein, 239 aa, Artificial Sequence
  Synthetic Polypeptide
MALPVTALLLPLALLLHAARPNSCELTNITIAIEKEECRFCISINTTWCAGYCYTRDLVYKDPARPKIQKTCTFKELVYETVRVPGCAHHADSLYTYPVATQCHCGKCDSDSTDCTVRGLGPSYCSFGEMKEGGGGSGGGGSGGGGSAPDVQDCPECTLQENPFFSQPGAPILQCMGCCFSRAYPTPLRSKKTMLVQKNVTSESTCCVAKSYNRVTVMGGFKVENHTACHCSTCYYHKS

SEQ ID NO: 3405 - protein, 248 aa, Artificial Sequence
  Synthetic Polypeptide
MEMLQGLLLLLLLSMGGAWASREPLRPWCHPINAILAVEKEGCPVCITVNTTICAGYCPTMMRVLQAVLPPLPQVVCTYRDVRFESIRLPGCPRGVDPVVSFPVALSCRCGPCRRSTSDCGGPKDHPLTCDHPQLSGLLFLGGGGSGGGGSGGGGSAPDVQDCPECTLQENPFFSQPGAPILQCMGCCFSRAYPTPLRSKKTMLVQKNVTSESTCCVAKSYNRVTVMGGFKVENHTACHCSTCYYHKS

SEQ ID NO: 3406 - protein, 245 aa, Artificial Sequence
  Synthetic Polypeptide
MTALFLMSMLFGLACGQAMSFCIPTEYTMHIERRECAYCLTINTTICAGYCMTRDINGKLFLPKYALSQDVCTYRDFIYRTVEIPGCPLHVAPYFSYPVALSCKCGKCNTDYSDCIHEAIKTNYCTKPQKSYLVGFSVGGGGSGGGGSGGGGSAPDVQDCPECTLQENPFFSQPGAPILQCMGCCFSRAYPTPLRSKKTMLVQKNVTSESTCCVAKSYNRVTVMGGFKVENHTACHCSTCYYHKS

SEQ ID NO: 3407 - protein, 286 aa, Artificial Sequence
  Synthetic Polypeptide
LFNQEVQIPLTESYCGPCPKNWICYKNNCYQFFDESKNWYESQASCMSQNASLLKVYSKEDQDLLKLVKSAHWMGLVHIPTNGSWQWEDGSILSPNLLTIIEMQKGDCALYASSFKGFIENCSTPNTYICMQRTVGGGGSGGGGSGGGGSDLFNQEVQIPLTESYCGPCPKNWICYKNNCYQFFDESKNWYESQASCMSQNASLLKVYSKEDQDLLKLVKSAHWMGLVHIPTNGSWQWEDGSILSPNLLTIIEMQKGDCALYASSFKGFIENCSTPNTYICMQRTV

SEQ ID NO: 3408 - protein, 53 aa, Artificial Sequence
  Synthetic Polypeptide
MDPDLEIRAAFLRQRNTALRTEVAELEQEVQRLENEVSQYETRYGPLGGGKTR

SEQ ID NO: 3409 - protein, 53 aa, Artificial Sequence
  Synthetic Polypeptide
TRMDPDLEIEAAFLERENTALETRVAELRQRVQRLRNRVSQYRTRYGPLGGGK

SEQ ID NO: 3410 - protein, 28 aa, Artificial Sequence
  Synthetic Polypeptide
EVAALEKEVAALEKEVAALEKEVAALEK

SEQ ID NO: 3411 - protein, 28 aa, Artificial Sequence
  Synthetic Polypeptide
KVAALKEKVAALKEKVAALKEKVAALKE

SEQ ID NO: 3412 - protein, 13 aa, Artificial Sequence
  Synthetic Polypeptide
AHIVMVDAYKPTK

SEQ ID NO: 3413 - protein, 17 aa, Artificial Sequence
  Synthetic Polypeptide
QIEYLAKQIVDNAIQQA

SEQ ID NO: 3414 - protein, 44 aa, Artificial Sequence
  Synthetic Polypeptide
SHIQIPPGLTELLQGYTVEVLRQQPPDLVEFAVEYFTRLREARA

SEQ ID NO: 3415 - protein, 21 aa, Artificial Sequence
  Synthetic Polypeptide
CGQIEYLAKQIVDNAIQQAGC

SEQ ID NO: 3416 - protein, 45 aa, Artificial Sequence
  Synthetic Polypeptide
CGHIQIPPGLTELLQGYTVEVLRQQPPDLVEFAVEYFTRLREARA

SEQ ID NO: 3417 - protein, 16 aa, Artificial Sequence
  Synthetic Polypeptide
TDKDMTITFTNKKDAE

SEQ ID NO: 3418 - protein, 15 aa, Artificial Sequence
  Synthetic Polypeptide
GGGGSGGGGSGGGGS

SEQ ID NO: 3419 - protein, 6 aa, Artificial Sequence
  Synthetic Polypeptide
SGGGGS

SEQ ID NO: 3420 - protein, 8 aa, Artificial Sequence
  Synthetic Polypeptide
GGGSGGGS

SEQ ID NO: 3421 - protein, 10 aa, Artificial Sequence
  Synthetic Polypeptide
GGGGSGGGGS

SEQ ID NO: 3422 - protein, 15 aa, Artificial Sequence
  Synthetic Polypeptide
GGGGSGGGGSGGGGS

SEQ ID NO: 3423 - protein, 12 aa, Artificial Sequence
  Synthetic Polypeptide
EQKLISEEDGSG

SEQ ID NO: 3424 - protein, 13 aa, Artificial Sequence
  Synthetic Polypeptide
EQKLISEEDLGSG

SEQ ID NO: 3425 - protein, 13 aa, Artificial Sequence
  Synthetic Polypeptide
EQKLISEEDLGSG

SEQ ID NO: 3426 - protein, 17 aa, Artificial Sequence
  Synthetic Polypeptide
GKPIPNPLLGLDSTGSG

SEQ ID NO: 3427 - protein, 12 aa, Artificial Sequence
  Synthetic Polypeptide
YPYDVPDYAGSG

SEQ ID NO: 3428 - protein, 9 aa, Artificial Sequence
  Synthetic Polypeptide
HHHHHHGSG

SEQ ID NO: 3429 - protein, 15 aa, Artificial Sequence
  Synthetic Polypeptide
GLNDIFEAQKIEWHE

SEQ ID NO: 3430 - protein, 13 aa, Artificial Sequence
  Synthetic Polypeptide
GSGGGGSGGGGSG

SEQ ID NO: 3431 - protein, 13 aa, Artificial Sequence
  Synthetic Polypeptide
GSGGGGSGGGGSG

SEQ ID NO: 3432 - protein, 11 aa, Artificial Sequence
  Synthetic Polypeptide
WSHPQFEKGSG

SEQ ID NO: 3433 - protein, 11 aa, Artificial Sequence
  Synthetic Polypeptide
WSHPQFEKGSG

SEQ ID NO: 3434 - protein, 11 aa, Artificial Sequence
  Synthetic Polypeptide
DYKDDDDKGQR

SEQ ID NO: 3435 - protein, 286 aa, Artificial Sequence
  Synthetic Polypeptide
LFNQEVQIPLTESYCGPCPKNWICYKNNCYQFFDESKNWYESQASCMSQNASLLKVYSKEDQDLLKLVKSAHWMGLVHIPTNGSWQWEDGSILSPNLLTIIEMQKGDCALYASSFKGYIENCSTPNTYICMQRTVSGGGGSGGGGSGGGGDLFNQEVQIPLTESYCGPCPKNWICYKNNCYQFFDESKNWYESQASCMSQNASLLKVYSKEDQDLLKLVKSAHWMGLVHIPTNGSWQWEDGSILSPNLLTIIEMQKGDCALYASSFKGYIENCSTPNTYICMQRTV

SEQ ID NO: 3436 - protein, 141 aa, Artificial Sequence
  Synthetic Polypeptide
DIQNPDPAVYQLRDSKSSDKSVCLFTDFDSQTNVSQSKDSDVYITDKTVLDMRSMDFKSNSAVAWSNKSDFACANAFNNSIIPEDTFFPSPESSCDVKLVEKSFETDTNLNFQNLSVIGFRILLLKVAGFNLLMTLRLWSS

SEQ ID NO: 3437 - protein, 140 aa, Artificial Sequence
  Synthetic Polypeptide
IQNPDPAVYQLRDSKSSDKSVCLFTDFDSQTNVSQSKDSDVYITDKTVLDMRSMDFKSNSAVAWSNKSDFACANAFNNSIIPEDTFFPSPESSCDVKLVEKSFETDTNLNFQNLSVIGFRILLLKVAGFNLLMTLRLWSS

SEQ ID NO: 3438 - protein, 140 aa, Artificial Sequence
  Synthetic Polypeptide
IQNPDPAVYQLRDSKSSDKSVCLFTDFDSQTNVSQSKDSDVYITDKCVLDMRSMDFKSNSAVAWSNKSDFACANAFNNSIIPEDTFFPSSDVPCDVKLVEKSFETDTNLNFQNLSVIGFRILLLKVAGFNLLMTLRLWSS

SEQ ID NO: 3439 - protein, 140 aa, Artificial Sequence; identical to SEQ ID NO: 3437
  Synthetic Polypeptide

SEQ ID NO: 3440 - protein, 137 aa, Artificial Sequence
  Synthetic Polypeptide
PDPAVYQLRDSKSSDKSVCLFTDFDSQTNVSQSKDSDVYITDKTVLDMRSMDFKSNSAVAWSNKSDFACANAFNNSIIPEDTFFPSPESSCDVKLVEKSFETDTNLNFQNLSVIGFRILLLKVAGFNLLMTLRLWSS

SEQ ID NO: 3441 - protein, 140 aa, Artificial Sequence
  Synthetic Polypeptide
IQNPDPAVYQLRDSKSSDKSVCLFTDFDSQTNVSQSKDSDVYITDKCVLDMRSMDFKSNSAVAWSNKSDFACANAFNNSIIPEDTFFPSPESSCDVKLVEKSFETDTNLNFQNLSVIGFRILLLKVAGFNLLMTLRLWSS

SEQ ID NO: 3442 - protein, 137 aa, Artificial Sequence
  Synthetic Polypeptide
PDPAVYQLRDSKSSDKSVCLFTDFDSQTNVSQSKDSDVYITDKCVLDMRSMDFKSNSAVAWSNKSDFACANAFNNSIIPEDTFFPSPESSCDVKLVEKSFETDTNLNFQNLSVIGFRILLLKVAGFNLLMTLRLWSS

SEQ ID NO: 3443 - protein, 140 aa, Artificial Sequence
  Synthetic Polypeptide
IQNPDPAVYQLRDSKSSDKSVCLFTDFDSQTNVSQSKDSDVYITDKTVLDMRSMDFKSNSAVAWSNKSDFACANAFNNSIIPEDTFFPSSDVPCDVKLVEKSFETDTNLNFQNLSVIGFRILLLKVAGFNLLMTLRLWSS

SEQ ID NO: 3444 - protein, 140 aa, Artificial Sequence
  Synthetic Polypeptide
IQNPDPAVYQLRDSKSSDKSVCLFTDFDSQTNVSQSKDSDVYITDKTVLDMRSMDFKSNRAVAWSNKSDFACANAFNNSIIPEDTFFPSPESSCDVKLVEKSFETDTNLNFQNLSVIGFRILLLKVAGFNLLMTLRLWSS

SEQ ID NO: 3445 - protein, 140 aa, Artificial Sequence
  Synthetic Polypeptide
IQNPDPAVYQLRDSKSSDKSVCLFTDFDSQTNVSQSKDSDVYITDKTVLDMRSMDFKSNRAVAWSNKSDFACANAFNNSIIPEDTFFPSSDVPCDVKLVEKSFETDTNLNFQNLSVIGFRILLLKVAGFNLLMTLRLWSS

SEQ ID NO: 3446 - protein, 140 aa, Artificial Sequence
  Synthetic Polypeptide
IQNPDPAVYQLRDSKSSDKSVCLFTDFDSQTNVSQSKDSDVYITDKTVLDMRSMDFKSNSAVAWSNKSDFACANAFNNSIIPEDTFFPSSDSSCDVKLVEKSFETDTNLNFQNLSVIGFRILLLKVAGFNLLMTLRLWSS

SEQ ID NO: 3447 - protein, 239 aa, Artificial Sequence
  Synthetic Polypeptide
IQNPDPAVYQLRDSKSSDKSVCLFTDFDSQTNVSQSKDSDVYITDKTVLDMRSMDFKSNSAVAWSNKSDFACANAFNNSIIPEDTFFPSPESSCGTQSFGLLDPKLCYLLDGILFIYGVILTALFLRVKFSRSADAPAYQQGQNQLYNELNLGRREEYDVLDKRRGRDPEMGGKPQRRKNPQEGLYNELQKDKMAEAYSEIGMKGERRRGKGHDGLYQGLSTATKDTYDALHMQALPPR

SEQ ID NO: 3448 - protein, 136 aa, Artificial Sequence
  Synthetic Polypeptide
IQNPEPAVYQLKDPRSQDSTLCLFTDFDSQINVPKTMESGTFITDKTVLDMKAMDSKSNGAIAWSNQTSFTCQDIFKETNATYPSSDVPCDATLTEKSFETDMNLNFQNLSVMGLRILLLKVAGFNLLMTLRLWSS

SEQ ID NO: 3449 - protein, 133 aa, Artificial Sequence
  Synthetic Polypeptide
VQDPDPSVYQMRSPKTGRTVCLFTDFDSQADFQKPEGATVISLNSTVLDMKVMDSKSNGALTWNSETNIECKENFQQPFYPSSNYSCDAKLIEKSFETDMDLNFYNLLVIGLRILLLKVIGFNLFMTLRLWSC

SEQ ID NO: 3450 - protein, 177 aa, Artificial Sequence
  Synthetic Polypeptide
EDLNKVFPPEVAVFEPSEAEISHTQKATLVCLATGFFPDHVELSWWVNGKEVHSGVSTDPQPLKEQPALNDSRYCLSSRLRVSATFWQNPRNHFRCQVQFYGLSENDEWTQDRAKPVTQIVSAEAWGRADCGFTSVSYQQGVLSATILYEILLGKATLYAVLVSALVLMAMVKRKDF

SEQ ID NO: 3451 - protein, 179 aa, Artificial Sequence
  Synthetic Polypeptide
EDLKNVFPPEVAVFEPSEAEISHTQKATLVCLATGFYPDHVELSWWVNGKEVHSGVSTDPQPLKEQPALNDSRYCLSSRLRVSATFWQNPRNHFRCQVQFYGLSENDEWTQDRAKPVTQIVSAEAWGRADCGFTSESYQQGVLSATILYEILLGKATLYAVLVSALVLMAMVKRKDSRG

SEQ ID NO: 3452 - protein, 179 aa, Artificial Sequence; identical to SEQ ID NO: 3451
  Synthetic Polypeptide

SEQ ID NO: 3453 - protein, 179 aa, Artificial Sequence
  Synthetic Polypeptide
EDLKNVFPPEVAVFEPSEAEISHTQKATLVCLATGFYPDHVELSWWVNGKEVHSGVCTDPQPLKEQPALNDSRYCLSSRLRVSATFWQNPRNHFRCQVQFYGLSENDEWTQDRAKPVTQIVSAEAWGRADCGFTSESYQQGVLSATILYEILLGKATLYAVLVSALVLMAMVKRKDSRG

SEQ ID NO: 3454 - protein, 179 aa, Artificial Sequence
  Synthetic Polypeptide
EDLKNVFPPEVAVFEPSKAEIAHTQKATLVCLATGFYPDHVELSWWVNGKEVHSGVCTDPQPLKEQPALNDSRYCLSSRLRVSATFWQNPRNHFRCQVQFYGLSENDEWTQDRAKPVTQIVSAEAWGRADCGITSASYHQGVLSATILYEILLGKATLYAVLVSALVLMAMVKRKDSRG

SEQ ID NO: 3455 - protein, 179 aa, Artificial Sequence; identical to SEQ ID NO: 3451
  Synthetic Polypeptide

SEQ ID NO: 3456 - protein, 178 aa, Artificial Sequence
  Synthetic Polypeptide
DLKNVFPPEVAVFEPSEAEISHTQKATLVCLATGFYPDHVELSWWVNGKEVHSGVSTDPQPLKEQPALNDSRYCLSSRLRVSATFWQNPRNHFRCQVQFYGLSENDEWTQDRAKPVTQIVSAEAWGRADCGFTSESYQQGVLSATILYEILLGKATLYAVLVSALVLMAMVKRKDSRG

SEQ ID NO: 3457 - protein, 177 aa, Artificial Sequence
  Synthetic Polypeptide
EDLKNVFPPEVAVFEPSEAEISHTQKATLVCLATGFFPDHVELSWWVNGKEVHSGVSTDPQPLKEQPALNDSRYCLSSRLRVSATFWQNPRNHFRCQVQFYGLSENDEWTQDRAKPVTQIVSAEAWGRADCGFTSESYQQGVLSATILYEILLGKATLYAVLVSALVLMAMVKRKDF

SEQ ID NO: 3458 - protein, 177 aa, Artificial Sequence; identical to SEQ ID NO: 3450
  Synthetic Polypeptide

SEQ ID NO: 3459 - protein, 179 aa, Artificial Sequence
  Synthetic Polypeptide
EDLKNVFPPEVAVFEPSKAEIAHTQKATLVCLATGFYPDHVELSWWVNGKEVHSGVSTDPQPLKEQPALNDSRYCLSSRLRVSATFWQNPRNHFRCQVQFYGLSENDEWTQDRAKPVTQIVSAEAWGRADCGITSASYHQGVLSATILYEILLGKATLYAVLVSALVLMAMVKRKDSRG

SEQ ID NO: 3460 - protein, 179 aa, Artificial Sequence
  Synthetic Polypeptide
EDLKNVFPPEVAVFEPSKAEIAHTQKATLVCLATGFYPDHVELSWWVNGKEVHSGVSTDPQPLKEQPALNDSRYCLSSRLRVSATFWQNPRNHFRCQVQFYGLSENDEWTQDRAKPVTQIVSAEAWGRADCGFTSESYQQGVLSATILYEILLGKATLYAVLVSALVLMAMVKRKDSRG

SEQ ID NO: 3461 - protein, 179 aa, Artificial Sequence
  Synthetic Polypeptide
EDLKNVFPPEVAVFEPSKAEISHTQKATLVCLATGFYPDHVELSWWVNGKEVHSGVSTDPQPLKEQPALNDSRYCLSSRLRVSATFWQNPRNHFRCQVQFYGLSENDEWTQDRAKPVTQIVSAEAWGRADCGITSESYQQGVLSATILYEILLGKATLYAVLVSALVLMAMVKRKDSRG

SEQ ID NO: 3462 - protein, 179 aa, Artificial Sequence
  Synthetic Polypeptide
EDLKNVFPPEVAVFEPSKAEISHTQKATLVCLATGFYPDHVELSWWVNGKEVHSGVSTDPQPLKEQPALNDSRYCLSSRLRVSATFWQNPRNHFRCQVQFYGLSENDEWTQDRAKPVTQIVSAEAWGRADCGFTSASYQQGVLSATILYEILLGKATLYAVLVSALVLMAMVKRKDSRG

SEQ ID NO: 3463 - protein, 179 aa, Artificial Sequence
  Synthetic Polypeptide
EDLKNVFPPEVAVFEPSKAEISHTQKATLVCLATGFYPDHVELSWWVNGKEVHSGVSTDPQPLKEQPALNDSRYCLSSRLRVSATFWQNPRNHFRCQVQFYGLSENDEWTQDRAKPVTQIVSAEAWGRADCGFTSESYHQGVLSATILYEILLGKATLYAVLVSALVLMAMVKRKDSRG

SEQ ID NO: 3464 - protein, 179 aa, Artificial Sequence
  Synthetic Polypeptide
EDLKNVFPPEVAVFEPSRAEIAHTQKATLVCLATGFYPDHVELSWWVNGKEVHSGVSTDPQPLKEQPALNDSRYCLSSRLRVSATFWQNPRNHFRCQVQFYGLSENDEWTQDRAKPVTQIVSAEAWGRADCGFTSESYQQGVLSATILYEILLGKATLYAVLVSALVLMAMVKRKDSRG

SEQ ID NO: 3465 - protein, 179 aa, Artificial Sequence
  Synthetic Polypeptide
EDLKNVFPPEVAVFEPSRAEISHTQKATLVCLATGFYPDHVELSWWVNGKEVHSGVSTDPQPLKEQPALNDSRYCLSSRLRVSATFWQNPRNHFRCQVQFYGLSENDEWTQDRAKPVTQIVSAEAWGRADCGFTSESYQQGVLSATILYEILLGKATLYAVLVSALVLMAMVKRKDSRG

SEQ ID NO: 3466 - protein, 179 aa, Artificial Sequence
  Synthetic Polypeptide
EDLKNVFPPEVAVFEPSKAEIAHTQKATLVCLATGFYPDHVELSWWVNGKEVHSGVSTDPQPLKEQPALNDSRYCLSSGLRVSATFWQNPRNHFRCQVQFYGLSENDEWTQDRAKPVTQIVSAEAWGRADCGITSASYHQGVLSATILYEILLGKATLYAVLVSALVLMAMVKRKDSRG

SEQ ID NO: 3467 - protein, 179 aa, Artificial Sequence
  Synthetic Polypeptide
EDLKNVFPPEVAVFEPSKAEIAHTQKATLVCLATGFYPDHVELSWWVNGKEVHSGVSTDPQPLKEQPALNDSRYCLSSGLRVSATFWQNPRNHFRCQVQFYGLSENDEWTQDRAKPVTQIVSAEAWGRADCGFTSESYQQGVLSATILYEILLGKATLYAVLVSALVLMAMVKRKDSRG

SEQ ID NO: 3468 - protein, 179 aa, Artificial Sequence
  Synthetic Polypeptide
EDLKNVFPPEVAVFEPSEAEISHTQKATLVCLATGFYPDHVELSWWVNGKEVHSGVSTDPQPLKEQPALNDSRYCLSSGLRVSATFWQNPRNHFRCQVQFYGLSENDEWTQDRAKPVTQIVSAEAWGRADCGFTSESYQQGVLSATILYEILLGKATLYAVLVSALVLMAMVKRKDSRG

SEQ ID NO: 3469 - protein, 171 aa, Artificial Sequence
  Synthetic Polypeptide
EDLRNVTPPKVSLFEPSKAEIANKQKATLVCLARGFFPDHVELSWWVNGKEVHSGVSTDPQAYKESNYSYCLSSRLRVSATFWHNPRNHFRCQVQFHGLSEEDKWPEGSPKPVTQNISAEAWGRACGITSSYQQGVLSATILYEILLGKATLYAVLVSTLVVMAMVKRKNS

SEQ ID NO: 3470 - protein, 177 aa, Artificial Sequence
  Synthetic Polypeptide
EDLQKVTPPTVTVFEPSEAEISRTQKATLVCLARGFYPDHVELSWWVNGKEVTSGFSTDPQPDKERPSENDSSYCLSSRLRVSASFWHNPRNHFRCQVQFYGLGDDDEWKYDRVKPITQNISAEAWGRADCGFTSVSYHQGVLSATILYEILLGKATLYAVLVSILVLMAKVKRKGS

SEQ ID NO: 3471 - protein, 276 aa, Artificial Sequence
  Synthetic Polypeptide
EDLKNVFPPEVAVFEPSEAEISHTQKATLVCLATGFYPDHVELSWWVNGKEVHSGVSTDPQPLKEQPALNDSRYCLSSRLRVSATFWQNPRNHFRCQVQFYGLSENDEWTQDRAKPVTQIVSAEAWGRADCGSQSFGLLDPKLCYLLDGILFIYGVILTALFLRVKFSRSADAPAYQQGQNQLYNELNLGRREEYDVLDKRRGRDPEMGGKPQRRKNPQEGLYNELQKDKMAEAYSEIGMKGERRRGKGHDGLYQGLSTATKDTYDALHMQALPPR

SEQ ID NO: 3472 - protein, 269 aa, Artificial Sequence
  Synthetic Polypeptide
GCPALPTGVGGTPFPSLAPPIMLLVDGKQQMVVVCLVLDVAPPGLDSPIWFSAGNGSALDAFTYGPSPATDGTWTNLAHLSLPSEELASWEPLVCHTGPGAEGHSRSTQPMHLSGEASTARTCPQEPLRGTPGGALWLGVLRLLLFKLLLFDLLLTCSCLCDPAGPLPSPATTTRLRALGSHRLHPATETGGREATSSPRPQPRDRRWGDTPPGRKPGSPVWGEGSYLSSYPTCPAQAWCSRSRLRAPSSSLGAFFAGDLPPPLQAGAA

SEQ ID NO: 3473 - protein, 258 aa, Artificial Sequence
  Synthetic Polypeptide
TPFPSLAPPIMLLVDGKQQMVVVCLVLDVAPPGLDSPIWFSAGNGSALDAFTYGPSPATDGTWTNLAHLSLPSEELASWEPLVCHTGPGAEGHSRSTQPMHLSGEASTARTCPQEPLRGTPGGALWLGVLRLLLFKLLLFDLLLTCSCLCDPAGPLPSPATTTRLRALGSHRLHPATETGGREATSSPRPQPRDRRWGDTPPGRKPGSPVWGEGSYLSSYPTCPAQAWCSRSALRAPSSSLGAFFAGDLPPPLQAGAA

SEQ ID NO: 3474 - protein, 210 aa, Artificial Sequence
  Synthetic Polypeptide
TPFPSLAPPIMLLVDGKQQMVVVCLVLDVAPPGLDSPIWFSAGNGSALDAFTYGPSPATDGTWTNLAHLSLPSEELASWEPLVCHTGPGAEGHSRSTQPMHLSGEASTARTCPQEPLRGTPGGALWLGVLRLLLFKLLLFDLLLTCSCLCDPAGPLPSPATTTRLRALGSHRLHPATETGGREATSSPRPQPRDRRWGDTPPGRKPGSPV

SEQ ID NO: 3475 - protein, 189 aa, Artificial Sequence
  Synthetic Polypeptide
DKQLDADVSPKPTIFLPSIAETKLQKAGTYLCLLEKFFPDIIKIHWQEKKSNTILGSQEGNTMKTNDTYMKFSWLTVPEESLDKEHRCIVRHENNKNGIDQEIIFPPIKTDVTTVDPKYNYSKDANDVITMDPKDNWSKDANDTLLLQLTNTSAYYMYLLLLLKSVVYFAIITCCLLGRTAFCCNGEKS

SEQ ID NO: 3476 - protein, 173 aa, Artificial Sequence
  Synthetic Polypeptide
DKQLDADVSPKPTIFLPSIAETKLQKAGTYLCLLEKFFPDVIKIHWQEKKSNTILGSQEGNTMKTNDTYMKFSWLTVPEKSLDKEHRCIVRHENNKNGVDQEIIFPPIKTDVITMDPKDNCSKDANDTLLLQLTNTSAYYMYLLLLLKSVVYFAIITCCLLRRTAFCCNGEKS

SEQ ID NO: 3477 - protein, 153 aa, Artificial Sequence
  Synthetic Polypeptide
SQPHTKPSVFVMKNGTNVACLVKEFYPKDIRINLVSSKKITEFDPAIVISPSGKYNAVKLGKYEDSNSVTCSVQHDNKTVHSTDFEVKTDSTDHVKPKETENTKQPSKSCHKPKAIVHTEKVNMMSLTVLGLRMLFAKTVAVNFLLTAKLFFL

SEQ ID NO: 3478 - protein, 153 aa, Artificial Sequence; identical to SEQ ID NO: 3477
  Synthetic Polypeptide

SEQ ID NO: 3479 - protein, 107 aa, Artificial Sequence
  Synthetic Polypeptide
IQNPDPAVYITDKTVLDMRSMDFKSNSAVAWSNKSDFACANAFNNSIIPEDTFFPSPESSCDVKLVEKSFETDTNLNFQNLSVIGFRILLLKVAGFNLLMTLRLWSS

SEQ ID NO: 3480 - protein, 179 aa, Artificial Sequence
  Synthetic Polypeptide
EDLKNVFPPEVAVFEPSRAEISHTQKATLVCLATGFYPDHVELSWWVNGKEVHSGVCTDPQPLKEQPALNDSRYCLSSRLRVSATFWQNPRNHFRCQVQFYGLSENDEWTQDRAKPVTQIVSAEAWGRADCGFTSESYQQGVLSATILYEILLGKATLYAVLVSALVLMAMVKRKDSRG

SEQ ID NO: 3481 - protein, 179 aa, Artificial Sequence
  Synthetic Polypeptide
EDLKNVFPPEVAVFEPSRAEIAHTQKATLVCLATGFYPDHVELSWWVNGKEVHSGVCTDPQPLKEQPALNDSRYCLSSRLRVSATFWQNPRNHFRCQVQFYGLSENDEWTQDRAKPVTQIVSAEAWGRADCGFTSESYQQGVLSATILYEILLGKATLYAVLVSALVLMAMVKRKDSRG

SEQ ID NO: 3482 - protein, 30 aa, Artificial Sequence
  Synthetic Polypeptide
QSFGLLDPKLCYLLDGILFIYGVILTALFL

SEQ ID NO: 3483 - protein, 143 aa, Artificial Sequence
  Synthetic Polypeptide
QSFGLLDPKLCYLLDGILFIYGVILTALFLRVKFSRSADAPAYQQGQNQLYNELNLGRREEYDVLDKRRGRDPEMGGKPQRRKNPQEGLYNELQKDKMAEAYSEIGMKGERRRGKGHDGLYQGLSTATKDTYDALHMQALPPR

SEQ ID NO: 3484 - protein, 143 aa, Artificial Sequence; identical to SEQ ID NO: 3483
  Synthetic Polypeptide

SEQ ID NO: 3485 - protein, 41 aa, Artificial Sequence
  Synthetic Polypeptide
RSKRSRLLHSDYMNMTPRRPGPTRKHYQPYAPPRDFAAYRS

SEQ ID NO: 3486 - protein, 42 aa, Artificial Sequence
  Synthetic Polypeptide
KRGRKKLLYIFKQPFMRPVQTTQEEDGCSCRFPEEEEGGCEL

SEQ ID NO: 3487 - protein, 55 aa, Artificial Sequence
  Synthetic Polypeptide
KNRKAKAKPVTRGAGAGGRQRGQNKERPPPVPNPDYEPIRKGQRDLYSGLNQRRI

SEQ ID NO: 3488 - protein, 30 aa, Artificial Sequence; identical to SEQ ID NO: 3482
  Synthetic Polypeptide

SEQ ID NO: 3489 - protein, 113 aa, Artificial Sequence
  Synthetic Polypeptide
RVKFSRSADAPAYQQGQNQLYNELNLGRREEYDVLDKRRGRDPEMGGKPQRRKNPQEGLYNELQKDKMAEAYSEIGMKGERRRGKGHDGLYQGLSTATKDTYDALHMQALPPR

SEQ ID NO: 3490 - protein, 143 aa, Artificial Sequence; identical to SEQ ID NO: 3483
  Synthetic Polypeptide

SEQ ID NO: 3491 - protein, 41 aa, Artificial Sequence; identical to SEQ ID NO: 3485
  Synthetic Polypeptide

SEQ ID NO: 3492 - protein, 42 aa, Artificial Sequence; identical to SEQ ID NO: 3486
  Synthetic Polypeptide

SEQ ID NO: 3493 - protein, 184 aa, Artificial Sequence
  Synthetic Polypeptide
QSFGLLDPKLCYLLDGILFIYGVILTALFLRSKRSRLLHSDYMNMTPRRPGPTRKHYQPYAPPRDFAAYRSRVKFSRSADAPAYQQGQNQLYNELNLGRREEYDVLDKRRGRDPEMGGKPQRRKNPQEGLYNELQKDKMAEAYSEIGMKGERRRGKGHDGLYQGLSTATKDTYDALHMQALPPR

SEQ ID NO: 3494 - protein, 185 aa, Artificial Sequence
  Synthetic Polypeptide
QSFGLLDPKLCYLLDGILFIYGVILTALFLKRGRKKLLYIFKQPFMRPVQTTQEEDGCSCRFPEEEEGGCELRVKFSRSADAPAYQQGQNQLYNELNLGRREEYDVLDKRRGRDPEMGGKPQRRKNPQEGLYNELQKDKMAEAYSEIGMKGERRRGKGHDGLYQGLSTATKDTYDALHMQALPPR

SEQ ID NO: 3495 - protein, 184 aa, Artificial Sequence; identical to SEQ ID NO: 3493
  Synthetic Polypeptide

SEQ ID NO: 3496 - protein, 185 aa, Artificial Sequence; identical to SEQ ID NO: 3494
  Synthetic Polypeptide

SEQ ID NO: 3497 - protein, 136 aa, Artificial Sequence
  Synthetic Polypeptide
DPAVYQLRDSKSSDKSVCLFTDFDSQTNVSQSKDSDVYITDKCVLDMRSMDFKSNSAVAWSNKSDFACANAFNNSIIPEDTFFPSPESSCDVKLVEKSFETDTNLNFQNLSVIGFRILLLKVAGFNLLMTLRLWSS

SEQ ID NO: 3498 - protein, 134 aa, Artificial Sequence
  Synthetic Polypeptide
AVYQLRDSKSSDKSVCLFTDFDSQTNVSQSKDSDVYITDKCVLDMRSMDFKSNSAVAWSNKSDFACANAFNNSIIPEDTFFPSPESSCDVKLVEKSFETDTNLNFQNLSVIGFRILLLKVAGFNLLMTLRLWSS

SEQ ID NO: 3499 - protein, 130 aa, Artificial Sequence
  Synthetic Polypeptide
LRDSKSSDKSVCLFTDFDSQTNVSQSKDSDVYITDKCVLDMRSMDFKSNSAVAWSNKSDFACANAFNNSIIPEDTFFPSPESSCDVKLVEKSFETDTNLNFQNLSVIGFRILLLKVAGFNLLMTLRLWSS

SEQ ID NO: 3500 - protein, 127 aa, Artificial Sequence
  Synthetic Polypeptide
SKSSDKSVCLFTDFDSQTNVSQSKDSDVYITDKCVLDMRSMDFKSNSAVAWSNKSDFACANAFNNSIIPEDTFFPSPESSCDVKLVEKSFETDTNLNFQNLSVIGFRILLLKVAGFNLLMTLRLWSS

SEQ ID NO: 3501 - protein, 123 aa, Artificial Sequence
  Synthetic Polypeptide
DKSVCLFTDFDSQTNVSQSKDSDVYITDKCVLDMRSMDFKSNSAVAWSNKSDFACANAFNNSIIPEDTFFPSPESSCDVKLVEKSFETDTNLNFQNLSVIGFRILLLKVAGFNLLMTLRLWSS

SEQ ID NO: 3502 - protein, 114 aa, Artificial Sequence
  Synthetic Polypeptide
FDSQTNVSQSKDSDVYITDKCVLDMRSMDFKSNSAVAWSNKSDFACANAFNNSIIPEDTFFPSPESSCDVKLVEKSFETDTNLNFQNLSVIGFRILLLKVAGFNLLMTLRLWSS

SEQ ID NO: 3503 - protein, 108 aa, Artificial Sequence
  Synthetic Polypeptide
VSQSKDSDVYITDKCVLDMRSMDFKSNSAVAWSNKSDFACANAFNNSIIPEDTFFPSPESSCDVKLVEKSFETDTNLNFQNLSVIGFRILLLKVAGFNLLMTLRLWSS

SEQ ID NO: 3504 - protein, 94 aa, Artificial Sequence
  Synthetic Polypeptide
CVLDMRSMDFKSNSAVAWSNKSDFACANAFNNSIIPEDTFFPSPESSCDVKLVEKSFETDTNLNFQNLSVIGFRILLLKVAGFNLLMTLRLWSS

SEQ ID NO: 3505 - protein, 88 aa, Artificial Sequence
  Synthetic Polypeptide
SMDFKSNSAVAWSNKSDFACANAFNNSIIPEDTFFPSPESSCDVKLVEKSFETDTNLNFQNLSVIGFRILLLKVAGFNLLMTLRLWSS

SEQ ID NO: 3506 - protein, 60 aa, Artificial Sequence
  Synthetic Polypeptide
IPEDTFFPSPESSCDVKLVEKSFETDTNLNFQNLSVIGFRILLLKVAGFNLLMTLRLWSS

SEQ ID NO: 3507 - protein, 50 aa, Artificial Sequence
  Synthetic Polypeptide
ESSCDVKLVEKSFETDTNLNFQNLSVIGFRILLLKVAGFNLLMTLRLWSS

SEQ ID NO: 3508 - protein, 179 aa, Artificial Sequence; identical to SEQ ID NO: 3453
  Synthetic Polypeptide

SEQ ID NO: 3509 - protein, 176 aa, Artificial Sequence
  Synthetic Polypeptide
KNVFPPEVAVFEPSEAEISHTQKATLVCLATGFYPDHVELSWWVNGKEVHSGVCTDPQPLKEQPALNDSRYCLSSRLRVSATFWQNPRNHFRCQVQFYGLSENDEWTQDRAKPVTQIVSAEAWGRADCGFTSESYQQGVLSATILYEILLGKATLYAVLVSALVLMAMVKRKDSRG

SEQ ID NO: 3510 - protein, 175 aa, Artificial Sequence
  Synthetic Polypeptide
NVFPPEVAVFEPSEAEISHTQKATLVCLATGFYPDHVELSWWVNGKEVHSGVCTDPQPLKEQPALNDSRYCLSSRLRVSATFWQNPRNHFRCQVQFYGLSENDEWTQDRAKPVTQIVSAEAWGRADCGFTSESYQQGVLSATILYEILLGKATLYAVLVSALVLMAMVKRKDSRG

SEQ ID NO: 3511 - protein, 173 aa, Artificial Sequence
  Synthetic Polypeptide
FPPEVAVFEPSEAEISHTQKATLVCLATGFYPDHVELSWWVNGKEVHSGVCTDPQPLKEQPALNDSRYCLSSRLRVSATFWQNPRNHFRCQVQFYGLSENDEWTQDRAKPVTQIVSAEAWGRADCGFTSESYQQGVLSATILYEILLGKATLYAVLVSALVLMAMVKRKDSRG

SEQ ID NO: 3512 - protein, 169 aa, Artificial Sequence
  Synthetic Polypeptide
VAVFEPSEAEISHTQKATLVCLATGFYPDHVELSWWVNGKEVHSGVCTDPQPLKEQPALNDSRYCLSSRLRVSATFWQNPRNHFRCQVQFYGLSENDEWTQDRAKPVTQIVSAEAWGRADCGFTSESYQQGVLSATILYEILLGKATLYAVLVSALVLMAMVKRKDSRG

SEQ ID NO: 3513 - protein, 164 aa, Artificial Sequence
  Synthetic Polypeptide
PSEAEISHTQKATLVCLATGFYPDHVELSWWVNGKEVHSGVCTDPQPLKEQPALNDSRYCLSSRLRVSATFWQNPRNHFRCQVQFYGLSENDEWTQDRAKPVTQIVSAEAWGRADCGFTSESYQQGVLSATILYEILLGKATLYAVLVSALVLMAMVKRKDSRG

SEQ ID NO: 3514 - protein, 161 aa, Artificial Sequence
  Synthetic Polypeptide
AEISHTQKATLVCLATGFYPDHVELSWWVNGKEVHSGVCTDPQPLKEQPALNDSRYCLSSRLRVSATFWQNPRNHFRCQVQFYGLSENDEWTQDRAKPVTQIVSAEAWGRADCGFTSESYQQGVLSATILYEILLGKATLYAVLVSALVLMAMVKRKDSRG

SEQ ID NO: 3515 - protein, 149 aa, Artificial Sequence
  Synthetic Polypeptide
CLATGFYPDHVELSWWVNGKEVHSGVCTDPQPLKEQPALNDSRYCLSSRLRVSATFWQNPRNHFRCQVQFYGLSENDEWTQDRAKPVTQIVSAEAWGRADCGFTSESYQQGVLSATILYEILLGKATLYAVLVSALVLMAMVKRKDSRG

SEQ ID NO: 3516 - protein, 137 aa, Artificial Sequence
  Synthetic Polypeptide
LSWWVNGKEVHSGVCTDPQPLKEQPALNDSRYCLSSRLRVSATFWQNPRNHFRCQVQFYGLSENDEWTQDRAKPVTQIVSAEAWGRADCGFTSESYQQGVLSATILYEILLGKATLYAVLVSALVLMAMVKRKDSRG

SEQ ID NO: 3517 - protein, 128 aa, Artificial Sequence
  Synthetic Polypeptide
VHSGVCTDPQPLKEQPALNDSRYCLSSRLRVSATFWQNPRNHFRCQVQFYGLSENDEWTQDRAKPVTQIVSAEAWGRADCGFTSESYQQGVLSATILYEILLGKATLYAVLVSALVLMAMVKRKDSRG

SEQ ID NO: 3518 - protein, 123 aa, Artificial Sequence
  Synthetic Polypeptide
CTDPQPLKEQPALNDSRYCLSSRLRVSATFWQNPRNHFRCQVQFYGLSENDEWTQDRAKPVTQIVSAEAWGRADCGFTSESYQQGVLSATILYEILLGKATLYAVLVSALVLMAMVKRKDSRG

SEQ ID NO: 3519 - protein, 115 aa, Artificial Sequence
  Synthetic Polypeptide
EQPALNDSRYCLSSRLRVSATFWQNPRNHFRCQVQFYGLSENDEWTQDRAKPVTQIVSAEAWGRADCGFTSESYQQGVLSATILYEILLGKATLYAVLVSALVLMAMVKRKDSRG

SEQ ID NO: 3520 - protein, 53 aa, Artificial Sequence
  Synthetic Polypeptide
GRADCGFTSESYQQGVLSATILYEILLGKATLYAVLVSALVLMAMVKRKDSRG

SEQ ID NO: 3521 - protein, 51 aa, Artificial Sequence
  Synthetic Polypeptide
ADCGFTSESYQQGVLSATILYEILLGKATLYAVLVSALVLMAMVKRKDSRG

SEQ ID NO: 3522 - protein, 173 aa, Artificial Sequence; identical to SEQ ID NO: 3476
  Synthetic Polypeptide

SEQ ID NO: 3523 - protein, 168 aa, Artificial Sequence
  Synthetic Polypeptide
ADVSPKPTIFLPSIAETKLQKAGTYLCLLEKFFPDVIKIHWQEKKSNTILGSQEGNTMKTNDTYMKFSWLTVPEKSLDKEHRCIVRHENNKNGVDQEIIFPPIKTDVITMDPKDNCSKDANDTLLLQLTNTSAYYMYLLLLLKSVVYFAIITCCLLRRTAFCCNGEKS

SEQ ID NO: 3524 - protein, 166 aa, Artificial Sequence
  Synthetic Polypeptide
VSPKPTIFLPSIAETKLQKAGTYLCLLEKFFPDVIKIHWQEKKSNTILGSQEGNTMKTNDTYMKFSWLTVPEKSLDKEHRCIVRHENNKNGVDQEIIFPPIKTDVITMDPKDNCSKDANDTLLLQLTNTSAYYMYLLLLLKSVVYFAIITCCLLRRTAFCCNGEKS

SEQ ID NO: 3525 - protein, 161 aa, Artificial Sequence
  Synthetic Polypeptide
TIFLPSIAETKLQKAGTYLCLLEKFFPDVIKIHWQEKKSNTILGSQEGNTMKTNDTYMKFSWLTVPEKSLDKEHRCIVRHENNKNGVDQEIIFPPIKTDVITMDPKDNCSKDANDTLLLQLTNTSAYYMYLLLLLKSVVYFAIITCCLLRRTAFCCNGEKS

SEQ ID NO: 3526 - protein, 67 aa, Artificial Sequence
  Synthetic Polypeptide
PIKTDVITMDPKDNCSKDANDTLLLQLTNTSAYYMYLLLLLKSVVYFAIITCCLLRRTAFCCNGEKS

SEQ ID NO: 3527 - protein, 59 aa, Artificial Sequence
  Synthetic Polypeptide
MDPKDNCSKDANDTLLLQLTNTSAYYMYLLLLLKSVVYFAIITCCLLRRTAFCCNGEKS

SEQ ID NO: 3528 - protein, 153 aa, Artificial Sequence; identical to SEQ ID NO: 3477
  Synthetic Polypeptide

SEQ ID NO: 3529 - protein, 151 aa, Artificial Sequence
  Synthetic Polypeptide
PHTKPSVFVMKNGTNVACLVKEFYPKDIRINLVSSKKITEFDPAIVISPSGKYNAVKLGKYEDSNSVTCSVQHDNKTVHSTDFEVKTDSTDHVKPKETENTKQPSKSCHKPKAIVHTEKVNMMSLTVLGLRMLFAKTVAVNFLLTAKLFFL

SEQ ID NO: 3530 - protein, 147 aa, Artificial Sequence
  Synthetic Polypeptide
PSVFVMKNGTNVACLVKEFYPKDIRINLVSSKKITEFDPAIVISPSGKYNAVKLGKYEDSNSVTCSVQHDNKTVHSTDFEVKTDSTDHVKPKETENTKQPSKSCHKPKAIVHTEKVNMMSLTVLGLRMLFAKTVAVNFLLTAKLFFL

SEQ ID NO: 3531 - protein, 145 aa, Artificial Sequence
  Synthetic Polypeptide
VFVMKNGTNVACLVKEFYPKDIRINLVSSKKITEFDPAIVISPSGKYNAVKLGKYEDSNSVTCSVQHDNKTVHSTDFEVKTDSTDHVKPKETENTKQPSKSCHKPKAIVHTEKVNMMSLTVLGLRMLFAKTVAVNFLLTAKLFFL

SEQ ID NO: 3532 - protein, 140 aa, Artificial Sequence
  Synthetic Polypeptide
NGTNVACLVKEFYPKDIRINLVSSKKITEFDPAIVISPSGKYNAVKLGKYEDSNSVTCSVQHDNKTVHSTDFEVKTDSTDHVKPKETENTKQPSKSCHKPKAIVHTEKVNMMSLTVLGLRMLFAKTVAVNFLLTAKLFFL

SEQ ID NO: 3533 - protein, 68 aa, Artificial Sequence
  Synthetic Polypeptide
EVKTDSTDHVKPKETENTKQPSKSCHKPKAIVHTEKVNMMSLTVLGLRMLFAKTVAVNFLLTAKLFFL

SEQ ID NO: 3534 - protein, 61 aa, Artificial Sequence
  Synthetic Polypeptide
DHVKPKETENTKQPSKSCHKPKAIVHTEKVNMMSLTVLGLRMLFAKTVAVNFLLTAKLFFL

SEQ ID NO: 3535 - protein, 5 aa, Artificial Sequence
  Synthetic Polypeptide
GGGGG

SEQ ID NO: 3536 - protein, 106 aa, Artificial Sequence
  Synthetic Polypeptide
GQPKANPTVTLFPPSSEELQANKATLVCLISDFYPGAVTVAWKADGSPVKAGVETTKPSKQSNNKYAASSYLSLTPEQWKSHRSYSCQVTHEGSTVEKTVAPTECS

SEQ ID NO: 3537 - protein, 103 aa, Artificial Sequence
  Synthetic Polypeptide
ASTKGPSVFPLAPSSKSTSGGTAALGCLVKDYFPEPVTVSWNSGALTSGVHTFPAVLQSSGLYSLSSVVTVPSSSLGTQTYICNVNHKPSNTKVDKRVEPKSC

SEQ ID NO: 3538 - protein, 102 aa, Artificial Sequence
  Synthetic Polypeptide
ASTKGPSVFPLAPSSKSTSGGTAALGCLVKDYFPEPVTVSWNSGALTSGVHTFPAVLQSSGLYSLSSVVTVPSSSLGTQTYICNVNHKPSNTKVDKRVEPKS

SEQ ID NO: 3539 - protein, 113 aa, Artificial Sequence
  Synthetic Polypeptide
ASTKGPSVFPLAPSSKSTSGGTAALGCLVKDYFPEPVTVSWNSGALTSGVHTFPAVLQSSGLYSLSSVVTVPSSSLGTQTYICNVNHKPSNTKVDKRVEPKSCDKTHTCPPCP

SEQ ID NO: 3540 - protein, 103 aa, Artificial Sequence
  Synthetic Polypeptide
ASTKGPSVFPLAPSSKSTSGGTAALGCLVKDYFPEPVTVSWNSGALTSGVHTFPAVLQSSGLYSLSSVVTVPSSSLGTQTYICNVNHKPSNTKVDKKVEPKSC

SEQ ID NO: 3541 - protein, 102 aa, Artificial Sequence
  Synthetic Polypeptide
ASTKGPSVFPLAPSSKSTSGGTAALGCLVKDYFPEPVTVSWNSGALTSGVHTFPAVLQSSGLYSLSSVVTVPSSSLGTQTYICNVNHKPSNTKVDKKVEPKS

SEQ ID NO: 3542 - protein, 113 aa, Artificial Sequence
  Synthetic Polypeptide
ASTKGPSVFPLAPSSKSTSGGTAALGCLVKDYFPEPVTVSWNSGALTSGVHTFPAVLQSSGLYSLSSVVTVPSSSLGTQTYICNVNHKPSNTKVDKKVEPKSCDKTHTCPPCP

SEQ ID NO: 3543 - protein, 101 aa, Artificial Sequence
  Synthetic Polypeptide
ASTKGPSVFPLAPCSRSTSESTAALGCLVKDYFPEPVTVSWNSGALTSGVHTFPAVLQSSGLYSLSSVVTVPSSNFGTQTYTCNVDHKPSNTKVDKTVERK

SEQ ID NO: 3544 - protein, 102 aa, Artificial Sequence
  Synthetic Polypeptide
ASTKGPSVFPLAPCSRSTSESTAALGCLVKDYFPEPVTVSWNSGALTSGVHTFPAVLQSSGLYSLSSVVTVPSSNFGTQTYTCNVDHKPSNTKVDKTVERKC

SEQ ID NO: 3545 - protein, 103 aa, Artificial Sequence
  Synthetic Polypeptide
ASTKGPSVFPLAPCSRSTSESTAALGCLVKDYFPEPVTVSWNSGALTSGVHTFPAVLQSSGLYSLSSVVTVPSSNFGTQTYTCNVDHKPSNTKVDKTVERKCC

SEQ ID NO: 3546 - protein, 103 aa, Artificial Sequence
  Synthetic Polypeptide
ASTKGPSVFPLAPCSRSTSESTAALGCLVKDYFPEPVTVSWNSGALTSGVHTFPAVLQSSGLYSLSSVVTVPSSSLGTKTYTCNVDHKPSNTKVDKRVESKYG

SEQ ID NO: 3547 - protein, 121 aa, Artificial Sequence
  Synthetic Polypeptide
ASPTSPKVFPLSLCSTQPDGNVVIACLVQGFFPQEPLSVTWSESGQGVTARNFPPSQDASGDLYTTSSQLTLPATQCLAGKSVTCHVKHYTNPSQDVTVPCPVPSTPPTPSPSTPPTPSPS

SEQ ID NO: 3548 - protein, 108 aa, Artificial Sequence
  Synthetic Polypeptide
ASPTSPKVFPLSLDSTPQDGNVVVACLVQGFFPQEPLSVTWSESGQNVTARNFPPSQDASGDLYTTSSQLTLPATQCPDGKSVTCHVKHYTNPSQDVTVPCPVPPPPP

SEQ ID NO: 3549 - protein, 159 aa, Artificial Sequence
  Synthetic Polypeptide
APTKAPDVFPIISGCRHPKDNSPVVLACLITGYHPTSVTVTWYMGTQSQPQRTFPEIQRRDSYYMTSSQLSTPLQQWRQGEYKCVVQHTASKSKKEIFRWPESPKAQASSVPTAQPQAEGSLAKATTAPATTRNTGRGGEEKKKEKEKEEQEERETKTP

SEQ ID NO: 3550 - protein, 103 aa, Artificial Sequence
  Synthetic Polypeptide
ASTQSPSVFPLTRCCKNIPSNATSVTLGCLATGYFPEPVMVTWDTGSLNGTTMTLPATTLTLSGHYATISLLTVSGAWAKQMFTCRVAHTPSSTDWVDNKTFS

SEQ ID NO: 3551 - protein, 104 aa, Artificial Sequence
  Synthetic Polypeptide
GSASAPTLFPLVSCENSPSDTSSVAVGCLAQDFLPDSITLSWKYKNNSDISSTRGFPSVLRGGKYAATSQVLLPSKDVMQGTDEHVVCKVQHPNGNKEKNVPLP

SEQ ID NO: 3552 - protein, 80 aa, Artificial Sequence
  Synthetic Polypeptide
IQNPDPAVYQLRDSKSSDKSVCLFTDFDSQTNVSQSKDSDVYITDKTVLDMRSMDFKSNSAVAWSNKSDFACANAFNNSI

SEQ ID NO: 3553 - protein, 90 aa, Artificial Sequence
  Synthetic Polypeptide
IQNPDPAVYQLRDSKSSDKSVCLFTDFDSQTNVSQSKDSDVYITDKTVLDMRSMDFKSNSAVAWSNKSDFACANAFNNSIIPEDTFFPSP

SEQ ID NO: 3554 - protein, 126 aa, Artificial Sequence
  Synthetic Polypeptide
EDLKNVFPPEVAVFEPSEAEISHTQKATLVCLATGFYPDHVELSWWVNGKEVHSGVSTDPQPLKEQPALNDSRYCLSSRLRVSATFWQNPRNHFRCQVQFYGLSENDEWTQDRAKPVTQIVSAEAW

SEQ ID NO: 3555 - protein, 128 aa, Artificial Sequence
  Synthetic Polypeptide
EDLKNVFPPEVAVFEPSEAEISHTQKATLVCLATGFYPDHVELSWWVNGKEVHSGVSTDPQPLKEQPALNDSRYCLSSRLRVSATFWQNPRNHFRCQVQFYGLSENDEWTQDRAKPVTQIVSAEAWGR

SEQ ID NO: 3556 - protein, 106 aa, Artificial Sequence
  Synthetic Polypeptide
DKQLDADVSPKPTIFLPSIAETKLQKAGTYLCLLEKFFPDVIKIHWQEKKSNTILGSQEGNTMKTNDTYMKFSWLTVPEKSLDKEHRCIVRHENNKNGVDQEIIFP

SEQ ID NO: 3557 - protein, 114 aa, Artificial Sequence
  Synthetic Polypeptide
DKQLDADVSPKPTIFLPSIAETKLQKAGTYLCLLEKFFPDVIKIHWQEKKSNTILGSQEGNTMKTNDTYMKFSWLTVPEKSLDKEHRCIVRHENNKNGVDQEIIFPPIKTDVIT

SEQ ID NO: 3558 - protein, 85 aa, Artificial Sequence
  Synthetic Polypeptide
SQPHTKPSVFVMKNGTNVACLVKEFYPKDIRINLVSSKKITEFDPAIVISPSGKYNAVKLGKYEDSNSVTCSVQHDNKTVHSTDF

SEQ ID NO: 3559 - protein, 92 aa, Artificial Sequence
  Synthetic Polypeptide
SQPHTKPSVFVMKNGTNVACLVKEFYPKDIRINLVSSKKITEFDPAIVISPSGKYNAVKLGKYEDSNSVTCSVQHDNKTVHSTDFEVKTDST

SEQ ID NO: 3560 - protein, 131 aa, Artificial Sequence
  Synthetic Polypeptide
EDLKNVFPPEVAVFEPSEAEISHTQKATLVCLATGFYPDHVELSWWVNGKEVHSGVSTDPQPLKEQPALNDSRYCLSSRLRVSATFWQNPRNHFRCQVQFYGLSENDEWTQDRAKPVTQIVSAEAWGRADC

SEQ ID NO: 3561 - protein, 94 aa, Artificial Sequence
  Synthetic Polypeptide
IQNPDPAVYQLRDSKSSDKSVCLFTDFDSQTNVSQSKDSDVYITDKTVLDMRSMDFKSNSAVAWSNKSDFACANAFNNSIIPEDTFFPSPESSC

SEQ ID NO: 3562 - protein, 94 aa, Artificial Sequence; identical to SEQ ID NO: 3561
  Synthetic Polypeptide

SEQ ID NO: 3563 - protein, 79 aa, Artificial Sequence
  Synthetic Polypeptide
KSSDKSVCLFTDFDSQTNVSQSKDSDVYITDKTVLDMRSMDFKSNSAVAWSNKSDFACANAFNNSIIPEDTFFPSPESS

SEQ ID NO: 3564 - protein, 126 aa, Artificial Sequence; identical to SEQ ID NO: 3554
  Synthetic Polypeptide

SEQ ID NO: 3565 - protein, 110 aa, Artificial Sequence
  Synthetic Polypeptide
PEVAVFEPSEAEISHTQKATLVCLATGFYPDHVELSWWVNGKEVHSGVSTDPQPLKEQPALNDSRYCLSSRLRVSATFWQNPRNHFRCQVQFYGLSENDEWTQDRAKPVT

SEQ ID NO: 3566 - protein, 114 aa, Artificial Sequence; identical to SEQ ID NO: 3557
  Synthetic Polypeptide

SEQ ID NO: 3567 - protein, 95 aa, Artificial Sequence
  Synthetic Polypeptide
PKPTIFLPSIAETKLQKAGTYLCLLEKFFPDVIKIHWQEKKSNTILGSQEGNTMKTNDTYMKFSWLTVPEKSLDKEHRCIVRHENNKNGVDQEII

SEQ ID NO: 3568 - protein, 85 aa, Artificial Sequence; identical to SEQ ID NO: 3558
  Synthetic Polypeptide

SEQ ID NO: 3569 - protein, 92 aa, Artificial Sequence; identical to SEQ ID NO: 3559
  Synthetic Polypeptide

SEQ ID NO: 3570 - protein, 10 aa, Artificial Sequence
  Synthetic Polypeptide
GGGGGGGGGG

SEQ ID NO: 3571 - protein, 21 aa, Artificial Sequence
  Synthetic Polypeptide
DVKLVEKSFETDTNLNFQNLS

SEQ ID NO: 3572 - protein, 22 aa, Artificial Sequence
  Synthetic Polypeptide
CDVKLVEKSFETDTNLNFQNLS

SEQ ID NO: 3573 - protein, 19 aa, Artificial Sequence
  Synthetic Polypeptide
GRADCGFTSESYQQGVLSA

SEQ ID NO: 3574 - protein, 27 aa, Artificial Sequence
  Synthetic Polypeptide
QIVSAEAWGRADCGFTSESYQQGVLSA

SEQ ID NO: 3575 - protein, 24 aa, Artificial Sequence
  Synthetic Polypeptide
MDPKDNCSKDANDTLLLQLTNTSA

SEQ ID NO: 3576 - protein, 34 aa, Artificial Sequence
  Synthetic Polypeptide
FPPIKTDVITMDPKDNCSKDANDTLLLQLTNTSA

SEQ ID NO: 3577 - protein, 44 aa, Artificial Sequence
  Synthetic Polypeptide
EVKTDSTDHVKPKETENTKQPSKSCHKPKAIVHTEKVNMMSLTV

SEQ ID NO: 3578 - protein, 37 aa, Artificial Sequence
  Synthetic Polypeptide
DHVKPKETENTKQPSKSCHKPKAIVHTEKVNMMSLTV

SEQ ID NO: 3579 - protein, 10 aa, Artificial Sequence
  Synthetic Polypeptide
QSFGLLDPKL

SEQ ID NO: 3580 - protein, 5 aa, Artificial Sequence
  Synthetic Polypeptide
GGGGG

SEQ ID NO: 3581 - protein, 20 aa, Artificial Sequence
  Synthetic Polypeptide
VIGFRILLLKVAGFNLLMTL

SEQ ID NO: 3582 - protein, 23 aa, Artificial Sequence
  Synthetic Polypeptide
TILYEILLGKATLYAVLVSALVL

SEQ ID NO: 3583 - protein, 23 aa, Artificial Sequence
  Synthetic Polypeptide
YYMYLLLLLKSVVYFAIITCCLL

SEQ ID NO: 3584 - protein, 23 aa, Artificial Sequence
  Synthetic Polypeptide
LGLRMLFAKTVAVNFLLTAKLFF

SEQ ID NO: 3585 - protein, 20 aa, Artificial Sequence
  Synthetic Polypeptide
CYLLDGILFIYGVILTALFL

SEQ ID NO: 3586 - protein, 5 aa, Artificial Sequence
  Synthetic Polypeptide
GGGGG

SEQ ID NO: 3587 - protein, 5 aa, Artificial Sequence
  Synthetic Polypeptide
RLWSS

SEQ ID NO: 3588 - protein, 11 aa, Artificial Sequence
  Synthetic Polypeptide
MAMVKRKDSRG

SEQ ID NO: 3589 - protein, 12 aa, Artificial Sequence
  Synthetic Polypeptide
RRTAFCCNGEKS

SEQ ID NO: 3590 - protein, 113 aa, Artificial Sequence; identical to SEQ ID NO: 3489
  Synthetic Polypeptide

SEQ ID NO: 3591 - protein, 5 aa, Artificial Sequence
  Synthetic Polypeptide
GGGGG

SEQ ID NO: 3592 - protein, 10 aa, Artificial Sequence
  Synthetic Polypeptide
DKTHTCPPCP

SEQ ID NO: 3593 - protein, 9 aa, Artificial Sequence
  Synthetic Polypeptide
CCVECPPCP

SEQ ID NO: 3594 - protein, 234 aa, Artificial Sequence
  Synthetic Polypeptide
PAEPKSPDKTHTCPPCPAPPVAGPSVFLFPPKPKDTLMIARTPEVTCVVVDVSHEDPEVKFNWYVDGVEVHNAKTKPREEQYNSTYRVVSVLTVLHQDWLNGKEYKCKVSNKALPAPIEKTISKAKGQPREPQVYTLPPSRDELTKNQVSLTCLVKGFYPSDIAVEWESNGQPENNYKTTPPVLDSDGSFFLYSKLTVDKSRWQQGNVFSCSVMHEALHNHYTQKSLSLSPGKK

SEQ ID NO: 3595 - protein, 235 aa, Artificial Sequence
  Synthetic Polypeptide
PAEPKSPDKTHTCPPCPAPPVAGPSVFLFPPKPKDTLMIARTPEVTCVVVDVSHEDPEVKFNWYVDGVEVHNAKTKPREEQYNSTYRVVSVLTVLHQDWLNGKEYKCKVSNKALPAPIEKTISKAKGQPREPQVYTLPPSRDELTKNQVSLTCLVKGFYPSDIAVEWESNGQPENNYKTTPPVLDSDGSFFLYSKLTVDKSRWQQGNVFSCSVMHEALHNHYTQKSLSSLSPGKK

SEQ ID NO: 3596 - protein, 229 aa, Artificial Sequence
  Synthetic Polypeptide
ESKYGPPCPPCPAPEFEGGPSVFLFPPKPKDTLMISRTPEVTCVVVDVSQEDPEVQFNWYVDGVEVHNAKTKPREEQFNSTYRVVSVLTVLHQDWLNGKEYKCKVSNKGLPSSIEKTISKAKGQPREPQVYTLPPSQEEMTKNQVSLTCLVKGFYPSDIAVEWESNGQPENNYKTTPPVLDSDGSFFLYSRLTVDKSRWQEGNVFSCSVMHEALHNHYTQKSLSLSLGK

SEQ ID NO: 3597 - protein, 119 aa, Artificial Sequence
  Synthetic Polypeptide
ESKYGPPCPPCPGQPREPQVYTLPPSQEEMTKNQVSLTCLVKGFYPSDIAVEWESNGQPENNYKTTPPVLDSDGSFFLYSRLTVDKSRWQEGNVFSCSVMHEALHNHYTQKSLSLSLGK

SEQ ID NO: 3598 - protein, 12 aa, Artificial Sequence
  Synthetic Polypeptide
ESKYGPPCPPCP

SEQ ID NO: 3599 - protein, 5 aa, Artificial Sequence
  Synthetic Polypeptide
GGGGG

SEQ ID NO: 3600 - protein, 112 aa, Artificial Sequence
  Synthetic Polypeptide
RVKFSRSADAPAYQQGQNQLYNELNLGRREEYDVLDKRRGRDPEMGGKPRRKNPQEGLYNELQKDKMAEAYSEIGMKGERRRGKGHDGLYQGLSTATKDTYDALHMQALPPR

SEQ ID NO: 3601 - protein, 112 aa, Artificial Sequence; identical to SEQ ID NO: 3600
  Synthetic Polypeptide

SEQ ID NO: 3602 - protein, 42 aa, Artificial Sequence; identical to SEQ ID NO: 3486
  Synthetic Polypeptide

SEQ ID NO: 3603 - protein, 72 aa, Artificial Sequence
  Synthetic Polypeptide
AKPTTTPAPRPPTPAPTIASQPLSLRPEACRPAAGGAVHTRGLDFACDIYIWAPLAGTCGVLLLSLVITLYC

SEQ ID NO: 3604 - protein, 226 aa, Artificial Sequence
  Synthetic Polypeptide
AKPTTTPAPRPPTPAPTIASQPLSLRPEACRPAAGGAVHTRGLDFACDIYIWAPLAGTCGVLLLSLVITLYCKRGRKKLLYIFKQPFMRPVQTTQEEDGCSCRFPEEEEGGCELRVKFSRSADAPAYQQGQNQLYNELNLGRREEYDVLDKRRGRDPEMGGKPRRKNPQEGLYNELQKDKMAEAYSEIGMKGERRRGKGHDGLYQGLSTATKDTYDALHMQALPPR

SEQ ID NO: 3605 - protein, 114 aa, Artificial Sequence
  Synthetic Polypeptide
AKPTTTPAPRPPTPAPTIASQPLSLRPEACRPAAGGAVHTRGLDFACDIYIWAPLAGTCGVLLLSLVITLYCKRGRKKLLYIFKQPFMRPVQTTQEEDGCSCRFPEEEEGGCEL

SEQ ID NO: 3606 - protein, 108 aa, Artificial Sequence
  Synthetic Polypeptide
KIEVMYPPPYLDNEKSNGTIIHVKGKHLCPSPLFPGPSKPFWVLVVVGGVLACYSLLVTVAFIIFWVRSKRSRLLHSDYMNMTPRRPGPTRKHYQPYAPPRDFAAYRS

SEQ ID NO: 3607 - protein, 150 aa, Artificial Sequence
  Synthetic Polypeptide
FKIPIEELEDRVFVNCNTSITWVEGTVGTLLSDITRLDLGKRILDPRGIYRCNGTDIYKDKESTVQVHYRMCQSCVELDPATVAGIIVTDVIATLLLALGVFCFAGHETGRLSGAADTQALLRNDQVYQPLRDRDDAQYSHLGGNWARNK

SEQ ID NO: 3608 - protein, 185 aa, Artificial Sequence
  Synthetic Polypeptide
DGNEEMGGITQTPYKVSISGTTVILTCPQYPGSEILWQHNDKNIGGDEDDKNIGSDEDHLSLKEFSELEQSGYYVCYPRGSKPEDANFYLYLRARVCENCMEMDVMSVATIVIVDICITGGLLLLVYYWSKNRKAKAKPVTRGAGAGGRQRGQNKERPPPVQNPDYEPIRKGQRDLYSGLNQRRI

SEQ ID NO: 3609 - protein, 160 aa, Artificial Sequence
  Synthetic Polypeptide
QSIKGNHLVKVYDYQEDGSVLLTCDAEAKNITWFKDGKMIGFLTEDKKKWNLGSNAKDPRGMYQCKGSQNKSKPLQVYYRMCQNCIELNAATISGFLFAEIVSIFVLAVGVYFIAGQDGVRQSRASDKQTLLPNDQLYQPLKDREDDQYSHLQGNQLRRN

SEQ ID NO: 3610 - protein, 143 aa, Artificial Sequence; identical to SEQ ID NO: 3483
  Synthetic Polypeptide

SEQ ID NO: 3611 - protein, 5 aa, Artificial Sequence
  Synthetic Polypeptide
GGGGG

SEQ ID NO: 3612 - protein, 9 aa, Artificial Sequence
  Synthetic Polypeptide
GAIGFLRTA

SEQ ID NO: 3613 - protein, 10 aa, Artificial Sequence
  Synthetic Polypeptide
ALRRLLGLFG

SEQ ID NO: 3614 - protein, 10 aa, Artificial Sequence
  Synthetic Polypeptide
RAARVLGLET

SEQ ID NO: 3615 - protein, 8 aa, Artificial Sequence
  Synthetic Polypeptide
GPQGIFGQ

SEQ ID NO: 3616 - protein, 8 aa, Artificial Sequence
  Synthetic Polypeptide
RAIHIQAE

SEQ ID NO: 3617 - protein, 8 aa, Artificial Sequence
  Synthetic Polypeptide
APGQIAGQ

SEQ ID NO: 3618 - protein, 8 aa, Artificial Sequence
  Synthetic Polypeptide
GPQGLAGQ

SEQ ID NO: 3619 - protein, 8 aa, Artificial Sequence
  Synthetic Polypeptide
GPLGIAGI

SEQ ID NO: 3620 - protein, 8 aa, Artificial Sequence
  Synthetic Polypeptide
IPENFFGV

SEQ ID NO: 3621 - protein, 8 aa, Artificial Sequence
  Synthetic Polypeptide
MAASAKRE

SEQ ID NO: 3622 - protein, 8 aa, Artificial Sequence
  Synthetic Polypeptide
PFSPLVAT

SEQ ID NO: 3623 - protein, 8 aa, Artificial Sequence
  Synthetic Polypeptide
GPLGIAGQ

SEQ ID NO: 3624 - protein, 8 aa, Artificial Sequence
  Synthetic Polypeptide
GPQAIAGQ

SEQ ID NO: 3625 - protein, 5 aa, Artificial Sequence
  Synthetic Polypeptide
PGYIN

SEQ ID NO: 3626 - protein, 5 aa, Artificial Sequence
  Synthetic Polypeptide
GGGGG

SEQ ID NO: 3627 - protein, 22 aa, Artificial Sequence
  Synthetic Polypeptide
VKQTLNFDLLKLAGDVESNPGP

SEQ ID NO: 3628 - protein, 18 aa, Artificial Sequence
  Synthetic Polypeptide
EGRGSLLTCGDVEENPGP

SEQ ID NO: 3629 - protein, 18 aa, Artificial Sequence
  Synthetic Polypeptide
EGRGSLLTCGDVEENPGP

SEQ ID NO: 3630 - protein, 19 aa, Artificial Sequence
  Synthetic Polypeptide
ATNFSLLKQAGDVEENPGP

SEQ ID NO: 3631 - protein, 19 aa, Artificial Sequence
  Synthetic Polypeptide
ATNFSLLKQAGDVEQNPGP

SEQ ID NO: 3632 - protein, 20 aa, Artificial Sequence
  Synthetic Polypeptide
QCTNYALLKLAGDVESNPGP

SEQ ID NO: 3633 - protein, 4 aa, Artificial Sequence
  Synthetic Polypeptide
SGSG

SEQ ID NO: 3634 - protein, 4 aa, Artificial Sequence
  Synthetic Polypeptide
SGSG

SEQ ID NO: 3635 - protein, 4 aa, Artificial Sequence
  Synthetic Polypeptide
RAKR

SEQ ID NO: 3636 - protein, 4 aa, Artificial Sequence
  Synthetic Polypeptide
RAKR

SEQ ID NO: 3637 - protein, 4 aa, Artificial Sequence
  Synthetic Polypeptide
RAKR

SEQ ID NO: 3638 - protein, 855 aa, Artificial Sequence
  Synthetic Polypeptide
MALPVTALLLPLALLLHAARPDIQMTQSPSSLSASVGDRVTITCKASDHINNWLAWYQQKPGKAPKLLIYGATTLETGVPSRFSGSGSGTDFTLTISSLQPEDFATYYCQQSWNTPWTFGQGTKVEIKRLEDLKNVFPPEVAVFEPSEAEISHTQKATLVCLATGFYPDHVELSWWVNGKEVHSGVCTDPQPLKEQPALNDSRYCLSSRLRVSATFWQNPRNHFRCQVQFYGLSENDEWTQDRAKPVTQIVSAEAWGRADCGFTSESYQQGVLSATILYEILLGKATLYAVLVSALVLMAMVKRKDSRGRAKRSGSGATNFSLLKQAGDVEENPGPTSMDWIWRILFLVGAATGAHSFEEVQLVESGGGLVQPGGSLRLSCAASGYAFSSYWVNWVRQAPGKGLEWVAQIYPGDGDTNYNGKFKGRFTISRDNSKNTLYLQMNSLRAEDTAVYYCARSITTVVGCAMDYWGQGTLVTVSSTRIQNPDPAVYQLRDSKSSDKSVCLFTDFDSQTNVSQSKDSDVYITDKCVLDMRSMDFKSNSAVAWSNKSDFACANAFNNSIIPEDTFFPSPESSCDVKLVEKSFETDTNLNFQNLSVIGFRILLLKVAGFNLLMTLRLWSSRAKRSGSGVKQTLNFDLLKLAGDVESNPGPSRGHMTEYKPTVRLATRDDVPRAVRTLAAAFADYPATRHTVDPDRHIERVTELQELFLTRVGLDIGKVWVADDGAAVAVWTTPESVEAGAVFAEIGPRMAELSGSRLAAQQQMEGLLAPHRPKEPAWFLATVGVSPDHQGKGLGSAVVLPGVEAAERAGVPAFLETSAPRNLPFYERLGFTVTADVEVPEGPRTWCMTRKPGA

SEQ ID NO: 3639 - protein, 730 aa, Artificial Sequence
  Synthetic Polypeptide
MALPVTALLLPLALLLHAARPDIQMTQTTSSLSASLGDRVTISCRASQDISKYLNWYQQKPDGTVKLLIYHTSRLHSGVPSRFSGSGSGTDYSLTISNLEQEDIATYFCQQGNTLPYTFGGGTKLEITGGGGSGGGGSGGGGSEVKLQESGPGLVAPSQSLSVTCTVSGVSLPDYGVSWIRQPPRKGLEWLGVIWGSETTYYNSALKSRLTIIKDNSKSQVFLKMNSLQTDDTAIYYCAKHYYYGGSYAMDYWGQGTSVTVSSTRGGSGVFTLEDFVGDWRQTAGYNLDQVLEQGGVSSLFQNLGVSVTPIQRIVLSGENGLKIDIHVIIPYEGLSGDQMGQIEKIFKVVYPVDDHHFKVILHYGTLVIDGVTPNMIDYFGRPYEGIAVFDGKKITVTGTLWNGNKIIDERLINPDGSLLFRVTINGVTGWRLCERILALEGGSWSHPQFEKDYKDDDDKGSDYKDDDDKGSDYKDDDDKGSDYKDDDDKAWSHPQFEKHHHHHHHHTSGSGEGRGSLLTCGDVEENPGPHMTEYKPTVRLATRDDVPRAVRTLAAAFADYPATRHTVDPDRHIERVTELQELFLTRVGLDIGKVWVADDGAAVAVWTTPESVEAGAVFAEIGPRMAELSGSRLAAQQQMEGLLAPHRPKEPAWFLATVGVSPDHQGKGLGSAVVLPGVEAAERAGVPAFLETSAPRNLPFYERLGFTVTADVEVPEGPRTWCMTRKPGA

SEQ ID NO: 3640 - protein, 730 aa, Artificial Sequence
  Synthetic Polypeptide
MALPVTALLLPLALLLHAARPEIVMTQSPATLSLSPGERATLSCRASQDISKYLNWYQQKPGQAPRLLIYHTSRLHSGIPARFSGSGSGTDYTLTISSLQPEDFAVYFCQQGNTLPYTFGQGTKLEIKGGGGSGGGGSGGGGSQVQLQESGPGLVKPSETLSLTCTVSGVSLPDYGVSWIRQPPGKGLEWIGVIWGSETTYYNSSLKSRVTISKDNSKNQVSLKLSSVTAADTAVYYCAKHYYYGGSYAMDYWGQGTLVTVSSTRGGSGVFTLEDFVGDWRQTAGYNLDQVLEQGGVSSLFQNLGVSVTPIQRIVLSGENGLKIDIHVIIPYEGLSGDQMGQIEKIFKVVYPVDDHHFKVILHYGTLVIDGVTPNMIDYFGRPYEGIAVFDGKKITVTGTLWNGNKIIDERLINPDGSLLFRVTINGVTGWRLCERILALEGGSWSHPQFEKDYKDDDDKGSDYKDDDDKGSDYKDDDDKGSDYKDDDDKAWSHPQFEKHHHHHHHHTSGSGEGRGSLLTCGDVEENPGPHMTEYKPTVRLATRDDVPRAVRTLAAAFADYPATRHTVDPDRHIERVTELQELFLTRVGLDIGKVWVADDGAAVAVWTTPESVEAGAVFAEIGPRMAELSGSRLAAQQQMEGLLAPHRPKEPAWFLATVGVSPDHQGKGLGSAVVLPGVEAAERAGVPAFLETSAPRNLPFYERLGFTVTADVEVPEGPRTWCMTRKPGA

SEQ ID NO: 3641 - protein, 732 aa, Artificial Sequence
  Synthetic Polypeptide
MALPVTALLLPLALLLHAARPDIQMTQSPSSLSASVGDRVTITCSASQDISNYLNWYQQKPGKAPKLLIYYTSNLHSGVPSRFSGSGSGTDFTLTISSLQPEDFATYYCQQYRKLPWTFGQGTKLEIKRGGGGSGGGGSGGGGSQVQLVQSGAEVKKPGSSVKVSCKASGGTFSNYWMHWVRQAPGQGLEWMGATYRGHSDTYYNQKFKGRVTITADKSTSTAYMELSSLRSEDTAVYYCARGAIYDGYDVLDNWGQGTLVTVSSTRGGSGVFTLEDFVGDWRQTAGYNLDQVLEQGGVSSLFQNLGVSVTPIQRIVLSGENGLKIDIHVIIPYEGLSGDQMGQIEKIFKVVYPVDDHHFKVILHYGTLVIDGVTPNMIDYFGRPYEGIAVFDGKKITVTGTLWNGNKIIDERLINPDGSLLFRVTINGVTGWRLCERILALEGGSWSHPQFEKDYKDDDDKGSDYKDDDDKGSDYKDDDDKGSDYKDDDDKAWSHPQFEKHHHHHHHHTSGSGEGRGSLLTCGDVEENPGPHMTEYKPTVRLATRDDVPRAVRTLAAAFADYPATRHTVDPDRHIERVTELQELFLTRVGLDIGKVWVADDGAAVAVWTTPESVEAGAVFAEIGPRMAELSGSRLAAQQQMEGLLAPHRPKEPAWFLATVGVSPDHQGKGLGSAVVLPGVEAAERAGVPAFLETSAPRNLPFYERLGFTVTADVEVPEGPRTWCMTRKPGA

SEQ ID NO: 3642 - protein, 732 aa, Artificial Sequence
  Synthetic Polypeptide
MALPVTALLLPLALLLHAARPDIVLTQSPATLSLSPGDRATISCRASESVTILGSHLIYWYQQKPGQPPRLLIQLASNVQTGVPARFSGSGSRTDFTLTISSVEPEDFAVYYCLQSRTIPRTFGQGTKLEIKRGGGGSGGGGSGGGGSQVQLVQSGPEVKKPGESVKISCKASGYTFRHYSMNWVKQAPGQGLKWMGRINTESGVPIYADDFKGRFSFTVDTSASTAYLEISSLTSEDTAVYFCSNDYLYSLDFWGQGTTLTVSSTRGGSGVFTLEDFVGDWRQTAGYNLDQVLEQGGVSSLFQNLGVSVTPIQRIVLSGENGLKIDIHVIIPYEGLSGDQMGQIEKIFKVVYPVDDHHFKVILHYGTLVIDGVTPNMIDYFGRPYEGIAVFDGKKITVTGTLWNGNKIIDERLINPDGSLLFRVTINGVTGWRLCERILALEGGSWSHPQFEKDYKDDDDKGSDYKDDDDKGSDYKDDDDKGSDYKDDDDKAWSHPQFEKHHHHHHHHTSGSGEGRGSLLTCGDVEENPGPHMTEYKPTVRLATRDDVPRAVRTLAAAFADYPATRHTVDPDRHIERVTELQELFLTRVGLDIGKVWVADDGAAVAVWTTPESVEAGAVFAEIGPRMAELSGSRLAAQQQMEGLLAPHRPKEPAWFLATVGVSPDHQGKGLGSAVVLPGVEAAERAGVPAFLETSAPRNLPFYERLGFTVTADVEVPEGPRTWCMTRKPGA

SEQ ID NO: 3643 - protein, 733 aa, Artificial Sequence
  Synthetic Polypeptide
MALPVTALLLPLALLLHAARPDEIVLTQSPATLSLSPGERATLSCRASQSVSSYLAWYQQKPGQAPRLLIYDASNRATGIPARFSGSGSGTDFTLTISSLEPEDFAVYYCQQRSNWPITFGQGTRLEIKGGGGSGGGGSGGGGSEVQLVESGGGLVQPGRSLRLSCAASGFTFNDYAMHWVRQAPGKGLEWVSTISWNSGSIGYADSVKGRFTISRDNAKKSLYLQMNSLRAEDTALYYCAKDIQYGNYYYGMDVWGQGTTVTVSSTRGGSGVFTLEDFVGDWRQTAGYNLDQVLEQGGVSSLFQNLGVSVTPIQRIVLSGENGLKIDIHVIIPYEGLSGDQMGQIEKIFKVVYPVDDHHFKVILHYGTLVIDGVTPNMIDYFGRPYEGIAVFDGKKITVTGTLWNGNKIIDERLINPDGSLLFRVTINGVTGWRLCERILALEGGSWSHPQFEKDYKDDDDKGSDYKDDDDKGSDYKDDDDKGSDYKDDDDKAWSHPQFEKHHHHHHHHTSGSGEGRGSLLTCGDVEENPGPHMTEYKPTVRLATRDDVPRAVRTLAAAFADYPATRHTVDPDRHIERVTELQELFLTRVGLDIGKVWVADDGAAVAVWTTPESVEAGAVFAEIGPRMAELSGSRLAAQQQMEGLLAPHRPKEPAWFLATVGVSPDHQGKGLGSAVVLPGVEAAERAGVPAFLETSAPRNLPFYERLGFTVTADVEVPEGPRTWCMTRKPGA

SEQ ID NO: 3644 - protein, 5 aa, Artificial Sequence
  Synthetic Polypeptide
GGGGG

SEQ ID NO: 3645 - protein, 609 aa, Artificial Sequence
  Synthetic Polypeptide
MALPVTALLLPLALLLHAARPEVQLVESGGGLVQPGGSLRLSCAASGYAFSSYCVNWVRQAPGKEEEWVAQICPGDGDTNYNGKFKGRFTISRDNSKNTLYLQMNSLRAEDTAVYYCARSITTVVGCAYDYWGQGTLVTVSSTRGGSGVFTLEDFVGDWRQTAGYNLDQVLEQGGVSSLFQNLGVSVTPIQRIVLSGENGLKIDIHVIIPYEGLSGDQMGQIEKIFKVVYPVDDHHFKVILHYGTLVIDGVTPNMIDYFGRPYEGIAVFDGKKITVTGTLWNGNKIIDERLINPDGSLLFRVTINGVTGWRLCERILALEGGSWSHPQFEKDYKDDDDKGSDYKDDDDKGSDYKDDDDKGSDYKDDDDKAWSHPQFEKHHHHHHHHTSGSGEGRGSLLTCGDVEENPGPHMTEYKPTVRLATRDDVPRAVRTLAAAFADYPATRHTVDPDRHIERVTELQELFLTRVGLDIGKVWVADDGAAVAVWTTPESVEAGAVFAEIGPRMAELSGSRLAAQQQMEGLLAPHRPKEPAWFLATVGVSPDHQGKGLGSAVVLPGVEAAERAGVPAFLETSAPRNLPFYERLGFTVTADVEVPEGPRTWCMTRKPGA

SEQ ID NO: 3646 - protein, 607 aa, Artificial Sequence
  Synthetic Polypeptide
MALPVTALLLPLALLLHAARPEVQLVESGGGLVQPGGSLRLSCAASGFDFSRYCMSWVRQAPGKEEEWIGEICPDSSTINYAPSLKDKFIISRDNAKNSLYLQMNSLRAEDTAVYYCARPDGNYWYYDVWGQGTLVTVSSTRGGSGVFTLEDFVGDWRQTAGYNLDQVLEQGGVSSLFQNLGVSVTPIQRIVLSGENGLKIDIHVIIPYEGLSGDQMGQIEKIFKVVYPVDDHHFKVILHYGTLVIDGVTPNMIDYFGRPYEGIAVFDGKKITVTGTLWNGNKIIDERLINPDGSLLFRVTINGVTGWRLCERILALEGGSWSHPQFEKDYKDDDDKGSDYKDDDDKGSDYKDDDDKGSDYKDDDDKAWSHPQFEKHHHHHHHHTSGSGEGRGSLLTCGDVEENPGPHMTEYKPTVRLATRDDVPRAVRTLAAAFADYPATRHTVDPDRHIERVTELQELFLTRVGLDIGKVWVADDGAAVAVWTTPESVEAGAVFAEIGPRMAELSGSRLAAQQQMEGLLAPHRPKEPAWFLATVGVSPDHQGKGLGSAVVLPGVEAAERAGVPAFLETSAPRNLPFYERLGFTVTADVEVPEGPRTWCMTRKPGA

SEQ ID NO: 3647 - protein, 744 aa, Artificial Sequence
  Synthetic Polypeptide
MALPVTALLLPLALLLHAARPQVQLVQSGAEVKKPGASVKVSCKASGGTFSNYWMHWVRQAPGQGLEWMGWTYRGHSDTNYAQKFQGRVTMTRDTSISTAYMELSRLRSDDTAVYYCARGAIYDGYDVLDNRGQGTLVTVSSGSGGGGSGGGGSFEVQLLESGGGLVQPGGSLRLSCAASGFTFNSFAMSWVRQAPGKGLEWVSAISGSGGGTYYADSVKGRFTISRDISKNTLYLQMNSLRAEDTAVYYCAKDKILWFGEPVFDYRGQGTLVTVSSTRGGSGVFTLEDFVGDWRQTAGYNLDQVLEQGGVSSLFQNLGVSVTPIQRIVLSGENGLKIDIHVIIPYEGLSGDQMGQIEKIFKVVYPVDDHHFKVILHYGTLVIDGVTPNMIDYFGRPYEGIAVFDGKKITVTGTLWNGNKIIDERLINPDGSLLFRVTINGVTGWRLCERILALEGGSWSHPQFEKDYKDDDDKGSDYKDDDDKGSDYKDDDDKGSDYKDDDDKAWSHPQFEKHHHHHHHHTSGSGEGRGSLLTCGDVEENPGPHMTEYKPTVRLATRDDVPRAVRTLAAAFADYPATRHTVDPDRHIERVTELQELFLTRVGLDIGKVWVADDGAAVAVWTTPESVEAGAVFAEIGPRMAELSGSRLAAQQQMEGLLAPHRPKEPAWFLATVGVSPDHQGKGLGSAVVLPGVEAAERAGVPAFLETSAPRNLPFYERLGFTVTADVEVPEGPRTWCMTRKPGA

SEQ ID NO: 3648 - protein, 609 aa, Artificial Sequence
  Synthetic Polypeptide
MALPVTALLLPLALLLHAARPQVQLVQSGAEVKKPGASVKVSCKASGGTFSNYWMHWVRQAPGQGLEWMGWTYRGHSDTNYAQKFQGRVTMTRDTSISTAYMELSRLRSDDTAVYYCARGAIYDGYDVLDNRGQGTLVTVSSTRGGSGVFTLEDFVGDWRQTAGYNLDQVLEQGGVSSLFQNLGVSVTPIQRIVLSGENGLKIDIHVIIPYEGLSGDQMGQIEKIFKVVYPVDDHHFKVILHYGTLVIDGVTPNMIDYFGRPYEGIAVFDGKKITVTGTLWNGNKIIDERLINPDGSLLFRVTINGVTGWRLCERILALEGGSWSHPQFEKDYKDDDDKGSDYKDDDDKGSDYKDDDDKGSDYKDDDDKAWSHPQFEKHHHHHHHHTSGSGEGRGSLLTCGDVEENPGPHMTEYKPTVRLATRDDVPRAVRTLAAAFADYPATRHTVDPDRHIERVTELQELFLTRVGLDIGKVWVADDGAAVAVWTTPESVEAGAVFAEIGPRMAELSGSRLAAQQQMEGLLAPHRPKEPAWFLATVGVSPDHQGKGLGSAVVLPGVEAAERAGVPAFLETSAPRNLPFYERLGFTVTADVEVPEGPRTWCMTRKPGA

SEQ ID NO: 3649 - protein, 608 aa, Artificial Sequence
  Synthetic Polypeptide
MDWIWRILFLVGAATGAHSQVQLVESGGGLVQPGGSLRLSCAASGFTFSNYGMSWVRQAPGKGLELVSSIRSDGSWTYYADSVKGRFTISRDISKNTLDLQMNSLRAEDTAVYYCARRYWSKSHASVTDYRGQGTLVTVSSTRGGSGVFTLEDFVGDWRQTAGYNLDQVLEQGGVSSLFQNLGVSVTPIQRIVLSGENGLKIDIHVIIPYEGLSGDQMGQIEKIFKVVYPVDDHHFKVILHYGTLVIDGVTPNMIDYFGRPYEGIAVFDGKKITVTGTLWNGNKIIDERLINPDGSLLFRVTINGVTGWRLCERILALEGGSWSHPQFEKDYKDDDDKGSDYKDDDDKGSDYKDDDDKGSDYKDDDDKAWSHPQFEKHHHHHHHHTSGSGEGRGSLLTCGDVEENPGPHMTEYKPTVRLATRDDVPRAVRTLAAAFADYPATRHTVDPDRHIERVTELQELFLTRVGLDIGKVWVADDGAAVAVWTTPESVEAGAVFAEIGPRMAELSGSRLAAQQQMEGLLAPHRPKEPAWFLATVGVSPDHQGKGLGSAVVLPGVEAAERAGVPAFLETSAPRNLPFYERLGFTVTADVEVPEGPRTWCMTRKPGA

SEQ ID NO: 3650 - protein, 744 aa, Artificial Sequence
  Synthetic Polypeptide
MDWIWRILFLVGAATGAHSQVQLVESGGGLVQPGGSLRLSCAASGFTFSNYGMSWVRQAPGKGLELVSSIRSDGSWTYYADSVKGRFTISRDISKNTLDLQMNSLRAEDTAVYYCARRYWSKSHASVTDYRGQGTLVTVSSGSGGGGSGGGGSFEQLQLQESGPGLVKPSETLSLTCTVSGGSVSSGSYYWGWIRQPPGKGLEWIGHISYSGSTYYNPSLKSRVTISVDTSRNQFSLKLSSVTAADTAVYYCARGRGYATSLAFDIRGQGTLVTVSSTRGGSGVFTLEDFVGDWRQTAGYNLDQVLEQGGVSSLFQNLGVSVTPIQRIVLSGENGLKIDIHVIIPYEGLSGDQMGQIEKIFKVVYPVDDHHFKVILHYGTLVIDGVTPNMIDYFGRPYEGIAVFDGKKITVTGTLWNGNKIIDERLINPDGSLLFRVTINGVTGWRLCERILALEGGSWSHPQFEKDYKDDDDKGSDYKDDDDKGSDYKDDDDKGSDYKDDDDKAWSHPQFEKHHHHHHHHTSGSGEGRGSLLTCGDVEENPGPHMTEYKPTVRLATRDDVPRAVRTLAAAFADYPATRHTVDPDRHIERVTELQELFLTRVGLDIGKVWVADDGAAVAVWTTPESVEAGAVFAEIGPRMAELSGSRLAAQQQMEGLLAPHRPKEPAWFLATVGVSPDHQGKGLGSAVVLPGVEAAERAGVPAFLETSAPRNLPFYERLGFTVTADVEVPEGPRTWCMTRKPGA

SEQ ID NO: 3651 - protein, 609 aa, Artificial Sequence
  Synthetic Polypeptide
MALPVTALLLPLALLLHAARPEVQLVESGGGLVKPGGSLKLSCAASGYTFTSYVMGWVRRAPGKEEELIGYINPYNDGTKYNEKFQGRVTISSDKSISTAYMELSSLRSEDTAMYYCARGTYYYGTRVFDYRGQGTLVTVSSTRGGSGVFTLEDFVGDWRQTAGYNLDQVLEQGGVSSLFQNLGVSVTPIQRIVLSGENGLKIDIHVIIPYEGLSGDQMGQIEKIFKVVYPVDDHHFKVILHYGTLVIDGVTPNMIDYFGRPYEGIAVFDGKKITVTGTLWNGNKIIDERLINPDGSLLFRVTINGVTGWRLCERILALEGGSWSHPQFEKDYKDDDDKGSDYKDDDDKGSDYKDDDDKGSDYKDDDDKAWSHPQFEKHHHHHHHHTSGSGEGRGSLLTCGDVEENPGPHMTEYKPTVRLATRDDVPRAVRTLAAAFADYPATRHTVDPDRHIERVTELQELFLTRVGLDIGKVWVADDGAAVAVWTTPESVEAGAVFAEIGPRMAELSGSRLAAQQQMEGLLAPHRPKEPAWFLATVGVSPDHQGKGLGSAVVLPGVEAAERAGVPAFLETSAPRNLPFYERLGFTVTADVEVPEGPRTWCMTRKPGA

SEQ ID NO: 3652 - protein, 611 aa, Artificial Sequence
  Synthetic Polypeptide
MALPVTALLLPLALLLHAARPEVQLVESGGGLVKPGGSLKLSCAASGFAFSIYDMGWVRRAPGKEEELVAYISSGGGTTYYPDTVKGRFTISRDNAKNTLYLQMSSLRAEDTAMYYCARHSGYGSSYGVLFAYRGQGTLVTVSSTRGGSGVFTLEDFVGDWRQTAGYNLDQVLEQGGVSSLFQNLGVSVTPIQRIVLSGENGLKIDIHVIIPYEGLSGDQMGQIEKIFKVVYPVDDHHFKVILHYGTLVIDGVTPNMIDYFGRPYEGIAVFDGKKITVTGTLWNGNKIIDERLINPDGSLLFRVTINGVTGWRLCERILALEGGSWSHPQFEKDYKDDDDKGSDYKDDDDKGSDYKDDDDKGSDYKDDDDKAWSHPQFEKHHHHHHHHTSGSGEGRGSLLTCGDVEENPGPHMTEYKPTVRLATRDDVPRAVRTLAAAFADYPATRHTVDPDRHIERVTELQELFLTRVGLDIGKVWVADDGAAVAVWTTPESVEAGAVFAEIGPRMAELSGSRLAAQQQMEGLLAPHRPKEPAWFLATVGVSPDHQGKGLGSAVVLPGVEAAERAGVPAFLETSAPRNLPFYERLGFTVTADVEVPEGPRTWCMTRKPGA

SEQ ID NO: 3653 - protein, 612 aa, Artificial Sequence
  Synthetic Polypeptide
MALPVTALLLPLALLLHAARPEVQLVESGGGLVQPGRSLRLSCAASGFTFDDYAMGWVRRAPGKEEELVSGISWNSGSIGYADSVKGRFTISRDNAKNSLYLQMNSLRAEDTALYYCAKDKGGGYYDFWSGSDYRGQGTLVTVSSTRGGSGVFTLEDFVGDWRQTAGYNLDQVLEQGGVSSLFQNLGVSVTPIQRIVLSGENGLKIDIHVIIPYEGLSGDQMGQIEKIFKVVYPVDDHHFKVILHYGTLVIDGVTPNMIDYFGRPYEGIAVFDGKKITVTGTLWNGNKIIDERLINPDGSLLFRVTINGVTGWRLCERILALEGGSWSHPQFEKDYKDDDDKGSDYKDDDDKGSDYKDDDDKGSDYKDDDDKAWSHPQFEKHHHHHHHHTSGSGEGRGSLLTCGDVEENPGPHMTEYKPTVRLATRDDVPRAVRTLAAAFADYPATRHTVDPDRHIERVTELQELFLTRVGLDIGKVWVADDGAAVAVWTTPESVEAGAVFAEIGPRMAELSGSRLAAQQQMEGLLAPHRPKEPAWFLATVGVSPDHQGKGLGSAVVLPGVEAAERAGVPAFLETSAPRNLPFYERLGFTVTADVEVPEGPRTWCMTRKPGA

SEQ ID NO: 3654 - protein, 609 aa, Artificial Sequence
  Synthetic Polypeptide
MALPVTALLLPLALLLHAARPEVQLVESGGGLVQPGGSLRLSCAASGFTFSSYAMGWVRRAPGKEEELVASISGSGDYIRYADSVKGRFTISADTSKNTAYLQMNSLRAEDTAVYYCAKEGTGANSSLADYRGQGTLVTVSSTRGGSGVFTLEDFVGDWRQTAGYNLDQVLEQGGVSSLFQNLGVSVTPIQRIVLSGENGLKIDIHVIIPYEGLSGDQMGQIEKIFKVVYPVDDHHFKVILHYGTLVIDGVTPNMIDYFGRPYEGIAVFDGKKITVTGTLWNGNKIIDERLINPDGSLLFRVTINGVTGWRLCERILALEGGSWSHPQFEKDYKDDDDKGSDYKDDDDKGSDYKDDDDKGSDYKDDDDKAWSHPQFEKHHHHHHHHTSGSGEGRGSLLTCGDVEENPGPHMTEYKPTVRLATRDDVPRAVRTLAAAFADYPATRHTVDPDRHIERVTELQELFLTRVGLDIGKVWVADDGAAVAVWTTPESVEAGAVFAEIGPRMAELSGSRLAAQQQMEGLLAPHRPKEPAWFLATVGVSPDHQGKGLGSAVVLPGVEAAERAGVPAFLETSAPRNLPFYERLGFTVTADVEVPEGPRTWCMTRKPGA

SEQ ID NO: 3655 - protein, 609 aa, Artificial Sequence
  Synthetic Polypeptide
MALPVTALLLPLALLLHAARPEVQLVESGGGLVQPGGSLRLSCAASGFTFSSYAMTWFRQAPGKGLEWVASISGSGDYIRYEDSVEGRFTVSRDNAKNSVYLQMNSLRAEDTAVYYCAKEGTGANSSLADYWGQGTTVTVSSTRGGSGVFTLEDFVGDWRQTAGYNLDQVLEQGGVSSLFQNLGVSVTPIQRIVLSGENGLKIDIHVIIPYEGLSGDQMGQIEKIFKVVYPVDDHHFKVILHYGTLVIDGVTPNMIDYFGRPYEGIAVFDGKKITVTGTLWNGNKIIDERLINPDGSLLFRVTINGVTGWRLCERILALEGGSWSHPQFEKDYKDDDDKGSDYKDDDDKGSDYKDDDDKGSDYKDDDDKAWSHPQFEKHHHHHHHHTSGSGEGRGSLLTCGDVEENPGPHMTEYKPTVRLATRDDVPRAVRTLAAAFADYPATRHTVDPDRHIERVTELQELFLTRVGLDIGKVWVADDGAAVAVWTTPESVEAGAVFAEIGPRMAELSGSRLAAQQQMEGLLAPHRPKEPAWFLATVGVSPDHQGKGLGSAVVLPGVEAAERAGVPAFLETSAPRNLPFYERLGFTVTADVEVPEGPRTWCMTRKPGA

SEQ ID NO: 3656 - protein, 609 aa, Artificial Sequence
  Synthetic Polypeptide
MALPVTALLLPLALLLHAARPEVQLVESGGGLVKPGGSLKLSCAASGYTFTSYCMGWVRRAPGKEEELIGYICPYNDGTKYNEKFQGRVTISSDKSISTAYMELSSLRSEDTAMYYCARGTYYYGTRVFDYRGQGTLVTVSSTRGGSGVFTLEDFVGDWRQTAGYNLDQVLEQGGVSSLFQNLGVSVTPIQRIVLSGENGLKIDIHVIIPYEGLSGDQMGQIEKIFKVVYPVDDHHFKVILHYGTLVIDGVTPNMIDYFGRPYEGIAVFDGKKITVTGTLWNGNKIIDERLINPDGSLLFRVTINGVTGWRLCERILALEGGSWSHPQFEKDYKDDDDKGSDYKDDDDKGSDYKDDDDKGSDYKDDDDKAWSHPQFEKHHHHHHHHTSGSGEGRGSLLTCGDVEENPGPHMTEYKPTVRLATRDDVPRAVRTLAAAFADYPATRHTVDPDRHIERVTELQELFLTRVGLDIGKVWVADDGAAVAVWTTPESVEAGAVFAEIGPRMAELSGSRLAAQQQMEGLLAPHRPKEPAWFLATVGVSPDHQGKGLGSAVVLPGVEAAERAGVPAFLETSAPRNLPFYERLGFTVTADVEVPEGPRTWCMTRKPGA

SEQ ID NO: 3657 - protein, 743 aa, Artificial Sequence
  Synthetic Polypeptide
MALPVTALLLPLALLLHAARPEVQLVESGGGVVQPGRSLRLSCAASGYTFTSYVMGWVRRAPGKEEELIGYINPYNDGTYYADSVKGRFTISRDNSKNTLYLQMNSLRAEDTAVYYCARGTYYYGTRVFDYRGQGTMVTVSSGSGGGGSGGGGSFEVQLVESGGGVVQPGRSLRLSCAASGYTFTSYVMHWVRQAPGKGLEWIGYINPYNDGTYYADSVKGRFTISRDNSKNTLYLQMNSLRAEDTAVYYCARGTYYYGTRVFDYWGQGTMVTVSSTRGGSGVFTLEDFVGDWRQTAGYNLDQVLEQGGVSSLFQNLGVSVTPIQRIVLSGENGLKIDIHVIIPYEGLSGDQMGQIEKIFKVVYPVDDHHFKVILHYGTLVIDGVTPNMIDYFGRPYEGIAVFDGKKITVTGTLWNGNKIIDERLINPDGSLLFRVTINGVTGWRLCERILALEGGSWSHPQFEKDYKDDDDKGSDYKDDDDKGSDYKDDDDKGSDYKDDDDKAWSHPQFEKHHHHHHHHTSGSGEGRGSLLTCGDVEENPGPHMTEYKPTVRLATRDDVPRAVRTLAAAFADYPATRHTVDPDRHIERVTELQELFLTRVGLDIGKVWVADDGAAVAVWTTPESVEAGAVFAEIGPRMAELSGSRLAAQQQMEGLLAPHRPKEPAWFLATVGVSPDHQGKGLGSAVVLPGVEAAERAGVPAFLETSAPRNLPFYERLGFTVTADVEVPEGPRTWCMTRKPGA

SEQ ID NO: 3658 - protein, 609 aa, Artificial Sequence
  Synthetic Polypeptide
MALPVTALLLPLALLLHAARPEVQLVESGGGVVQPGRSLRLSCAASGYTFTSYVMGWVRRAPGKEEELIGYINPYNDGTYYADSVKGRFTISRDNSKNTLYLQMNSLRAEDTAVYYCARGTYYYGTRVFDYRGQGTMVTVSSTRGGSGVFTLEDFVGDWRQTAGYNLDQVLEQGGVSSLFQNLGVSVTPIQRIVLSGENGLKIDIHVIIPYEGLSGDQMGQIEKIFKVVYPVDDHHFKVILHYGTLVIDGVTPNMIDYFGRPYEGIAVFDGKKITVTGTLWNGNKIIDERLINPDGSLLFRVTINGVTGWRLCERILALEGGSWSHPQFEKDYKDDDDKGSDYKDDDDKGSDYKDDDDKGSDYKDDDDKAWSHPQFEKHHHHHHHHTSGSGEGRGSLLTCGDVEENPGPHMTEYKPTVRLATRDDVPRAVRTLAAAFADYPATRHTVDPDRHIERVTELQELFLTRVGLDIGKVWVADDGAAVAVWTTPESVEAGAVFAEIGPRMAELSGSRLAAQQQMEGLLAPHRPKEPAWFLATVGVSPDHQGKGLGSAVVLPGVEAAERAGVPAFLETSAPRNLPFYERLGFTVTADVEVPEGPRTWCMTRKPGA

SEQ ID NO: 3659 - protein, 734 aa, Artificial Sequence
  Synthetic Polypeptide
MALPVTALLLPLALLLHAARPEVQLVESGGGLVQPGGSLRLSCAASGFNIKDTCIGWVRRAPGKEEELVAKICKYSGHTRYADSVKGRFTISADTSKNTAYLQMNSLRAEDTAVYYCAAVSVRDGHYNYWGQGTTVTVSSGGGSGGGSEVQLVESGGGLVQPGGSLRLSCAASGFNIKDTCIGWVRRAPGKEEELVADICPYKGSTRYADSVKGRFTISADTSKNTAYLQMNSLRAEDTAVYYCAIVSARDGYYNYWGQGTTVTVSSTRGGSGVFTLEDFVGDWRQTAGYNLDQVLEQGGVSSLFQNLGVSVTPIQRIVLSGENGLKIDIHVIIPYEGLSGDQMGQIEKIFKVVYPVDDHHFKVILHYGTLVIDGVTPNMIDYFGRPYEGIAVFDGKKITVTGTLWNGNKIIDERLINPDGSLLFRVTINGVTGWRLCERILALEGGSWSHPQFEKDYKDDDDKGSDYKDDDDKGSDYKDDDDKGSDYKDDDDKAWSHPQFEKHHHHHHHHTSGSGEGRGSLLTCGDVEENPGPHMTEYKPTVRLATRDDVPRAVRTLAAAFADYPATRHTVDPDRHIERVTELQELFLTRVGLDIGKVWVADDGAAVAVWTTPESVEAGAVFAEIGPRMAELSGSRLAAQQQMEGLLAPHRPKEPAWFLATVGVSPDHQGKGLGSAVVLPGVEAAERAGVPAFLETSAPRNLPFYERLGFTVTADVEVPEGPRTWCMTRKPGA

SEQ ID NO: 3660 - protein, 607 aa, Artificial Sequence
  Synthetic Polypeptide
MALPVTALLLPLALLLHAARPEVQLVESGGGLVQPGGSLRLSCAASGFNIKDTCIGWVRRAPGKEEELVAKICKYSGHTRYADSVKGRFTISADTSKNTAYLQMNSLRAEDTAVYYCAAVSVRDGHYNYWGQGTTVTVSSTRGGSGVFTLEDFVGDWRQTAGYNLDQVLEQGGVSSLFQNLGVSVTPIQRIVLSGENGLKIDIHVIIPYEGLSGDQMGQIEKIFKVVYPVDDHHFKVILHYGTLVIDGVTPNMIDYFGRPYEGIAVFDGKKITVTGTLWNGNKIIDERLINPDGSLLFRVTINGVTGWRLCERILALEGGSWSHPQFEKDYKDDDDKGSDYKDDDDKGSDYKDDDDKGSDYKDDDDKAWSHPQFEKHHHHHHHHTSGSGEGRGSLLTCGDVEENPGPHMTEYKPTVRLATRDDVPRAVRTLAAAFADYPATRHTVDPDRHIERVTELQELFLTRVGLDIGKVWVADDGAAVAVWTTPESVEAGAVFAEIGPRMAELSGSRLAAQQQMEGLLAPHRPKEPAWFLATVGVSPDHQGKGLGSAVVLPGVEAAERAGVPAFLETSAPRNLPFYERLGFTVTADVEVPEGPRTWCMTRKPGA

SEQ ID NO: 3661 - protein, 734 aa, Artificial Sequence
  Synthetic Polypeptide
MALPVTALLLPLALLLHAARPEVQLVESGGGLVQPGGSLRLSCTFSGGTFSSYTMGWFRQAPGKEREFVAEVRWGGVTTYSNSLKDRFSISEDSVKNAVYLQMNSLKPEDTAVYYCAAVRQMYMTVVPDYWGQGTLVTVSSSGGGGSFEQLQLQESGPGLVKPSETLSLTCTVSGGSISSGDYYWGWIRQPPGKGLEWIGHIYYSGATYYNPSLKSRVTISVDTSRNQFSLKLSSVTAADTAVYYCTRDDSSNWRSRGQGTLVTVSSTRGGSGVFTLEDFVGDWRQTAGYNLDQVLEQGGVSSLFQNLGVSVTPIQRIVLSGENGLKIDIHVIIPYEGLSGDQMGQIEKIFKVVYPVDDHHFKVILHYGTLVIDGVTPNMIDYFGRPYEGIAVFDGKKITVTGTLWNGNKIIDERLINPDGSLLFRVTINGVTGWRLCERILALEGGSWSHPQFEKDYKDDDDKGSDYKDDDDKGSDYKDDDDKGSDYKDDDDKAWSHPQFEKHHHHHHHHTSGSGEGRGSLLTCGDVEENPGPHMTEYKPTVRLATRDDVPRAVRTLAAAFADYPATRHTVDPDRHIERVTELQELFLTRVGLDIGKVWVADDGAAVAVWTTPESVEAGAVFAEIGPRMAELSGSRLAAQQQMEGLLAPHRPKEPAWFLATVGVSPDHQGKGLGSAVVLPGVEAAERAGVPAFLETSAPRNLPFYERLGFTVTADVEVPEGPRTWCMTRKPGA

SEQ ID NO: 3662 - protein, 608 aa, Artificial Sequence
  Synthetic Polypeptide
MALPVTALLLPLALLLHAARPEVQLVESGGGLVQPGGSLRLSCTFSGGTFSSYTMGWFRQAPGKEREFVAEVRWGGVTTYSNSLKDRFSISEDSVKNAVYLQMNSLKPEDTAVYYCAAVRQMYMTVVPDYWGQGTLVTVSSTRGGSGVFTLEDFVGDWRQTAGYNLDQVLEQGGVSSLFQNLGVSVTPIQRIVLSGENGLKIDIHVIIPYEGLSGDQMGQIEKIFKVVYPVDDHHFKVILHYGTLVIDGVTPNMIDYFGRPYEGIAVFDGKKITVTGTLWNGNKIIDERLINPDGSLLFRVTINGVTGWRLCERILALEGGSWSHPQFEKDYKDDDDKGSDYKDDDDKGSDYKDDDDKGSDYKDDDDKAWSHPQFEKHHHHHHHHTSGSGEGRGSLLTCGDVEENPGPHMTEYKPTVRLATRDDVPRAVRTLAAAFADYPATRHTVDPDRHIERVTELQELFLTRVGLDIGKVWVADDGAAVAVWTTPESVEAGAVFAEIGPRMAELSGSRLAAQQQMEGLLAPHRPKEPAWFLATVGVSPDHQGKGLGSAVVLPGVEAAERAGVPAFLETSAPRNLPFYERLGFTVTADVEVPEGPRTWCMTRKPGA

SEQ ID NO: 3663 - protein, 746 aa, Artificial Sequence
  Synthetic Polypeptide
MALPVTALLLPLALLLHAARPEVQLVESGGGVVQPGRSLRLSCAASGFSFSGYGMHWVRQAPGKGLEWVAYISYDGSNKYYADSVKGRFTISRDNSKNTLYLQMNSLRAEDTAVYYCAKDPAWGLRLGESSSYDFDIWGQGTMVTVSSGSGGGGSGGGGSGGGGSFEVQLLESGGGLVQPGGSLRLSCAASGFSFSSYALSWVRQAPGKGLEWVSSIGENDGTTDYADAVKGRFTISRDNSKNTLYLQMNSLRVEDTAVYYCVKDGVHWGQGTLVTVSSTRGGSGVFTLEDFVGDWRQTAGYNLDQVLEQGGVSSLFQNLGVSVTPIQRIVLSGENGLKIDIHVIIPYEGLSGDQMGQIEKIFKVVYPVDDHHFKVILHYGTLVIDGVTPNMIDYFGRPYEGIAVFDGKKITVTGTLWNGNKIIDERLINPDGSLLFRVTINGVTGWRLCERILALEGGSWSHPQFEKDYKDDDDKGSDYKDDDDKGSDYKDDDDKGSDYKDDDDKAWSHPQFEKHHHHHHHHTSGSGEGRGSLLTCGDVEENPGPHMTEYKPTVRLATRDDVPRAVRTLAAAFADYPATRHTVDPDRHIERVTELQELFLTRVGLDIGKVWVADDGAAVAVWTTPESVEAGAVFAEIGPRMAELSGSRLAAQQQMEGLLAPHRPKEPAWFLATVGVSPDHQGKGLGSAVVLPGVEAAERAGVPAFLETSAPRNLPFYERLGFTVTADVEVPEGPRTWCMTRKPGA

SEQ ID NO: 3664 - protein, 615 aa, Artificial Sequence
  Synthetic Polypeptide
MALPVTALLLPLALLLHAARPEVQLVESGGGVVQPGRSLRLSCAASGFSFSGYGMHWVRQAPGKGLEWVAYISYDGSNKYYADSVKGRFTISRDNSKNTLYLQMNSLRAEDTAVYYCAKDPAWGLRLGESSSYDFDIWGQGTMVTVSSTRGGSGVFTLEDFVGDWRQTAGYNLDQVLEQGGVSSLFQNLGVSVTPIQRIVLSGENGLKIDIHVIIPYEGLSGDQMGQIEKIFKVVYPVDDHHFKVILHYGTLVIDGVTPNMIDYFGRPYEGIAVFDGKKITVTGTLWNGNKIIDERLINPDGSLLFRVTINGVTGWRLCERILALEGGSWSHPQFEKDYKDDDDKGSDYKDDDDKGSDYKDDDDKGSDYKDDDDKAWSHPQFEKHHHHHHHHTSGSGEGRGSLLTCGDVEENPGPHMTEYKPTVRLATRDDVPRAVRTLAAAFADYPATRHTVDPDRHIERVTELQELFLTRVGLDIGKVWVADDGAAVAVWTTPESVEAGAVFAEIGPRMAELSGSRLAAQQQMEGLLAPHRPKEPAWFLATVGVSPDHQGKGLGSAVVLPGVEAAERAGVPAFLETSAPRNLPFYERLGFTVTADVEVPEGPRTWCMTRKPGA

SEQ ID NO: 3665 - protein, 739 aa, Artificial Sequence
  Synthetic Polypeptide
MDWIWRILFLVGAATGAHSEVQLLESGGGLVQPGGSLRLSCAASGFSFSSYALSWVRQAPGKGLEWVSSIGENDGTTDYADAVKGRFTISRDNSKNTLYLQMNSLRVEDTAVYYCVKDGVHWGQGTLVTVSSGSGGGGSGGGGSFEVQLVESGGGVVQPGRSLRLSCAASGFSFSGYGMHWVRQAPGKGLEWVAYISYDGSNKYYADSVKGRFTISRDNSKNTLYLQMNSLRAEDTAVYYCAKDPAWGLRLGESSSYDFDIWGQGTMVTVSSTRGGSGVFTLEDFVGDWRQTAGYNLDQVLEQGGVSSLFQNLGVSVTPIQRIVLSGENGLKIDIHVIIPYEGLSGDQMGQIEKIFKVVYPVDDHHFKVILHYGTLVIDGVTPNMIDYFGRPYEGIAVFDGKKITVTGTLWNGNKIIDERLINPDGSLLFRVTINGVTGWRLCERILALEGGSWSHPQFEKDYKDDDDKGSDYKDDDDKGSDYKDDDDKGSDYKDDDDKAWSHPQFEKHHHHHHHHTSGSGEGRGSLLTCGDVEENPGPHMTEYKPTVRLATRDDVPRAVRTLAAAFADYPATRHTVDPDRHIERVTELQELFLTRVGLDIGKVWVADDGAAVAVWTTPESVEAGAVFAEIGPRMAELSGSRLAAQQQMEGLLAPHRPKEPAWFLATVGVSPDHQGKGLGSAVVLPGVEAAERAGVPAFLETSAPRNLPFYERLGFTVTADVEVPEGPRTWCMTRKPGA

SEQ ID NO: 3666 - protein, 599 aa, Artificial Sequence
  Synthetic Polypeptide
MDWIWRILFLVGAATGAHSEVQLLESGGGLVQPGGSLRLSCAASGFSFSSYALSWVRQAPGKGLEWVSSIGENDGTTDYADAVKGRFTISRDNSKNTLYLQMNSLRVEDTAVYYCVKDGVHWGQGTLVTVSSTRGGSGVFTLEDFVGDWRQTAGYNLDQVLEQGGVSSLFQNLGVSVTPIQRIVLSGENGLKIDIHVIIPYEGLSGDQMGQIEKIFKVVYPVDDHHFKVILHYGTLVIDGVTPNMIDYFGRPYEGIAVFDGKKITVTGTLWNGNKIIDERLINPDGSLLFRVTINGVTGWRLCERILALEGGSWSHPQFEKDYKDDDDKGSDYKDDDDKGSDYKDDDDKGSDYKDDDDKAWSHPQFEKHHHHHHHHTSGSGEGRGSLLTCGDVEENPGPHMTEYKPTVRLATRDDVPRAVRTLAAAFADYPATRHTVDPDRHIERVTELQELFLTRVGLDIGKVWVADDGAAVAVWTTPESVEAGAVFAEIGPRMAELSGSRLAAQQQMEGLLAPHRPKEPAWFLATVGVSPDHQGKGLGSAVVLPGVEAAERAGVPAFLETSAPRNLPFYERLGFTVTADVEVPEGPRTWCMTRKPGA

SEQ ID NO: 3667 - protein, 612 aa, Artificial Sequence
  Synthetic Polypeptide
MALPVTALLLPLALLLHAARPQLQLQESGPGLVKPSETLALTCNVSGGSISSSSYYWGWIRQPPGKRLEWIGSIYYSGSTYFNPSLKSRVTISVDTSKNQFSLKLSSVTAADTAVYYCAGGDYYGPVGQWPSDYRGQGTLVTVSSTRGGSGVFTLEDFVGDWRQTAGYNLDQVLEQGGVSSLFQNLGVSVTPIQRIVLSGENGLKIDIHVIIPYEGLSGDQMGQIEKIFKVVYPVDDHHFKVILHYGTLVIDGVTPNMIDYFGRPYEGIAVFDGKKITVTGTLWNGNKIIDERLINPDGSLLFRVTINGVTGWRLCERILALEGGSWSHPQFEKDYKDDDDKGSDYKDDDDKGSDYKDDDDKGSDYKDDDDKAWSHPQFEKHHHHHHHHTSGSGEGRGSLLTCGDVEENPGPHMTEYKPTVRLATRDDVPRAVRTLAAAFADYPATRHTVDPDRHIERVTELQELFLTRVGLDIGKVWVADDGAAVAVWTTPESVEAGAVFAEIGPRMAELSGSRLAAQQQMEGLLAPHRPKEPAWFLATVGVSPDHQGKGLGSAVVLPGVEAAERAGVPAFLETSAPRNLPFYERLGFTVTADVEVPEGPRTWCMTRKPGA

SEQ ID NO: 3668 - protein, 742 aa, Artificial Sequence
  Synthetic Polypeptide
MDWIWRILFLVGAATGAHSQLQLQESGPGLVKPSETLSLTCTVSGGSVSSSSYYWGWIRQPPGKRLELIGSIYYGGSTYFNPSLKSRVTISVDTSKNQFSLKLSSVTAADTAVYYCAGGDTYGPVGQWPSDYRGQGTLVTVSSGGGGSGGGSFEVQLLESGGGLVQPGGSLRLSCAASGFIFSIYAMSWVRQAPGKGLEWVSGISGSGVNTYYADSVKGRFIISRDNSRNTVYLQMNSLRADDTAVYHCANGKGWDGNTWYEDYRGQGTLVTVSSTRGGSGVFTLEDFVGDWRQTAGYNLDQVLEQGGVSSLFQNLGVSVTPIQRIVLSGENGLKIDIHVIIPYEGLSGDQMGQIEKIFKVVYPVDDHHFKVILHYGTLVIDGVTPNMIDYFGRPYEGIAVFDGKKITVTGTLWNGNKIIDERLINPDGSLLFRVTINGVTGWRLCERILALEGGSWSHPQFEKDYKDDDDKGSDYKDDDDKGSDYKDDDDKGSDYKDDDDKAWSHPQFEKHHHHHHHHTSGSGEGRGSLLTCGDVEENPGPHMTEYKPTVRLATRDDVPRAVRTLAAAFADYPATRHTVDPDRHIERVTELQELFLTRVGLDIGKVWVADDGAAVAVWTTPESVEAGAVFAEIGPRMAELSGSRLAAQQQMEGLLAPHRPKEPAWFLATVGVSPDHQGKGLGSAVVLPGVEAAERAGVPAFLETSAPRNLPFYERLGFTVTADVEVPEGPRTWCMTRKPGA

SEQ ID NO: 3669 - protein, 610 aa, Artificial Sequence
  Synthetic Polypeptide
MDWIWRILFLVGAATGAHSQLQLQESGPGLVKPSETLSLTCTVSGGSVSSSSYYWGWIRQPPGKRLELIGSIYYGGSTYFNPSLKSRVTISVDTSKNQFSLKLSSVTAADTAVYYCAGGDTYGPVGQWPSDYRGQGTLVTVSSTRGGSGVFTLEDFVGDWRQTAGYNLDQVLEQGGVSSLFQNLGVSVTPIQRIVLSGENGLKIDIHVIIPYEGLSGDQMGQIEKIFKVVYPVDDHHFKVILHYGTLVIDGVTPNMIDYFGRPYEGIAVFDGKKITVTGTLWNGNKIIDERLINPDGSLLFRVTINGVTGWRLCERILALEGGSWSHPQFEKDYKDDDDKGSDYKDDDDKGSDYKDDDDKGSDYKDDDDKAWSHPQFEKHHHHHHHHTSGSGEGRGSLLTCGDVEENPGPHMTEYKPTVRLATRDDVPRAVRTLAAAFADYPATRHTVDPDRHIERVTELQELFLTRVGLDIGKVWVADDGAAVAVWTTPESVEAGAVFAEIGPRMAELSGSRLAAQQQMEGLLAPHRPKEPAWFLATVGVSPDHQGKGLGSAVVLPGVEAAERAGVPAFLETSAPRNLPFYERLGFTVTADVEVPEGPRTWCMTRKPGA

SEQ ID NO: 3670 - protein, 609 aa, Artificial Sequence
  Synthetic Polypeptide
MALPVTALLLPLALLLHAARPEVQLLESGGGLVQPGGSLRLSCAASGFTFSSYAMSWVRQAPGKGLEWVSSISGSGDYIYYADSVKGRFTISRDISKNTLYLQMNSLRAEDTAVYYCAKEGTGANSSLADYRGQGTLVTVSSTRGGSGVFTLEDFVGDWRQTAGYNLDQVLEQGGVSSLFQNLGVSVTPIQRIVLSGENGLKIDIHVIIPYEGLSGDQMGQIEKIFKVVYPVDDHHFKVILHYGTLVIDGVTPNMIDYFGRPYEGIAVFDGKKITVTGTLWNGNKIIDERLINPDGSLLFRVTINGVTGWRLCERILALEGGSWSHPQFEKDYKDDDDKGSDYKDDDDKGSDYKDDDDKGSDYKDDDDKAWSHPQFEKHHHHHHHHTSGSGEGRGSLLTCGDVEENPGPHMTEYKPTVRLATRDDVPRAVRTLAAAFADYPATRHTVDPDRHIERVTELQELFLTRVGLDIGKVWVADDGAAVAVWTTPESVEAGAVFAEIGPRMAELSGSRLAAQQQMEGLLAPHRPKEPAWFLATVGVSPDHQGKGLGSAVVLPGVEAAERAGVPAFLETSAPRNLPFYERLGFTVTADVEVPEGPRTWCMTRKPGA

SEQ ID NO: 3671 - protein, 606 aa, Artificial Sequence
  Synthetic Polypeptide
MALPVTALLLPLALLLHAARPQVQLVESGGGLVQPGGSLRLSCAASGFTFTNHAMSWVRQAPGKGLELVSSISGNGRTTYYADSVKGRFTISRDISKNTLDLQMNSLRAEDTAVYYCAKDGGETLVDSRGQGTLVTVSSTRGGSGVFTLEDFVGDWRQTAGYNLDQVLEQGGVSSLFQNLGVSVTPIQRIVLSGENGLKIDIHVIIPYEGLSGDQMGQIEKIFKVVYPVDDHHFKVILHYGTLVIDGVTPNMIDYFGRPYEGIAVFDGKKITVTGTLWNGNKIIDERLINPDGSLLFRVTINGVTGWRLCERILALEGGSWSHPQFEKDYKDDDDKGSDYKDDDDKGSDYKDDDDKGSDYKDDDDKAWSHPQFEKHHHHHHHHTSGSGEGRGSLLTCGDVEENPGPHMTEYKPTVRLATRDDVPRAVRTLAAAFADYPATRHTVDPDRHIERVTELQELFLTRVGLDIGKVWVADDGAAVAVWTTPESVEAGAVFAEIGPRMAELSGSRLAAQQQMEGLLAPHRPKEPAWFLATVGVSPDHQGKGLGSAVVLPGVEAAERAGVPAFLETSAPRNLPFYERLGFTVTADVEVPEGPRTWCMTRKPGA

SEQ ID NO: 3672 - protein, 734 aa, Artificial Sequence
  Synthetic Polypeptide
MALPVTALLLPLALLLHAARPQLQLQESGPGLVKPSETLSLTCTVSGDSISSGDYYWGWIRQPPGKGLEWIGHIYYSGVTYYNPSLKSRVTISVDTSRNQFSLKLSSVTAADTAVYYCTREDSSNWRSRGQGTLVTVSSLESGGGGSFEVQLLESGGGLIQPGGSLRLSCAASGFTFSSHAMTWVRQAPGKGLEWVSAISGSGDYTHYADSVKGRFTISRDNSKNTVYLQMNSLRAEDSAVYYCAKDEDGGSLLGHRGQGTLVTVSSTRGGSGVFTLEDFVGDWRQTAGYNLDQVLEQGGVSSLFQNLGVSVTPIQRIVLSGENGLKIDIHVIIPYEGLSGDQMGQIEKIFKVVYPVDDHHFKVILHYGTLVIDGVTPNMIDYFGRPYEGIAVFDGKKITVTGTLWNGNKIIDERLINPDGSLLFRVTINGVTGWRLCERILALEGGSWSHPQFEKDYKDDDDKGSDYKDDDDKGSDYKDDDDKGSDYKDDDDKAWSHPQFEKHHHHHHHHTSGSGEGRGSLLTCGDVEENPGPHMTEYKPTVRLATRDDVPRAVRTLAAAFADYPATRHTVDPDRHIERVTELQELFLTRVGLDIGKVWVADDGAAVAVWTTPESVEAGAVFAEIGPRMAELSGSRLAAQQQMEGLLAPHRPKEPAWFLATVGVSPDHQGKGLGSAVVLPGVEAAERAGVPAFLETSAPRNLPFYERLGFTVTADVEVPEGPRTWCMTRKPGA

SEQ ID NO: 3673 - protein, 332 aa, Artificial Sequence
  Synthetic Polypeptide
MALPVTALLLPLALLLHAARPWSHPQFEKGSGEFRVQPTESIVRFPNITNLCPFGEVFNATRFASVYAWNRKRISNCVADYSVLYNSASFSTFKCYGVSPTKLNDLCFTNVYADSFVIRGDEVRQIAPGQTGKIADYNYKLPDDFTGCVIAWNSNNLDSKVGGNYNYLYRLFRKSNLKPFERDISTEIYQAGSTPCNGVEGFNCYFPLQSYGFQPTNGVGYQPYRVVVLSFELLHAPATVCGPKKSTNLVKNKCVNFTRTTTKPVLRTPSPVHPTGTSQPQRPEDCRPRGSVKGTGLDFACDIYIWAPLAGICVAPLLSLIITLICYHRSLE

SEQ ID NO: 3674 - protein, 675 aa, Artificial Sequence
  Synthetic Polypeptide
MPSWALFMVTSCLLLAPQNLAQVSSQDVSLLASDSEPLKCFSRTFEDLTCFWDEEEAAPSGTYQLLYAYPREKPRACPLSSQSMPHFGTRYVCQFPDQEEVRLFFPLHLWVKNVFLNQTRTQRVLFVDSVGLPAPPSIIKAMGGSQPGELQISWEEPAPEISDFLRYELRYGPRDPKNSTGPTVIQLIATETCCPALQRPHSASALDQSPCAQPTMPWQDGPKQTSPSREASALTAEGGSCLISGLQPGNSYWLQLRSEPDGISLGGSWGSWSLPVTVDLPGDAVALGLQCFTLDLKNVTCQWQQQDHASSQGFFYHSRARCCPRDRYPIWENCEEEEKTNPGLQTPQFSRCHFKSRNDSIIHILVEVTTAPGTVHSYLGSPFWIHQAVRLPTPNLHWREISSGHLELEWQHPSSWAAQETCYQLRYTGEGHQDWKVLEPPLGARGGTLELRPRSRYRLQLRARLNGPTYQGPWSSWSDPTRVETATETATRGGSGVFTLEDFVGDWRQTAGYNLDQVLEQGGVSSLFQNLGVSVTPIQRIVLSGENGLKIDIHVIIPYEGLSGDQMGQIEKIFKVVYPVDDHHFKVILHYGTLVIDGVTPNMIDYFGRPYEGIAVFDGKKITVTGTLWNGNKIIDERLINPDGSLLFRVTINGVTGWRLCERILASWKDASGWS

SEQ ID NO: 3675 - protein, 483 aa, Artificial Sequence
  Synthetic Polypeptide
MPPPRLLFFLLFLTPMEVRPDYKDDDDKEEPLVVKVEEGDNAVLQCLKGTSDGPTQQLTWSRESPLKPFLKLSLGLPGLGIHMRPLAIWLFIFNVSQQMGGFYLCQPGPPSEKAWQPGWTVNVEGSGELFRWNVSDLGGLGCGLKNRSSEGPSSPSGKLMSPKLYVWAKDRPEIWEGEPPCLPPRDSLNQSLSQDLTMAPGSTLWLSCGVPPDSVSRGPLSWTHVHPKGPKSLLSLELKDDRPARDMWVMETGLLLPRATAQDAGKYYCHRGNLTMSFHLEITARPVLWHWLLRTGGWTRGGSGVFTLEDFVGDWRQTAGYNLDQVLEQGGVSSLFQNLGVSVTPIQRIVLSGENGLKIDIHVIIPYEGLSGDQMGQIEKIFKVVYPVDDHHFKVILHYGTLVIDGVTPNMIDYFGRPYEGIAVFDGKKITVTGTLWNGNKIIDERLINPDGSLLFRVTINGVTGWRLCERILASWKDASGWS

SEQ ID NO: 3676 - protein, 765 aa, Artificial Sequence
  Synthetic Polypeptide
MPPPRLLFFLLFLTPMEVRPDYKDDDDKEEPLVVKVEEGDNAVLQCLKGTSDGPTQQLTWSRESPLKPFLKLSLGLPGLGIHMRPLAIWLFIFNVSQQMGGFYLCQPGPPSEKAWQPGWTVNVEGSGELFRWNVSDLGGLGCGLKNRSSEGPSSPSGKLMSPKLYVWAKDRPEIWEGEPPCLPPRDSLNQSLSQDLTMAPGSTLWLSCGVPPDSVSRGPLSWTHVHPKGPKSLLSLELKDDRPARDMWVMETGLLLPRATAQDAGKYYCHRGNLTMSFHLEITARPVLWHWLLRTGGWTRGGSGVFTLEDFVGDWRQTAGYNLDQVLEQGGVSSLFQNLGVSVTPIQRIVLSGENGLKIDIHVIIPYEGLSGDQMGQIEKIFKVVYPVDDHHFKVILHYGTLVIDGVTPNMIDYFGRPYEGIAVFDGKKITVTGTLWNGNKIIDERLINPDGSLLFRVTINGVTGWRLCERILALEGGSWSHPQFEKDYKDDDDKGSDYKDDDDKGSDYKDDDDKGSDYKDDDDKAWSHPQFEKHHHHHHHHTSGSGEGRGSLLTCGDVEENPGPHMTEYKPTVRLATRDDVPRAVRTLAAAFADYPATRHTVDPDRHIERVTELQELFLTRVGLDIGKVWVADDGAAVAVWTTPESVEAGAVFAEIGPRMAELSGSRLAAQQQMEGLLAPHRPKEPAWFLATVGVSPDHQGKGLGSAVVLPGVEAAERAGVPAFLETSAPRNLPFYERLGFTVTADVEVPEGPRTWCMTRKPGA

SEQ ID NO: 3677 - protein, 719 aa, Artificial Sequence
  Synthetic Polypeptide
MPLLLLLPLLWAGALAMDPNFWLQVQESVTVQEGLCVLVPCTFFHPIPYYDKNSPVHGYWFREGAIISGDSPVATNKLDQEVQEETQGRFRLLGDPSRNNCSLSIVDARRRDNGSYFFRMERGSTKYSYKSPQLSVHVTDLTHRPKILIPGTLEPGHSKNLTCSVSWACEQGTPPIFSWLSAAPTSLGPRTTHSSVLIITPRPQDHGTNLTCQVKFAGAGVTTERTIQLNVTYVPQNPTTGIFPGDGSGKQETRGGSGVFTLEDFVGDWRQTAGYNLDQVLEQGGVSSLFQNLGVSVTPIQRIVLSGENGLKIDIHVIIPYEGLSGDQMGQIEKIFKVVYPVDDHHFKVILHYGTLVIDGVTPNMIDYFGRPYEGIAVFDGKKITVTGTLWNGNKIIDERLINPDGSLLFRVTINGVTGWRLCERILALEGGSWSHPQFEKDYKDDDDKGSDYKDDDDKGSDYKDDDDKGSDYKDDDDKAWSHPQFEKHHHHHHHHTSGSGEGRGSLLTCGDVEENPGPHMTEYKPTVRLATRDDVPRAVRTLAAAFADYPATRHTVDPDRHIERVTELQELFLTRVGLDIGKVWVADDGAAVAVWTTPESVEAGAVFAEIGPRMAELSGSRLAAQQQMEGLLAPHRPKEPAWFLATVGVSPDHQGKGLGSAVVLPGVEAAERAGVPAFLETSAPRNLPFYERLGFTVTADVEVPEGPRTWCMTRKPGA

SEQ ID NO: 3678 - protein, 695 aa, Artificial Sequence
  Synthetic Polypeptide
MPLLLLLPLLWAGALAMDPNFWLQVQESVTVQEGLCVLVPCTFFHPIPYYDKNSPVHGYWFREGAIISGDSPVATNKLDQEVQEETQGRFRLLGDPSRNNCSLSIVDARRRDNGSYFFRMERGSTKYSYKSPQLSVHVTDLTHRPKILIPGTLEPGHSKNLTCSVSWACEQGTPPIFSWLSAAPTSLGPRTTHSSVLIITPRPQDHGTNLTCQVKFAGAGVTTERTIQLNVTYVPQNPTTGIFPGDGSGKQETRGGSEAEAERGKLPGKKLPLEVLIELEANARKAGCTRGCLICLSKIKCTAKMKKYIPGRCADYGGDKKTGQAGIVGAIVDIPEISGFKEMEPMEQFIAQVDRCADCTTGCLKGLANVKCSDLLKKWLPGRCATFADKIQSEVDNIKGLAGDLEGGSWSHPQFEKDYKDDDDKGSDYKDDDDKGSDYKDDDDKGSDYKDDDDKAWSHPQFEKHHHHHHHHTSGSGEGRGSLLTCGDVEENPGPHMTEYKPTVRLATRDDVPRAVRTLAAAFADYPATRHTVDPDRHIERVTELQELFLTRVGLDIGKVWVADDGAAVAVWTTPESVEAGAVFAEIGPRMAELSGSRLAAQQQMEGLLAPHRPKEPAWFLATVGVSPDHQGKGLGSAVVLPGVEAAERAGVPAFLETSAPRNLPFYERLGFTVTADVEVPEGPRTWCMTRKPGA

SEQ ID NO: 3679 - protein, 729 aa, Artificial Sequence
  Synthetic Polypeptide
MPLLLLLPLLWAGALAMDPNFWLQVQESVTVQEGLCVLVPCTFFHPIPYYDKNSPVHGYWFREGAIISGDSPVATNKLDQEVQEETQGRFRLLGDPSRNNCSLSIVDARRRDNGSYFFRMERGSTKYSYKSPQLSVHVTDLTHRPKILIPGTLEPGHSKNLTCSVSWACEQGTPPIFSWLSAAPTSLGPRTTHSSVLIITPRPQDHGTNLTCQVKFAGAGVTTERTIQLNVTYVPQNPTTGIFPGDGSGKQETRGGSQPTENKQESQIEDIDRSTSLGLMCYEQCTGQSGLDLKCYKECADFTGDRNRGRKLPGKKLPLEVLKIMEANARRAGCTRGCLICLSKIKCTAKMKQYIPGRCHTYEGDKSIGQGGIGGPIVDIPEIIGFQNMEPMEQFIAQVDLCADCTTGCLKGLANVRCNDLLKKWLPDRCAGFANKIQSEVDNIKGLAGDRLEYPYDVPDYAWSHPQFEKYPYDVPDYAGYPYDVPDYAGYPYDVPDYHHHHHHHHTSGSGEGRGSLLTCGDVEENPGPHMTEYKPTVRLATRDDVPRAVRTLAAAFADYPATRHTVDPDRHIERVTELQELFLTRVGLDIGKVWVADDGAAVAVWTTPESVEAGAVFAEIGPRMAELSGSRLAAQQQMEGLLAPHRPKEPAWFLATVGVSPDHQGKGLGSAVVLPGVEAAERAGVPAFLETSAPRNLPFYERLGFTVTADVEVPEGPRTWCMTRKPGA

SEQ ID NO: 3680 - protein, 461 aa, Artificial Sequence
  Synthetic Polypeptide
MPLLLLLPLLWAGALAMDPNFWLQVQESVTVQEGLCVLVPCTFFHPIPYYDKNSPVHGYWFREGAIISGDSPVATNKLDQEVQEETQGRFRLLGDPSRNNCSLSIVDARRRDNGSYFFRMERGSTKYSYKSPQLSVHVTDLTHRPKILIPGTLEPGHSKNLTCSVSWACEQGTPPIFSWLSAAPTSLGPRTTHSSVLIITPRPQDHGTNLTCQVKFAGAGVTTERTIQLNVTYVPQNPTTGIFPGDGSGKQETRGGSAASEEADDDHVSLVKNYWRIGVGNERDVSLDRGGPPKLSKELLAEMHAIASNAGCSRVCLIGLSKIKCTPKMKTFLPGRCNTFAPKPATGDGPFAAAAAIPGFSDLTAMEQYKAQVAQCDCSNRCLVGLANIKCSAALKAALPQRCTTFATNIQKEGEVDSIKGYGRKLETDFYDYKDDDDKDYKDDDDKVETDFYDYKDDDDK

SEQ ID NO: 3681 - protein, 708 aa, Artificial Sequence
  Synthetic Polypeptide
MRRAALWLWLCALALSLQPALPQIVATNLPPEDQDGSGDDSDNFSGSGAGALQDITLSQQTPSTWKDTQLLTAIPTSPEPTGLEATAASTSTLPAGEGPKEGEAVVLPEVEPGLTAREQEATPRPRETTQLPTTHQASTTTATTAQEPATSHPHRDMQPGHHETSTPAGPSQADLHTPHTEDGGPSATERAAEDGASSQLPAAEGSGEQDFTFETSGENTAVVAVEPDRRNQSPVDQGATGTRGGSGVFTLEDFVGDWRQTAGYNLDQVLEQGGVSSLFQNLGVSVTPIQRIVLSGENGLKIDIHVIIPYEGLSGDQMGQIEKIFKVVYPVDDHHFKVILHYGTLVIDGVTPNMIDYFGRPYEGIAVFDGKKITVTGTLWNGNKIIDERLINPDGSLLFRVTINGVTGWRLCERILALEGGSWSHPQFEKDYKDDDDKGSDYKDDDDKGSDYKDDDDKGSDYKDDDDKAWSHPQFEKHHHHHHHHTSGSGEGRGSLLTCGDVEENPGPHMTEYKPTVRLATRDDVPRAVRTLAAAFADYPATRHTVDPDRHIERVTELQELFLTRVGLDIGKVWVADDGAAVAVWTTPESVEAGAVFAEIGPRMAELSGSRLAAQQQMEGLLAPHRPKEPAWFLATVGVSPDHQGKGLGSAVVLPGVEAAERAGVPAFLETSAPRNLPFYERLGFTVTADVEVPEGPRTWCMTRKPGA

SEQ ID NO: 3682 - protein, 767 aa, Artificial Sequence
  Synthetic Polypeptide
MVLLWLTLLLIALPCLLQTKEDPNPPITNLRMKAKAQQLTWDLNRNVTDIECVKDADYSMPAVNNSYCQFGAISLCEVTNYTVRVANPPFSTWILFPENSGKPWAGAENLTCWIHDVDFLSCSWAVGPGAPADVQYDLYLNVANRRQQYECLHYKTDAQGTRIGCRFDDISRLSSGSQSSHILVRGRSAAFGIPCTDKFVVFSQIEILTPPNMTAKCNKTHSFMHWKMRSHFNRKFRYELQIQKRMQPVITEQVRDRTSFQLLNPGTYTVQIRARERVYEFLSAWSTPQRFECDQEEGANTRGGSGVFTLEDFVGDWRQTAGYNLDQVLEQGGVSSLFQNLGVSVTPIQRIVLSGENGLKIDIHVIIPYEGLSGDQMGQIEKIFKVVYPVDDHHFKVILHYGTLVIDGVTPNMIDYFGRPYEGIAVFDGKKITVTGTLWNGNKIIDERLINPDGSLLFRVTINGVTGWRLCERILALEGGSWSHPQFEKDYKDDDDKGSDYKDDDDKGSDYKDDDDKGSDYKDDDDKAWSHPQFEKHHHHHHHHTSGSGEGRGSLLTCGDVEENPGPHMTEYKPTVRLATRDDVPRAVRTLAAAFADYPATRHTVDPDRHIERVTELQELFLTRVGLDIGKVWVADDGAAVAVWTTPESVEAGAVFAEIGPRMAELSGSRLAAQQQMEGLLAPHRPKEPAWFLATVGVSPDHQGKGLGSAVVLPGVEAAERAGVPAFLETSAPRNLPFYERLGFTVTADVEVPEGPRTWCMTRKPGA

SEQ ID NO: 3683 - protein, 1176 aa, Artificial Sequence
  Synthetic Polypeptide
MGPWSRSLSALLLLLQVSSWLCQEPEPCHPGFDAESYTFTVPRRHLERGRVLGRVNFEDCTGRQRTAYFSLDTRFKVGTDGVITVKRPLRFHNPQIHFLVYAWDSTYRKFSTKVTLNTVGHHHRPPPHQASVSGIQAELLTFPNSSPGLRRQKRDWVIPPISCPENEKGPFPKNLVQIKSNKDKEGKVFYSITGQGADTPPVGVFIIERETGWLKVTEPLDRERIATYTLFSHAVSSNGNAVEDPMEILITVTDQNDNKPEFTQEVFKGSVMEGALPGTSVMEVTATDADDDVNTYNAAIAYTILSQDPELPDKNMFTINRNTGVISVVTTGLDRESFPTYTLVVQAADLQGEGLSTTATAVITVTDTNDNPPIFNPTTYKGQVPENEANVVITTLKVTDADAPNTPAWEAVYTILNDDGGQFVVTTNPVNNDGILKTAKGLDFEAKQQYILHVAVTNVVPFEVSLTTSTATVTVDVLDVNEAPIFVPPEKRVEVSEDFGVGQEITSYTAQEPDTFMEQKITYRIWRDTANWLEINPDTGAISTRAELDREDFEHVKNSTYTALIIATDNGSPVATGTGTLLLILSDVNDNAPIPEPRTIFFCERNPKPQVINIIDADLPPNTSPFTAELTHGASANWTIQYNDPTQESIILKPKMALEVGDYKINLKLMDNQNKDQVTTLEVSVCDCEGAAGVCRKAQPVEAGLQIPATRGGSGVFTLEDFVGDWRQTAGYNLDQVLEQGGVSSLFQNLGVSVTPIQRIVLSGENGLKIDIHVIIPYEGLSGDQMGQIEKIFKVVYPVDDHHFKVILHYGTLVIDGVTPNMIDYFGRPYEGIAVFDGKKITVTGTLWNGNKIIDERLINPDGSLLFRVTINGVTGWRLCERILALEGGSWSHPQFEKDYKDDDDKGSDYKDDDDKGSDYKDDDDKGSDYKDDDDKAWSHPQFEKHHHHHHHHTSGSGEGRGSLLTCGDVEENPGPHMTEYKPTVRLATRDDVPRAVRTLAAAFADYPATRHTVDPDRHIERVTELQELFLTRVGLDIGKVWVADDGAAVAVWTTPESVEAGAVFAEIGPRMAELSGSRLAAQQQMEGLLAPHRPKEPAWFLATVGVSPDHQGKGLGSAVVLPGVEAAERAGVPAFLETSAPRNLPFYERLGFTVTADVEVPEGPRTWCMTRKPGA

SEQ ID NO: 3684 - protein, 706 aa, Artificial Sequence
  Synthetic Polypeptide
MSAPRLLISIIIMVSASSSSCMGGKQMTQNYSTIFAEGNISQPVLMDINAVLCCPPIALRNLIIITWEIILRGQPSCTKAYKKETNETKETNCTVERITWVSRPDQNSDLQILPVDTTHDGYYRGIVVTPDGNFHRGYHLQVLVTPEVNLFQSRNITAVCKAVTGKPAAQISWIPEGSILATKQEYWGNGTVTVKSTCPWEGHKSTVTCHVSHLTGNKSLSVKLNSGLRTSGSPALSLLTRGGSGVFTLEDFVGDWRQTAGYNLDQVLEQGGVSSLFQNLGVSVTPIQRIVLSGENGLKIDIHVIIPYEGLSGDQMGQIEKIFKVVYPVDDHHFKVILHYGTLVIDGVTPNMIDYFGRPYEGIAVFDGKKITVTGTLWNGNKIIDERLINPDGSLLFRVTINGVTGWRLCERILALEGGSWSHPQFEKDYKDDDDKGSDYKDDDDKGSDYKDDDDKGSDYKDDDDKAWSHPQFEKHHHHHHHHTSGSGEGRGSLLTCGDVEENPGPHMTEYKPTVRLATRDDVPRAVRTLAAAFADYPATRHTVDPDRHIERVTELQELFLTRVGLDIGKVWVADDGAAVAVWTTPESVEAGAVFAEIGPRMAELSGSRLAAQQQMEGLLAPHRPKEPAWFLATVGVSPDHQGKGLGSAVVLPGVEAAERAGVPAFLETSAPRNLPFYERLGFTVTADVEVPEGPRTWCMTRKPGA

SEQ ID NO: 3685 - protein, 955 aa, Artificial Sequence
  Synthetic Polypeptide
MECLYYFLGFLLLAARLPLDAAKRFHDVLGNERPSAYMREHNQLNGWSSDENDWNEKLYPVWKRGDMRWKNSWKGGRVQAVLTSDSPALVGSNITFAVNLIFPRCQKEDANGNIVYEKNCRNEAGLSADPYVYNWTAWSEDSDGENGTGQSHHNVFPDGKPFPHHPGWRRWNFIYVFHTLGQYFQKLGRCSVRVSVNTANVTLGPQLMEVTVYRRHGRAYVPIAQVKDVYVVTDQIPVFVTMFQKNDRNSSDETFLKDLPIMFDVLIHDPSHFLNYSTINYKWSFGDNTGLFVSTNHTVNHTYVLNGTFSLNLTVKAAAPGPCPPPPPPPRPSKPTPSLGPAGDNPLELSRIPDENCQINRYGHFQATITIVEGILEVNIIQMTDVLMPVPWPESSLIDFVVTCQGSIPTEVCTIISDPTCEITQNTVCSPVDVDEMCLLTVRRTFNGSGTYCVNLTLGDDTSLALTSTLISVPDRDPASPLRMANSATRGGSGVFTLEDFVGDWRQTAGYNLDQVLEQGGVSSLFQNLGVSVTPIQRIVLSGENGLKIDIHVIIPYEGLSGDQMGQIEKIFKVVYPVDDHHFKVILHYGTLVIDGVTPNMIDYFGRPYEGIAVFDGKKITVTGTLWNGNKIIDERLINPDGSLLFRVTINGVTGWRLCERILALEGGSWSHPQFEKDYKDDDDKGSDYKDDDDKGSDYKDDDDKGSDYKDDDDKAWSHPQFEKHHHHHHHHTSGSGEGRGSLLTCGDVEENPGPHMTEYKPTVRLATRDDVPRAVRTLAAAFADYPATRHTVDPDRHIERVTELQELFLTRVGLDIGKVWVADDGAAVAVWTTPESVEAGAVFAEIGPRMAELSGSRLAAQQQMEGLLAPHRPKEPAWFLATVGVSPDHQGKGLGSAVVLPGVEAAERAGVPAFLETSAPRNLPFYERLGFTVTADVEVPEGPRTWCMTRKPGA

SEQ ID NO: 3686 - protein, 1131 aa, Artificial Sequence
  Synthetic Polypeptide
MGAARGSPARPRRLPLLSVLLLPLLGGTQTAIVFIKQPSSQDALQGRRALLRCEVEAPGPVHVYWLLDGAPVQDTERRFAQGSSLSFAAVDRLQDSGTFQCVARDDVTGEEARSANASFNIKWIEAGPVVLKHPASEAEIQPQTQVTLRCHIDGHPRPTYQWFRDGTPLSDGQSNHTVSSKERNLTLRPAGPEHSGLYSCCAHSAFGQACSSQNFTLSIADESFARVVLAPQDVVVARYEEAMFHCQFSAQPPPSLQWLFEDETPITNRSRPPHLRRATVFANGSLLLTQVRPRNAGIYRCIGQGQRGPPIILEATLHLAEIEDMPLFEPRVFTAGSEERVTCLPPKGLPEPSVWWEHAGVRLPTHGRVYQKGHELVLANIAESDAGVYTCHAANLAGQRRQDVNITVATVPSWLKKPQDSQLEEGKPGYLDCLTQATPKPTVVWYRNQMLISEDSRFEVFKNGTLRINSVEVYDGTWYRCMSSTPAGSIEAQARVQVLDGSSLPEWVTDNAGTLHFARVTRDDAGNYTCIASNGPQGQIRAHVQLTVAVFITFKVEPERTTVYQGHTALLQCEAQGDPKPLIQWKGKDRILDPTKLGPRMHIFQNGSLVIHDVAPEDSGRYTCIAGNSCNIKHTEAPLYVVDKPVPEESEGPGSPPPYKMIQTTRGGSGVFTLEDFVGDWRQTAGYNLDQVLEQGGVSSLFQNLGVSVTPIQRIVLSGENGLKIDIHVIIPYEGLSGDQMGQIEKIFKVVYPVDDHHFKVILHYGTLVIDGVTPNMIDYFGRPYEGIAVFDGKKITVTGTLWNGNKIIDERLINPDGSLLFRVTINGVTGWRLCERILALEGGSWSHPQFEKDYKDDDDKGSDYKDDDDKGSDYKDDDDKGSDYKDDDDKAWSHPQFEKHHHHHHHHTSGSGEGRGSLLTCGDVEENPGPHMTEYKPTVRLATRDDVPRAVRTLAAAFADYPATRHTVDPDRHIERVTELQELFLTRVGLDIGKVWVADDGAAVAVWTTPESVEAGAVFAEIGPRMAELSGSRLAAQQQMEGLLAPHRPKEPAWFLATVGVSPDHQGKGLGSAVVLPGVEAAERAGVPAFLETSAPRNLPFYERLGFTVTADVEVPEGPRTWCMTRKPGA

SEQ ID NO: 3687 - protein, 757 aa, Artificial Sequence
  Synthetic Polypeptide
MLVRRGARAGPRMPRGWTALCLLSLLPSGFMSLDNNGTATPELPTQGTFSNVSTNVSYQETTTPSTLGSTSLHPVSQHGNEATTNITETTVKFTSTSVITSVYGNTNSSVQSQTSVISTVFTTPANVSTPETTLKPSLSPGNVSDLSTTSTSLATSPTKPYTSSSPILSDIKAEIKCSGIREVKLTQGICLEQNKTSSCAEFKKDRGEGLARVLCGEEQADADAGAQVCSLLLAQSEVRPQCLLLVLANRTEISSKLQLMKKHQSDLKKLGILDFTEQDVASHQSYSQKTTRGGSGVFTLEDFVGDWRQTAGYNLDQVLEQGGVSSLFQNLGVSVTPIQRIVLSGENGLKIDIHVIIPYEGLSGDQMGQIEKIFKVVYPVDDHHFKVILHYGTLVIDGVTPNMIDYFGRPYEGIAVFDGKKITVTGTLWNGNKIIDERLINPDGSLLFRVTINGVTGWRLCERILALEGGSWSHPQFEKDYKDDDDKGSDYKDDDDKGSDYKDDDDKGSDYKDDDDKAWSHPQFEKHHHHHHHHTSGSGEGRGSLLTCGDVEENPGPHMTEYKPTVRLATRDDVPRAVRTLAAAFADYPATRHTVDPDRHIERVTELQELFLTRVGLDIGKVWVADDGAAVAVWTTPESVEAGAVFAEIGPRMAELSGSRLAAQQQMEGLLAPHRPKEPAWFLATVGVSPDHQGKGLGSAVVLPGVEAAERAGVPAFLETSAPRNLPFYERLGFTVTADVEVPEGPRTWCMTRKPGA

SEQ ID NO: 3688 - protein, 735 aa, Artificial Sequence
  Synthetic Polypeptide
MAPPQVLAFGLLLAAATATFAAAQEECVCENYKLAVNCFVNNNRQCQCTSVGAQNTVICSKLAAKCLVMKAEMNGSKLGRRAKPEGALQNNDGLYDPDCDESGLFKAKQCNGTSTCWCVNTAGVRRTDKDTEITCSERVRTYWIIIELKHKAREKPYDSKSLRTALQKEITTRYQLDPKFITSILYENNVITIDLVQNSSQKTQNDVDIADVAYYFEKDVKGESLFHSKKMDLTVNGEQLDLDPGQTLIYYVDEKAPEFSMQGLKQARTRGGSGVFTLEDFVGDWRQTAGYNLDQVLEQGGVSSLFQNLGVSVTPIQRIVLSGENGLKIDIHVIIPYEGLSGDQMGQIEKIFKVVYPVDDHHFKVILHYGTLVIDGVTPNMIDYFGRPYEGIAVFDGKKITVTGTLWNGNKIIDERLINPDGSLLFRVTINGVTGWRLCERILALEGGSWSHPQFEKDYKDDDDKGSDYKDDDDKGSDYKDDDDKGSDYKDDDDKAWSHPQFEKHHHHHHHHTSGSGEGRGSLLTCGDVEENPGPHMTEYKPTVRLATRDDVPRAVRTLAAAFADYPATRHTVDPDRHIERVTELQELFLTRVGLDIGKVWVADDGAAVAVWTTPESVEAGAVFAEIGPRMAELSGSRLAAQQQMEGLLAPHRPKEPAWFLATVGVSPDHQGKGLGSAVVLPGVEAAERAGVPAFLETSAPRNLPFYERLGFTVTADVEVPEGPRTWCMTRKPGA

SEQ ID NO: 3689 - protein, 732 aa, Artificial Sequence
  Synthetic Polypeptide
MSEEVTYADLQFQNSSEMEKIPEIGKFGEKAPPAPSHVWRPAALFLTLLCLLLLIGLGVLASMFHVTLKIEMKKMNKLQNISEELQRNISLQLMSNMNISNKIRNLSTTLQTIATKLCRELYSKEQEHKCKPCPRRWIWHKDSCYFLSDDVQTWQESKMACAAQNASLLKINNKNALEFIKSQSRSYDYWLGLSPEEDSTRGMRVDNIINSSAWVIRNAPDLNNMYCGYINRLYVQYYHCTYKQRMICEKMANPVQLGSTYFREATRGGSGVFTLEDFVGDWRQTAGYNLDQVLEQGGVSSLFQNLGVSVTPIQRIVLSGENGLKIDIHVIIPYEGLSGDQMGQIEKIFKVVYPVDDHHFKVILHYGTLVIDGVTPNMIDYFGRPYEGIAVFDGKKITVTGTLWNGNKIIDERLINPDGSLLFRVTINGVTGWRLCERILALEGGSWSHPQFEKDYKDDDDKGSDYKDDDDKGSDYKDDDDKGSDYKDDDDKAWSHPQFEKHHHHHHHHTSGSGEGRGSLLTCGDVEENPGPHMTEYKPTVRLATRDDVPRAVRTLAAAFADYPATRHTVDPDRHIERVTELQELFLTRVGLDIGKVWVADDGAAVAVWTTPESVEAGAVFAEIGPRMAELSGSRLAAQQQMEGLLAPHRPKEPAWFLATVGVSPDHQGKGLGSAVVLPGVEAAERAGVPAFLETSAPRNLPFYERLGFTVTADVEVPEGPRTWCMTRKPGA

SEQ ID NO: 3690 - protein, 630 aa, Artificial Sequence
  Synthetic Polypeptide
MALPVTALLLPLALLLHAARPFECPAGIYAPICSGGGGSCGGGGSKISHFLKMESLNFIRAHTPYINIYNCEPANPSEKNSPSTQYCYSIQSGGGGSCGGGGSPAGIYAPIGGGGSKISHFLKMESLNFIRAHTPYINIYNCEPANPSEKNSPSTQYCYSIQSTRGGSGVFTLEDFVGDWRQTAGYNLDQVLEQGGVSSLFQNLGVSVTPIQRIVLSGENGLKIDIHVIIPYEGLSGDQMGQIEKIFKVVYPVDDHHFKVILHYGTLVIDGVTPNMIDYFGRPYEGIAVFDGKKITVTGTLWNGNKIIDERLINPDGSLLFRVTINGVTGWRLCERILALEGGSWSHPQFEKDYKDDDDKGSDYKDDDDKGSDYKDDDDKGSDYKDDDDKAWSHPQFEKHHHHHHHHTSGSGEGRGSLLTCGDVEENPGPHMTEYKPTVRLATRDDVPRAVRTLAAAFADYPATRHTVDPDRHIERVTELQELFLTRVGLDIGKVWVADDGAAVAVWTTPESVEAGAVFAEIGPRMAELSGSRLAAQQQMEGLLAPHRPKEPAWFLATVGVSPDHQGKGLGSAVVLPGVEAAERAGVPAFLETSAPRNLPFYERLGFTVTADVEVPEGPRTWCMTRKPGA

SEQ ID NO: 3691 - protein, 570 aa, Artificial Sequence
  Synthetic Polypeptide
MALPVTALLLPLALLLHAARPFECPAGIYAPICSGGGGSCGGGGSKISHFLKMESLNFIRAHTPYINIYNCEPANPSEKNSPSTQYCYSIQSGGGGSCGGGGSTRGGSGVFTLEDFVGDWRQTAGYNLDQVLEQGGVSSLFQNLGVSVTPIQRIVLSGENGLKIDIHVIIPYEGLSGDQMGQIEKIFKVVYPVDDHHFKVILHYGTLVIDGVTPNMIDYFGRPYEGIAVFDGKKITVTGTLWNGNKIIDERLINPDGSLLFRVTINGVTGWRLCERILALEGGSWSHPQFEKDYKDDDDKGSDYKDDDDKGSDYKDDDDKGSDYKDDDDKAWSHPQFEKHHHHHHHHTSGSGEGRGSLLTCGDVEENPGPHMTEYKPTVRLATRDDVPRAVRTLAAAFADYPATRHTVDPDRHIERVTELQELFLTRVGLDIGKVWVADDGAAVAVWTTPESVEAGAVFAEIGPRMAELSGSRLAAQQQMEGLLAPHRPKEPAWFLATVGVSPDHQGKGLGSAVVLPGVEAAERAGVPAFLETSAPRNLPFYERLGFTVTADVEVPEGPRTWCMTRKPGA

SEQ ID NO: 3692 - protein, 982 aa, Artificial Sequence
  Synthetic Polypeptide
MSLWLLEGVPMRQAAVTSTSLTIKSVFTRSELKFSPQWSHHGKIVTCQLQDADGKFLSNDTVQLNVKHTPKLEIKVTPSDAIVREGDSVTMTCEVSSSNPEYTTVSWLKDGTSLKKQNTFTLNLREVTKDQSGKYCCQVSNDVGPGRSEEVFLQVQYAPEPSTVQILHSPAVEGSQVEFLCMSLANPLPTNYTWYHNGKEMQGRTEEKVHIPKILPWHAGTYSCVAENILGTGQRGPGAELDVQYPPKKVTTVIQNPMPIREGDTVTLSCNYNSSNPSVTRYEWKPHGAWEEPSLGVLKIQNVGWDNTTIACAACNSWCSWASPVALNVQYAPRDVRVRKIKPLSEIHSGNSVSLQCDFSSSHPKEVQFFWEKNGRLLGKESQLNFDSISPEDAGSYSCWVNNSIGQTASKAWTLEVLYAPRRLRVSMSPGDQVMEGKSATLTCESDANPPVSHYTWFDWNNQSLPYHSQKLRLEPVKVQHSGAYWCQGTNSVGKGRSPLSTLTVYYSPETIGRRTRGGSGVFTLEDFVGDWRQTAGYNLDQVLEQGGVSSLFQNLGVSVTPIQRIVLSGENGLKIDIHVIIPYEGLSGDQMGQIEKIFKVVYPVDDHHFKVILHYGTLVIDGVTPNMIDYFGRPYEGIAVFDGKKITVTGTLWNGNKIIDERLINPDGSLLFRVTINGVTGWRLCERILALEGGSWSHPQFEKDYKDDDDKGSDYKDDDDKGSDYKDDDDKGSDYKDDDDKAWSHPQFEKHHHHHHHHTSGSGEGRGSLLTCGDVEENPGPHMTEYKPTVRLATRDDVPRAVRTLAAAFADYPATRHTVDPDRHIERVTELQELFLTRVGLDIGKVWVADDGAAVAVWTTPESVEAGAVFAEIGPRMAELSGSRLAAQQQMEGLLAPHRPKEPAWFLATVGVSPDHQGKGLGSAVVLPGVEAAERAGVPAFLETSAPRNLPFYERLGFTVTADVEVPEGPRTWCMTRKPGA

SEQ ID NO: 3693 - protein, 880 aa, Artificial Sequence
  Synthetic Polypeptide
MRPADLLQLVLLLDLPRDLGGMGCSSPPCECHQEEDFRVTCKDIQRIPSLPPSTQTLKLIETHLRTIPSHAFSNLPNISRIYVSIDVTLQQLESHSFYNLSKVTHIEIRNTRNLTYIDPDALKELPLLKFLGIFNTGLKMFPDLTKVYSTDIFFILEITDNPYMTSIPVNAFQGLCNETLTLKLYNNGFTSVQGYAFNGTKLDAVYLNKNKYLTVIDKDAFGGVYSGPSLLDVSQTSVTALPSKGLEHLKELIARNTWTLKKLPLSLSFLHLTRADLSYPSHCCAFKNQKKIRGILESLMCNESSMQSLRQRKSVNALNSPLHQEYEENLGDSIVGYKEKSKFQDTHNNAHYYVFFEEQEDEIIGFGQELKNPQEETLQAFDSHYDYTICGDSEDMVCTPKSDEFNPCEDIMGTRGGSGVFTLEDFVGDWRQTAGYNLDQVLEQGGVSSLFQNLGVSVTPIQRIVLSGENGLKIDIHVIIPYEGLSGDQMGQIEKIFKVVYPVDDHHFKVILHYGTLVIDGVTPNMIDYFGRPYEGIAVFDGKKITVTGTLWNGNKIIDERLINPDGSLLFRVTINGVTGWRLCERILALEGGSWSHPQFEKDYKDDDDKGSDYKDDDDKGSDYKDDDDKGSDYKDDDDKAWSHPQFEKHHHHHHHHTSGSGEGRGSLLTCGDVEENPGPHMTEYKPTVRLATRDDVPRAVRTLAAAFADYPATRHTVDPDRHIERVTELQELFLTRVGLDIGKVWVADDGAAVAVWTTPESVEAGAVFAEIGPRMAELSGSRLAAQQQMEGLLAPHRPKEPAWFLATVGVSPDHQGKGLGSAVVLPGVEAAERAGVPAFLETSAPRNLPFYERLGFTVTADVEVPEGPRTWCMTRKPGA

SEQ ID NO: 3694 - protein, 828 aa, Artificial Sequence
  Synthetic Polypeptide
MRPSGTAGAALLALLAALCPASRALEEKKGNYVVTDHGSCVRACGADSYEMEEDGVRKCKKCEGPCRKVCNGIGIGEFKDSLSINATNIKHFKNCTSISGDLHILPVAFRGDSFTHTPPLDPQELDILKTVKEITGFLLIQAWPENRTDLHAFENLEIIRGRTKQHGQFSLAVVSLNITSLGLRSLKEISDGDVIISGNKNLCYANTINWKKLFGTSGQKTKIISNRGENSCKATGQVCHALCSPEGCWGPEPRDCVSCRNVSRGRECVDKCNLLEGEPREFVENSECIQCHPECLPQAMNITCTGRGPDNCIQCAHYIDGPHCVKTCPAGVMGENNTLVWKYADAGHVCHLCHPNCTYGCTRGGSGVFTLEDFVGDWRQTAGYNLDQVLEQGGVSSLFQNLGVSVTPIQRIVLSGENGLKIDIHVIIPYEGLSGDQMGQIEKIFKVVYPVDDHHFKVILHYGTLVIDGVTPNMIDYFGRPYEGIAVFDGKKITVTGTLWNGNKIIDERLINPDGSLLFRVTINGVTGWRLCERILALEGGSWSHPQFEKDYKDDDDKGSDYKDDDDKGSDYKDDDDKGSDYKDDDDKAWSHPQFEKHHHHHHHHTSGSGEGRGSLLTCGDVEENPGPHMTEYKPTVRLATRDDVPRAVRTLAAAFADYPATRHTVDPDRHIERVTELQELFLTRVGLDIGKVWVADDGAAVAVWTTPESVEAGAVFAEIGPRMAELSGSRLAAQQQMEGLLAPHRPKEPAWFLATVGVSPDHQGKGLGSAVVLPGVEAAERAGVPAFLETSAPRNLPFYERLGFTVTADVEVPEGPRTWCMTRKPGA

SEQ ID NO: 3695 - protein, 693 aa, Artificial Sequence
  Synthetic Polypeptide
MAGSPTCLTLIYILWQLTGSAASGPVKELVGSVGGAVTFPLKSKVKQVDSIVWTFNTTPLVTIQPEGGTIIVTQNRNRERVDFPDGGYSLKLSKLKKNDSGIYYVGIYSSSLQQPSTQEYVLHVYEHLSKPKVTMGLQSNKNGTCVTNLTCCMEHGEEDVIYTWKALGQAANESHNGSILPISWRWGESDMTFICVARNPVSRNFSSPILARKLCEGAADDPDSSMTRGGSGVFTLEDFVGDWRQTAGYNLDQVLEQGGVSSLFQNLGVSVTPIQRIVLSGENGLKIDIHVIIPYEGLSGDQMGQIEKIFKVVYPVDDHHFKVILHYGTLVIDGVTPNMIDYFGRPYEGIAVFDGKKITVTGTLWNGNKIIDERLINPDGSLLFRVTINGVTGWRLCERILALEGGSWSHPQFEKDYKDDDDKGSDYKDDDDKGSDYKDDDDKGSDYKDDDDKAWSHPQFEKHHHHHHHHTSGSGEGRGSLLTCGDVEENPGPHMTEYKPTVRLATRDDVPRAVRTLAAAFADYPATRHTVDPDRHIERVTELQELFLTRVGLDIGKVWVADDGAAVAVWTTPESVEAGAVFAEIGPRMAELSGSRLAAQQQMEGLLAPHRPKEPAWFLATVGVSPDHQGKGLGSAVVLPGVEAAERAGVPAFLETSAPRNLPFYERLGFTVTADVEVPEGPRTWCMTRKPGA

SEQ ID NO: 3696 - protein, 634 aa, Artificial Sequence
  Synthetic Polypeptide
MQIPQAPWPVVWAVLQLGWRPGWFLDSPDRPWNPPTFSPALLVVTEGDNATFTCSFSNTSESFVLNWYRMSPSNQTDKLAAFPEDRSQPGQDCRFRVTQLPNGRDFHMSVVRARRNDSGTYLCGAISLAPKAQIKESLRAELRVTERRAEVPTAHPSPSPRPAGQFQTRGGSGVFTLEDFVGDWRQTAGYNLDQVLEQGGVSSLFQNLGVSVTPIQRIVLSGENGLKIDIHVIIPYEGLSGDQMGQIEKIFKVVYPVDDHHFKVILHYGTLVIDGVTPNMIDYFGRPYEGIAVFDGKKITVTGTLWNGNKIIDERLINPDGSLLFRVTINGVTGWRLCERILALEGGSWSHPQFEKDYKDDDDKGSDYKDDDDKGSDYKDDDDKGSDYKDDDDKAWSHPQFEKHHHHHHHHTSGSGEGRGSLLTCGDVEENPGPHMTEYKPTVRLATRDDVPRAVRTLAAAFADYPATRHTVDPDRHIERVTELQELFLTRVGLDIGKVWVADDGAAVAVWTTPESVEAGAVFAEIGPRMAELSGSRLAAQQQMEGLLAPHRPKEPAWFLATVGVSPDHQGKGLGSAVVLPGVEAAERAGVPAFLETSAPRNLPFYERLGFTVTADVEVPEGPRTWCMTRKPGA

SEQ ID NO: 3697 - protein, 629 aa, Artificial Sequence
  Synthetic Polypeptide
MACLGFQRHKAQLNLATRTWPCTLLFFLLFIPVFCKAMHVAQPAVVLASSRGIASFVCEYASPGKATEVRVTVLRQADSQVTEVCAATYMMGNELTFLDDSICTGTSSGNQVNLTIQGLRAMDTGLYICKVELMYPPPYYLGIGNGTQIYVIDPEPCPDSDFTRGGSGVFTLEDFVGDWRQTAGYNLDQVLEQGGVSSLFQNLGVSVTPIQRIVLSGENGLKIDIHVIIPYEGLSGDQMGQIEKIFKVVYPVDDHHFKVILHYGTLVIDGVTPNMIDYFGRPYEGIAVFDGKKITVTGTLWNGNKIIDERLINPDGSLLFRVTINGVTGWRLCERILALEGGSWSHPQFEKDYKDDDDKGSDYKDDDDKGSDYKDDDDKGSDYKDDDDKAWSHPQFEKHHHHHHHHTSGSGEGRGSLLTCGDVEENPGPHMTEYKPTVRLATRDDVPRAVRTLAAAFADYPATRHTVDPDRHIERVTELQELFLTRVGLDIGKVWVADDGAAVAVWTTPESVEAGAVFAEIGPRMAELSGSRLAAQQQMEGLLAPHRPKEPAWFLATVGVSPDHQGKGLGSAVVLPGVEAAERAGVPAFLETSAPRNLPFYERLGFTVTADVEVPEGPRTWCMTRKPGA

SEQ ID NO: 3698 - protein, 623 aa, Artificial Sequence
  Synthetic Polypeptide
MALPVTALLLPLALLLHAARPLFNQEVQIPLTESYCGPCPKNWICYKNNCYQFFDESKNWYESQASCMSQNASLLKVYSKEDQDLLKLVKSYHWMGLVHIPTNGSWQWEDGSILSPNLLTIIEMQKGDCALYASSFKGYIENCSTPNTYICMQRTVTRGGSGVFTLEDFVGDWRQTAGYNLDQVLEQGGVSSLFQNLGVSVTPIQRIVLSGENGLKIDIHVIIPYEGLSGDQMGQIEKIFKVVYPVDDHHFKVILHYGTLVIDGVTPNMIDYFGRPYEGIAVFDGKKITVTGTLWNGNKIIDERLINPDGSLLFRVTINGVTGWRLCERILALEGGSWSHPQFEKDYKDDDDKGSDYKDDDDKGSDYKDDDDKGSDYKDDDDKAWSHPQFEKHHHHHHHHTSGSGEGRGSLLTCGDVEENPGPHMTEYKPTVRLATRDDVPRAVRTLAAAFADYPATRHTVDPDRHIERVTELQELFLTRVGLDIGKVWVADDGAAVAVWTTPESVEAGAVFAEIGPRMAELSGSRLAAQQQMEGLLAPHRPKEPAWFLATVGVSPDHQGKGLGSAVVLPGVEAAERAGVPAFLETSAPRNLPFYERLGFTVTADVEVPEGPRTWCMTRKPGA

SEQ ID NO: 3699 - protein, 1197 aa, Artificial Sequence
  Synthetic Polypeptide
MALPVTALLLPLALLLHAARPFEKSSNEATNITPKHNMKAFLDELKAENIKKFLYNFTQIPHLAGTEQNFQLAKQIQSQWKEFGLDSVELAHYDVLLSYPNKTHPNYISIINEDGNEIFNTSLFEPPPPGYENVSDIVPPFSAFSPQGMPEGDLVYVNYARTEDFFKLERDMKINCSGKIVIARYGKVFRGNKVKNAQLAGAKGVILYSDPADYFAPGVKSYPDGWNLPGGGVQRGNILNLNGAGDPLTPGYPANEYAYRRGIAEAVGLPSIPVHPIGYYDAQKLLEKMGGSAPPDSSWRGSLKVPYNVGPGFTGNFSTQKVKMHIHSTNEVTRIYNVIGTLRGAVEPDRYVILGGHRDSWVFGGIDPQSGAAVVHEIVRSFGTLKKEGWRPRRTILFASWDAEEFGLLGSTEWAEENSRLLQERGVAYINADSSIEGNYTLRVDCTPLMYSLVHNLTKELKSPDEGFEGKSLYESWTKKSPSPEFSGMPRISKLGSGNDFEVFFQRLGIASGRARYTKNWETNKFSGYPLYHSVYETYELVEKFYDPMFKYHLTVAQVRGGMVFELANSIVLPFDCRDYAVVLRKYADKIYSISMKHPQEMKTYSVSFDSLFSAVKNFTEIASKFSERLQDFDKSNPIVLRMMNDQLMFLERAFIDPLGLPDRPFYRHVIYAPSSHNKYAGESFPGIYDALFDIESKVDPSKAWGEVKRQIYVAAFTVQAAAETLSEVATRGGSGVFTLEDFVGDWRQTAGYNLDQVLEQGGVSSLFQNLGVSVTPIQRIVLSGENGLKIDIHVIIPYEGLSGDQMGQIEKIFKVVYPVDDHHFKVILHYGTLVIDGVTPNMIDYFGRPYEGIAVFDGKKITVTGTLWNGNKIIDERLINPDGSLLFRVTINGVTGWRLCERILALEGGSWSHPQFEKDYKDDDDKGSDYKDDDDKGSDYKDDDDKGSDYKDDDDKAWSHPQFEKHHHHHHHHTSGSGEGRGSLLTCGDVEENPGPHMTEYKPTVRLATRDDVPRAVRTLAAAFADYPATRHTVDPDRHIERVTELQELFLTRVGLDIGKVWVADDGAAVAVWTTPESVEAGAVFAEIGPRMAELSGSRLAAQQQMEGLLAPHRPKEPAWFLATVGVSPDHQGKGLGSAVVLPGVEAAERAGVPAFLETSAPRNLPFYERLGFTVTADVEVPEGPRTWCMTRKPGA

SEQ ID NO: 3700 - protein, 544 aa, Artificial Sequence
  Synthetic Polypeptide
MALPVTALLLPLALLLHAARPFEMLQMAGQCSQNEYFDSLLHACIPCQLRCSSNTPPLTCQRYCNASVTNSVKGTNATRGGSGVFTLEDFVGDWRQTAGYNLDQVLEQGGVSSLFQNLGVSVTPIQRIVLSGENGLKIDIHVIIPYEGLSGDQMGQIEKIFKVVYPVDDHHFKVILHYGTLVIDGVTPNMIDYFGRPYEGIAVFDGKKITVTGTLWNGNKIIDERLINPDGSLLFRVTINGVTGWRLCERILALEGGSWSHPQFEKDYKDDDDKGSDYKDDDDKGSDYKDDDDKGSDYKDDDDKAWSHPQFEKHHHHHHHHTSGSGEGRGSLLTCGDVEENPGPHMTEYKPTVRLATRDDVPRAVRTLAAAFADYPATRHTVDPDRHIERVTELQELFLTRVGLDIGKVWVADDGAAVAVWTTPESVEAGAVFAEIGPRMAELSGSRLAAQQQMEGLLAPHRPKEPAWFLATVGVSPDHQGKGLGSAVVLPGVEAAERAGVPAFLETSAPRNLPFYERLGFTVTADVEVPEGPRTWCMTRKPGA

SEQ ID NO: 3701 - protein, 544 aa, Artificial Sequence
  Synthetic Polypeptide
MADKNILYGPEPFYPLEDGTAGEQMFDALSRYAAIPGCIALTNAHTKENVLYEEFLKLSCRLAESFKKYGLKQNDTIAVCSENSLQFFLPVIASLYLGIIVAPVNDKYIERELIHSLGIVKPRIVFCSKNTFQKVLNVKSKLKSIETIIILDLNEDLGGYQCLNNFISQNSDSNLDVKKFKPYSFNRDDQVASIMFSSGTTGLPKGVMLTHKNIVARFSIAKDPTFGNAINPTSAILTVIPFHHGFGMMTTLGYFTCGFRVVLMHTFEEKLFLQSLQDYKVESTLLVPTLMAFLAKSALVEKYDLSHLKEIASGGAPLSKEIGEMVKKRFKLNFVRQGYGLTETTSAVLITPKGDAKPGSTGKIVPLHAVKVVDPTTGKILGPNEPGELYFKGPMIMKGYYNNEEATKAIIDNDGWLRSGDIAYYDNDGHFYIVDRLKSLIKYKGYQVAPAEIEGILLQHPYIVDAGVTGIPDEAAGELPAAGVVVQTGKYLNEQIVQDYVASQVSTAKWLRGGVKFLDEIPKGSTGKIDRKVLRQMLEKHTNG

SEQ ID NO: 3702 - protein, 199 aa, Artificial Sequence
  Synthetic Polypeptide
MTEYKPTVRLATRDDVPRAVRTLAAAFADYPATRHTVDPDRHIERVTELQELFLTRVGLDIGKVWVADDGAAVAVWTTPESVEAGAVFAEIGPRMAELSGSRLAAQQQMEGLLAPHRPKEPAWFLATVGVSPDHQGKGLGSAVVLPGVEAAERAGVPAFLETSAPRNLPFYERLGFTVTADVEVPEGPRTWCMTRKPGA

SEQ ID NO: 3703 - protein, 132 aa, Artificial Sequence
  Synthetic Polypeptide
MAKPLSQEESTLIERATATINSIPISEDYSVASAALSSDGRIFTGVNVYHFTGGPCAELVVLGTAAAAAAGNLTCIVAIGNENRGILSPCGRCRQVLLDLHPGIKAIVKDSDGQPTAVGIRELLPSGYVWEG

SEQ ID NO: 3704 - protein, 172 aa, Artificial Sequence
  Synthetic Polypeptide
MGNEASYPLEMCSHFDADEIKRLGKRFKKLDLDNSGSLSVEEFMSLPELQQNPLVQRVIDIFDTDGNGEVDFKEFIEGVSQFSVKGDKEQKLRFAFRIYDMDKDGYISNGELFQVLKMMVGNNTKLADTQLQQIVDKTIINADKDGDGRISFEEFCAVVGGLDIHKKMVVDV

SEQ ID NO: 3705 - protein, 357 aa, Artificial Sequence
  Synthetic Polypeptide
MLLLVTSLLLCELPHPAFLLIPRKVCNGIGIGEFKDSLSINATNIKHFKNCTSISGDLHILPVAFRGDSFTHTPPLDPQELDILKTVKEITGFLLIQAWPENRTDLHAFENLEIIRGRTKQHGQFSLAVVSLNITSLGLRSLKEISDGDVIISGNKNLCYANTINWKKLFGTSGQKTKIISNRGENSCKATGQVCHALCSPEGCWGPEPRDCVSCRNVSRGRECVDKCNLLEGEPREFVENSECIQCHPECLPQAMNITCTGRGPDNCIQCAHYIDGPHCVKTCPAGVMGENNTLVWKYADAGHVCHLCHPNCTYGCTGPGLEGCPTNGPKIPSIATGMVGALLLLLVVALGIGLFM

SEQ ID NO: 3706 - protein, 424 aa, Artificial Sequence
  Synthetic Polypeptide
MRPSGTAGAAFLALLAALCPASRALEEKKGNYVVTDHGSCVRACGADSYEMEEDGVRKCKKCEGPCRKVCNGIGIGEFKDSLSINATNIKHFKNCTSISGDLHILPVAFRGDSFTHTPPLDPQELDILKTVKEITGFLLIQAWPENRTDLHAFENLEIIRGRTKQHGQFSLAVVSLNITSLGLRSLKEISDGDVIISGNKNLCYANTINWKKLFGTSGQKTKIISNRGENSCKATGQVCHALCSPEGCWGPEPRDCVSCRNVSRGRECVDKCNLLEGEPREFVENSECIQCHPECLPQAMNITCTGRGPDNCIQCAHYIDGPHCVKTCPAGVMGENNTLVWKYADAGHVCHLCHPNCTYGCTGPGLEGCPTNGPKIPSIATGMVGALLLLLVVALGIGLFMRRRHIVRKRTLRRLLQERELVEP

SEQ ID NO: 3707 - protein, 333 aa, Artificial Sequence
  Synthetic Polypeptide
MPPPRLLFFLLFLTPMEVRPEEPLVVKVEEGDNAVLQCLKGTSDGPTQQLTWSRESPLKPFLKLSLGLPGLGIHMRPLAIWLFIFNVSQQMGGFYLCQPGPPSEKAWQPGWTVNVEGSGELFRWNVSDLGGLGCGLKNRSSEGPSSPSGKLMSPKLYVWAKDRPEIWEGEPPCLPPRDSLNQSLSQDLTMAPGSTLWLSCGVPPDSVSRGPLSWTHVHPKGPKSLLSLELKDDRPARDMWVMETGLLLPRATAQDAGKYYCHRGNLTMSFHLEITARPVLWHWLLRTGGWKVSAVTLAYLIFCLCSLVGILHLQRALVLRRKRKRMTDPTRRF

SEQ ID NO: 3708 - protein, 105 aa, Artificial Sequence
  Synthetic Polypeptide
MALPVTALLLPLALLLHAARPFEMLQMAGQCSQNEYFDSLLHACIPCQLRCSSNTPPLTCQRYCNASVTNSVKGTNAILWTCLGLSLIISLAVFVLMFLLRKINS

SEQ ID NO: 3709 - protein, 188 aa, Artificial Sequence
  Synthetic Polypeptide
MATYEVLCEVARKLGTDDREVVLFLLNVFIPQPTLAQLIGALRALKEEGRLTFPLLAECLFRAGRRDLLRDLLHLDPRFLERHLAGTMSYFSPYQLTVLHVDGELCARDIRSLIFLSKDTIGSRSTPQTFLHWVYCMENLDLLGPTDVDALMSMLRSLSRVDLQRQVQTLMGLHLSGPSHSQHYRHTP

SEQ ID NO: 3710 - protein, 241 aa, Artificial Sequence
  Synthetic Polypeptide
MSDSKEVPSLPFLRHLLEELDSHEDSLLLFLCHDAAPGCTTVTQALCSLSQQRKLTLAALVEMLYVLQRMDLLKSRFGLSKEGAEQLLGTSFLTRYRKLMVCVGEELDSSELRALRLFACNLNPSLSTALSESSRFVELVLALENVGLVSPSSVSVLADMLRTLRRLDLCQQLVEYEQQEQARYRYCYAASPSLPVRTLRRGHGASEHEQLCMPVQESSDSPELLRTPVQESSSDSPEQTT

SEQ ID NO: 3711 - protein, 188 aa, Artificial Sequence; identical to SEQ ID NO: 3709
  Synthetic Polypeptide

SEQ ID NO: 3712 - protein, 400 aa, Artificial Sequence
  Synthetic Polypeptide
MLEGVQVETISPGDGRTFPKRGQTCVVHYTGMLEDGKKVDSSRDRNKPFKFMLGKQEVIRGWEEGVAQMSVGQRAKLTISPDYAYGATGHPGIIPPHATLVFDVELLKLESGGGSGVDGFGDVGALESLRGNADLAYILSMEPCGHCLIINNVNFCRESGLRTRTGSNIDCEKLRRRFSSLHFMVEVKGDLTAKKMVLALLELAQQDHGALDCCVVVILSHGCQASHLQFPGAVYGTDGCPVSVEKIVNIFNGTSCPSLGGKPKLFFIQACGGEQKDHGFEVASTSPEDESPGSNPEPDATPFQEGLRTFDQLDAISSLPTPSDIFVSYSTFPGFVSWRDPKSGSWYVETLDDIFEQWAHSEDLQSLLLRVANAVSVKGIYKQMPGCFNFLRKKLFFKTS

SEQ ID NO: 3713 - protein, 270 aa, Artificial Sequence
  Synthetic Polypeptide
MDWIWRILFLVGAATGAHSEVQLVESGGGLVQPGGSLRLSCAASGSVFKINVMAWYRQAPGKGRELVAGIISGGSTSYADSVKGRFTISRDNAKNTLYLQMNSLRPEDTAVYYCAFITTESDYDLGRRYWGQGTLVTVSSGGGGSGGGGSGGGGSEVQLVESGGGLVQPGNSLRLSCAASGFTFSSFGMSWVRQAPGKGLEWVSSISGSGSDTLYADSVKGRFTISRDNAKTTLYLQMNSLRPEDTAVYYCTIGGSLSRSSQGTLVTVSS

SEQ ID NO: 3714 - protein, 246 aa, Artificial Sequence
  Synthetic Polypeptide
MALPVTALLLPLALLLHAARPEIVLTQSPATLSLSPGERATLSCRASQSVSSYLAWYQQKPGQAPRLLIYDASNRATGIPARFSGSGSGTDFTLTIEDFAVYYCQQSTFGQGTKVEIKGGGGSGGGGSGGGGSQVYLVESGGGVVQPGRSLRLSCAASGFTFSNYGMHWVRQAPGKGLEWVALIWYDGSNKYYADSVKGRFTISRDNSKNTLYLQMTSLRVEDTAVYYCASNVDHWGQGTLVTVSS

SEQ ID NO: 3715 - protein, 253 aa, Artificial Sequence
  Synthetic Polypeptide
MALPVTALLLPLALLLHAARPEIVLTQSPATLSLSPGERATLSCRASQSVSSYLAWYQQKPGQAPRLLIYDASNRATGIPARFSGSGSGTDFTLTISSLEPEDFAVYYCQQSSNWPRTFGQGTKVEIKGGGGSGGGGSGGGGSQVQLVESGGGWQPGRSLRLDCKASGITFSNSGMHWVRQAPGKGLEWVAVIYDGSKRYYADSVKGRFISRDNSKNTLFLQMNSLRAEDTAVYYCATNDDYWGQGTLVTVSS

SEQ ID NO: 3716 - protein, 263 aa, Artificial Sequence
  Synthetic Polypeptide
MALPVTALLLPLALLLHAARPEIVLTQSPGTLSLSPGERATLSCRASQSVGSSYLAWYQQKPGQAPRLLIYGAFSRATGIPDRFSGSGSGTDFTLTISRLEPEDFAVYYCQQYGSSPWTFGQGTKVEIKRGGGGSGGGGSGGGGSQVQLVESGGGVVQPGRSLRLSCAASGFTFSSYTMHWVRQAPGKGLEWVTFISYDGNNKYYADSVKGRFTISRDNSKNTLYLQMNSLRAEDTAIYYCARTGWLGPFDYWGQGTLVTVSS

SEQ ID NO: 3717 - protein, 376 aa, Artificial Sequence
  Synthetic Polypeptide
MALPVTALLLPLALLLHAARPEIVLTQSPATLSLSPGERATLSCRASQSVSSYLAWYQQKPGQAPRLLIYDASNRATGIPARFSGSGSGTDFTLTIEDFAVYYCQQSTFGQGTKVEIKGGGGSGGGGSGGGGSQVYLVESGGGVVQPGRSLRLSCAASGFTFSNYGMHWVRQAPGKGLEWVALIWYDGSNKYYADSVKGRFTISRDNSKNTLYLQMTSLRVEDTAVYYCASNVDHWGQGTLVTVSSGGGGSGGGGSGGGGSEVQLVESGGGLVQPGNSLRLSCAASGFTFSSFGMSWVRQAPGKGLEWVSSISGSGSDTLYADSVKGRFTISRDNAKTTLYLQMNSLRPEDTAVYYCTIGGSLSRSSQGTLVTVSS

SEQ ID NO: 3718 - protein, 383 aa, Artificial Sequence
  Synthetic Polypeptide
MALPVTALLLPLALLLHAARPEIVLTQSPATLSLSPGERATLSCRASQSVSSYLAWYQQKPGQAPRLLIYDASNRATGIPARFSGSGSGTDFTLTISSLEPEDFAVYYCQQSSNWPRTFGQGTKVEIKGGGGSGGGGSGGGGSQVQLVESGGGWQPGRSLRLDCKASGITFSNSGMHWVRQAPGKGLEWVAVIYDGSKRYYADSVKGRFISRDNSKNTLFLQMNSLRAEDTAVYYCATNDDYWGQGTLVTVSSGGGGSGGGGSGGGGSEVQLVESGGGLVQPGNSLRLSCAASGFTFSSFGMSWVRQAPGKGLEWVSSISGSGSDTLYADSVKGRFTISRDNAKTTLYLQMNSLRPEDTAVYYCTIGGSLSRSSQGTLVTVSS

SEQ ID NO: 3719 - protein, 393 aa, Artificial Sequence
  Synthetic Polypeptide
MALPVTALLLPLALLLHAARPEIVLTQSPGTLSLSPGERATLSCRASQSVGSSYLAWYQQKPGQAPRLLIYGAFSRATGIPDRFSGSGSGTDFTLTISRLEPEDFAVYYCQQYGSSPWTFGQGTKVEIKRGGGGSGGGGSGGGGSQVQLVESGGGVVQPGRSLRLSCAASGFTFSSYTMHWVRQAPGKGLEWVTFISYDGNNKYYADSVKGRFTISRDNSKNTLYLQMNSLRAEDTAIYYCARTGWLGPFDYWGQGTLVTVSSGGGGSGGGGSGGGGSEVQLVESGGGLVQPGNSLRLSCAASGFTFSSFGMSWVRQAPGKGLEWVSSISGSGSDTLYADSVKGRFTISRDNAKTTLYLQMNSLRPEDTAVYYCTIGGSLSRSSQGTLVTVSS

SEQ ID NO: 3720 - protein, 259 aa, Artificial Sequence
  Synthetic Polypeptide
MDWIWRILFLVGAATGAHSEIVLTQSPATLSLSPGERATLSCSASISVSYMYWYQQKPGQAPRLLIYDMSNLASGIPARFSGSGSGTDFTLTISSLEPEDFAVYYCMQWSGYPYTFGGGTKVEIKGGGGSGGGGSGGGGSEVQLVESGGGLVQPGGSLRLSCAASGFTFSPFAMSWVRQAPGKGLEWVAKISPGGSWTYYSDTVTGRFTISRDNAKNSLYLQMNSLRAEDTAVYYCARQLWGYYALDIWGQGTTVTVSS

SEQ ID NO: 3721 - protein, 47 aa, Artificial Sequence
  Synthetic Polypeptide
MDWIWRILFLVGAATGAHSGHRPLDKKREEAPSLRPAPPPISGGGYR

SEQ ID NO: 3722 - protein, 301 aa, Artificial Sequence
  Synthetic Polypeptide
MTRGVQVETISPGDGRTFPKRGQTCVVHYTGMLEDGKKVDSSRDRNKPFKFMLGKQEVIRGWEEGVAQMSVGQRAKLTISPDYAYGATGHPGIIPPHATLVFDVELLKLEGIHMATYEVLCEVARKLGTDDREVVLFLLNVFIPQPTLAQLIGALRALKEEGRLTFPLLAECLFRAGRRDLLRDLLHLDPRFLERHLAGTMSYFSPYQLTVLHVDGELCARDIRSLIFLSKDTIGSRSTPQTFLHWVYCMENLDLLGPTDVDALMSMLRSLSRVDLQRQVQTLMGLHLSGPSHSQHYRHTP

SEQ ID NO: 3723 - protein, 408 aa, Artificial Sequence
  Synthetic Polypeptide
MGVQVETISPGDGRTFPKRGQTCVVHYTGMLEDGKKVDSSRDRNKPFKFMLGKQEVIRGWEEGVAQMSVGQRAKLTISPDYAYGATGHPGIIPPHATLVFDVELLKLGTRGVQVETISPGDGRTFPKRGQTCVVHYTGMLEDGKKVDSSRDRNKPFKFMLGKQEVIRGWEEGVAQMSVGQRAKLTISPDYAYGATGHPGIIPPHATLVFDVELLKLEGIHMATYEVLCEVARKLGTDDREVVLFLLNVFIPQPTLAQLIGALRALKEEGRLTFPLLAECLFRAGRRDLLRDLLHLDPRFLERHLAGTMSYFSPYQLTVLHVDGELCARDIRSLIFLSKDTIGSRSTPQTFLHWVYCMENLDLLGPTDVDALMSMLRSLSRVDLQRQVQTLMGLHLSGPSHSQHYRHTP

SEQ ID NO: 3724 - protein, 395 aa, Artificial Sequence
  Synthetic Polypeptide
MYRMQLLSCIALSLALVTNSAPTSSSTKKTQLQLEHLLLDLQMILNGINNYKNPKLTRMLTFKFYMPKKATELKHLQCLEEELKPLEEVLNLAQSKNFHLRPRDLISNINVIVLELKGSETTFMCEYADETATIVEFLNRWITFCQSIISTLTTRGGGSSRKIEVMYPPPYLDNEKSNGTIIHVKGKHLCPSPLFPGPSKPFWVLVVVGGVLACYSLLVTVAFIIFWVRSKRSSSRAKRSGSGATNFSLLKQAGDVEENPGPHMAKPLSQEESTLIERATATINSIPISEDYSVASAALSSDGRIFTGVNVYHFTGGPCAELVVLGTAAAAAAGNLTCIVAIGNENRGILSPCGRCRQVLLDLHPGIKAIVKDSDGQPTAVGIRELLPSGYVWEG

SEQ ID NO: 3725 - protein, 787 aa, Artificial Sequence
  Synthetic Polypeptide
MQSGTHWRVLGLCLLSVGVWGQDGNEEMGGITQTPYKVSISGTTVILTCPQYPGSEILWQHNDKNIGGDEDDKNIGSDEDHLSLKEFSELEQSGYYVCYPRGSKPEDANFYLYLRARVCENCMEMDVMSVATIVIVDICITGGLLLLVYYWSKNRKAKAKPVTRGAGAGGRQRGQNKERPPPVPNPDYEPIRKGQRDLYSGLNQRRILERAKRSGSGATNFSLLKQAGDVEENPGPTSMEQGKGLAVLILAIILLQGTLAQSIKGNHLVKVYDYQEDGSVLLTCDAEAKNITWFKDGKMIGFLTEDKKKWNLGSNAKDPRGMYQCKGSQNKSKPLQVYYRMCQNCIELNAATISGFLFAEIVSIFVLAVGVYFIAGQDGVRQSRASDKQTLLPNDQLYQPLKDREDDQYSHLQGNQLRRNRAKRSGSGVKQTLNFDLLKLAGDVESNPGPFEMEHSTFLSGLVLATLLSQVSPFKIPIEELEDRVFVNCNTSITWVEGTVGTLLSDITRLDLGKRILDPRGIYRCNGTDIYKDKESTVQVHYRMCQSCVELDPATVAGIIVTDVIATLLLALGVFCFAGHETGRLSGAADTQALLRNDQVYQPLRDRDDAQYSHLGGNWARNKRAKRSGSGQCTNYALLKLAGDVESNPGPSRGHMAKPLSQEESTLIERATATINSIPISEDYSVASAALSSDGRIFTGVNVYHFTGGPCAELVVLGTAAAAAAGNLTCIVAIGNENRGILSPCGRCRQVLLDLHPGIKAIVKDSDGQPTAVGIRELLPSGYVWEG

SEQ ID NO: 3726 - protein, 979 aa, Artificial Sequence
  Synthetic Polypeptide
MQSGTHWRVLGLCLLSVGVWGQDGNEEMGGITQTPYKVSISGTTVILTCPQYPGSEILWQHNDKNIGGDEDDKNIGSDEDHLSLKEFSELEQSGYYVCYPRGSKPEDANFYLYLRARVCENCMEMDVMSVATIVIVDICITGGLLLLVYYWSKNRKAKAKPVTRGAGAGGRQRGQNKERPPPVPNPDYEPIRKGQRDLYSGLNQRRILERAKRSGSGATNFSLLKQAGDVEENPGPTSMEQGKGLAVLILAIILLQGTLAQSIKGNHLVKVYDYQEDGSVLLTCDAEAKNITWFKDGKMIGFLTEDKKKWNLGSNAKDPRGMYQCKGSQNKSKPLQVYYRMCQNCIELNAATISGFLFAEIVSIFVLAVGVYFIAGQDGVRQSRASDKQTLLPNDQLYQPLKDREDDQYSHLQGNQLRRNRAKRSGSGVKQTLNFDLLKLAGDVESNPGPFEMEHSTFLSGLVLATLLSQVSPFKIPIEELEDRVFVNCNTSITWVEGTVGTLLSDITRLDLGKRILDPRGIYRCNGTDIYKDKESTVQVHYRMCQSCVELDPATVAGIIVTDVIATLLLALGVFCFAGHETGRLSGAADTQALLRNDQVYQPLRDRDDAQYSHLGGNWARNKRAKRSGSGQCTNYALLKLAGDVESNPGPSRMKWKALFTAAILQAQLPITEAQSFGLLDPKLCYLLDGILFIYGVILTALFLRVKFSRSADAPAYQQGQNQLYNELNLGRREEYDVLDKRRGRDPEMGGKPQRRKNPQEGLYNELQKDKMAEAYSEIGMKGERRRGKGHDGLYQGLSTATKDTYDALHMQALPPRHMRAKRSGSGEGRGSLLTCGDVEENPGPGTMAKPLSQEESTLIERATATINSIPISEDYSVASAALSSDGRIFTGVNVYHFTGGPCAELVVLGTAAAAAAGNLTCIVAIGNENRGILSPCGRCRQVLLDLHPGIKAIVKDSDGQPTAVGIRELLPSGYVWEG

SEQ ID NO: 3727 - protein, 15 aa, Artificial Sequence
  Synthetic Polypeptide
GGGGGGGGGGGGGGG

SEQ ID NO: 3728 - protein, 15 aa, Artificial Sequence
  Synthetic Polypeptide
GGGGGGGGGGGGGGG

SEQ ID NO: 3729 - protein, 15 aa, Artificial Sequence
  Synthetic Polypeptide
GGGGGGGGGGGGGGG

SEQ ID NO: 3730 - protein, 15 aa, Artificial Sequence
  Synthetic Polypeptide
GGGGGGGGGGGGGGG

SEQ ID NO: 3731 - protein, 15 aa, Artificial Sequence
  Synthetic Polypeptide
GGGGGGGGGGGGGGG

SEQ ID NO: 3732 - protein, 15 aa, Artificial Sequence
  Synthetic Polypeptide
GGGGGGGGGGGGGGG

SEQ ID NO: 3733 - protein, 15 aa, Artificial Sequence
  Synthetic Polypeptide
GGGGGGGGGGGGGGG

SEQ ID NO: 3734 - protein, 15 aa, Artificial Sequence
  Synthetic Polypeptide
GGGGGGGGGGGGGGG

SEQ ID NO: 3735 - protein, 15 aa, Artificial Sequence
  Synthetic Polypeptide
GGGGGGGGGGGGGGG

SEQ ID NO: 3736 - protein, 15 aa, Artificial Sequence
  Synthetic Polypeptide
GGGGGGGGGGGGGGG

SEQ ID NO: 3737 - protein, 15 aa, Artificial Sequence
  Synthetic Polypeptide
GGGGGGGGGGGGGGG

SEQ ID NO: 3738 - protein, 15 aa, Artificial Sequence
  Synthetic Polypeptide
GGGGGGGGGGGGGGG

SEQ ID NO: 3739 - protein, 15 aa, Artificial Sequence
  Synthetic Polypeptide
GGGGGGGGGGGGGGG

SEQ ID NO: 3740 - protein, 15 aa, Artificial Sequence
  Synthetic Polypeptide
GGGGGGGGGGGGGGG

SEQ ID NO: 3741 - protein, 15 aa, Artificial Sequence
  Synthetic Polypeptide
GGGGGGGGGGGGGGG

SEQ ID NO: 3742 - protein, 15 aa, Artificial Sequence
  Synthetic Polypeptide
GGGGGGGGGGGGGGG

SEQ ID NO: 3743 - protein, 74 aa, Artificial Sequence
  Synthetic Polypeptide
TTPGERSSLPAFYPGTSGSCSGCGSLSLPLLAGLVAADAVASLLIVGAVFLCARPRRSPAQEDGKVYINMPGRG

SEQ ID NO: 3744 - protein, 74 aa, Artificial Sequence; identical to SEQ ID NO: 3743
  Synthetic Polypeptide

SEQ ID NO: 3745 - protein, 30 aa, Artificial Sequence; identical to SEQ ID NO: 3482
  Synthetic Polypeptide

SEQ ID NO: 3746 - protein, 30 aa, Artificial Sequence; identical to SEQ ID NO: 3482
  Synthetic Polypeptide

SEQ ID NO: 3747 - protein, 30 aa, Artificial Sequence
  Synthetic Polypeptide
QSFGLLDPKLSYLLDGILFIYGVILTALFL

SEQ ID NO: 3748 - protein, 30 aa, Artificial Sequence; identical to SEQ ID NO: 3747
  Synthetic Polypeptide

SEQ ID NO: 3749 - protein, 36 aa, Artificial Sequence
  Synthetic Polypeptide
RDQRLPPDAHKPPGGGSFRTPIQEEQADAHSTLAKI

SEQ ID NO: 3750 - protein, 36 aa, Artificial Sequence; identical to SEQ ID NO: 3749
  Synthetic Polypeptide

SEQ ID NO: 3751 - protein, 66 aa, Artificial Sequence
  Synthetic Polypeptide
QSFGLLDPKLCYLLDGILFIYGVILTALFLRDQRLPPDAHKPPGGGSFRTPIQEEQADAHSTLAKI

SEQ ID NO: 3752 - protein, 66 aa, Artificial Sequence; identical to SEQ ID NO: 3751
  Synthetic Polypeptide

SEQ ID NO: 3753 - protein, 66 aa, Artificial Sequence
  Synthetic Polypeptide
QSFGLLDPKLSYLLDGILFIYGVILTALFLRDQRLPPDAHKPPGGGSFRTPIQEEQADAHSTLAKI

SEQ ID NO: 3754 - protein, 66 aa, Artificial Sequence; identical to SEQ ID NO: 3753
  Synthetic Polypeptide

SEQ ID NO: 3755 - protein, 115 aa, Artificial Sequence
  Synthetic Polypeptide
MGGLEPCSRLLLLPLLLAVSGLRPVQAGSQAQSDCSCSTVSPGVLAGIVMGDLVLTVLIALAVYFLGRLVPRGRGAAEAATRKQRITETESPYQELQGQRSDVYSDLNTQRPYYK

SEQ ID NO: 3756 - protein, 86 aa, Artificial Sequence
  Synthetic Polypeptide
QAQSDCSCSTVSPGVLAGIVMGDLVLTVLIALAVYFLGRLVPRGRGAAEAATRKQRITETESPYQELQGQRSDVYSDLNTQRPYYK

SEQ ID NO: 3757 - protein, 115 aa, Artificial Sequence
  Synthetic Polypeptide
MGGLEPCSRLLLLPLLLAVSGLRPVQAGTQAQSDCSCSTVSPGVLAGIVMGDLVLTVLIALAVYFLGRLVPRGRGAAEAATRKQRITETESPYQELQGQRSDVYSDLNTQRPYYK

SEQ ID NO: 3758 - protein, 86 aa, Artificial Sequence; identical to SEQ ID NO: 3756
  Synthetic Polypeptide

SEQ ID NO: 3759 - protein, 115 aa, Artificial Sequence
  Synthetic Polypeptide
MGGLEPCSRLLLLPLLLAVSGLRPVQAGSQAQSDCSSSTVSPGVLAGIVMGDLVLTVLIALAVYFLGRLVPRGRGAAEAATRKQRITETESPYQELQGQRSDVYSDLNTQRPYYK

SEQ ID NO: 3760 - protein, 86 aa, Artificial Sequence
  Synthetic Polypeptide
QAQSDCSSSTVSPGVLAGIVMGDLVLTVLIALAVYFLGRLVPRGRGAAEAATRKQRITETESPYQELQGQRSDVYSDLNTQRPYYK

SEQ ID NO: 3761 - protein, 115 aa, Artificial Sequence
  Synthetic Polypeptide
MGGLEPCSRLLLLPLLLAVSGLRPVQAGTQAQSDCSSSTVSPGVLAGIVMGDLVLTVLIALAVYFLGRLVPRGRGAAEAATRKQRITETESPYQELQGQRSDVYSDLNTQRPYYK

SEQ ID NO: 3762 - protein, 86 aa, Artificial Sequence; identical to SEQ ID NO: 3760
  Synthetic Polypeptide

SEQ ID NO: 3763 - protein, 183 aa, Artificial Sequence
  Synthetic Polypeptide
LWVSQPPEIRTLEGSSAFLPCSFNASQGRLAIGSVTWFRDEVVPGKEVRNGTPEFRGRLAPLASSRFLHDHQAELHIRDVRGHDASIYVCRVEVLGLGVGTGNGTRLVVEKEHPQLGAGTVLLLRAGFYAVSFLSVAVGSTVYYQGKCLTWKGPRRQLPAVVPAPLPPPCGSSAHLLPPVPGG

SEQ ID NO: 3764 - protein, 76 aa, Artificial Sequence
  Synthetic Polypeptide
VVEKEHPQLGAGTVLLLRAGFYAVSFLSVAVGSTVYYQGKCLTWKGPRRQLPAVVPAPLPPPCGSSAHLLPPVPGG

SEQ ID NO: 3765 - protein, 108 aa, Artificial Sequence
  Synthetic Polypeptide
LWVSQPPEIRTLEGSSAFLPCSFNASQGRLAIGSVTWFRDEVVPGKEVRNGTPEFRGRLAPLASSRFLHDHQAELHIRDVRGHDASIYVCRVEVLGLGVGTGNGTRLV

SEQ ID NO: 3766 - protein, 9 aa, Artificial Sequence
  Synthetic Polypeptide
VEKEHPQLG

SEQ ID NO: 3767 - protein, 21 aa, Artificial Sequence
  Synthetic Polypeptide
AGTVLLLRAGFYAVSFLSVAV

SEQ ID NO: 3768 - protein, 44 aa, Artificial Sequence
  Synthetic Polypeptide
GQHRVLSGQVPDLEGTKATACCGACSFASSMWKLCPSAATCSRR

SEQ ID NO: 3769 - protein, 183 aa, Artificial Sequence; identical to SEQ ID NO: 3763
  Synthetic Polypeptide

SEQ ID NO: 3770 - protein, 75 aa, Artificial Sequence
  Synthetic Polypeptide
VEKEHPQLGAGTVLLLRAGFYAVSFLSVAVGSTVYYQGKCLTWKGPRRQLPAVVPAPLPPPCGSSAHLLPPVPGG

SEQ ID NO: 3771 - protein, 108 aa, Artificial Sequence; identical to SEQ ID NO: 3765
  Synthetic Polypeptide

SEQ ID NO: 3772 - protein, 9 aa, Artificial Sequence
  Synthetic Polypeptide
VEKEHPQLG

SEQ ID NO: 3773 - protein, 21 aa, Artificial Sequence
  Synthetic Polypeptide
AGTVLLLRAGFYAVSFLSVAV

SEQ ID NO: 3774 - protein, 45 aa, Artificial Sequence
  Synthetic Polypeptide
GSTVYYQGKCLTWKGPRRQLPAVVPAPLPPPCGSSAHLLPPVPGG

SEQ ID NO: 3775 - protein, 286 aa, Artificial Sequence
  Synthetic Polypeptide
MAWRALHPLLLLLLLFPGSQAGTSGEFGSLEQSKAQVLQSVAGQTLTVRCQYPPTGSLYEKKGWCKEASALVCIRLVTSSKPRTMAWTSRFTIWDDPDAGFFTVTMTDLREEDSGHYWCRIYRPSDNSVSKSVRFYLVVSPASASTQTSWTPRDLVSSQTQTQSCVPPTAGARQAPESPSTIPVPSQPQNSTLRPGPAAPIALVPVFCGLLVAKSLVLSALLVWWGDIWWKTMMELRSLDTQKATCHLQQVTDLPWTSVSSPVEREILYHTVARTKISDDDDEHTL

SEQ ID NO: 3776 - protein, 255 aa, Artificial Sequence
  Synthetic Polypeptide
QSKAQVLQSVAGQTLTVRCQYPPTGSLYEKKGWCKEASALVCIRLVTSSKPRTMAWTSRFTIWDDPDAGFFTVTMTDLREEDSGHYWCRIYRPSDNSVSKSVRFYLVVSPASASTQTSWTPRDLVSSQTQTQSCVPPTAGARQAPESPSTIPVPSQPQNSTLRPGPAAPIALVPVFCGLLVAKSLVLSALLVWWGDIWWKTMMELRSLDTQKATCHLQQVTDLPWTSVSSPVEREILYHTVARTKISDDDDEHTL

SEQ ID NO: 3777 - protein, 156 aa, Artificial Sequence
  Synthetic Polypeptide
KSVRFYLVVSPASASTQTSWTPRDLVSSQTQTQSCVPPTAGARQAPESPSTIPVPSQPQNSTLRPGPAAPIALVPVFCGLLVAKSLVLSALLVWWGDIWWKTMMELRSLDTQKATCHLQQVTDLPWTSVSSPVEREILYHTVARTKISDDDDEHTL

SEQ ID NO: 3778 - protein, 99 aa, Artificial Sequence
  Synthetic Polypeptide
QSKAQVLQSVAGQTLTVRCQYPPTGSLYEKKGWCKEASALVCIRLVTSSKPRTMAWTSRFTIWDDPDAGFFTVTMTDLREEDSGHYWCRIYRPSDNSVS

SEQ ID NO: 3779 - protein, 72 aa, Artificial Sequence
  Synthetic Polypeptide
KSVRFYLVVSPASASTQTSWTPRDLVSSQTQTQSCVPPTAGARQAPESPSTIPVPSQPQNSTLRPGPAAPIA

SEQ ID NO: 3780 - protein, 21 aa, Artificial Sequence
  Synthetic Polypeptide
LVPVFCGLLVAKSLVLSALLV

SEQ ID NO: 3781 - protein, 63 aa, Artificial Sequence
  Synthetic Polypeptide
WWGDIWWKTMMELRSLDTQKATCHLQQVTDLPWTSVSSPVEREILYHTVARTKISDDDDEHTL

SEQ ID NO: 3782 - protein, 285 aa, Artificial Sequence
  Synthetic Polypeptide
MAWRALHPLLLLLLLFPGSQAGSSFEGSTRQSKAQVLQSVAGQTLTVRCQYPPTGSLYEKKGWCKEASALVCIRLVTSSKPRTMAWTSRFTIWDDPDAGFFTVTMTDLREEDSGHYWCRIYRPSDNSVSKSVRFYLVVSPASASTQTSWTPRDLVSSQTQTQSCVPPTAGARQAPESPSTIPVPSQPQNSTLRPGPAAPIALVPVFCGLLVAKSLVLSALLVWWGDIWWKTMMELRSLDTQKATCHLQQVTDLPWTSVSSPVEREILYHTVARTKISDDDDEHTL

SEQ ID NO: 3783 - protein, 255 aa, Artificial Sequence; identical to SEQ ID NO: 3776
  Synthetic Polypeptide

SEQ ID NO: 3784 - protein, 156 aa, Artificial Sequence; identical to SEQ ID NO: 3777
  Synthetic Polypeptide

SEQ ID NO: 3785 - protein, 99 aa, Artificial Sequence; identical to SEQ ID NO: 3778
  Synthetic Polypeptide

SEQ ID NO: 3786 - protein, 72 aa, Artificial Sequence; identical to SEQ ID NO: 3779
  Synthetic Polypeptide

SEQ ID NO: 3787 - protein, 21 aa, Artificial Sequence
  Synthetic Polypeptide
LVPVFCGLLVAKSLVLSALLV

SEQ ID NO: 3788 - protein, 63 aa, Artificial Sequence; identical to SEQ ID NO: 3781
  Synthetic Polypeptide

SEQ ID NO: 3789 - protein, 283 aa, Artificial Sequence
  Synthetic Polypeptide
QQQTLPKPFIWAEPHFMVPKEKQVTICCQGNYGAVEYQLHFEGSLFAVDRPKPPERINKVQFYIPDMNSRMAGQYSCIYRVGELWSEPSNLLDLVVTEMYDTPTLSVHPGPEVISGEKVTFYCRLDTATSMFLLLKEGRSSHVQRGYGKVQAEFPLGPVTTAHRGTYRCFGSYNNHAWSFPSEPVKLLVTGDIENTSLAPEDPTFPADTWGTYLLTTETGLQKDHALWDHTAQNLLRMGLAFLVLVALVWFLVEDWLSRKRTRERASRASTWEGRRRLNTQTL

SEQ ID NO: 3790 - protein, 186 aa, Artificial Sequence
  Synthetic Polypeptide
EMYDTPTLSVHPGPEVISGEKVTFYCRLDTATSMFLLLKEGRSSHVQRGYGKVQAEFPLGPVTTAHRGTYRCFGSYNNHAWSFPSEPVKLLVTGDIENTSLAPEDPTFPADTWGTYLLTTETGLQKDHALWDHTAQNLLRMGLAFLVLVALVWFLVEDWLSRKRTRERASRASTWEGRRRLNTQTL

SEQ ID NO: 3791 - protein, 176 aa, Artificial Sequence
  Synthetic Polypeptide
HPGPEVISGEKVTFYCRLDTATSMFLLLKEGRSSHVQRGYGKVQAEFPLGPVTTAHRGTYRCFGSYNNHAWSFPSEPVKLLVTGDIENTSLAPEDPTFPADTWGTYLLTTETGLQKDHALWDHTAQNLLRMGLAFLVLVALVWFLVEDWLSRKRTRERASRASTWEGRRRLNTQTL

SEQ ID NO: 3792 - protein, 93 aa, Artificial Sequence
  Synthetic Polypeptide
GDIENTSLAPEDPTFPADTWGTYLLTTETGLQKDHALWDHTAQNLLRMGLAFLVLVALVWFLVEDWLSRKRTRERASRASTWEGRRRLNTQTL

SEQ ID NO: 3793 - protein, 97 aa, Artificial Sequence
  Synthetic Polypeptide
QQQTLPKPFIWAEPHFMVPKEKQVTICCQGNYGAVEYQLHFEGSLFAVDRPKPPERINKVQFYIPDMNSRMAGQYSCIYRVGELWSEPSNLLDLVVT

SEQ ID NO: 3794 - protein, 10 aa, Artificial Sequence
  Synthetic Polypeptide
EMYDTPTLSV

SEQ ID NO: 3795 - protein, 83 aa, Artificial Sequence
  Synthetic Polypeptide
HPGPEVISGEKVTFYCRLDTATSMFLLLKEGRSSHVQRGYGKVQAEFPLGPVTTAHRGTYRCFGSYNNHAWSFPSEPVKLLVT

SEQ ID NO: 3796 - protein, 47 aa, Artificial Sequence
  Synthetic Polypeptide
GDIENTSLAPEDPTFPADTWGTYLLTTETGLQKDHALWDHTAQNLLR

SEQ ID NO: 3797 - protein, 21 aa, Artificial Sequence
  Synthetic Polypeptide
MGLAFLVLVALVWFLVEDWLS

SEQ ID NO: 3798 - protein, 25 aa, Artificial Sequence
  Synthetic Polypeptide
RKRTRERASRASTWEGRRRLNTQTL

SEQ ID NO: 3799 - protein, 283 aa, Artificial Sequence; identical to SEQ ID NO: 3789
  Synthetic Polypeptide

SEQ ID NO: 3800 - protein, 186 aa, Artificial Sequence; identical to SEQ ID NO: 3790
  Synthetic Polypeptide

SEQ ID NO: 3801 - protein, 177 aa, Artificial Sequence
  Synthetic Polypeptide
VHPGPEVISGEKVTFYCRLDTATSMFLLLKEGRSSHVQRGYGKVQAEFPLGPVTTAHRGTYRCFGSYNNHAWSFPSEPVKLLVTGDIENTSLAPEDPTFPADTWGTYLLTTETGLQKDHALWDHTAQNLLRMGLAFLVLVALVWFLVEDWLSRKRTRERASRASTWEGRRRLNTQTL

SEQ ID NO: 3802 - protein, 93 aa, Artificial Sequence; identical to SEQ ID NO: 3792
  Synthetic Polypeptide

SEQ ID NO: 3803 - protein, 97 aa, Artificial Sequence; identical to SEQ ID NO: 3793
  Synthetic Polypeptide

SEQ ID NO: 3804 - protein, 10 aa, Artificial Sequence
  Synthetic Polypeptide
EMYDTPTLSV

SEQ ID NO: 3805 - protein, 83 aa, Artificial Sequence; identical to SEQ ID NO: 3795
  Synthetic Polypeptide

SEQ ID NO: 3806 - protein, 47 aa, Artificial Sequence; identical to SEQ ID NO: 3796
  Synthetic Polypeptide

SEQ ID NO: 3807 - protein, 21 aa, Artificial Sequence
  Synthetic Polypeptide
MGLAFLVLVALVWFLVEDWLS

SEQ ID NO: 3808 - protein, 25 aa, Artificial Sequence
  Synthetic Polypeptide
RKRTRERASRASTWEGRRRLNTQTL

SEQ ID NO: 3809 - protein, 238 aa, Artificial Sequence
  Synthetic Polypeptide
GMRTEDLPKAVVFLEPQWYRVLEKDSVTLKCQGAYSPEDNSTQWFHNESLISSQASSYFIDAATVDDSGEYRCQTNLSTLSDPVQLEVHIGWLLLQAPRWVFKEEDPIHLRCHSWKNTALHKVTYLQNGKGRKYFHHNSDFYIPKATLKDSGSYFCRGLVGSKNVSSETVNITITQGLAVSTISSFFPPGYQVSFCLVMVLLFAVDTGLYFSVKTNIRSSTRDWKDHKFKWRKDPQDK

SEQ ID NO: 3810 - protein, 238 aa, Artificial Sequence; identical to SEQ ID NO: 3809
  Synthetic Polypeptide

SEQ ID NO: 3811 - protein, 238 aa, Artificial Sequence
  Synthetic Polypeptide
GMRTEDLPKAVVFLEPQWYRVLEKDSVTLKCQGAYSPEDNSTQWFHNESLISSQASSYFIDAATVDDSGEYRCQTNLSTLSDPVQLEVHIGWLLLQAPRWVFKEEDPIHLRCHSWKNTALHKVTYLQNGKGRKYFHHNSDFYIPKATLKDSGSYFCRGLVGSKNVSSETVNITITQGLAVPTISSFFPPGYQVSFCLVMVLLFAVDTGLYFSVKTNIRSSTRDWKDHKFKWRKDPQDK

SEQ ID NO: 3812 - protein, 89 aa, Artificial Sequence
  Synthetic Polypeptide
MIPAVVLLLLLLVEQAAALGSLGEPQLCYILDAILFLYGIVLTLLYCRLKIQVRKAAITSYEKSDGVYTGLSTRNQETYETLKHEKPPQ

SEQ ID NO: 3813 - protein, 68 aa, Artificial Sequence
  Synthetic Polypeptide
LGEPQLCYILDAILFLYGIVLTLLYCRLKIQVRKAAITSYEKSDGVYTGLSTRNQETYETLKHEKPPQ

SEQ ID NO: 3814 - protein, 89 aa, Artificial Sequence
  Synthetic Polypeptide
MIPAVVLLLLLLVEQAAALGTLGEPQLCYILDAILFLYGIVLTLLYCRLKIQVRKAAITSYEKSDGVYTGLSTRNQETYETLKHEKPPQ

SEQ ID NO: 3815 - protein, 68 aa, Artificial Sequence; identical to SEQ ID NO: 3813
  Synthetic Polypeptide

SEQ ID NO: 3816 - protein, 89 aa, Artificial Sequence
  Synthetic Polypeptide
MIPAVVLLLLLLVEQAAALGSLGEPQLSYILDAILFLYGIVLTLLYCRLKIQVRKAAITSYEKSDGVYTGLSTRNQETYETLKHEKPPQ

SEQ ID NO: 3817 - protein, 68 aa, Artificial Sequence
  Synthetic Polypeptide
LGEPQLSYILDAILFLYGIVLTLLYCRLKIQVRKAAITSYEKSDGVYTGLSTRNQETYETLKHEKPPQ

SEQ ID NO: 3818 - protein, 89 aa, Artificial Sequence
  Synthetic Polypeptide
MIPAVVLLLLLLVEQAAALGTLGEPQLSYILDAILFLYGIVLTLLYCRLKIQVRKAAITSYEKSDGVYTGLSTRNQETYETLKHEKPPQ

SEQ ID NO: 3819 - protein, 68 aa, Artificial Sequence; identical to SEQ ID NO: 3817
  Synthetic Polypeptide

SEQ ID NO: 3820 - protein, 150 aa, Artificial Sequence
  Synthetic Polypeptide
QSFGLLDPKLSYLLDGILFIYGVILTALFLWRRKRKEKQSETSPKEFLTIYEDVKDLKTRRNHEQEQTFPGGGSTIYSMIQSQSSAPTSQEPAYTLYSLIQPSRKSGSRKRNHSPSFNSTIYEVIGKSQPKAQNPARLSRKELENFDVYS

SEQ ID NO: 3821 - protein, 120 aa, Artificial Sequence
  Synthetic Polypeptide
WRRKRKEKQSETSPKEFLTIYEDVKDLKTRRNHEQEQTFPGGGSTIYSMIQSQSSAPTSQEPAYTLYSLIQPSRKSGSRKRNHSPSFNSTIYEVIGKSQPKAQNPARLSRKELENFDVYS

SEQ ID NO: 3822 - protein, 152 aa, Artificial Sequence
  Synthetic Polypeptide
QSFGLLDPKLSYLLDGILFIYGVILTALFLWRRKRKEKQSETSPKEFLTIYEDVKDLKTRRNHEQEQTFPGGGSTIYSMIQSQSSAPTSQEPAYTLYSLIQPSRKSGSRKRNHSPSFNSTIYEVIGKSQPKAQNPARLSRKELENFDVYSSR

SEQ ID NO: 3823 - protein, 120 aa, Artificial Sequence; identical to SEQ ID NO: 3821
  Synthetic Polypeptide

SEQ ID NO: 3824 - protein, 199 aa, Artificial Sequence
  Synthetic Polypeptide
AKPTTTPAPRPPTPAPTIASQPLSLRPEACRPAAGGAVHTRGLDFACDSNLFVASWIAVMIIFRIGMAVAIFCCFFFPSWRRKRKEKQSETSPKEFLTIYEDVKDLKTRRNHEQEQTFPGGGSTIYSMIQSQSSAPTSQEPAYTLYSLIQPSRKSGSRKRNHSPSFNSTIYEVIGKSQPKAQNPARLSRKELENFDVYS

SEQ ID NO: 3825 - protein, 48 aa, Artificial Sequence
  Synthetic Polypeptide
AKPTTTPAPRPPTPAPTIASQPLSLRPEACRPAAGGAVHTRGLDFACD

SEQ ID NO: 3826 - protein, 31 aa, Artificial Sequence
  Synthetic Polypeptide
SNLFVASWIAVMIIFRIGMAVAIFCCFFFPS

SEQ ID NO: 3827 - protein, 120 aa, Artificial Sequence; identical to SEQ ID NO: 3821
  Synthetic Polypeptide

SEQ ID NO: 3828 - protein, 199 aa, Artificial Sequence; identical to SEQ ID NO: 3824
  Synthetic Polypeptide

SEQ ID NO: 3829 - protein, 48 aa, Artificial Sequence; identical to SEQ ID NO: 3825
  Synthetic Polypeptide

SEQ ID NO: 3830 - protein, 31 aa, Artificial Sequence; identical to SEQ ID NO: 3826
  Synthetic Polypeptide

SEQ ID NO: 3831 - protein, 120 aa, Artificial Sequence; identical to SEQ ID NO: 3821
  Synthetic Polypeptide

SEQ ID NO: 3832 - protein, 199 aa, Artificial Sequence
  Synthetic Polypeptide
AKPTTTPAPRPPTPAPTIASQPLSLRPEAARPAAGGAVHTRGLDFACDSNLFVASWIAVMIIFRIGMAVAIFCCFFFPSWRRKRKEKQSETSPKEFLTIYEDVKDLKTRRNHEQEQTFPGGGSTIYSMIQSQSSAPTSQEPAYTLYSLIQPSRKSGSRKRNHSPSFNSTIYEVIGKSQPKAQNPARLSRKELENFDVYS

SEQ ID NO: 3833 - protein, 48 aa, Artificial Sequence
  Synthetic Polypeptide
AKPTTTPAPRPPTPAPTIASQPLSLRPEAARPAAGGAVHTRGLDFACD

SEQ ID NO: 3834 - protein, 199 aa, Artificial Sequence; identical to SEQ ID NO: 3832
  Synthetic Polypeptide

SEQ ID NO: 3835 - protein, 48 aa, Artificial Sequence; identical to SEQ ID NO: 3833
  Synthetic Polypeptide

SEQ ID NO: 3836 - protein, 89 aa, Artificial Sequence
  Synthetic Polypeptide
GMRTEDLPKAVVFLEPQWYRVLEKDSVTLKCQGAYSPEDNSTQWFHNESLISSQASSYFIDAATVDDSGEYRCQTNLSTLSDPVQLEVH

SEQ ID NO: 3837 - protein, 84 aa, Artificial Sequence
  Synthetic Polypeptide
IGWLLLQAPRWVFKEEDPIHLRCHSWKNTALHKVTYLQNGKGRKYFHHNSDFYIPKATLKDSGSYFCRGLVGSKNVSSETVNIT

SEQ ID NO: 3838 - protein, 14 aa, Artificial Sequence
  Synthetic Polypeptide
IGWLLLQAPRWVFK

SEQ ID NO: 3839 - protein, 70 aa, Artificial Sequence
  Synthetic Polypeptide
EEDPIHLRCHSWKNTALHKVTYLQNGKGRKYFHHNSDFYIPKATLKDSGSYFCRGLVGSKNVSSETVNIT

SEQ ID NO: 3840 - protein, 17 aa, Artificial Sequence
  Synthetic Polypeptide
ITQGLAVSTISSFFPPG

SEQ ID NO: 3841 - protein, 23 aa, Artificial Sequence
  Synthetic Polypeptide
YQVSFCLVMVLLFAVDTGLYFSV

SEQ ID NO: 3842 - protein, 25 aa, Artificial Sequence
  Synthetic Polypeptide
KTNIRSSTRDWKDHKFKWRKDPQDK

SEQ ID NO: 3843 - protein, 238 aa, Artificial Sequence; identical to SEQ ID NO: 3809
  Synthetic Polypeptide

SEQ ID NO: 3844 - protein, 149 aa, Artificial Sequence
  Synthetic Polypeptide
IGWLLLQAPRWVFKEEDPIHLRCHSWKNTALHKVTYLQNGKGRKYFHHNSDFYIPKATLKDSGSYFCRGLVGSKNVSSETVNITITQGLAVSTISSFFPPGYQVSFCLVMVLLFAVDTGLYFSVKTNIRSSTRDWKDHKFKWRKDPQDK

SEQ ID NO: 3845 - protein, 65 aa, Artificial Sequence
  Synthetic Polypeptide
ITQGLAVSTISSFFPPGYQVSFCLVMVLLFAVDTGLYFSVKTNIRSSTRDWKDHKFKWRKDPQDK

SEQ ID NO: 3846 - protein, 89 aa, Artificial Sequence; identical to SEQ ID NO: 3836
  Synthetic Polypeptide

SEQ ID NO: 3847 - protein, 84 aa, Artificial Sequence; identical to SEQ ID NO: 3837
  Synthetic Polypeptide

SEQ ID NO: 3848 - protein, 14 aa, Artificial Sequence
  Synthetic Polypeptide
IGWLLLQAPRWVFK

SEQ ID NO: 3849 - protein, 70 aa, Artificial Sequence; identical to SEQ ID NO: 3839
  Synthetic Polypeptide

SEQ ID NO: 3850 - protein, 17 aa, Artificial Sequence
  Synthetic Polypeptide
ITQGLAVPTISSFFPPG

SEQ ID NO: 3851 - protein, 23 aa, Artificial Sequence
  Synthetic Polypeptide
YQVSFCLVMVLLFAVDTGLYFSV

SEQ ID NO: 3852 - protein, 25 aa, Artificial Sequence
  Synthetic Polypeptide
KTNIRSSTRDWKDHKFKWRKDPQDK

SEQ ID NO: 3853 - protein, 238 aa, Artificial Sequence; identical to SEQ ID NO: 3811
  Synthetic Polypeptide

SEQ ID NO: 3854 - protein, 149 aa, Artificial Sequence
  Synthetic Polypeptide
IGWLLLQAPRWVFKEEDPIHLRCHSWKNTALHKVTYLQNGKGRKYFHHNSDFYIPKATLKDSGSYFCRGLVGSKNVSSETVNITITQGLAVPTISSFFPPGYQVSFCLVMVLLFAVDTGLYFSVKTNIRSSTRDWKDHKFKWRKDPQDK

SEQ ID NO: 3855 - protein, 65 aa, Artificial Sequence
  Synthetic Polypeptide
ITQGLAVPTISSFFPPGYQVSFCLVMVLLFAVDTGLYFSVKTNIRSSTRDWKDHKFKWRKDPQDK

SEQ ID NO: 3856 - protein, 89 aa, Artificial Sequence; identical to SEQ ID NO: 3836
  Synthetic Polypeptide

SEQ ID NO: 3857 - protein, 84 aa, Artificial Sequence; identical to SEQ ID NO: 3837
  Synthetic Polypeptide

SEQ ID NO: 3858 - protein, 14 aa, Artificial Sequence
  Synthetic Polypeptide
IGWLLLQAPRWVFK

SEQ ID NO: 3859 - protein, 70 aa, Artificial Sequence; identical to SEQ ID NO: 3839
  Synthetic Polypeptide

SEQ ID NO: 3860 - protein, 17 aa, Artificial Sequence
  Synthetic Polypeptide
ITQGLAVSTISSFFPPG

SEQ ID NO: 3861 - protein, 23 aa, Artificial Sequence
  Synthetic Polypeptide
YQVSFCLVMVLLFAVDTGLYFSV

SEQ ID NO: 3862 - protein, 25 aa, Artificial Sequence
  Synthetic Polypeptide
KTNIRSSTRDWKDHKFKWRKDPQDK

SEQ ID NO: 3863 - protein, 238 aa, Artificial Sequence; identical to SEQ ID NO: 3809
  Synthetic Polypeptide

SEQ ID NO: 3864 - protein, 149 aa, Artificial Sequence; identical to SEQ ID NO: 3844
  Synthetic Polypeptide

SEQ ID NO: 3865 - protein, 65 aa, Artificial Sequence; identical to SEQ ID NO: 3845
  Synthetic Polypeptide

SEQ ID NO: 3866 - protein, 97 aa, Artificial Sequence
  Synthetic Polypeptide
VAEGKTDNQYTLFVAGGTVLLLLFVISITTIIVIFLNRRRRRERRDLFTESWDTQKAPNNYRSPISTGQPTNQSMDDTREDIYVNYPTFSRRPKTRV

SEQ ID NO: 3867 - protein, 15 aa, Artificial Sequence
  Synthetic Polypeptide
VAEGKTDNQYTLFVA

SEQ ID NO: 3868 - protein, 21 aa, Artificial Sequence
  Synthetic Polypeptide
GGTVLLLLFVISITTIIVIFL

SEQ ID NO: 3869 - protein, 61 aa, Artificial Sequence
  Synthetic Polypeptide
NRRRRRERRDLFTESWDTQKAPNNYRSPISTGQPTNQSMDDTREDIYVNYPTFSRRPKTRV

SEQ ID NO: 3870 - protein, 97 aa, Artificial Sequence; identical to SEQ ID NO: 3866
  Synthetic Polypeptide

SEQ ID NO: 3871 - protein, 15 aa, Artificial Sequence
  Synthetic Polypeptide
VAEGKTDNQYTLFVA

SEQ ID NO: 3872 - protein, 21 aa, Artificial Sequence
  Synthetic Polypeptide
GGTVLLLLFVISITTIIVIFL

SEQ ID NO: 3873 - protein, 61 aa, Artificial Sequence; identical to SEQ ID NO: 3869
  Synthetic Polypeptide

SEQ ID NO: 3874 - protein, 336 aa, Artificial Sequence
  Synthetic Polypeptide
MDYPTLLLALLHVYRALCEEVLWHTSVPFAENMSLECVYPSMGILTQVEWFKIGTQQDSIAIFSPTHGMVIRKPYAERVYFLNSTMASNNMTLFFRNASEDDVGYYSCSLYTYPQGTWQKVIQVVQSDSFEAAVPSNSHIVSEPGKNVTLTCQPQMTWPVQAVRWEKIQPRQIDLLTYCNLVHGRNFTSKFPRQIVSNCSHGRWSVIVIPDVTVSDSGLYRCYLQASAGENETFVMRLTVAEGKTDNQYTLFVAGGTVLLLLFVISITTIIVIFLNRRRRRERRDLFTESWDTQKAPNNYRSPISTGQPTNQSMDDTREDIYVNYPTFSRRPKTRV

SEQ ID NO: 3875 - protein, 318 aa, Artificial Sequence
  Synthetic Polypeptide
EEVLWHTSVPFAENMSLECVYPSMGILTQVEWFKIGTQQDSIAIFSPTHGMVIRKPYAERVYFLNSTMASNNMTLFFRNASEDDVGYYSCSLYTYPQGTWQKVIQVVQSDSFEAAVPSNSHIVSEPGKNVTLTCQPQMTWPVQAVRWEKIQPRQIDLLTYCNLVHGRNFTSKFPRQIVSNCSHGRWSVIVIPDVTVSDSGLYRCYLQASAGENETFVMRLTVAEGKTDNQYTLFVAGGTVLLLLFVISITTIIVIFLNRRRRRERRDLFTESWDTQKAPNNYRSPISTGQPTNQSMDDTREDIYVNYPTFSRRPKTRV

SEQ ID NO: 3876 - protein, 336 aa, Artificial Sequence; identical to SEQ ID NO: 3874
  Synthetic Polypeptide

SEQ ID NO: 3877 - protein, 318 aa, Artificial Sequence; identical to SEQ ID NO: 3875
  Synthetic Polypeptide

SEQ ID NO: 3878 - protein, 318 aa, Artificial Sequence
  Synthetic Polypeptide
AALGKDTIPWLGHLLVGLSGAFGFIILVYLLINCRNTGPWLKKVLKCNTPDPSKFFSQLSSEHGGDVQKWLSSPFPSSSFSPGGLAPEISPLEVLERDKVTQLLLQQDKVPEPASLSSNHSLTSCFTNQGYFFFHLPDALEIEACQVYFTYDPYSEEDPDEGVAGAPTGSSPQPLQPLSGEDDAYCTFPSRDDLLLFSPSLLGGPSPPSTAPGGSGAGEERMPPSLQERVPRDWDPQPLGPPTPGVPDLVDFQPPPELVLREAGEEVPDAGPREGVSFPWSRPPGQGEFRALNARLPLNTDAYLSLQELQGQDPTHLV

SEQ ID NO: 3879 - protein, 116 aa, Artificial Sequence
  Synthetic Polypeptide
NPFLFALEAVVISVGSMGLIISLLCVYFWLERTMPRIPTLKNLEDLVTEYHGNFSAWSGVSKGLAESLQPDYSERLCLVSEIPPKGGALGEGPGASPCNQHSPYWAPPCYTLKPET

SEQ ID NO: 3880 - protein, 108 aa, Artificial Sequence; identical to SEQ ID NO: 3765
  Synthetic Polypeptide

SEQ ID NO: 3881 - protein, 108 aa, Artificial Sequence; identical to SEQ ID NO: 3765
  Synthetic Polypeptide

SEQ ID NO: 3882 - protein, 99 aa, Artificial Sequence; identical to SEQ ID NO: 3778
  Synthetic Polypeptide

SEQ ID NO: 3883 - protein, 63 aa, Artificial Sequence; identical to SEQ ID NO: 3781
  Synthetic Polypeptide

SEQ ID NO: 3884 - protein, 97 aa, Artificial Sequence; identical to SEQ ID NO: 3793
  Synthetic Polypeptide

SEQ ID NO: 3885 - protein, 83 aa, Artificial Sequence; identical to SEQ ID NO: 3795
  Synthetic Polypeptide

SEQ ID NO: 3886 - protein, 190 aa, Artificial Sequence
  Synthetic Polypeptide
QQQTLPKPFIWAEPHFMVPKEKQVTICCQGNYGAVEYQLHFEGSLFAVDRPKPPERINKVQFYIPDMNSRMAGQYSCIYRVGELWSEPSNLLDLVVTEMYDTPTLSVHPGPEVISGEKVTFYCRLDTATSMFLLLKEGRSSHVQRGYGKVQAEFPLGPVTTAHRGTYRCFGSYNNHAWSFPSEPVKLLVT

SEQ ID NO: 3887 - protein, 97 aa, Artificial Sequence; identical to SEQ ID NO: 3793
  Synthetic Polypeptide

SEQ ID NO: 3888 - protein, 83 aa, Artificial Sequence; identical to SEQ ID NO: 3795
  Synthetic Polypeptide

SEQ ID NO: 3889 - protein, 190 aa, Artificial Sequence; identical to SEQ ID NO: 3886
  Synthetic Polypeptide

SEQ ID NO: 3890 - protein, 89 aa, Artificial Sequence; identical to SEQ ID NO: 3836
  Synthetic Polypeptide

SEQ ID NO: 3891 - protein, 84 aa, Artificial Sequence; identical to SEQ ID NO: 3837
  Synthetic Polypeptide

SEQ ID NO: 3892 - protein, 70 aa, Artificial Sequence; identical to SEQ ID NO: 3839
  Synthetic Polypeptide

SEQ ID NO: 3893 - protein, 173 aa, Artificial Sequence
  Synthetic Polypeptide
GMRTEDLPKAVVFLEPQWYRVLEKDSVTLKCQGAYSPEDNSTQWFHNESLISSQASSYFIDAATVDDSGEYRCQTNLSTLSDPVQLEVHIGWLLLQAPRWVFKEEDPIHLRCHSWKNTALHKVTYLQNGKGRKYFHHNSDFYIPKATLKDSGSYFCRGLVGSKNVSSETVNIT

SEQ ID NO: 3894 - protein, 89 aa, Artificial Sequence; identical to SEQ ID NO: 3836
  Synthetic Polypeptide

SEQ ID NO: 3895 - protein, 84 aa, Artificial Sequence; identical to SEQ ID NO: 3837
  Synthetic Polypeptide

SEQ ID NO: 3896 - protein, 14 aa, Artificial Sequence
  Synthetic Polypeptide
IGWLLLQAPRWVFK

SEQ ID NO: 3897 - protein, 70 aa, Artificial Sequence; identical to SEQ ID NO: 3839
  Synthetic Polypeptide

SEQ ID NO: 3898 - protein, 173 aa, Artificial Sequence; identical to SEQ ID NO: 3893
  Synthetic Polypeptide

SEQ ID NO: 3899 - protein, 89 aa, Artificial Sequence; identical to SEQ ID NO: 3836
  Synthetic Polypeptide

SEQ ID NO: 3900 - protein, 84 aa, Artificial Sequence; identical to SEQ ID NO: 3837
  Synthetic Polypeptide

SEQ ID NO: 3901 - protein, 14 aa, Artificial Sequence
  Synthetic Polypeptide
IGWLLLQAPRWVFK

SEQ ID NO: 3902 - protein, 70 aa, Artificial Sequence; identical to SEQ ID NO: 3839
  Synthetic Polypeptide

SEQ ID NO: 3903 - protein, 173 aa, Artificial Sequence; identical to SEQ ID NO: 3893
  Synthetic Polypeptide

SEQ ID NO: 3904 - protein, 5 aa, Artificial Sequence
  Synthetic Polypeptide
LGEPQ

SEQ ID NO: 3905 - protein, 5 aa, Artificial Sequence
  Synthetic Polypeptide
LGEPQ

SEQ ID NO: 3906 - protein, 30 aa, Artificial Sequence; identical to SEQ ID NO: 3482
  Synthetic Polypeptide

SEQ ID NO: 3907 - protein, 30 aa, Artificial Sequence; identical to SEQ ID NO: 3482
  Synthetic Polypeptide

SEQ ID NO: 3908 - protein, 30 aa, Artificial Sequence; identical to SEQ ID NO: 3747
  Synthetic Polypeptide

SEQ ID NO: 3909 - protein, 30 aa, Artificial Sequence; identical to SEQ ID NO: 3747
  Synthetic Polypeptide

SEQ ID NO: 3910 - protein, 26 aa, Artificial Sequence
  Synthetic Polypeptide
LGEPQLCYILDAILFLYGIVLTLLYC

SEQ ID NO: 3911 - protein, 26 aa, Artificial Sequence
  Synthetic Polypeptide
LGEPQLCYILDAILFLYGIVLTLLYC

SEQ ID NO: 3912 - protein, 26 aa, Artificial Sequence
  Synthetic Polypeptide
LGEPQLSYILDAILFLYGIVLTLLYC

SEQ ID NO: 3913 - protein, 26 aa, Artificial Sequence
  Synthetic Polypeptide
LGEPQLSYILDAILFLYGIVLTLLYC

SEQ ID NO: 3914 - protein, 21 aa, Artificial Sequence
  Synthetic Polypeptide
AGTVLLLRAGFYAVSFLSVAV

SEQ ID NO: 3915 - protein, 21 aa, Artificial Sequence
  Synthetic Polypeptide
AGTVLLLRAGFYAVSFLSVAV

SEQ ID NO: 3916 - protein, 21 aa, Artificial Sequence
  Synthetic Polypeptide
LVPVFCGLLVAKSLVLSALLV

SEQ ID NO: 3917 - protein, 21 aa, Artificial Sequence
  Synthetic Polypeptide
LVPVFCGLLVAKSLVLSALLV

SEQ ID NO: 3918 - protein, 21 aa, Artificial Sequence
  Synthetic Polypeptide
MGLAFLVLVALVWFLVEDWLS

SEQ ID NO: 3919 - protein, 21 aa, Artificial Sequence
  Synthetic Polypeptide
MGLAFLVLVALVWFLVEDWLS

SEQ ID NO: 3920 - protein, 31 aa, Artificial Sequence; identical to SEQ ID NO: 3826
  Synthetic Polypeptide

SEQ ID NO: 3921 - protein, 31 aa, Artificial Sequence; identical to SEQ ID NO: 3826
  Synthetic Polypeptide

SEQ ID NO: 3922 - protein, 23 aa, Artificial Sequence
  Synthetic Polypeptide
YQVSFCLVMVLLFAVDTGLYFSV

SEQ ID NO: 3923 - protein, 23 aa, Artificial Sequence
  Synthetic Polypeptide
YQVSFCLVMVLLFAVDTGLYFSV

SEQ ID NO: 3924 - protein, 23 aa, Artificial Sequence
  Synthetic Polypeptide
YQVSFCLVMVLLFAVDTGLYFSV

SEQ ID NO: 3925 - protein, 21 aa, Artificial Sequence
  Synthetic Polypeptide
GGTVLLLLFVISITTIIVIFL

SEQ ID NO: 3926 - protein, 21 aa, Artificial Sequence
  Synthetic Polypeptide
LSYILDAILFLYGIVLTLLYC

SEQ ID NO: 3927 - protein, 21 aa, Artificial Sequence
  Synthetic Polypeptide
LCYILDAILFLYGIVLTLLYC

SEQ ID NO: 3928 - protein, 20 aa, Artificial Sequence
  Synthetic Polypeptide
CYLLDGILFIYGVILTALFL

SEQ ID NO: 3929 - protein, 9 aa, Artificial Sequence
  Synthetic Polypeptide
VEKEHPQLG

SEQ ID NO: 3930 - protein, 9 aa, Artificial Sequence
  Synthetic Polypeptide
VEKEHPQLG

SEQ ID NO: 3931 - protein, 72 aa, Artificial Sequence; identical to SEQ ID NO: 3779
  Synthetic Polypeptide

SEQ ID NO: 3932 - protein, 72 aa, Artificial Sequence; identical to SEQ ID NO: 3779
  Synthetic Polypeptide

SEQ ID NO: 3933 - protein, 47 aa, Artificial Sequence; identical to SEQ ID NO: 3796
  Synthetic Polypeptide

SEQ ID NO: 3934 - protein, 47 aa, Artificial Sequence; identical to SEQ ID NO: 3796
  Synthetic Polypeptide

SEQ ID NO: 3935 - protein, 48 aa, Artificial Sequence; identical to SEQ ID NO: 3825
  Synthetic Polypeptide

SEQ ID NO: 3936 - protein, 48 aa, Artificial Sequence; identical to SEQ ID NO: 3825
  Synthetic Polypeptide

SEQ ID NO: 3937 - protein, 48 aa, Artificial Sequence; identical to SEQ ID NO: 3833
  Synthetic Polypeptide

SEQ ID NO: 3938 - protein, 48 aa, Artificial Sequence; identical to SEQ ID NO: 3833
  Synthetic Polypeptide

SEQ ID NO: 3939 - protein, 17 aa, Artificial Sequence
  Synthetic Polypeptide
ITQGLAVSTISSFFPPG

SEQ ID NO: 3940 - protein, 17 aa, Artificial Sequence
  Synthetic Polypeptide
ITQGLAVPTISSFFPPG

SEQ ID NO: 3941 - protein, 17 aa, Artificial Sequence
  Synthetic Polypeptide
ITQGLAVSTISSFFPPG

SEQ ID NO: 3942 - protein, 15 aa, Artificial Sequence
  Synthetic Polypeptide
VAEGKTDNQYTLFVA

SEQ ID NO: 3943 - protein, 10 aa, Artificial Sequence
  Synthetic Polypeptide
QSFGLLDPKL

SEQ ID NO: 3944 - protein, 44 aa, Artificial Sequence; identical to SEQ ID NO: 3768
  Synthetic Polypeptide

SEQ ID NO: 3945 - protein, 45 aa, Artificial Sequence; identical to SEQ ID NO: 3774
  Synthetic Polypeptide

SEQ ID NO: 3946 - protein, 63 aa, Artificial Sequence; identical to SEQ ID NO: 3781
  Synthetic Polypeptide

SEQ ID NO: 3947 - protein, 63 aa, Artificial Sequence; identical to SEQ ID NO: 3781
  Synthetic Polypeptide

SEQ ID NO: 3948 - protein, 25 aa, Artificial Sequence
  Synthetic Polypeptide
RKRTRERASRASTWEGRRRLNTQTL

SEQ ID NO: 3949 - protein, 25 aa, Artificial Sequence
  Synthetic Polypeptide
RKRTRERASRASTWEGRRRLNTQTL

SEQ ID NO: 3950 - protein, 25 aa, Artificial Sequence
  Synthetic Polypeptide
KTNIRSSTRDWKDHKFKWRKDPQDK

SEQ ID NO: 3951 - protein, 25 aa, Artificial Sequence
  Synthetic Polypeptide
KTNIRSSTRDWKDHKFKWRKDPQDK

SEQ ID NO: 3952 - protein, 25 aa, Artificial Sequence
  Synthetic Polypeptide
KTNIRSSTRDWKDHKFKWRKDPQDK

SEQ ID NO: 3953 - protein, 61 aa, Artificial Sequence; identical to SEQ ID NO: 3869
  Synthetic Polypeptide

SEQ ID NO: 3954 - protein, 42 aa, Artificial Sequence
  Synthetic Polypeptide
RLKIQVRKAAITSYEKSDGVYTGLSTRNQETYETLKHEKPPQ

SEQ ID NO: 3955 - protein, 42 aa, Artificial Sequence; identical to SEQ ID NO: 3954
  Synthetic Polypeptide

SEQ ID NO: 3956 - protein, 113 aa, Artificial Sequence; identical to SEQ ID NO: 3489
  Synthetic Polypeptide

SEQ ID NO: 3957 - protein, 113 aa, Artificial Sequence; identical to SEQ ID NO: 3489
  Synthetic Polypeptide

SEQ ID NO: 3958 - protein, 113 aa, Artificial Sequence; identical to SEQ ID NO: 3489
  Synthetic Polypeptide

SEQ ID NO: 3959 - protein, 36 aa, Artificial Sequence; identical to SEQ ID NO: 3749
  Synthetic Polypeptide

SEQ ID NO: 3960 - protein, 36 aa, Artificial Sequence; identical to SEQ ID NO: 3749
  Synthetic Polypeptide

SEQ ID NO: 3961 - protein, 120 aa, Artificial Sequence; identical to SEQ ID NO: 3821
  Synthetic Polypeptide

SEQ ID NO: 3962 - protein, 120 aa, Artificial Sequence; identical to SEQ ID NO: 3821
  Synthetic Polypeptide

SEQ ID NO: 3963 - protein, 41 aa, Artificial Sequence; identical to SEQ ID NO: 3485
  Synthetic Polypeptide

SEQ ID NO: 3964 - protein, 42 aa, Artificial Sequence; identical to SEQ ID NO: 3486
  Synthetic Polypeptide

SEQ ID NO: 3965 - protein, 41 aa, Artificial Sequence; identical to SEQ ID NO: 3485
  Synthetic Polypeptide

SEQ ID NO: 3966 - protein, 42 aa, Artificial Sequence; identical to SEQ ID NO: 3486
  Synthetic Polypeptide

SEQ ID NO: 3967 - protein, 232 aa, Artificial Sequence
  Synthetic Polypeptide
LQDPCSNCPAGTFCDNNRNQICSPCPPNSFSSAGGQRTCDICRQCKGVFRTRKECSSTSNAECDCTPGFHCLGAGCSMCEQDCKQGQELTKKGCKDCCFGTFNDQKRGICRPWTNCSLDGKSVLVNGTKERDVVCGPSPADLSPGASSVTPPAPAREPGHSPQIISFFLALTSTALLFLLFFLTLRFSVVKRGRKKLLYIFKQPFMRPVQTTQEEDGCSCRFPEEEEGGCEL

SEQ ID NO: 3968 - protein, 232 aa, Artificial Sequence; identical to SEQ ID NO: 3967
  Synthetic Polypeptide

SEQ ID NO: 3969 - protein, 202 aa, Artificial Sequence
  Synthetic Polypeptide
NKILVKQSPMLVAYDNAVNLSCKYSYNLFSREFRASLHKGLDSAVEVCVVYGNYSQQLQVYSKTGFNCDGKLGNESVTFYLQNLYVNQTDIYFCKIEVMYPPPYLDNEKSNGTIIHVKGKHLCPSPLFPGPSKPFWVLVVVGGVLACYSLLVTVAFIIFWVRSKRSRLLHSDYMNMTPRRPGPTRKHYQPYAPPRDFAAYRS

SEQ ID NO: 3970 - protein, 202 aa, Artificial Sequence; identical to SEQ ID NO: 3969
  Synthetic Polypeptide

SEQ ID NO: 3971 - protein, 249 aa, Artificial Sequence
  Synthetic Polypeptide
LHCVGDTYPSNDRCCHECRPGNGMVSRCSRSQNTVCRPCGPGFYNDVVSSKPCKPCTWCNLRSGSERKQLCTATQDTVCRCRAGTQPLDSYKPGVDCAPCPPGHFSPGDNQACKPWTNCTLAGKHTLQPASNSSDAICEDRDPPATQPQETQGPPARPITVQPTEAWPRTSQGPSTRPVEVPGGRAVAAILGLGLVLGLLGPLAILLALYLLRRDQRLPPDAHKPPGGGSFRTPIQEEQADAHSTLAKI

SEQ ID NO: 3972 - protein, 249 aa, Artificial Sequence; identical to SEQ ID NO: 3971
  Synthetic Polypeptide

SEQ ID NO: 3973 - protein, 346 aa, Artificial Sequence
  Synthetic Polypeptide
KGCQGSADHVVSISGVPLQLQPNSIQTKVDSIAWKKLLPSQNGFHHILKWENGSLPSNTSNDRFSFIVKNLSLLIKAAQQQDSGLYCLEVTSISGKVQTATFQVFVFDKVEKPRLQGQGKILDRGRCQVALSCLVSRDGNVSYAWYRGSKLIQTAGNLTYLDEEVDINGTHTYTCNVSNPVSWESHTLNLTQDCQNAHQEFRFWPFLVIIVILSALFLGTLACFCVWRRKRKEKQSETSPKEFLTIYEDVKDLKTRRNHEQEQTFPGGGSTIYSMIQSQSSAPTSQEPAYTLYSLIQPSRKSGSRKRNHSPSFNSTIYEVIGKSQPKAQNPARLSRKELENFDVYS

SEQ ID NO: 3974 - protein, 346 aa, Artificial Sequence; identical to SEQ ID NO: 3973
  Synthetic Polypeptide

SEQ ID NO: 3975 - protein, 268 aa, Artificial Sequence
  Synthetic Polypeptide
TPAAPPKAVLKLEPQWINVLQEDSVTLTCRGTHSPESDSIQWFHNGNLIPTHTQPSYRFKANNNDSGEYTCQTGQTSLSDPVHLTVLSEWLVLQTPHLEFQEGETIVLRCHSWKDKPLVKVTFFQNGKSKKFSRSDPNFSIPQANHSHSGDYHCTGNIGYTLYSSKPVTITVQAPSSSPMGIIVAVVTGIAVAAIVAAVVALIYCRKKRISALPGYPECREMGETLPEKPANPTNPDEADKVGAENTITYSLLMHPDALEEPDDQNRI

SEQ ID NO: 3976 - protein, 268 aa, Artificial Sequence; identical to SEQ ID NO: 3975
  Synthetic Polypeptide

SEQ ID NO: 3977 - protein, 360 aa, Artificial Sequence
  Synthetic Polypeptide
QVVDTTKAVITLQPPWVSVFQEETVTLHCEVLHLPGSSSTQWFLNGTATQTSTPSYRITSASVNDSGEYRCQRGLSGRSDPIQLEIHRGWLLLQVSSRVFTEGEPLALRCHAWKDKLVYNVLYYRNGKAFKFFHWNSNLTILKTNISHNGTYHCSGMGKHRYTSAGISVTVKELFPAPVLNASVTSPLLEGNLVTLSCETKLLLQRPGLQLYFSFYMGSKTLRGRNTSSEYQILTARREDSGLYWCEAATEDGNVLKRSPELELQVLGLQLPTPVWFHVLFYLAVGIMFLVNTVLWVTIRKELKRKKKWDLEISLDSGHEKKVISSLQEDRHLEEELKCQEQKEEQLQEGVHRKEPQGAT

SEQ ID NO: 3978 - protein, 360 aa, Artificial Sequence; identical to SEQ ID NO: 3977
  Synthetic Polypeptide

SEQ ID NO: 3979 - protein, 17 aa, Artificial Sequence
  Synthetic Polypeptide
GGGGGGGGGGGGGGGGG

SEQ ID NO: 3980 - protein, 17 aa, Artificial Sequence
  Synthetic Polypeptide
GGGGGGGGGGGGGGGGG

SEQ ID NO: 3981 - protein, 17 aa, Artificial Sequence
  Synthetic Polypeptide
GGGGGGGGGGGGGGGGG

SEQ ID NO: 3982 - protein, 17 aa, Artificial Sequence
  Synthetic Polypeptide
GGGGGGGGGGGGGGGGG

SEQ ID NO: 3983 - protein, 17 aa, Artificial Sequence
  Synthetic Polypeptide
GGGGGGGGGGGGGGGGG

SEQ ID NO: 3984 - protein, 17 aa, Artificial Sequence
  Synthetic Polypeptide
GGGGGGGGGGGGGGGGG

SEQ ID NO: 3985 - protein, 17 aa, Artificial Sequence
  Synthetic Polypeptide
GGGGGGGGGGGGGGGGG

SEQ ID NO: 3986 - protein, 17 aa, Artificial Sequence
  Synthetic Polypeptide
GGGGGGGGGGGGGGGGG

SEQ ID NO: 3987 - protein, 17 aa, Artificial Sequence
  Synthetic Polypeptide
GGGGGGGGGGGGGGGGG

SEQ ID NO: 3988 - protein, 17 aa, Artificial Sequence
  Synthetic Polypeptide
GGGGGGGGGGGGGGGGG

SEQ ID NO: 3989 - protein, 17 aa, Artificial Sequence
  Synthetic Polypeptide
GGGGGGGGGGGGGGGGG

SEQ ID NO: 3990 - protein, 17 aa, Artificial Sequence
  Synthetic Polypeptide
GGGGGGGGGGGGGGGGG

SEQ ID NO: 3991 - protein, 17 aa, Artificial Sequence
  Synthetic Polypeptide
GGGGGGGGGGGGGGGGG

SEQ ID NO: 3992 - protein, 17 aa, Artificial Sequence
  Synthetic Polypeptide
GGGGGGGGGGGGGGGGG

SEQ ID NO: 3993 - protein, 17 aa, Artificial Sequence
  Synthetic Polypeptide
GGGGGGGGGGGGGGGGG

SEQ ID NO: 3994 - protein, 903 aa, Artificial Sequence
  Synthetic Polypeptide
MALPVTALLLPLALLLHAARPDIQMTQSPSSLSASVGDRVTITCKASDHINNWLAWYQQKPGQAPKLLIYGATTLETGVPSRFSGSGSGTDYTLTISSLQPEDFATYYCQQSWNTPWTFGQGTKLEIKRLELWVSQPPEIRTLEGSSAFLPCSFNASQGRLAIGSVTWFRDEVVPGKEVRNGTPEFRGRLAPLASSRFLHDHQAELHIRDVRGHDASIYVCRVEVLGLGVGTGNGTRLVVEKEHPQLGAGTVLLLRAGFYAVSFLSVAVGSTVYYQGKCLTWKGPRRQLPAVVPAPLPPPCGSSAHLLPPVPGGRAKRSGSGATNFSLLKQAGDVEENPGPTSMDWIWRILFLVGAATGAHSFEQVQLQQPGAELVKPGASVKMSCKASGYAFSSYWINWMKQKPGQGLEWIGQIYPGDGDTNYNGKFKGRATLTADTSSSTAYMQLSSLTSEDSAVYFCARSITTVVGCAMDYWGQGTSVTVSSTRLWVSQPPEIRTLEGSSAFLPCSFNASQGRLAIGSVTWFRDEVVPGKEVRNGTPEFRGRLAPLASSRFLHDHQAELHIRDVRGHDASIYVCRVEVLGLGVGTGNGTRLVVEKEHPQLGAGTVLLLRAGFYAVSFLSVAVGSTVYYQGKCLTWKGPRRQLPAVVPAPLPPPCGSSAHLLPPVPGGRAKRSGSGVKQTLNFDLLKLAGDVESNPGPSRGHMTEYKPTVRLATRDDVPRAVRTLAAAFADYPATRHTVDPDRHIERVTELQELFLTRVGLDIGKVWVADDGAAVAVWTTPESVEAGAVFAEIGPRMAELSGSRLAAQQQMEGLLAPHRPKEPAWFLATVGVSPDHQGKGLGSAVVLPGVEAAERAGVPAFLETSAPRNLPFYERLGFTVTADVEVPEGPRTWCMTRKPGA

SEQ ID NO: 3995 - protein, 957 aa, Artificial Sequence
  Synthetic Polypeptide
MALPVTALLLPLALLLHAARPACEVQLLESGGGLIQPGGSLRLSCAASGFTFSSHAMTWVRQAPGKGLEWVSAISGSGDYTHYADSVKGRFTISRDNSKNTVYLQMNSLRAEDSAVYYCAKDEDGGSLLGHRGQGTLVTVSSGTGGGGSGGGGSGGGGSEFGSLELWVSQPPEIRTLEGSSAFLPCSFNASQGRLAIGSVTWFRDEVVPGKEVRNGTPEFRGRLAPLASSRFLHDHQAELHIRDVRGHDASIYVCRVEVLGLGVGTGNGTRLVVEKEHPQLGAGTVLLLRAGFYAVSFLSVAVGSTVYYQGKCLTWKGPRRQLPAVVPAPLPPPCGSSAHLLPPVPGGRAKRSGSGATNFSLLKQAGDVEENPGPTSATMDWIWRILFLVGAATGAHSGPEVQLVESGGGLVQAGGSLRLSCAASGRTFSMGWFRQAPGKEREFVAAITYSGGSPYYADSVKGRFTISRDNAKNTVYLQMNSLKPEDTAVYYCAANPTYGSDWNAENWGQGTQVTVSSGSGGGGSGGGGSGGGGSFEGSTRLWVSQPPEIRTLEGSSAFLPCSFNASQGRLAIGSVTWFRDEVVPGKEVRNGTPEFRGRLAPLASSRFLHDHQAELHIRDVRGHDASIYVCRVEVLGLGVGTGNGTRLVVEKEHPQLGAGTVLLLRAGFYAVSFLSVAVGSTVYYQGKCLTWKGPRRQLPAVVPAPLPPPCGSSAHLLPPVPGGRAKRSGSGVKQTLNFDLLKLAGDVESNPGPSRGHMTEYKPTVRLATRDDVPRAVRTLAAAFADYPATRHTVDPDRHIERVTELQELFLTRVGLDIGKVWVADDGAAVAVWTTPESVEAGAVFAEIGPRMAELSGSRLAAQQQMEGLLAPHRPKEPAWFLATVGVSPDHQGKGLGSAVVLPGVEAAERAGVPAFLETSAPRNLPFYERLGFTVTADVEVPEGPRTWCMTRKPGA

SEQ ID NO: 3996 - protein, 1108 aa, Artificial Sequence
  Synthetic Polypeptide
MALPVTALLLPLALLLHAARPDIQMTQSPSSLSASVGDRVTITCKASDHINNWLAWYQQKPGQAPKLLIYGATTLETGVPSRFSGSGSGTDYTLTISSLQPEDFATYYCQQSWNTPWTFGQGTKLEIKRLEGQPKANPTVTLFPPSSEELQANKATLVCLISDFYPGAVTVAWKADGSPVKAGVETTKPSKQSNNKYAASSYLSLTPEQWKSHRSYSCQVTHEGSTVEKTVAPTECSGSLWVSQPPEIRTLEGSSAFLPCSFNASQGRLAIGSVTWFRDEVVPGKEVRNGTPEFRGRLAPLASSRFLHDHQAELHIRDVRGHDASIYVCRVEVLGLGVGTGNGTRLVVEKEHPQLGAGTVLLLRAGFYAVSFLSVAVGSTVYYQGKCLTWKGPRRQLPAVVPAPLPPPCGSSAHLLPPVPGGRAKRSGSGATNFSLLKQAGDVEENPGPTSMDWIWRILFLVGAATGAHSFEQVQLQQPGAELVKPGASVKMSCKASGYAFSSYWINWMKQKPGQGLEWIGQIYPGDGDTNYNGKFKGRATLTADTSSSTAYMQLSSLTSEDSAVYFCARSITTVVGCAMDYWGQGTSVTVSSTRASTKGPSVFPLAPSSKSTSGGTAALGCLVKDYFPEPVTVSWNSGALTSGVHTFPAVLQSSGLYSLSSVVTVPSSSLGTQTYICNVNHKPSNTKVDKRVEPKSCGTLWVSQPPEIRTLEGSSAFLPCSFNASQGRLAIGSVTWFRDEVVPGKEVRNGTPEFRGRLAPLASSRFLHDHQAELHIRDVRGHDASIYVCRVEVLGLGVGTGNGTRLVVEKEHPQLGAGTVLLLRAGFYAVSFLSVAVGSTVYYQGKCLTWKGPRRQLPAVVPAPLPPPCGSSAHLLPPVPGGRAKRSGSGVKQTLNFDLLKLAGDVESNPGPSRGGIHTMATYEVLCEVARKLGTDDREVVLFLLNVFIPQPTLAQLIGALRALKEEGRLTFPLLAECLFRAGRRDLLRDLLHLDPRFLERHLAGTMSYFSPYQLTVLHVDGELCARDIRSLIFLSKDTIGSRSTPQTFLHWVYCMENLDLLGPTDVDALMSMLRSLSRVDLQRQVQTLMGLHLSGPSHSQHYRHTP

SEQ ID NO: 3997 - protein, 1161 aa, Artificial Sequence
  Synthetic Polypeptide
MALPVTALLLPLALLLHAARPDIQMTQSPSSLSASVGDRVTITCKASDHINNWLAWYQQKPGQAPKLLIYGATTLETGVPSRFSGSGSGTDYTLTISSLQPEDFATYYCQQSWNTPWTFGQGTKLEIKRLEGQPKANPTVTLFPPSSEELQANKATLVCLISDFYPGAVTVAWKADGSPVKAGVETTKPSKQSNNKYAASSYLSLTPEQWKSHRSYSCQVTHEGSTVEKTVAPTECSGSLWVSQPPEIRTLEGSSAFLPCSFNASQGRLAIGSVTWFRDEVVPGKEVRNGTPEFRGRLAPLASSRFLHDHQAELHIRDVRGHDASIYVCRVEVLGLGVGTGNGTRLVVEKEHPQLGAGTVLLLRAGFYAVSFLSVAVGSTVYYQGKCLTWKGPRRQLPAVVPAPLPPPCGSSAHLLPPVPGGRAKRSGSGATNFSLLKQAGDVEENPGPTSMDWIWRILFLVGAATGAHSFEQVQLQQPGAELVKPGASVKMSCKASGYAFSSYWINWMKQKPGQGLEWIGQIYPGDGDTNYNGKFKGRATLTADTSSSTAYMQLSSLTSEDSAVYFCARSITTVVGCAMDYWGQGTSVTVSSTRASTKGPSVFPLAPSSKSTSGGTAALGCLVKDYFPEPVTVSWNSGALTSGVHTFPAVLQSSGLYSLSSVVTVPSSSLGTQTYICNVNHKPSNTKVDKRVEPKSCGTLWVSQPPEIRTLEGSSAFLPCSFNASQGRLAIGSVTWFRDEVVPGKEVRNGTPEFRGRLAPLASSRFLHDHQAELHIRDVRGHDASIYVCRVEVLGLGVGTGNGTRLVVEKEHPQLGAGTVLLLRAGFYAVSFLSVAVGSTVYYQGKCLTWKGPRRQLPAVVPAPLPPPCGSSAHLLPPVPGGRAKRSGSGVKQTLNFDLLKLAGDVESNPGPSRGGIHTMSDSKEVPSLPFLRHLLEELDSHEDSLLLFLCHDAAPGCTTVTQALCSLSQQRKLTLAALVEMLYVLQRMDLLKSRFGLSKEGAEQLLGTSFLTRYRKLMVCVGEELDSSELRALRLFACNLNPSLSTALSESSRFVELVLALENVGLVSPSSVSVLADMLRTLRRLDLCQQLVEYEQQEQARYRYCYAASPSLPVRTLRRGHGASEHEQLCMPVQESSDSPELLRTPVQESSSDSPEQTT

SEQ ID NO: 3998 - protein, 1116 aa, Artificial Sequence
  Synthetic Polypeptide
MALPVTALLLPLALLLHAARPDIQMTQSPSSLSASVGDRVTITCKASDHINNWLAWYQQKPGQAPKLLIYGATTLETGVPSRFSGSGSGTDYTLTISSLQPEDFATYYCQQSWNTPWTFGQGTKLEIKRLEGQPKANPTVTLFPPSSEELQANKATLVCLISDFYPGAVTVAWKADGSPVKAGVETTKPSKQSNNKYAASSYLSLTPEQWKSHRSYSCQVTHEGSTVEKTVAPTECSGSLWVSQPPEIRTLEGSSAFLPCSFNASQGRLAIGSVTWFRDEVVPGKEVRNGTPEFRGRLAPLASSRFLHDHQAELHIRDVRGHDASIYVCRVEVLGLGVGTGNGTRLVVEKEHPQLGAGTVLLLRAGFYAVSFLSVAVGSTVYYQGKCLTWKGPRRQLPAVVPAPLPPPCGSSAHLLPPVPGGRAKRSGSGATNFSLLKQAGDVEENPGPTSMDWIWRILFLVGAATGAHSFEQVQLQQPGAELVKPGASVKMSCKASGYAFSSYWINWMKQKPGQGLEWIGQIYPGDGDTNYNGKFKGRATLTADTSSSTAYMQLSSLTSEDSAVYFCARSITTVVGCAMDYWGQGTSVTVSSTRASTKGPSVFPLAPSSKSTSGGTAALGCLVKDYFPEPVTVSWNSGALTSGVHTFPAVLQSSGLYSLSSVVTVPSSSLGTQTYICNVNHKPSNTKVDKRVEPKSCGTLWVSQPPEIRTLEGSSAFLPCSFNASQGRLAIGSVTWFRDEVVPGKEVRNGTPEFRGRLAPLASSRFLHDHQAELHIRDVRGHDASIYVCRVEVLGLGVGTGNGTRLVVEKEHPQLGAGTVLLLRAGFYAVSFLSVAVGSTVYYQGKCLTWKGPRRQLPAVVPAPLPPPCGSSAHLLPPVPGGRAKRSGSGVKQTLNFDLLKLAGDVESNPGPSRGHMTEYKPTVRLATRDDVPRAVRTLAAAFADYPATRHTVDPDRHIERVTELQELFLTRVGLDIGKVWVADDGAAVAVWTTPESVEAGAVFAEIGPRMAELSGSRLAAQQQMEGLLAPHRPKEPAWFLATVGVSPDHQGKGLGSAVVLPGVEAAERAGVPAFLETSAPRNLPFYERLGFTVTADVEVPEGPRTWCMTRKPGA

SEQ ID NO: 3999 - protein, 1253 aa, Artificial Sequence
  Synthetic Polypeptide
MALPVTALLLPLALLLHAARPEVQLVESGGGLVQAGGSLRLSCAASGRTFSMGWFRQAPGKEREFVAAITYSGGSPYYADSVKGRFTISRDNAKNTVYLQMNSLKPEDTAVYYCAANPTYGSDWNAENWGQGTQVTVSSGTGGGGSGGGGSGGGGSEFDIQMTQSPSSLSASVGDRVTITCKASDHINNWLAWYQQKPGQAPKLLIYGATTLETGVPSRFSGSGSGTDYTLTISSLQPEDFATYYCQQSWNTPWTFGQGTKLEIKRLEGQPKANPTVTLFPPSSEELQANKATLVCLISDFYPGAVTVAWKADGSPVKAGVETTKPSKQSNNKYAASSYLSLTPEQWKSHRSYSCQVTHEGSTVEKTVAPTECSGSLWVSQPPEIRTLEGSSAFLPCSFNASQGRLAIGSVTWFRDEVVPGKEVRNGTPEFRGRLAPLASSRFLHDHQAELHIRDVRGHDASIYVCRVEVLGLGVGTGNGTRLVVEKEHPQLGAGTVLLLRAGFYAVSFLSVAVGSTVYYQGKCLTWKGPRRQLPAVVPAPLPPPCGSSAHLLPPVPGGRAKRSGSGATNFSLLKQAGDVEENPGPTSMDWIWRILFLVGAATGAHSFEQVQLQQPGAELVKPGASVKMSCKASGYAFSSYWINWMKQKPGQGLEWIGQIYPGDGDTNYNGKFKGRATLTADTSSSTAYMQLSSLTSEDSAVYFCARSITTVVGCAMDYWGQGTSVTVSSTRASTKGPSVFPLAPSSKSTSGGTAALGCLVKDYFPEPVTVSWNSGALTSGVHTFPAVLQSSGLYSLSSVVTVPSSSLGTQTYICNVNHKPSNTKVDKRVEPKSCGTLWVSQPPEIRTLEGSSAFLPCSFNASQGRLAIGSVTWFRDEVVPGKEVRNGTPEFRGRLAPLASSRFLHDHQAELHIRDVRGHDASIYVCRVEVLGLGVGTGNGTRLVVEKEHPQLGAGTVLLLRAGFYAVSFLSVAVGSTVYYQGKCLTWKGPRRQLPAVVPAPLPPPCGSSAHLLPPVPGGRAKRSGSGVKQTLNFDLLKLAGDVESNPGPSRGHMTEYKPTVRLATRDDVPRAVRTLAAAFADYPATRHTVDPDRHIERVTELQELFLTRVGLDIGKVWVADDGAAVAVWTTPESVEAGAVFAEIGPRMAELSGSRLAAQQQMEGLLAPHRPKEPAWFLATVGVSPDHQGKGLGSAVVLPGVEAAERAGVPAFLETSAPRNLPFYERLGFTVTADVEVPEGPRTWCMTRKPGA

SEQ ID NO: 4000 - protein, 1390 aa, Artificial Sequence
  Synthetic Polypeptide
MALPVTALLLPLALLLHAARPEVQLVESGGGLVQAGGSLRLSCAASGRTFSMGWFRQAPGKEREFVAAITYSGGSPYYADSVKGRFTISRDNAKNTVYLQMNSLKPEDTAVYYCAANPTYGSDWNAENWGQGTQVTVSSGTGGGGSGGGGSGGGGSEFDIQMTQSPSSLSASVGDRVTITCKASDHINNWLAWYQQKPGQAPKLLIYGATTLETGVPSRFSGSGSGTDYTLTISSLQPEDFATYYCQQSWNTPWTFGQGTKLEIKRLEGQPKANPTVTLFPPSSEELQANKATLVCLISDFYPGAVTVAWKADGSPVKAGVETTKPSKQSNNKYAASSYLSLTPEQWKSHRSYSCQVTHEGSTVEKTVAPTECSGSLWVSQPPEIRTLEGSSAFLPCSFNASQGRLAIGSVTWFRDEVVPGKEVRNGTPEFRGRLAPLASSRFLHDHQAELHIRDVRGHDASIYVCRVEVLGLGVGTGNGTRLVVEKEHPQLGAGTVLLLRAGFYAVSFLSVAVGSTVYYQGKCLTWKGPRRQLPAVVPAPLPPPCGSSAHLLPPVPGGRAKRSGSGATNFSLLKQAGDVEENPGPTSMDWIWRILFLVGAATGAHSGPEVQLVESGGGLVQAGGSLRLSCAASGRTFTMGWFRQAPGKEREFVAAISLSPTLAYYADSVKGRFTISRDNAKNTVVLQMNSLKPEDTALYYCAADRKSVMSIRPDYWGQGTQVTVSSGSGGGGSGGGGSGGGGSFEQVQLQQPGAELVKPGASVKMSCKASGYAFSSYWINWMKQKPGQGLEWIGQIYPGDGDTNYNGKFKGRATLTADTSSSTAYMQLSSLTSEDSAVYFCARSITTVVGCAMDYWGQGTSVTVSSTRASTKGPSVFPLAPSSKSTSGGTAALGCLVKDYFPEPVTVSWNSGALTSGVHTFPAVLQSSGLYSLSSVVTVPSSSLGTQTYICNVNHKPSNTKVDKRVEPKSCGTLWVSQPPEIRTLEGSSAFLPCSFNASQGRLAIGSVTWFRDEVVPGKEVRNGTPEFRGRLAPLASSRFLHDHQAELHIRDVRGHDASIYVCRVEVLGLGVGTGNGTRLVVEKEHPQLGAGTVLLLRAGFYAVSFLSVAVGSTVYYQGKCLTWKGPRRQLPAVVPAPLPPPCGSSAHLLPPVPGGRAKRSGSGVKQTLNFDLLKLAGDVESNPGPSRGHMTEYKPTVRLATRDDVPRAVRTLAAAFADYPATRHTVDPDRHIERVTELQELFLTRVGLDIGKVWVADDGAAVAVWTTPESVEAGAVFAEIGPRMAELSGSRLAAQQQMEGLLAPHRPKEPAWFLATVGVSPDHQGKGLGSAVVLPGVEAAERAGVPAFLETSAPRNLPFYERLGFTVTADVEVPEGPRTWCMTRKPGA

SEQ ID NO: 4001 - protein, 1123 aa, Artificial Sequence
  Synthetic Polypeptide
MALPVTALLLPLALLLHAARPEVQLVESGGGLVQAGGSLRLSCAASGRTFSMGWFRQAPGKEREFVAAITYSGGSPYYADSVKGRFTISRDNAKNTVYLQMNSLKPEDTAVYYCAANPTYGSDWNAENWGQGTQVTVSSLEGQPKANPTVTLFPPSSEELQANKATLVCLISDFYPGAVTVAWKADGSPVKAGVETTKPSKQSNNKYAASSYLSLTPEQWKSHRSYSCQVTHEGSTVEKTVAPTECSGSLWVSQPPEIRTLEGSSAFLPCSFNASQGRLAIGSVTWFRDEVVPGKEVRNGTPEFRGRLAPLASSRFLHDHQAELHIRDVRGHDASIYVCRVEVLGLGVGTGNGTRLVVEKEHPQLGAGTVLLLRAGFYAVSFLSVAVGSTVYYQGKCLTWKGPRRQLPAVVPAPLPPPCGSSAHLLPPVPGGRAKRSGSGATNFSLLKQAGDVEENPGPTSMDWIWRILFLVGAATGAHSGPEVQLVESGGGLVQAGGSLRLSCAASGRTFTMGWFRQAPGKEREFVAAISLSPTLAYYADSVKGRFTISRDNAKNTVVLQMNSLKPEDTALYYCAADRKSVMSIRPDYWGQGTQVTVSSTRASTKGPSVFPLAPSSKSTSGGTAALGCLVKDYFPEPVTVSWNSGALTSGVHTFPAVLQSSGLYSLSSVVTVPSSSLGTQTYICNVNHKPSNTKVDKRVEPKSCGTLWVSQPPEIRTLEGSSAFLPCSFNASQGRLAIGSVTWFRDEVVPGKEVRNGTPEFRGRLAPLASSRFLHDHQAELHIRDVRGHDASIYVCRVEVLGLGVGTGNGTRLVVEKEHPQLGAGTVLLLRAGFYAVSFLSVAVGSTVYYQGKCLTWKGPRRQLPAVVPAPLPPPCGSSAHLLPPVPGGRAKRSGSGVKQTLNFDLLKLAGDVESNPGPSRGHMTEYKPTVRLATRDDVPRAVRTLAAAFADYPATRHTVDPDRHIERVTELQELFLTRVGLDIGKVWVADDGAAVAVWTTPESVEAGAVFAEIGPRMAELSGSRLAAQQQMEGLLAPHRPKEPAWFLATVGVSPDHQGKGLGSAVVLPGVEAAERAGVPAFLETSAPRNLPFYERLGFTVTADVEVPEGPRTWCMTRKPGA

SEQ ID NO: 4002 - protein, 1131 aa, Artificial Sequence
  Synthetic Polypeptide
MALPVTALLLPLALLLHAARPDIQMTQSPSSLSASVGDRVTITCKASDHINNWLAWYQQKPGQAPKLLIYGATTLETGVPSRFSGSGSGTDYTLTISSLQPEDFATYYCQQSWNTPWTFGQGTKLEIKRLEDLKNVFPPEVAVFEPSEAEISHTQKATLVCLATGFYPDHVELSWWVNGKEVHSGVSTDPQPLKEQPALNDSRYCLSSRLRVSATFWQNPRNHFRCQVQFYGLSENDEWTQDRAKPVTQIVSAEAWGRADCGSLWVSQPPEIRTLEGSSAFLPCSFNASQGRLAIGSVTWFRDEVVPGKEVRNGTPEFRGRLAPLASSRFLHDHQAELHIRDVRGHDASIYVCRVEVLGLGVGTGNGTRLVVEKEHPQLGAGTVLLLRAGFYAVSFLSVAVGSTVYYQGKCLTWKGPRRQLPAVVPAPLPPPCGSSAHLLPPVPGGRAKRSGSGATNFSLLKQAGDVEENPGPTSMDWIWRILFLVGAATGAHSFEQVQLQQPGAELVKPGASVKMSCKASGYAFSSYWINWMKQKPGQGLEWIGQIYPGDGDTNYNGKFKGRATLTADTSSSTAYMQLSSLTSEDSAVYFCARSITTVVGCAMDYWGQGTSVTVSSTRIQNPDPAVYQLRDSKSSDKSVCLFTDFDSQTNVSQSKDSDVYITDKTVLDMRSMDFKSNSAVAWSNKSDFACANAFNNSIIPEDTFFPSPESSCGTLWVSQPPEIRTLEGSSAFLPCSFNASQGRLAIGSVTWFRDEVVPGKEVRNGTPEFRGRLAPLASSRFLHDHQAELHIRDVRGHDASIYVCRVEVLGLGVGTGNGTRLVVEKEHPQLGAGTVLLLRAGFYAVSFLSVAVGSTVYYQGKCLTWKGPRRQLPAVVPAPLPPPCGSSAHLLPPVPGGRAKRSGSGVKQTLNFDLLKLAGDVESNPGPSRGHMTEYKPTVRLATRDDVPRAVRTLAAAFADYPATRHTVDPDRHIERVTELQELFLTRVGLDIGKVWVADDGAAVAVWTTPESVEAGAVFAEIGPRMAELSGSRLAAQQQMEGLLAPHRPKEPAWFLATVGVSPDHQGKGLGSAVVLPGVEAAERAGVPAFLETSAPRNLPFYERLGFTVTADVEVPEGPRTWCMTRKPGA

SEQ ID NO: 4003 - protein, 1268 aa, Artificial Sequence
  Synthetic Polypeptide
MALPVTALLLPLALLLHAARPEVQLVESGGGLVQAGGSLRLSCAASGRTFSMGWFRQAPGKEREFVAAITYSGGSPYYADSVKGRFTISRDNAKNTVYLQMNSLKPEDTAVYYCAANPTYGSDWNAENWGQGTQVTVSSGTGGGGSGGGGSGGGGSEFDIQMTQSPSSLSASVGDRVTITCKASDHINNWLAWYQQKPGQAPKLLIYGATTLETGVPSRFSGSGSGTDYTLTISSLQPEDFATYYCQQSWNTPWTFGQGTKLEIKRLEDLKNVFPPEVAVFEPSEAEISHTQKATLVCLATGFYPDHVELSWWVNGKEVHSGVSTDPQPLKEQPALNDSRYCLSSRLRVSATFWQNPRNHFRCQVQFYGLSENDEWTQDRAKPVTQIVSAEAWGRADCGSLWVSQPPEIRTLEGSSAFLPCSFNASQGRLAIGSVTWFRDEVVPGKEVRNGTPEFRGRLAPLASSRFLHDHQAELHIRDVRGHDASIYVCRVEVLGLGVGTGNGTRLVVEKEHPQLGAGTVLLLRAGFYAVSFLSVAVGSTVYYQGKCLTWKGPRRQLPAVVPAPLPPPCGSSAHLLPPVPGGRAKRSGSGATNFSLLKQAGDVEENPGPTSMDWIWRILFLVGAATGAHSFEQVQLQQPGAELVKPGASVKMSCKASGYAFSSYWINWMKQKPGQGLEWIGQIYPGDGDTNYNGKFKGRATLTADTSSSTAYMQLSSLTSEDSAVYFCARSITTVVGCAMDYWGQGTSVTVSSTRIQNPDPAVYQLRDSKSSDKSVCLFTDFDSQTNVSQSKDSDVYITDKTVLDMRSMDFKSNSAVAWSNKSDFACANAFNNSIIPEDTFFPSPESSCGTLWVSQPPEIRTLEGSSAFLPCSFNASQGRLAIGSVTWFRDEVVPGKEVRNGTPEFRGRLAPLASSRFLHDHQAELHIRDVRGHDASIYVCRVEVLGLGVGTGNGTRLVVEKEHPQLGAGTVLLLRAGFYAVSFLSVAVGSTVYYQGKCLTWKGPRRQLPAVVPAPLPPPCGSSAHLLPPVPGGRAKRSGSGVKQTLNFDLLKLAGDVESNPGPSRGHMTEYKPTVRLATRDDVPRAVRTLAAAFADYPATRHTVDPDRHIERVTELQELFLTRVGLDIGKVWVADDGAAVAVWTTPESVEAGAVFAEIGPRMAELSGSRLAAQQQMEGLLAPHRPKEPAWFLATVGVSPDHQGKGLGSAVVLPGVEAAERAGVPAFLETSAPRNLPFYERLGFTVTADVEVPEGPRTWCMTRKPGA

SEQ ID NO: 4004 - protein, 1405 aa, Artificial Sequence
  Synthetic Polypeptide
MALPVTALLLPLALLLHAARPEVQLVESGGGLVQAGGSLRLSCAASGRTFSMGWFRQAPGKEREFVAAITYSGGSPYYADSVKGRFTISRDNAKNTVYLQMNSLKPEDTAVYYCAANPTYGSDWNAENWGQGTQVTVSSGTGGGGSGGGGSGGGGSEFDIQMTQSPSSLSASVGDRVTITCKASDHINNWLAWYQQKPGQAPKLLIYGATTLETGVPSRFSGSGSGTDYTLTISSLQPEDFATYYCQQSWNTPWTFGQGTKLEIKRLEDLKNVFPPEVAVFEPSEAEISHTQKATLVCLATGFYPDHVELSWWVNGKEVHSGVSTDPQPLKEQPALNDSRYCLSSRLRVSATFWQNPRNHFRCQVQFYGLSENDEWTQDRAKPVTQIVSAEAWGRADCGSLWVSQPPEIRTLEGSSAFLPCSFNASQGRLAIGSVTWFRDEVVPGKEVRNGTPEFRGRLAPLASSRFLHDHQAELHIRDVRGHDASIYVCRVEVLGLGVGTGNGTRLVVEKEHPQLGAGTVLLLRAGFYAVSFLSVAVGSTVYYQGKCLTWKGPRRQLPAVVPAPLPPPCGSSAHLLPPVPGGRAKRSGSGATNFSLLKQAGDVEENPGPTSMDWIWRILFLVGAATGAHSGPEVQLVESGGGLVQAGGSLRLSCAASGRTFTMGWFRQAPGKEREFVAAISLSPTLAYYADSVKGRFTISRDNAKNTVVLQMNSLKPEDTALYYCAADRKSVMSIRPDYWGQGTQVTVSSGSGGGGSGGGGSGGGGSFEQVQLQQPGAELVKPGASVKMSCKASGYAFSSYWINWMKQKPGQGLEWIGQIYPGDGDTNYNGKFKGRATLTADTSSSTAYMQLSSLTSEDSAVYFCARSITTVVGCAMDYWGQGTSVTVSSTRIQNPDPAVYQLRDSKSSDKSVCLFTDFDSQTNVSQSKDSDVYITDKTVLDMRSMDFKSNSAVAWSNKSDFACANAFNNSIIPEDTFFPSPESSCGTLWVSQPPEIRTLEGSSAFLPCSFNASQGRLAIGSVTWFRDEVVPGKEVRNGTPEFRGRLAPLASSRFLHDHQAELHIRDVRGHDASIYVCRVEVLGLGVGTGNGTRLVVEKEHPQLGAGTVLLLRAGFYAVSFLSVAVGSTVYYQGKCLTWKGPRRQLPAVVPAPLPPPCGSSAHLLPPVPGGRAKRSGSGVKQTLNFDLLKLAGDVESNPGPSRGHMTEYKPTVRLATRDDVPRAVRTLAAAFADYPATRHTVDPDRHIERVTELQELFLTRVGLDIGKVWVADDGAAVAVWTTPESVEAGAVFAEIGPRMAELSGSRLAAQQQMEGLLAPHRPKEPAWFLATVGVSPDHQGKGLGSAVVLPGVEAAERAGVPAFLETSAPRNLPFYERLGFTVTADVEVPEGPRTWCMTRKPGA

SEQ ID NO: 4005 - protein, 1138 aa, Artificial Sequence
  Synthetic Polypeptide
MALPVTALLLPLALLLHAARPEVQLVESGGGLVQAGGSLRLSCAASGRTFSMGWFRQAPGKEREFVAAITYSGGSPYYADSVKGRFTISRDNAKNTVYLQMNSLKPEDTAVYYCAANPTYGSDWNAENWGQGTQVTVSSLEDLKNVFPPEVAVFEPSEAEISHTQKATLVCLATGFYPDHVELSWWVNGKEVHSGVSTDPQPLKEQPALNDSRYCLSSRLRVSATFWQNPRNHFRCQVQFYGLSENDEWTQDRAKPVTQIVSAEAWGRADCGSLWVSQPPEIRTLEGSSAFLPCSFNASQGRLAIGSVTWFRDEVVPGKEVRNGTPEFRGRLAPLASSRFLHDHQAELHIRDVRGHDASIYVCRVEVLGLGVGTGNGTRLVVEKEHPQLGAGTVLLLRAGFYAVSFLSVAVGSTVYYQGKCLTWKGPRRQLPAVVPAPLPPPCGSSAHLLPPVPGGRAKRSGSGATNFSLLKQAGDVEENPGPTSMDWIWRILFLVGAATGAHSGPEVQLVESGGGLVQAGGSLRLSCAASGRTFTMGWFRQAPGKEREFVAAISLSPTLAYYADSVKGRFTISRDNAKNTVVLQMNSLKPEDTALYYCAADRKSVMSIRPDYWGQGTQVTVSSTRIQNPDPAVYQLRDSKSSDKSVCLFTDFDSQTNVSQSKDSDVYITDKTVLDMRSMDFKSNSAVAWSNKSDFACANAFNNSIIPEDTFFPSPESSCGTLWVSQPPEIRTLEGSSAFLPCSFNASQGRLAIGSVTWFRDEVVPGKEVRNGTPEFRGRLAPLASSRFLHDHQAELHIRDVRGHDASIYVCRVEVLGLGVGTGNGTRLVVEKEHPQLGAGTVLLLRAGFYAVSFLSVAVGSTVYYQGKCLTWKGPRRQLPAVVPAPLPPPCGSSAHLLPPVPGGRAKRSGSGVKQTLNFDLLKLAGDVESNPGPSRGHMTEYKPTVRLATRDDVPRAVRTLAAAFADYPATRHTVDPDRHIERVTELQELFLTRVGLDIGKVWVADDGAAVAVWTTPESVEAGAVFAEIGPRMAELSGSRLAAQQQMEGLLAPHRPKEPAWFLATVGVSPDHQGKGLGSAVVLPGVEAAERAGVPAFLETSAPRNLPFYERLGFTVTADVEVPEGPRTWCMTRKPGA

SEQ ID NO: 4006 - protein, 578 aa, Artificial Sequence
  Synthetic Polypeptide
MALPVTALLLPLALLLHAARPACEVQLLESGGGLIQPGGSLRLSCAASGFTFSSHAMTWVRQAPGKGLEWVSAISGSGDYTHYADSVKGRFTISRDNSKNTVYLQMNSLRAEDSAVYYCAKDEDGGSLLGHRGQGTLVTVSSGTGGGGSGGGGSGGGGSEFGSLELWVSQPPEIRTLEGSSAFLPCSFNASQGRLAIGSVTWFRDEVVPGKEVRNGTPEFRGRLAPLASSRFLHDHQAELHIRDVRGHDASIYVCRVEVLGLGVGTGNGTRLVVEKEHPQLGAGTVLLLRAGFYAVSFLSVAVGSTVYYQGKCLTWKGPRRQLPAVVPAPLPPPCGSSAHLLPPVPGGRAKRSGSGATNFSLLKQAGDVEENPGPTRGHMTEYKPTVRLATRDDVPRAVRTLAAAFADYPATRHTVDPDRHIERVTELQELFLTRVGLDIGKVWVADDGAAVAVWTTPESVEAGAVFAEIGPRMAELSGSRLAAQQQMEGLLAPHRPKEPAWFLATVGVSPDHQGKGLGSAVVLPGVEAAERAGVPAFLETSAPRNLPFYERLGFTVTADVEVPEGPRTWCMTRKPGA

SEQ ID NO: 4007 - protein, 958 aa, Artificial Sequence
  Synthetic Polypeptide
MALPVTALLLPLALLLHAARPDIQMTQSPSSLSASVGDRVTITCKASDHINNWLAWYQQKPGQAPKLLIYGATTLETGVPSRFSGSGSGTDYTLTISSLQPEDFATYYCQQSWNTPWTFGQGTKLEIKRLELWVSQPPEIRTLEGSSAFLPCSFNASQGRLAIGSVTWFRDEVVPGKEVRNGTPEFRGRLAPLASSRFLHDHQAELHIRDVRGHDASIYVCRVEVLGLGVGTGNGTRLVVEKEHPQLGAGTVLLLRAGFYAVSFLSVAVGSTVYYQGKCLTWKGPRRQLPAVVPAPLPPPCGSSAHLLPPVPGGRAKRSGSGATNFSLLKQAGDVEENPGPTSMDWIWRILFLVGAATGAHSFEQVQLQQPGAELVKPGASVKMSCKASGYAFSSYWINWMKQKPGQGLEWIGQIYPGDGDTNYNGKFKGRATLTADTSSSTAYMQLSSLTSEDSAVYFCARSITTVVGCAMDYWGQGTSVTVSSTRGMRTEDLPKAVVFLEPQWYRVLEKDSVTLKCQGAYSPEDNSTQWFHNESLISSQASSYFIDAATVDDSGEYRCQTNLSTLSDPVQLEVHIGWLLLQAPRWVFKEEDPIHLRCHSWKNTALHKVTYLQNGKGRKYFHHNSDFYIPKATLKDSGSYFCRGLVGSKNVSSETVNITITQGLAVPTISSFFPPGYQVSFCLVMVLLFAVDTGLYFSVKTNIRSSTRDWKDHKFKWRKDPQDKRAKRSGSGVKQTLNFDLLKLAGDVESNPGPSRGHMTEYKPTVRLATRDDVPRAVRTLAAAFADYPATRHTVDPDRHIERVTELQELFLTRVGLDIGKVWVADDGAAVAVWTTPESVEAGAVFAEIGPRMAELSGSRLAAQQQMEGLLAPHRPKEPAWFLATVGVSPDHQGKGLGSAVVLPGVEAAERAGVPAFLETSAPRNLPFYERLGFTVTADVEVPEGPRTWCMTRKPGA

SEQ ID NO: 4008 - protein, 1012 aa, Artificial Sequence
  Synthetic Polypeptide
MALPVTALLLPLALLLHAARPACEVQLLESGGGLIQPGGSLRLSCAASGFTFSSHAMTWVRQAPGKGLEWVSAISGSGDYTHYADSVKGRFTISRDNSKNTVYLQMNSLRAEDSAVYYCAKDEDGGSLLGHRGQGTLVTVSSGTGGGGSGGGGSGGGGSEFGSLELWVSQPPEIRTLEGSSAFLPCSFNASQGRLAIGSVTWFRDEVVPGKEVRNGTPEFRGRLAPLASSRFLHDHQAELHIRDVRGHDASIYVCRVEVLGLGVGTGNGTRLVVEKEHPQLGAGTVLLLRAGFYAVSFLSVAVGSTVYYQGKCLTWKGPRRQLPAVVPAPLPPPCGSSAHLLPPVPGGRAKRSGSGATNFSLLKQAGDVEENPGPTSATMDWIWRILFLVGAATGAHSGPEVQLVESGGGLVQAGGSLRLSCAASGRTFSMGWFRQAPGKEREFVAAITYSGGSPYYADSVKGRFTISRDNAKNTVYLQMNSLKPEDTAVYYCAANPTYGSDWNAENWGQGTQVTVSSGSGGGGSGGGGSGGGGSFEGSTRGMRTEDLPKAVVFLEPQWYRVLEKDSVTLKCQGAYSPEDNSTQWFHNESLISSQASSYFIDAATVDDSGEYRCQTNLSTLSDPVQLEVHIGWLLLQAPRWVFKEEDPIHLRCHSWKNTALHKVTYLQNGKGRKYFHHNSDFYIPKATLKDSGSYFCRGLVGSKNVSSETVNITITQGLAVPTISSFFPPGYQVSFCLVMVLLFAVDTGLYFSVKTNIRSSTRDWKDHKFKWRKDPQDKRAKRSGSGVKQTLNFDLLKLAGDVESNPGPSRGHMTEYKPTVRLATRDDVPRAVRTLAAAFADYPATRHTVDPDRHIERVTELQELFLTRVGLDIGKVWVADDGAAVAVWTTPESVEAGAVFAEIGPRMAELSGSRLAAQQQMEGLLAPHRPKEPAWFLATVGVSPDHQGKGLGSAVVLPGVEAAERAGVPAFLETSAPRNLPFYERLGFTVTADVEVPEGPRTWCMTRKPGA

SEQ ID NO: 4009 - protein, 1163 aa, Artificial Sequence
  Synthetic Polypeptide
MALPVTALLLPLALLLHAARPDIQMTQSPSSLSASVGDRVTITCKASDHINNWLAWYQQKPGQAPKLLIYGATTLETGVPSRFSGSGSGTDYTLTISSLQPEDFATYYCQQSWNTPWTFGQGTKLEIKRLEGQPKANPTVTLFPPSSEELQANKATLVCLISDFYPGAVTVAWKADGSPVKAGVETTKPSKQSNNKYAASSYLSLTPEQWKSHRSYSCQVTHEGSTVEKTVAPTECSGSLWVSQPPEIRTLEGSSAFLPCSFNASQGRLAIGSVTWFRDEVVPGKEVRNGTPEFRGRLAPLASSRFLHDHQAELHIRDVRGHDASIYVCRVEVLGLGVGTGNGTRLVVEKEHPQLGAGTVLLLRAGFYAVSFLSVAVGSTVYYQGKCLTWKGPRRQLPAVVPAPLPPPCGSSAHLLPPVPGGRAKRSGSGATNFSLLKQAGDVEENPGPTSMDWIWRILFLVGAATGAHSFEQVQLQQPGAELVKPGASVKMSCKASGYAFSSYWINWMKQKPGQGLEWIGQIYPGDGDTNYNGKFKGRATLTADTSSSTAYMQLSSLTSEDSAVYFCARSITTVVGCAMDYWGQGTSVTVSSTRASTKGPSVFPLAPSSKSTSGGTAALGCLVKDYFPEPVTVSWNSGALTSGVHTFPAVLQSSGLYSLSSVVTVPSSSLGTQTYICNVNHKPSNTKVDKRVEPKSCGTGMRTEDLPKAVVFLEPQWYRVLEKDSVTLKCQGAYSPEDNSTQWFHNESLISSQASSYFIDAATVDDSGEYRCQTNLSTLSDPVQLEVHIGWLLLQAPRWVFKEEDPIHLRCHSWKNTALHKVTYLQNGKGRKYFHHNSDFYIPKATLKDSGSYFCRGLVGSKNVSSETVNITITQGLAVPTISSFFPPGYQVSFCLVMVLLFAVDTGLYFSVKTNIRSSTRDWKDHKFKWRKDPQDKRAKRSGSGVKQTLNFDLLKLAGDVESNPGPSRGGIHTMATYEVLCEVARKLGTDDREVVLFLLNVFIPQPTLAQLIGALRALKEEGRLTFPLLAECLFRAGRRDLLRDLLHLDPRFLERHLAGTMSYFSPYQLTVLHVDGELCARDIRSLIFLSKDTIGSRSTPQTFLHWVYCMENLDLLGPTDVDALMSMLRSLSRVDLQRQVQTLMGLHLSGPSHSQHYRHTP

SEQ ID NO: 4010 - protein, 1216 aa, Artificial Sequence
  Synthetic Polypeptide
MALPVTALLLPLALLLHAARPDIQMTQSPSSLSASVGDRVTITCKASDHINNWLAWYQQKPGQAPKLLIYGATTLETGVPSRFSGSGSGTDYTLTISSLQPEDFATYYCQQSWNTPWTFGQGTKLEIKRLEGQPKANPTVTLFPPSSEELQANKATLVCLISDFYPGAVTVAWKADGSPVKAGVETTKPSKQSNNKYAASSYLSLTPEQWKSHRSYSCQVTHEGSTVEKTVAPTECSGSLWVSQPPEIRTLEGSSAFLPCSFNASQGRLAIGSVTWFRDEVVPGKEVRNGTPEFRGRLAPLASSRFLHDHQAELHIRDVRGHDASIYVCRVEVLGLGVGTGNGTRLVVEKEHPQLGAGTVLLLRAGFYAVSFLSVAVGSTVYYQGKCLTWKGPRRQLPAVVPAPLPPPCGSSAHLLPPVPGGRAKRSGSGATNFSLLKQAGDVEENPGPTSMDWIWRILFLVGAATGAHSFEQVQLQQPGAELVKPGASVKMSCKASGYAFSSYWINWMKQKPGQGLEWIGQIYPGDGDTNYNGKFKGRATLTADTSSSTAYMQLSSLTSEDSAVYFCARSITTVVGCAMDYWGQGTSVTVSSTRASTKGPSVFPLAPSSKSTSGGTAALGCLVKDYFPEPVTVSWNSGALTSGVHTFPAVLQSSGLYSLSSVVTVPSSSLGTQTYICNVNHKPSNTKVDKRVEPKSCGTGMRTEDLPKAVVFLEPQWYRVLEKDSVTLKCQGAYSPEDNSTQWFHNESLISSQASSYFIDAATVDDSGEYRCQTNLSTLSDPVQLEVHIGWLLLQAPRWVFKEEDPIHLRCHSWKNTALHKVTYLQNGKGRKYFHHNSDFYIPKATLKDSGSYFCRGLVGSKNVSSETVNITITQGLAVPTISSFFPPGYQVSFCLVMVLLFAVDTGLYFSVKTNIRSSTRDWKDHKFKWRKDPQDKRAKRSGSGVKQTLNFDLLKLAGDVESNPGPSRGGIHTMSDSKEVPSLPFLRHLLEELDSHEDSLLLFLCHDAAPGCTTVTQALCSLSQQRKLTLAALVEMLYVLQRMDLLKSRFGLSKEGAEQLLGTSFLTRYRKLMVCVGEELDSSELRALRLFACNLNPSLSTALSESSRFVELVLALENVGLVSPSSVSVLADMLRTLRRLDLCQQLVEYEQQEQARYRYCYAASPSLPVRTLRRGHGASEHEQLCMPVQESSDSPELLRTPVQESSSDSPEQTT

SEQ ID NO: 4011 - protein, 1171 aa, Artificial Sequence
  Synthetic Polypeptide
MALPVTALLLPLALLLHAARPDIQMTQSPSSLSASVGDRVTITCKASDHINNWLAWYQQKPGQAPKLLIYGATTLETGVPSRFSGSGSGTDYTLTISSLQPEDFATYYCQQSWNTPWTFGQGTKLEIKRLEGQPKANPTVTLFPPSSEELQANKATLVCLISDFYPGAVTVAWKADGSPVKAGVETTKPSKQSNNKYAASSYLSLTPEQWKSHRSYSCQVTHEGSTVEKTVAPTECSGSLWVSQPPEIRTLEGSSAFLPCSFNASQGRLAIGSVTWFRDEVVPGKEVRNGTPEFRGRLAPLASSRFLHDHQAELHIRDVRGHDASIYVCRVEVLGLGVGTGNGTRLVVEKEHPQLGAGTVLLLRAGFYAVSFLSVAVGSTVYYQGKCLTWKGPRRQLPAVVPAPLPPPCGSSAHLLPPVPGGRAKRSGSGATNFSLLKQAGDVEENPGPTSMDWIWRILFLVGAATGAHSFEQVQLQQPGAELVKPGASVKMSCKASGYAFSSYWINWMKQKPGQGLEWIGQIYPGDGDTNYNGKFKGRATLTADTSSSTAYMQLSSLTSEDSAVYFCARSITTVVGCAMDYWGQGTSVTVSSTRASTKGPSVFPLAPSSKSTSGGTAALGCLVKDYFPEPVTVSWNSGALTSGVHTFPAVLQSSGLYSLSSVVTVPSSSLGTQTYICNVNHKPSNTKVDKRVEPKSCGTGMRTEDLPKAVVFLEPQWYRVLEKDSVTLKCQGAYSPEDNSTQWFHNESLISSQASSYFIDAATVDDSGEYRCQTNLSTLSDPVQLEVHIGWLLLQAPRWVFKEEDPIHLRCHSWKNTALHKVTYLQNGKGRKYFHHNSDFYIPKATLKDSGSYFCRGLVGSKNVSSETVNITITQGLAVPTISSFFPPGYQVSFCLVMVLLFAVDTGLYFSVKTNIRSSTRDWKDHKFKWRKDPQDKRAKRSGSGVKQTLNFDLLKLAGDVESNPGPSRGHMTEYKPTVRLATRDDVPRAVRTLAAAFADYPATRHTVDPDRHIERVTELQELFLTRVGLDIGKVWVADDGAAVAVWTTPESVEAGAVFAEIGPRMAELSGSRLAAQQQMEGLLAPHRPKEPAWFLATVGVSPDHQGKGLGSAVVLPGVEAAERAGVPAFLETSAPRNLPFYERLGFTVTADVEVPEGPRTWCMTRKPGA

SEQ ID NO: 4012 - protein, 1308 aa, Artificial Sequence
  Synthetic Polypeptide
MALPVTALLLPLALLLHAARPEVQLVESGGGLVQAGGSLRLSCAASGRTFSMGWFRQAPGKEREFVAAITYSGGSPYYADSVKGRFTISRDNAKNTVYLQMNSLKPEDTAVYYCAANPTYGSDWNAENWGQGTQVTVSSGTGGGGSGGGGSGGGGSEFDIQMTQSPSSLSASVGDRVTITCKASDHINNWLAWYQQKPGQAPKLLIYGATTLETGVPSRFSGSGSGTDYTLTISSLQPEDFATYYCQQSWNTPWTFGQGTKLEIKRLEGQPKANPTVTLFPPSSEELQANKATLVCLISDFYPGAVTVAWKADGSPVKAGVETTKPSKQSNNKYAASSYLSLTPEQWKSHRSYSCQVTHEGSTVEKTVAPTECSGSLWVSQPPEIRTLEGSSAFLPCSFNASQGRLAIGSVTWFRDEVVPGKEVRNGTPEFRGRLAPLASSRFLHDHQAELHIRDVRGHDASIYVCRVEVLGLGVGTGNGTRLVVEKEHPQLGAGTVLLLRAGFYAVSFLSVAVGSTVYYQGKCLTWKGPRRQLPAVVPAPLPPPCGSSAHLLPPVPGGRAKRSGSGATNFSLLKQAGDVEENPGPTSMDWIWRILFLVGAATGAHSFEQVQLQQPGAELVKPGASVKMSCKASGYAFSSYWINWMKQKPGQGLEWIGQIYPGDGDTNYNGKFKGRATLTADTSSSTAYMQLSSLTSEDSAVYFCARSITTVVGCAMDYWGQGTSVTVSSTRASTKGPSVFPLAPSSKSTSGGTAALGCLVKDYFPEPVTVSWNSGALTSGVHTFPAVLQSSGLYSLSSVVTVPSSSLGTQTYICNVNHKPSNTKVDKRVEPKSCGTGMRTEDLPKAVVFLEPQWYRVLEKDSVTLKCQGAYSPEDNSTQWFHNESLISSQASSYFIDAATVDDSGEYRCQTNLSTLSDPVQLEVHIGWLLLQAPRWVFKEEDPIHLRCHSWKNTALHKVTYLQNGKGRKYFHHNSDFYIPKATLKDSGSYFCRGLVGSKNVSSETVNITITQGLAVPTISSFFPPGYQVSFCLVMVLLFAVDTGLYFSVKTNIRSSTRDWKDHKFKWRKDPQDKRAKRSGSGVKQTLNFDLLKLAGDVESNPGPSRGHMTEYKPTVRLATRDDVPRAVRTLAAAFADYPATRHTVDPDRHIERVTELQELFLTRVGLDIGKVWVADDGAAVAVWTTPESVEAGAVFAEIGPRMAELSGSRLAAQQQMEGLLAPHRPKEPAWFLATVGVSPDHQGKGLGSAVVLPGVEAAERAGVPAFLETSAPRNLPFYERLGFTVTADVEVPEGPRTWCMTRKPGA

SEQ ID NO: 4013 - protein, 1445 aa, Artificial Sequence
  Synthetic Polypeptide
MALPVTALLLPLALLLHAARPEVQLVESGGGLVQAGGSLRLSCAASGRTFSMGWFRQAPGKEREFVAAITYSGGSPYYADSVKGRFTISRDNAKNTVYLQMNSLKPEDTAVYYCAANPTYGSDWNAENWGQGTQVTVSSGTGGGGSGGGGSGGGGSEFDIQMTQSPSSLSASVGDRVTITCKASDHINNWLAWYQQKPGQAPKLLIYGATTLETGVPSRFSGSGSGTDYTLTISSLQPEDFATYYCQQSWNTPWTFGQGTKLEIKRLEGQPKANPTVTLFPPSSEELQANKATLVCLISDFYPGAVTVAWKADGSPVKAGVETTKPSKQSNNKYAASSYLSLTPEQWKSHRSYSCQVTHEGSTVEKTVAPTECSGSLWVSQPPEIRTLEGSSAFLPCSFNASQGRLAIGSVTWFRDEVVPGKEVRNGTPEFRGRLAPLASSRFLHDHQAELHIRDVRGHDASIYVCRVEVLGLGVGTGNGTRLVVEKEHPQLGAGTVLLLRAGFYAVSFLSVAVGSTVYYQGKCLTWKGPRRQLPAVVPAPLPPPCGSSAHLLPPVPGGRAKRSGSGATNFSLLKQAGDVEENPGPTSMDWIWRILFLVGAATGAHSGPEVQLVESGGGLVQAGGSLRLSCAASGRTFTMGWFRQAPGKEREFVAAISLSPTLAYYADSVKGRFTISRDNAKNTVVLQMNSLKPEDTALYYCAADRKSVMSIRPDYWGQGTQVTVSSGSGGGGSGGGGSGGGGSFEQVQLQQPGAELVKPGASVKMSCKASGYAFSSYWINWMKQKPGQGLEWIGQIYPGDGDTNYNGKFKGRATLTADTSSSTAYMQLSSLTSEDSAVYFCARSITTVVGCAMDYWGQGTSVTVSSTRASTKGPSVFPLAPSSKSTSGGTAALGCLVKDYFPEPVTVSWNSGALTSGVHTFPAVLQSSGLYSLSSVVTVPSSSLGTQTYICNVNHKPSNTKVDKRVEPKSCGTGMRTEDLPKAVVFLEPQWYRVLEKDSVTLKCQGAYSPEDNSTQWFHNESLISSQASSYFIDAATVDDSGEYRCQTNLSTLSDPVQLEVHIGWLLLQAPRWVFKEEDPIHLRCHSWKNTALHKVTYLQNGKGRKYFHHNSDFYIPKATLKDSGSYFCRGLVGSKNVSSETVNITITQGLAVPTISSFFPPGYQVSFCLVMVLLFAVDTGLYFSVKTNIRSSTRDWKDHKFKWRKDPQDKRAKRSGSGVKQTLNFDLLKLAGDVESNPGPSRGHMTEYKPTVRLATRDDVPRAVRTLAAAFADYPATRHTVDPDRHIERVTELQELFLTRVGLDIGKVWVADDGAAVAVWTTPESVEAGAVFAEIGPRMAELSGSRLAAQQQMEGLLAPHRPKEPAWFLATVGVSPDHQGKGLGSAVVLPGVEAAERAGVPAFLETSAPRNLPFYERLGFTVTADVEVPEGPRTWCMTRKPGA

SEQ ID NO: 4014 - protein, 1178 aa, Artificial Sequence
  Synthetic Polypeptide
MALPVTALLLPLALLLHAARPEVQLVESGGGLVQAGGSLRLSCAASGRTFSMGWFRQAPGKEREFVAAITYSGGSPYYADSVKGRFTISRDNAKNTVYLQMNSLKPEDTAVYYCAANPTYGSDWNAENWGQGTQVTVSSLEGQPKANPTVTLFPPSSEELQANKATLVCLISDFYPGAVTVAWKADGSPVKAGVETTKPSKQSNNKYAASSYLSLTPEQWKSHRSYSCQVTHEGSTVEKTVAPTECSGSLWVSQPPEIRTLEGSSAFLPCSFNASQGRLAIGSVTWFRDEVVPGKEVRNGTPEFRGRLAPLASSRFLHDHQAELHIRDVRGHDASIYVCRVEVLGLGVGTGNGTRLVVEKEHPQLGAGTVLLLRAGFYAVSFLSVAVGSTVYYQGKCLTWKGPRRQLPAVVPAPLPPPCGSSAHLLPPVPGGRAKRSGSGATNFSLLKQAGDVEENPGPTSMDWIWRILFLVGAATGAHSGPEVQLVESGGGLVQAGGSLRLSCAASGRTFTMGWFRQAPGKEREFVAAISLSPTLAYYADSVKGRFTISRDNAKNTVVLQMNSLKPEDTALYYCAADRKSVMSIRPDYWGQGTQVTVSSTRASTKGPSVFPLAPSSKSTSGGTAALGCLVKDYFPEPVTVSWNSGALTSGVHTFPAVLQSSGLYSLSSVVTVPSSSLGTQTYICNVNHKPSNTKVDKRVEPKSCGTGMRTEDLPKAVVFLEPQWYRVLEKDSVTLKCQGAYSPEDNSTQWFHNESLISSQASSYFIDAATVDDSGEYRCQTNLSTLSDPVQLEVHIGWLLLQAPRWVFKEEDPIHLRCHSWKNTALHKVTYLQNGKGRKYFHHNSDFYIPKATLKDSGSYFCRGLVGSKNVSSETVNITITQGLAVPTISSFFPPGYQVSFCLVMVLLFAVDTGLYFSVKTNIRSSTRDWKDHKFKWRKDPQDKRAKRSGSGVKQTLNFDLLKLAGDVESNPGPSRGHMTEYKPTVRLATRDDVPRAVRTLAAAFADYPATRHTVDPDRHIERVTELQELFLTRVGLDIGKVWVADDGAAVAVWTTPESVEAGAVFAEIGPRMAELSGSRLAAQQQMEGLLAPHRPKEPAWFLATVGVSPDHQGKGLGSAVVLPGVEAAERAGVPAFLETSAPRNLPFYERLGFTVTADVEVPEGPRTWCMTRKPGA

SEQ ID NO: 4015 - protein, 1186 aa, Artificial Sequence
  Synthetic Polypeptide
MALPVTALLLPLALLLHAARPDIQMTQSPSSLSASVGDRVTITCKASDHINNWLAWYQQKPGQAPKLLIYGATTLETGVPSRFSGSGSGTDYTLTISSLQPEDFATYYCQQSWNTPWTFGQGTKLEIKRLEDLKNVFPPEVAVFEPSEAEISHTQKATLVCLATGFYPDHVELSWWVNGKEVHSGVSTDPQPLKEQPALNDSRYCLSSRLRVSATFWQNPRNHFRCQVQFYGLSENDEWTQDRAKPVTQIVSAEAWGRADCGSLWVSQPPEIRTLEGSSAFLPCSFNASQGRLAIGSVTWFRDEVVPGKEVRNGTPEFRGRLAPLASSRFLHDHQAELHIRDVRGHDASIYVCRVEVLGLGVGTGNGTRLVVEKEHPQLGAGTVLLLRAGFYAVSFLSVAVGSTVYYQGKCLTWKGPRRQLPAVVPAPLPPPCGSSAHLLPPVPGGRAKRSGSGATNFSLLKQAGDVEENPGPTSMDWIWRILFLVGAATGAHSFEQVQLQQPGAELVKPGASVKMSCKASGYAFSSYWINWMKQKPGQGLEWIGQIYPGDGDTNYNGKFKGRATLTADTSSSTAYMQLSSLTSEDSAVYFCARSITTVVGCAMDYWGQGTSVTVSSTRIQNPDPAVYQLRDSKSSDKSVCLFTDFDSQTNVSQSKDSDVYITDKTVLDMRSMDFKSNSAVAWSNKSDFACANAFNNSIIPEDTFFPSPESSCGTGMRTEDLPKAVVFLEPQWYRVLEKDSVTLKCQGAYSPEDNSTQWFHNESLISSQASSYFIDAATVDDSGEYRCQTNLSTLSDPVQLEVHIGWLLLQAPRWVFKEEDPIHLRCHSWKNTALHKVTYLQNGKGRKYFHHNSDFYIPKATLKDSGSYFCRGLVGSKNVSSETVNITITQGLAVPTISSFFPPGYQVSFCLVMVLLFAVDTGLYFSVKTNIRSSTRDWKDHKFKWRKDPQDKRAKRSGSGVKQTLNFDLLKLAGDVESNPGPSRGHMTEYKPTVRLATRDDVPRAVRTLAAAFADYPATRHTVDPDRHIERVTELQELFLTRVGLDIGKVWVADDGAAVAVWTTPESVEAGAVFAEIGPRMAELSGSRLAAQQQMEGLLAPHRPKEPAWFLATVGVSPDHQGKGLGSAVVLPGVEAAERAGVPAFLETSAPRNLPFYERLGFTVTADVEVPEGPRTWCMTRKPGA

SEQ ID NO: 4016 - protein, 1323 aa, Artificial Sequence
  Synthetic Polypeptide
MALPVTALLLPLALLLHAARPEVQLVESGGGLVQAGGSLRLSCAASGRTFSMGWFRQAPGKEREFVAAITYSGGSPYYADSVKGRFTISRDNAKNTVYLQMNSLKPEDTAVYYCAANPTYGSDWNAENWGQGTQVTVSSGTGGGGSGGGGSGGGGSEFDIQMTQSPSSLSASVGDRVTITCKASDHINNWLAWYQQKPGQAPKLLIYGATTLETGVPSRFSGSGSGTDYTLTISSLQPEDFATYYCQQSWNTPWTFGQGTKLEIKRLEDLKNVFPPEVAVFEPSEAEISHTQKATLVCLATGFYPDHVELSWWVNGKEVHSGVSTDPQPLKEQPALNDSRYCLSSRLRVSATFWQNPRNHFRCQVQFYGLSENDEWTQDRAKPVTQIVSAEAWGRADCGSLWVSQPPEIRTLEGSSAFLPCSFNASQGRLAIGSVTWFRDEVVPGKEVRNGTPEFRGRLAPLASSRFLHDHQAELHIRDVRGHDASIYVCRVEVLGLGVGTGNGTRLVVEKEHPQLGAGTVLLLRAGFYAVSFLSVAVGSTVYYQGKCLTWKGPRRQLPAVVPAPLPPPCGSSAHLLPPVPGGRAKRSGSGATNFSLLKQAGDVEENPGPTSMDWIWRILFLVGAATGAHSFEQVQLQQPGAELVKPGASVKMSCKASGYAFSSYWINWMKQKPGQGLEWIGQIYPGDGDTNYNGKFKGRATLTADTSSSTAYMQLSSLTSEDSAVYFCARSITTVVGCAMDYWGQGTSVTVSSTRIQNPDPAVYQLRDSKSSDKSVCLFTDFDSQTNVSQSKDSDVYITDKTVLDMRSMDFKSNSAVAWSNKSDFACANAFNNSIIPEDTFFPSPESSCGTGMRTEDLPKAVVFLEPQWYRVLEKDSVTLKCQGAYSPEDNSTQWFHNESLISSQASSYFIDAATVDDSGEYRCQTNLSTLSDPVQLEVHIGWLLLQAPRWVFKEEDPIHLRCHSWKNTALHKVTYLQNGKGRKYFHHNSDFYIPKATLKDSGSYFCRGLVGSKNVSSETVNITITQGLAVPTISSFFPPGYQVSFCLVMVLLFAVDTGLYFSVKTNIRSSTRDWKDHKFKWRKDPQDKRAKRSGSGVKQTLNFDLLKLAGDVESNPGPSRGHMTEYKPTVRLATRDDVPRAVRTLAAAFADYPATRHTVDPDRHIERVTELQELFLTRVGLDIGKVWVADDGAAVAVWTTPESVEAGAVFAEIGPRMAELSGSRLAAQQQMEGLLAPHRPKEPAWFLATVGVSPDHQGKGLGSAVVLPGVEAAERAGVPAFLETSAPRNLPFYERLGFTVTADVEVPEGPRTWCMTRKPGA

SEQ ID NO: 4017 - protein, 1460 aa, Artificial Sequence
  Synthetic Polypeptide
MALPVTALLLPLALLLHAARPEVQLVESGGGLVQAGGSLRLSCAASGRTFSMGWFRQAPGKEREFVAAITYSGGSPYYADSVKGRFTISRDNAKNTVYLQMNSLKPEDTAVYYCAANPTYGSDWNAENWGQGTQVTVSSGTGGGGSGGGGSGGGGSEFDIQMTQSPSSLSASVGDRVTITCKASDHINNWLAWYQQKPGQAPKLLIYGATTLETGVPSRFSGSGSGTDYTLTISSLQPEDFATYYCQQSWNTPWTFGQGTKLEIKRLEDLKNVFPPEVAVFEPSEAEISHTQKATLVCLATGFYPDHVELSWWVNGKEVHSGVSTDPQPLKEQPALNDSRYCLSSRLRVSATFWQNPRNHFRCQVQFYGLSENDEWTQDRAKPVTQIVSAEAWGRADCGSLWVSQPPEIRTLEGSSAFLPCSFNASQGRLAIGSVTWFRDEVVPGKEVRNGTPEFRGRLAPLASSRFLHDHQAELHIRDVRGHDASIYVCRVEVLGLGVGTGNGTRLVVEKEHPQLGAGTVLLLRAGFYAVSFLSVAVGSTVYYQGKCLTWKGPRRQLPAVVPAPLPPPCGSSAHLLPPVPGGRAKRSGSGATNFSLLKQAGDVEENPGPTSMDWIWRILFLVGAATGAHSGPEVQLVESGGGLVQAGGSLRLSCAASGRTFTMGWFRQAPGKEREFVAAISLSPTLAYYADSVKGRFTISRDNAKNTVVLQMNSLKPEDTALYYCAADRKSVMSIRPDYWGQGTQVTVSSGSGGGGSGGGGSGGGGSFEQVQLQQPGAELVKPGASVKMSCKASGYAFSSYWINWMKQKPGQGLEWIGQIYPGDGDTNYNGKFKGRATLTADTSSSTAYMQLSSLTSEDSAVYFCARSITTVVGCAMDYWGQGTSVTVSSTRIQNPDPAVYQLRDSKSSDKSVCLFTDFDSQTNVSQSKDSDVYITDKTVLDMRSMDFKSNSAVAWSNKSDFACANAFNNSIIPEDTFFPSPESSCGTGMRTEDLPKAVVFLEPQWYRVLEKDSVTLKCQGAYSPEDNSTQWFHNESLISSQASSYFIDAATVDDSGEYRCQTNLSTLSDPVQLEVHIGWLLLQAPRWVFKEEDPIHLRCHSWKNTALHKVTYLQNGKGRKYFHHNSDFYIPKATLKDSGSYFCRGLVGSKNVSSETVNITITQGLAVPTISSFFPPGYQVSFCLVMVLLFAVDTGLYFSVKTNIRSSTRDWKDHKFKWRKDPQDKRAKRSGSGVKQTLNFDLLKLAGDVESNPGPSRGHMTEYKPTVRLATRDDVPRAVRTLAAAFADYPATRHTVDPDRHIERVTELQELFLTRVGLDIGKVWVADDGAAVAVWTTPESVEAGAVFAEIGPRMAELSGSRLAAQQQMEGLLAPHRPKEPAWFLATVGVSPDHQGKGLGSAVVLPGVEAAERAGVPAFLETSAPRNLPFYERLGFTVTADVEVPEGPRTWCMTRKPGA

SEQ ID NO: 4018 - protein, 1193 aa, Artificial Sequence
  Synthetic Polypeptide
MALPVTALLLPLALLLHAARPEVQLVESGGGLVQAGGSLRLSCAASGRTFSMGWFRQAPGKEREFVAAITYSGGSPYYADSVKGRFTISRDNAKNTVYLQMNSLKPEDTAVYYCAANPTYGSDWNAENWGQGTQVTVSSLEDLKNVFPPEVAVFEPSEAEISHTQKATLVCLATGFYPDHVELSWWVNGKEVHSGVSTDPQPLKEQPALNDSRYCLSSRLRVSATFWQNPRNHFRCQVQFYGLSENDEWTQDRAKPVTQIVSAEAWGRADCGSLWVSQPPEIRTLEGSSAFLPCSFNASQGRLAIGSVTWFRDEVVPGKEVRNGTPEFRGRLAPLASSRFLHDHQAELHIRDVRGHDASIYVCRVEVLGLGVGTGNGTRLVVEKEHPQLGAGTVLLLRAGFYAVSFLSVAVGSTVYYQGKCLTWKGPRRQLPAVVPAPLPPPCGSSAHLLPPVPGGRAKRSGSGATNFSLLKQAGDVEENPGPTSMDWIWRILFLVGAATGAHSGPEVQLVESGGGLVQAGGSLRLSCAASGRTFTMGWFRQAPGKEREFVAAISLSPTLAYYADSVKGRFTISRDNAKNTVVLQMNSLKPEDTALYYCAADRKSVMSIRPDYWGQGTQVTVSSTRIQNPDPAVYQLRDSKSSDKSVCLFTDFDSQTNVSQSKDSDVYITDKTVLDMRSMDFKSNSAVAWSNKSDFACANAFNNSIIPEDTFFPSPESSCGTGMRTEDLPKAVVFLEPQWYRVLEKDSVTLKCQGAYSPEDNSTQWFHNESLISSQASSYFIDAATVDDSGEYRCQTNLSTLSDPVQLEVHIGWLLLQAPRWVFKEEDPIHLRCHSWKNTALHKVTYLQNGKGRKYFHHNSDFYIPKATLKDSGSYFCRGLVGSKNVSSETVNITITQGLAVPTISSFFPPGYQVSFCLVMVLLFAVDTGLYFSVKTNIRSSTRDWKDHKFKWRKDPQDKRAKRSGSGVKQTLNFDLLKLAGDVESNPGPSRGHMTEYKPTVRLATRDDVPRAVRTLAAAFADYPATRHTVDPDRHIERVTELQELFLTRVGLDIGKVWVADDGAAVAVWTTPESVEAGAVFAEIGPRMAELSGSRLAAQQQMEGLLAPHRPKEPAWFLATVGVSPDHQGKGLGSAVVLPGVEAAERAGVPAFLETSAPRNLPFYERLGFTVTADVEVPEGPRTWCMTRKPGA

SEQ ID NO: 4019 - protein, 578 aa, Artificial Sequence; identical to SEQ ID NO: 4006
  Synthetic Polypeptide

SEQ ID NO: 4020 - protein, 1013 aa, Artificial Sequence
  Synthetic Polypeptide
MALPVTALLLPLALLLHAARPDIQMTQSPSSLSASVGDRVTITCKASDHINNWLAWYQQKPGQAPKLLIYGATTLETGVPSRFSGSGSGTDYTLTISSLQPEDFATYYCQQSWNTPWTFGQGTKLEIKRLEGMRTEDLPKAVVFLEPQWYRVLEKDSVTLKCQGAYSPEDNSTQWFHNESLISSQASSYFIDAATVDDSGEYRCQTNLSTLSDPVQLEVHIGWLLLQAPRWVFKEEDPIHLRCHSWKNTALHKVTYLQNGKGRKYFHHNSDFYIPKATLKDSGSYFCRGLVGSKNVSSETVNITITQGLAVSTISSFFPPGYQVSFCLVMVLLFAVDTGLYFSVKTNIRSSTRDWKDHKFKWRKDPQDKRAKRSGSGATNFSLLKQAGDVEENPGPTSMDWIWRILFLVGAATGAHSFEQVQLQQPGAELVKPGASVKMSCKASGYAFSSYWINWMKQKPGQGLEWIGQIYPGDGDTNYNGKFKGRATLTADTSSSTAYMQLSSLTSEDSAVYFCARSITTVVGCAMDYWGQGTSVTVSSTRGMRTEDLPKAVVFLEPQWYRVLEKDSVTLKCQGAYSPEDNSTQWFHNESLISSQASSYFIDAATVDDSGEYRCQTNLSTLSDPVQLEVHIGWLLLQAPRWVFKEEDPIHLRCHSWKNTALHKVTYLQNGKGRKYFHHNSDFYIPKATLKDSGSYFCRGLVGSKNVSSETVNITITQGLAVPTISSFFPPGYQVSFCLVMVLLFAVDTGLYFSVKTNIRSSTRDWKDHKFKWRKDPQDKRAKRSGSGVKQTLNFDLLKLAGDVESNPGPSRGHMTEYKPTVRLATRDDVPRAVRTLAAAFADYPATRHTVDPDRHIERVTELQELFLTRVGLDIGKVWVADDGAAVAVWTTPESVEAGAVFAEIGPRMAELSGSRLAAQQQMEGLLAPHRPKEPAWFLATVGVSPDHQGKGLGSAVVLPGVEAAERAGVPAFLETSAPRNLPFYERLGFTVTADVEVPEGPRTWCMTRKPGA

SEQ ID NO: 4021 - protein, 1067 aa, Artificial Sequence
  Synthetic Polypeptide
MALPVTALLLPLALLLHAARPACEVQLLESGGGLIQPGGSLRLSCAASGFTFSSHAMTWVRQAPGKGLEWVSAISGSGDYTHYADSVKGRFTISRDNSKNTVYLQMNSLRAEDSAVYYCAKDEDGGSLLGHRGQGTLVTVSSGTGGGGSGGGGSGGGGSEFGSLEGMRTEDLPKAVVFLEPQWYRVLEKDSVTLKCQGAYSPEDNSTQWFHNESLISSQASSYFIDAATVDDSGEYRCQTNLSTLSDPVQLEVHIGWLLLQAPRWVFKEEDPIHLRCHSWKNTALHKVTYLQNGKGRKYFHHNSDFYIPKATLKDSGSYFCRGLVGSKNVSSETVNITITQGLAVSTISSFFPPGYQVSFCLVMVLLFAVDTGLYFSVKTNIRSSTRDWKDHKFKWRKDPQDKRAKRSGSGATNFSLLKQAGDVEENPGPTSATMDWIWRILFLVGAATGAHSGPEVQLVESGGGLVQAGGSLRLSCAASGRTFSMGWFRQAPGKEREFVAAITYSGGSPYYADSVKGRFTISRDNAKNTVYLQMNSLKPEDTAVYYCAANPTYGSDWNAENWGQGTQVTVSSGSGGGGSGGGGSGGGGSFEGSTRGMRTEDLPKAVVFLEPQWYRVLEKDSVTLKCQGAYSPEDNSTQWFHNESLISSQASSYFIDAATVDDSGEYRCQTNLSTLSDPVQLEVHIGWLLLQAPRWVFKEEDPIHLRCHSWKNTALHKVTYLQNGKGRKYFHHNSDFYIPKATLKDSGSYFCRGLVGSKNVSSETVNITITQGLAVPTISSFFPPGYQVSFCLVMVLLFAVDTGLYFSVKTNIRSSTRDWKDHKFKWRKDPQDKRAKRSGSGVKQTLNFDLLKLAGDVESNPGPSRGHMTEYKPTVRLATRDDVPRAVRTLAAAFADYPATRHTVDPDRHIERVTELQELFLTRVGLDIGKVWVADDGAAVAVWTTPESVEAGAVFAEIGPRMAELSGSRLAAQQQMEGLLAPHRPKEPAWFLATVGVSPDHQGKGLGSAVVLPGVEAAERAGVPAFLETSAPRNLPFYERLGFTVTADVEVPEGPRTWCMTRKPGA

SEQ ID NO: 4022 - protein, 1218 aa, Artificial Sequence
  Synthetic Polypeptide
MALPVTALLLPLALLLHAARPDIQMTQSPSSLSASVGDRVTITCKASDHINNWLAWYQQKPGQAPKLLIYGATTLETGVPSRFSGSGSGTDYTLTISSLQPEDFATYYCQQSWNTPWTFGQGTKLEIKRLEGQPKANPTVTLFPPSSEELQANKATLVCLISDFYPGAVTVAWKADGSPVKAGVETTKPSKQSNNKYAASSYLSLTPEQWKSHRSYSCQVTHEGSTVEKTVAPTECSGSGMRTEDLPKAVVFLEPQWYRVLEKDSVTLKCQGAYSPEDNSTQWFHNESLISSQASSYFIDAATVDDSGEYRCQTNLSTLSDPVQLEVHIGWLLLQAPRWVFKEEDPIHLRCHSWKNTALHKVTYLQNGKGRKYFHHNSDFYIPKATLKDSGSYFCRGLVGSKNVSSETVNITITQGLAVSTISSFFPPGYQVSFCLVMVLLFAVDTGLYFSVKTNIRSSTRDWKDHKFKWRKDPQDKRAKRSGSGATNFSLLKQAGDVEENPGPTSMDWIWRILFLVGAATGAHSFEQVQLQQPGAELVKPGASVKMSCKASGYAFSSYWINWMKQKPGQGLEWIGQIYPGDGDTNYNGKFKGRATLTADTSSSTAYMQLSSLTSEDSAVYFCARSITTVVGCAMDYWGQGTSVTVSSTRASTKGPSVFPLAPSSKSTSGGTAALGCLVKDYFPEPVTVSWNSGALTSGVHTFPAVLQSSGLYSLSSVVTVPSSSLGTQTYICNVNHKPSNTKVDKRVEPKSCGTGMRTEDLPKAVVFLEPQWYRVLEKDSVTLKCQGAYSPEDNSTQWFHNESLISSQASSYFIDAATVDDSGEYRCQTNLSTLSDPVQLEVHIGWLLLQAPRWVFKEEDPIHLRCHSWKNTALHKVTYLQNGKGRKYFHHNSDFYIPKATLKDSGSYFCRGLVGSKNVSSETVNITITQGLAVPTISSFFPPGYQVSFCLVMVLLFAVDTGLYFSVKTNIRSSTRDWKDHKFKWRKDPQDKRAKRSGSGVKQTLNFDLLKLAGDVESNPGPSRGGIHTMATYEVLCEVARKLGTDDREVVLFLLNVFIPQPTLAQLIGALRALKEEGRLTFPLLAECLFRAGRRDLLRDLLHLDPRFLERHLAGTMSYFSPYQLTVLHVDGELCARDIRSLIFLSKDTIGSRSTPQTFLHWVYCMENLDLLGPTDVDALMSMLRSLSRVDLQRQVQTLMGLHLSGPSHSQHYRHTP

SEQ ID NO: 4023 - protein, 1271 aa, Artificial Sequence
  Synthetic Polypeptide
MALPVTALLLPLALLLHAARPDIQMTQSPSSLSASVGDRVTITCKASDHINNWLAWYQQKPGQAPKLLIYGATTLETGVPSRFSGSGSGTDYTLTISSLQPEDFATYYCQQSWNTPWTFGQGTKLEIKRLEGQPKANPTVTLFPPSSEELQANKATLVCLISDFYPGAVTVAWKADGSPVKAGVETTKPSKQSNNKYAASSYLSLTPEQWKSHRSYSCQVTHEGSTVEKTVAPTECSGSGMRTEDLPKAVVFLEPQWYRVLEKDSVTLKCQGAYSPEDNSTQWFHNESLISSQASSYFIDAATVDDSGEYRCQTNLSTLSDPVQLEVHIGWLLLQAPRWVFKEEDPIHLRCHSWKNTALHKVTYLQNGKGRKYFHHNSDFYIPKATLKDSGSYFCRGLVGSKNVSSETVNITITQGLAVSTISSFFPPGYQVSFCLVMVLLFAVDTGLYFSVKTNIRSSTRDWKDHKFKWRKDPQDKRAKRSGSGATNFSLLKQAGDVEENPGPTSMDWIWRILFLVGAATGAHSFEQVQLQQPGAELVKPGASVKMSCKASGYAFSSYWINWMKQKPGQGLEWIGQIYPGDGDTNYNGKFKGRATLTADTSSSTAYMQLSSLTSEDSAVYFCARSITTVVGCAMDYWGQGTSVTVSSTRASTKGPSVFPLAPSSKSTSGGTAALGCLVKDYFPEPVTVSWNSGALTSGVHTFPAVLQSSGLYSLSSVVTVPSSSLGTQTYICNVNHKPSNTKVDKRVEPKSCGTGMRTEDLPKAVVFLEPQWYRVLEKDSVTLKCQGAYSPEDNSTQWFHNESLISSQASSYFIDAATVDDSGEYRCQTNLSTLSDPVQLEVHIGWLLLQAPRWVFKEEDPIHLRCHSWKNTALHKVTYLQNGKGRKYFHHNSDFYIPKATLKDSGSYFCRGLVGSKNVSSETVNITITQGLAVPTISSFFPPGYQVSFCLVMVLLFAVDTGLYFSVKTNIRSSTRDWKDHKFKWRKDPQDKRAKRSGSGVKQTLNFDLLKLAGDVESNPGPSRGGIHTMSDSKEVPSLPFLRHLLEELDSHEDSLLLFLCHDAAPGCTTVTQALCSLSQQRKLTLAALVEMLYVLQRMDLLKSRFGLSKEGAEQLLGTSFLTRYRKLMVCVGEELDSSELRALRLFACNLNPSLSTALSESSRFVELVLALENVGLVSPSSVSVLADMLRTLRRLDLCQQLVEYEQQEQARYRYCYAASPSLPVRTLRRGHGASEHEQLCMPVQESSDSPELLRTPVQESSSDSPEQTT

SEQ ID NO: 4024 - protein, 1226 aa, Artificial Sequence
  Synthetic Polypeptide
MALPVTALLLPLALLLHAARPDIQMTQSPSSLSASVGDRVTITCKASDHINNWLAWYQQKPGQAPKLLIYGATTLETGVPSRFSGSGSGTDYTLTISSLQPEDFATYYCQQSWNTPWTFGQGTKLEIKRLEGQPKANPTVTLFPPSSEELQANKATLVCLISDFYPGAVTVAWKADGSPVKAGVETTKPSKQSNNKYAASSYLSLTPEQWKSHRSYSCQVTHEGSTVEKTVAPTECSGSGMRTEDLPKAVVFLEPQWYRVLEKDSVTLKCQGAYSPEDNSTQWFHNESLISSQASSYFIDAATVDDSGEYRCQTNLSTLSDPVQLEVHIGWLLLQAPRWVFKEEDPIHLRCHSWKNTALHKVTYLQNGKGRKYFHHNSDFYIPKATLKDSGSYFCRGLVGSKNVSSETVNITITQGLAVSTISSFFPPGYQVSFCLVMVLLFAVDTGLYFSVKTNIRSSTRDWKDHKFKWRKDPQDKRAKRSGSGATNFSLLKQAGDVEENPGPTSMDWIWRILFLVGAATGAHSFEQVQLQQPGAELVKPGASVKMSCKASGYAFSSYWINWMKQKPGQGLEWIGQIYPGDGDTNYNGKFKGRATLTADTSSSTAYMQLSSLTSEDSAVYFCARSITTVVGCAMDYWGQGTSVTVSSTRASTKGPSVFPLAPSSKSTSGGTAALGCLVKDYFPEPVTVSWNSGALTSGVHTFPAVLQSSGLYSLSSVVTVPSSSLGTQTYICNVNHKPSNTKVDKRVEPKSCGTGMRTEDLPKAVVFLEPQWYRVLEKDSVTLKCQGAYSPEDNSTQWFHNESLISSQASSYFIDAATVDDSGEYRCQTNLSTLSDPVQLEVHIGWLLLQAPRWVFKEEDPIHLRCHSWKNTALHKVTYLQNGKGRKYFHHNSDFYIPKATLKDSGSYFCRGLVGSKNVSSETVNITITQGLAVPTISSFFPPGYQVSFCLVMVLLFAVDTGLYFSVKTNIRSSTRDWKDHKFKWRKDPQDKRAKRSGSGVKQTLNFDLLKLAGDVESNPGPSRGHMTEYKPTVRLATRDDVPRAVRTLAAAFADYPATRHTVDPDRHIERVTELQELFLTRVGLDIGKVWVADDGAAVAVWTTPESVEAGAVFAEIGPRMAELSGSRLAAQQQMEGLLAPHRPKEPAWFLATVGVSPDHQGKGLGSAVVLPGVEAAERAGVPAFLETSAPRNLPFYERLGFTVTADVEVPEGPRTWCMTRKPGA

SEQ ID NO: 4025 - protein, 1363 aa, Artificial Sequence
  Synthetic Polypeptide
MALPVTALLLPLALLLHAARPEVQLVESGGGLVQAGGSLRLSCAASGRTFSMGWFRQAPGKEREFVAAITYSGGSPYYADSVKGRFTISRDNAKNTVYLQMNSLKPEDTAVYYCAANPTYGSDWNAENWGQGTQVTVSSGTGGGGSGGGGSGGGGSEFDIQMTQSPSSLSASVGDRVTITCKASDHINNWLAWYQQKPGQAPKLLIYGATTLETGVPSRFSGSGSGTDYTLTISSLQPEDFATYYCQQSWNTPWTFGQGTKLEIKRLEGQPKANPTVTLFPPSSEELQANKATLVCLISDFYPGAVTVAWKADGSPVKAGVETTKPSKQSNNKYAASSYLSLTPEQWKSHRSYSCQVTHEGSTVEKTVAPTECSGSGMRTEDLPKAVVFLEPQWYRVLEKDSVTLKCQGAYSPEDNSTQWFHNESLISSQASSYFIDAATVDDSGEYRCQTNLSTLSDPVQLEVHIGWLLLQAPRWVFKEEDPIHLRCHSWKNTALHKVTYLQNGKGRKYFHHNSDFYIPKATLKDSGSYFCRGLVGSKNVSSETVNITITQGLAVSTISSFFPPGYQVSFCLVMVLLFAVDTGLYFSVKTNIRSSTRDWKDHKFKWRKDPQDKRAKRSGSGATNFSLLKQAGDVEENPGPTSMDWIWRILFLVGAATGAHSFEQVQLQQPGAELVKPGASVKMSCKASGYAFSSYWINWMKQKPGQGLEWIGQIYPGDGDTNYNGKFKGRATLTADTSSSTAYMQLSSLTSEDSAVYFCARSITTVVGCAMDYWGQGTSVTVSSTRASTKGPSVFPLAPSSKSTSGGTAALGCLVKDYFPEPVTVSWNSGALTSGVHTFPAVLQSSGLYSLSSVVTVPSSSLGTQTYICNVNHKPSNTKVDKRVEPKSCGTGMRTEDLPKAVVFLEPQWYRVLEKDSVTLKCQGAYSPEDNSTQWFHNESLISSQASSYFIDAATVDDSGEYRCQTNLSTLSDPVQLEVHIGWLLLQAPRWVFKEEDPIHLRCHSWKNTALHKVTYLQNGKGRKYFHHNSDFYIPKATLKDSGSYFCRGLVGSKNVSSETVNITITQGLAVPTISSFFPPGYQVSFCLVMVLLFAVDTGLYFSVKTNIRSSTRDWKDHKFKWRKDPQDKRAKRSGSGVKQTLNFDLLKLAGDVESNPGPSRGHMTEYKPTVRLATRDDVPRAVRTLAAAFADYPATRHTVDPDRHIERVTELQELFLTRVGLDIGKVWVADDGAAVAVWTTPESVEAGAVFAEIGPRMAELSGSRLAAQQQMEGLLAPHRPKEPAWFLATVGVSPDHQGKGLGSAVVLPGVEAAERAGVPAFLETSAPRNLPFYERLGFTVTADVEVPEGPRTWCMTRKPGA

SEQ ID NO: 4026 - protein, 1500 aa, Artificial Sequence
  Synthetic Polypeptide
MALPVTALLLPLALLLHAARPEVQLVESGGGLVQAGGSLRLSCAASGRTFSMGWFRQAPGKEREFVAAITYSGGSPYYADSVKGRFTISRDNAKNTVYLQMNSLKPEDTAVYYCAANPTYGSDWNAENWGQGTQVTVSSGTGGGGSGGGGSGGGGSEFDIQMTQSPSSLSASVGDRVTITCKASDHINNWLAWYQQKPGQAPKLLIYGATTLETGVPSRFSGSGSGTDYTLTISSLQPEDFATYYCQQSWNTPWTFGQGTKLEIKRLEGQPKANPTVTLFPPSSEELQANKATLVCLISDFYPGAVTVAWKADGSPVKAGVETTKPSKQSNNKYAASSYLSLTPEQWKSHRSYSCQVTHEGSTVEKTVAPTECSGSGMRTEDLPKAVVFLEPQWYRVLEKDSVTLKCQGAYSPEDNSTQWFHNESLISSQASSYFIDAATVDDSGEYRCQTNLSTLSDPVQLEVHIGWLLLQAPRWVFKEEDPIHLRCHSWKNTALHKVTYLQNGKGRKYFHHNSDFYIPKATLKDSGSYFCRGLVGSKNVSSETVNITITQGLAVSTISSFFPPGYQVSFCLVMVLLFAVDTGLYFSVKTNIRSSTRDWKDHKFKWRKDPQDKRAKRSGSGATNFSLLKQAGDVEENPGPTSMDWIWRILFLVGAATGAHSGPEVQLVESGGGLVQAGGSLRLSCAASGRTFTMGWFRQAPGKEREFVAAISLSPTLAYYADSVKGRFTISRDNAKNTVVLQMNSLKPEDTALYYCAADRKSVMSIRPDYWGQGTQVTVSSGSGGGGSGGGGSGGGGSFEQVQLQQPGAELVKPGASVKMSCKASGYAFSSYWINWMKQKPGQGLEWIGQIYPGDGDTNYNGKFKGRATLTADTSSSTAYMQLSSLTSEDSAVYFCARSITTVVGCAMDYWGQGTSVTVSSTRASTKGPSVFPLAPSSKSTSGGTAALGCLVKDYFPEPVTVSWNSGALTSGVHTFPAVLQSSGLYSLSSVVTVPSSSLGTQTYICNVNHKPSNTKVDKRVEPKSCGTGMRTEDLPKAVVFLEPQWYRVLEKDSVTLKCQGAYSPEDNSTQWFHNESLISSQASSYFIDAATVDDSGEYRCQTNLSTLSDPVQLEVHIGWLLLQAPRWVFKEEDPIHLRCHSWKNTALHKVTYLQNGKGRKYFHHNSDFYIPKATLKDSGSYFCRGLVGSKNVSSETVNITITQGLAVPTISSFFPPGYQVSFCLVMVLLFAVDTGLYFSVKTNIRSSTRDWKDHKFKWRKDPQDKRAKRSGSGVKQTLNFDLLKLAGDVESNPGPSRGHMTEYKPTVRLATRDDVPRAVRTLAAAFADYPATRHTVDPDRHIERVTELQELFLTRVGLDIGKVWVADDGAAVAVWTTPESVEAGAVFAEIGPRMAELSGSRLAAQQQMEGLLAPHRPKEPAWFLATVGVSPDHQGKGLGSAVVLPGVEAAERAGVPAFLETSAPRNLPFYERLGFTVTADVEVPEGPRTWCMTRKPGA

SEQ ID NO: 4027 - protein, 1233 aa, Artificial Sequence
  Synthetic Polypeptide
MALPVTALLLPLALLLHAARPEVQLVESGGGLVQAGGSLRLSCAASGRTFSMGWFRQAPGKEREFVAAITYSGGSPYYADSVKGRFTISRDNAKNTVYLQMNSLKPEDTAVYYCAANPTYGSDWNAENWGQGTQVTVSSLEGQPKANPTVTLFPPSSEELQANKATLVCLISDFYPGAVTVAWKADGSPVKAGVETTKPSKQSNNKYAASSYLSLTPEQWKSHRSYSCQVTHEGSTVEKTVAPTECSGSGMRTEDLPKAVVFLEPQWYRVLEKDSVTLKCQGAYSPEDNSTQWFHNESLISSQASSYFIDAATVDDSGEYRCQTNLSTLSDPVQLEVHIGWLLLQAPRWVFKEEDPIHLRCHSWKNTALHKVTYLQNGKGRKYFHHNSDFYIPKATLKDSGSYFCRGLVGSKNVSSETVNITITQGLAVSTISSFFPPGYQVSFCLVMVLLFAVDTGLYFSVKTNIRSSTRDWKDHKFKWRKDPQDKRAKRSGSGATNFSLLKQAGDVEENPGPTSMDWIWRILFLVGAATGAHSGPEVQLVESGGGLVQAGGSLRLSCAASGRTFTMGWFRQAPGKEREFVAAISLSPTLAYYADSVKGRFTISRDNAKNTVVLQMNSLKPEDTALYYCAADRKSVMSIRPDYWGQGTQVTVSSTRASTKGPSVFPLAPSSKSTSGGTAALGCLVKDYFPEPVTVSWNSGALTSGVHTFPAVLQSSGLYSLSSVVTVPSSSLGTQTYICNVNHKPSNTKVDKRVEPKSCGTGMRTEDLPKAVVFLEPQWYRVLEKDSVTLKCQGAYSPEDNSTQWFHNESLISSQASSYFIDAATVDDSGEYRCQTNLSTLSDPVQLEVHIGWLLLQAPRWVFKEEDPIHLRCHSWKNTALHKVTYLQNGKGRKYFHHNSDFYIPKATLKDSGSYFCRGLVGSKNVSSETVNITITQGLAVPTISSFFPPGYQVSFCLVMVLLFAVDTGLYFSVKTNIRSSTRDWKDHKFKWRKDPQDKRAKRSGSGVKQTLNFDLLKLAGDVESNPGPSRGHMTEYKPTVRLATRDDVPRAVRTLAAAFADYPATRHTVDPDRHIERVTELQELFLTRVGLDIGKVWVADDGAAVAVWTTPESVEAGAVFAEIGPRMAELSGSRLAAQQQMEGLLAPHRPKEPAWFLATVGVSPDHQGKGLGSAVVLPGVEAAERAGVPAFLETSAPRNLPFYERLGFTVTADVEVPEGPRTWCMTRKPGA

SEQ ID NO: 4028 - protein, 1241 aa, Artificial Sequence
  Synthetic Polypeptide
MALPVTALLLPLALLLHAARPDIQMTQSPSSLSASVGDRVTITCKASDHINNWLAWYQQKPGQAPKLLIYGATTLETGVPSRFSGSGSGTDYTLTISSLQPEDFATYYCQQSWNTPWTFGQGTKLEIKRLEDLKNVFPPEVAVFEPSEAEISHTQKATLVCLATGFYPDHVELSWWVNGKEVHSGVSTDPQPLKEQPALNDSRYCLSSRLRVSATFWQNPRNHFRCQVQFYGLSENDEWTQDRAKPVTQIVSAEAWGRADCGSGMRTEDLPKAVVFLEPQWYRVLEKDSVTLKCQGAYSPEDNSTQWFHNESLISSQASSYFIDAATVDDSGEYRCQTNLSTLSDPVQLEVHIGWLLLQAPRWVFKEEDPIHLRCHSWKNTALHKVTYLQNGKGRKYFHHNSDFYIPKATLKDSGSYFCRGLVGSKNVSSETVNITITQGLAVSTISSFFPPGYQVSFCLVMVLLFAVDTGLYFSVKTNIRSSTRDWKDHKFKWRKDPQDKRAKRSGSGATNFSLLKQAGDVEENPGPTSMDWIWRILFLVGAATGAHSFEQVQLQQPGAELVKPGASVKMSCKASGYAFSSYWINWMKQKPGQGLEWIGQIYPGDGDTNYNGKFKGRATLTADTSSSTAYMQLSSLTSEDSAVYFCARSITTVVGCAMDYWGQGTSVTVSSTRIQNPDPAVYQLRDSKSSDKSVCLFTDFDSQTNVSQSKDSDVYITDKTVLDMRSMDFKSNSAVAWSNKSDFACANAFNNSIIPEDTFFPSPESSCGTGMRTEDLPKAVVFLEPQWYRVLEKDSVTLKCQGAYSPEDNSTQWFHNESLISSQASSYFIDAATVDDSGEYRCQTNLSTLSDPVQLEVHIGWLLLQAPRWVFKEEDPIHLRCHSWKNTALHKVTYLQNGKGRKYFHHNSDFYIPKATLKDSGSYFCRGLVGSKNVSSETVNITITQGLAVPTISSFFPPGYQVSFCLVMVLLFAVDTGLYFSVKTNIRSSTRDWKDHKFKWRKDPQDKRAKRSGSGVKQTLNFDLLKLAGDVESNPGPSRGHMTEYKPTVRLATRDDVPRAVRTLAAAFADYPATRHTVDPDRHIERVTELQELFLTRVGLDIGKVWVADDGAAVAVWTTPESVEAGAVFAEIGPRMAELSGSRLAAQQQMEGLLAPHRPKEPAWFLATVGVSPDHQGKGLGSAVVLPGVEAAERAGVPAFLETSAPRNLPFYERLGFTVTADVEVPEGPRTWCMTRKPGA

SEQ ID NO: 4029 - protein, 1378 aa, Artificial Sequence
  Synthetic Polypeptide
MALPVTALLLPLALLLHAARPEVQLVESGGGLVQAGGSLRLSCAASGRTFSMGWFRQAPGKEREFVAAITYSGGSPYYADSVKGRFTISRDNAKNTVYLQMNSLKPEDTAVYYCAANPTYGSDWNAENWGQGTQVTVSSGTGGGGSGGGGSGGGGSEFDIQMTQSPSSLSASVGDRVTITCKASDHINNWLAWYQQKPGQAPKLLIYGATTLETGVPSRFSGSGSGTDYTLTISSLQPEDFATYYCQQSWNTPWTFGQGTKLEIKRLEDLKNVFPPEVAVFEPSEAEISHTQKATLVCLATGFYPDHVELSWWVNGKEVHSGVSTDPQPLKEQPALNDSRYCLSSRLRVSATFWQNPRNHFRCQVQFYGLSENDEWTQDRAKPVTQIVSAEAWGRADCGSGMRTEDLPKAVVFLEPQWYRVLEKDSVTLKCQGAYSPEDNSTQWFHNESLISSQASSYFIDAATVDDSGEYRCQTNLSTLSDPVQLEVHIGWLLLQAPRWVFKEEDPIHLRCHSWKNTALHKVTYLQNGKGRKYFHHNSDFYIPKATLKDSGSYFCRGLVGSKNVSSETVNITITQGLAVSTISSFFPPGYQVSFCLVMVLLFAVDTGLYFSVKTNIRSSTRDWKDHKFKWRKDPQDKRAKRSGSGATNFSLLKQAGDVEENPGPTSMDWIWRILFLVGAATGAHSFEQVQLQQPGAELVKPGASVKMSCKASGYAFSSYWINWMKQKPGQGLEWIGQIYPGDGDTNYNGKFKGRATLTADTSSSTAYMQLSSLTSEDSAVYFCARSITTVVGCAMDYWGQGTSVTVSSTRIQNPDPAVYQLRDSKSSDKSVCLFTDFDSQTNVSQSKDSDVYITDKTVLDMRSMDFKSNSAVAWSNKSDFACANAFNNSIIPEDTFFPSPESSCGTGMRTEDLPKAVVFLEPQWYRVLEKDSVTLKCQGAYSPEDNSTQWFHNESLISSQASSYFIDAATVDDSGEYRCQTNLSTLSDPVQLEVHIGWLLLQAPRWVFKEEDPIHLRCHSWKNTALHKVTYLQNGKGRKYFHHNSDFYIPKATLKDSGSYFCRGLVGSKNVSSETVNITITQGLAVPTISSFFPPGYQVSFCLVMVLLFAVDTGLYFSVKTNIRSSTRDWKDHKFKWRKDPQDKRAKRSGSGVKQTLNFDLLKLAGDVESNPGPSRGHMTEYKPTVRLATRDDVPRAVRTLAAAFADYPATRHTVDPDRHIERVTELQELFLTRVGLDIGKVWVADDGAAVAVWTTPESVEAGAVFAEIGPRMAELSGSRLAAQQQMEGLLAPHRPKEPAWFLATVGVSPDHQGKGLGSAVVLPGVEAAERAGVPAFLETSAPRNLPFYERLGFTVTADVEVPEGPRTWCMTRKPGA

SEQ ID NO: 4030 - protein, 1515 aa, Artificial Sequence
  Synthetic Polypeptide
MALPVTALLLPLALLLHAARPEVQLVESGGGLVQAGGSLRLSCAASGRTFSMGWFRQAPGKEREFVAAITYSGGSPYYADSVKGRFTISRDNAKNTVYLQMNSLKPEDTAVYYCAANPTYGSDWNAENWGQGTQVTVSSGTGGGGSGGGGSGGGGSEFDIQMTQSPSSLSASVGDRVTITCKASDHINNWLAWYQQKPGQAPKLLIYGATTLETGVPSRFSGSGSGTDYTLTISSLQPEDFATYYCQQSWNTPWTFGQGTKLEIKRLEDLKNVFPPEVAVFEPSEAEISHTQKATLVCLATGFYPDHVELSWWVNGKEVHSGVSTDPQPLKEQPALNDSRYCLSSRLRVSATFWQNPRNHFRCQVQFYGLSENDEWTQDRAKPVTQIVSAEAWGRADCGSGMRTEDLPKAVVFLEPQWYRVLEKDSVTLKCQGAYSPEDNSTQWFHNESLISSQASSYFIDAATVDDSGEYRCQTNLSTLSDPVQLEVHIGWLLLQAPRWVFKEEDPIHLRCHSWKNTALHKVTYLQNGKGRKYFHHNSDFYIPKATLKDSGSYFCRGLVGSKNVSSETVNITITQGLAVSTISSFFPPGYQVSFCLVMVLLFAVDTGLYFSVKTNIRSSTRDWKDHKFKWRKDPQDKRAKRSGSGATNFSLLKQAGDVEENPGPTSMDWIWRILFLVGAATGAHSGPEVQLVESGGGLVQAGGSLRLSCAASGRTFTMGWFRQAPGKEREFVAAISLSPTLAYYADSVKGRFTISRDNAKNTVVLQMNSLKPEDTALYYCAADRKSVMSIRPDYWGQGTQVTVSSGSGGGGSGGGGSGGGGSFEQVQLQQPGAELVKPGASVKMSCKASGYAFSSYWINWMKQKPGQGLEWIGQIYPGDGDTNYNGKFKGRATLTADTSSSTAYMQLSSLTSEDSAVYFCARSITTVVGCAMDYWGQGTSVTVSSTRIQNPDPAVYQLRDSKSSDKSVCLFTDFDSQTNVSQSKDSDVYITDKTVLDMRSMDFKSNSAVAWSNKSDFACANAFNNSIIPEDTFFPSPESSCGTGMRTEDLPKAVVFLEPQWYRVLEKDSVTLKCQGAYSPEDNSTQWFHNESLISSQASSYFIDAATVDDSGEYRCQTNLSTLSDPVQLEVHIGWLLLQAPRWVFKEEDPIHLRCHSWKNTALHKVTYLQNGKGRKYFHHNSDFYIPKATLKDSGSYFCRGLVGSKNVSSETVNITITQGLAVPTISSFFPPGYQVSFCLVMVLLFAVDTGLYFSVKTNIRSSTRDWKDHKFKWRKDPQDKRAKRSGSGVKQTLNFDLLKLAGDVESNPGPSRGHMTEYKPTVRLATRDDVPRAVRTLAAAFADYPATRHTVDPDRHIERVTELQELFLTRVGLDIGKVWVADDGAAVAVWTTPESVEAGAVFAEIGPRMAELSGSRLAAQQQMEGLLAPHRPKEPAWFLATVGVSPDHQGKGLGSAVVLPGVEAAERAGVPAFLETSAPRNLPFYERLGFTVTADVEVPEGPRTWCMTRKPGA

SEQ ID NO: 4031 - protein, 1248 aa, Artificial Sequence
  Synthetic Polypeptide
MALPVTALLLPLALLLHAARPEVQLVESGGGLVQAGGSLRLSCAASGRTFSMGWFRQAPGKEREFVAAITYSGGSPYYADSVKGRFTISRDNAKNTVYLQMNSLKPEDTAVYYCAANPTYGSDWNAENWGQGTQVTVSSLEDLKNVFPPEVAVFEPSEAEISHTQKATLVCLATGFYPDHVELSWWVNGKEVHSGVSTDPQPLKEQPALNDSRYCLSSRLRVSATFWQNPRNHFRCQVQFYGLSENDEWTQDRAKPVTQIVSAEAWGRADCGSGMRTEDLPKAVVFLEPQWYRVLEKDSVTLKCQGAYSPEDNSTQWFHNESLISSQASSYFIDAATVDDSGEYRCQTNLSTLSDPVQLEVHIGWLLLQAPRWVFKEEDPIHLRCHSWKNTALHKVTYLQNGKGRKYFHHNSDFYIPKATLKDSGSYFCRGLVGSKNVSSETVNITITQGLAVSTISSFFPPGYQVSFCLVMVLLFAVDTGLYFSVKTNIRSSTRDWKDHKFKWRKDPQDKRAKRSGSGATNFSLLKQAGDVEENPGPTSMDWIWRILFLVGAATGAHSGPEVQLVESGGGLVQAGGSLRLSCAASGRTFTMGWFRQAPGKEREFVAAISLSPTLAYYADSVKGRFTISRDNAKNTVVLQMNSLKPEDTALYYCAADRKSVMSIRPDYWGQGTQVTVSSTRIQNPDPAVYQLRDSKSSDKSVCLFTDFDSQTNVSQSKDSDVYITDKTVLDMRSMDFKSNSAVAWSNKSDFACANAFNNSIIPEDTFFPSPESSCGTGMRTEDLPKAVVFLEPQWYRVLEKDSVTLKCQGAYSPEDNSTQWFHNESLISSQASSYFIDAATVDDSGEYRCQTNLSTLSDPVQLEVHIGWLLLQAPRWVFKEEDPIHLRCHSWKNTALHKVTYLQNGKGRKYFHHNSDFYIPKATLKDSGSYFCRGLVGSKNVSSETVNITITQGLAVPTISSFFPPGYQVSFCLVMVLLFAVDTGLYFSVKTNIRSSTRDWKDHKFKWRKDPQDKRAKRSGSGVKQTLNFDLLKLAGDVESNPGPSRGHMTEYKPTVRLATRDDVPRAVRTLAAAFADYPATRHTVDPDRHIERVTELQELFLTRVGLDIGKVWVADDGAAVAVWTTPESVEAGAVFAEIGPRMAELSGSRLAAQQQMEGLLAPHRPKEPAWFLATVGVSPDHQGKGLGSAVVLPGVEAAERAGVPAFLETSAPRNLPFYERLGFTVTADVEVPEGPRTWCMTRKPGA

SEQ ID NO: 4032 - protein, 633 aa, Artificial Sequence
  Synthetic Polypeptide
MALPVTALLLPLALLLHAARPACEVQLLESGGGLIQPGGSLRLSCAASGFTFSSHAMTWVRQAPGKGLEWVSAISGSGDYTHYADSVKGRFTISRDNSKNTVYLQMNSLRAEDSAVYYCAKDEDGGSLLGHRGQGTLVTVSSGTGGGGSGGGGSGGGGSEFGSLEGMRTEDLPKAVVFLEPQWYRVLEKDSVTLKCQGAYSPEDNSTQWFHNESLISSQASSYFIDAATVDDSGEYRCQTNLSTLSDPVQLEVHIGWLLLQAPRWVFKEEDPIHLRCHSWKNTALHKVTYLQNGKGRKYFHHNSDFYIPKATLKDSGSYFCRGLVGSKNVSSETVNITITQGLAVSTISSFFPPGYQVSFCLVMVLLFAVDTGLYFSVKTNIRSSTRDWKDHKFKWRKDPQDKRAKRSGSGATNFSLLKQAGDVEENPGPTRGHMTEYKPTVRLATRDDVPRAVRTLAAAFADYPATRHTVDPDRHIERVTELQELFLTRVGLDIGKVWVADDGAAVAVWTTPESVEAGAVFAEIGPRMAELSGSRLAAQQQMEGLLAPHRPKEPAWFLATVGVSPDHQGKGLGSAVVLPGVEAAERAGVPAFLETSAPRNLPFYERLGFTVTADVEVPEGPRTWCMTRKPGA

SEQ ID NO: 4033 - protein, 869 aa, Artificial Sequence
  Synthetic Polypeptide
MALPVTALLLPLALLLHAARPDIQMTQSPSSLSASVGDRVTITCKASDHINNWLAWYQQKPGQAPKLLIYGATTLETGVPSRFSGSGSGTDYTLTISSLQPEDFATYYCQQSWNTPWTFGQGTKLEIKRLELWVSQPPEIRTLEGSSAFLPCSFNASQGRLAIGSVTWFRDEVVPGKEVRNGTPEFRGRLAPLASSRFLHDHQAELHIRDVRGHDASIYVCRVEVLGLGVGTGNGTRLVVEKEHPQLGAGTVLLLRAGFYAVSFLSVAVGSTVYYQGKCLTWKGPRRQLPAVVPAPLPPPCGSSAHLLPPVPGGRAKRSGSGATNFSLLKQAGDVEENPGPTSMDWIWRILFLVGAATGAHSFEQVQLQQPGAELVKPGASVKMSCKASGYAFSSYWINWMKQKPGQGLEWIGQIYPGDGDTNYNGKFKGRATLTADTSSSTAYMQLSSLTSEDSAVYFCARSITTVVGCAMDYWGQGTSVTVSSTRIGWLLLQAPRWVFKEEDPIHLRCHSWKNTALHKVTYLQNGKGRKYFHHNSDFYIPKATLKDSGSYFCRGLVGSKNVSSETVNITITQGLAVPTISSFFPPGYQVSFCLVMVLLFAVDTGLYFSVKTNIRSSTRDWKDHKFKWRKDPQDKRAKRSGSGVKQTLNFDLLKLAGDVESNPGPSRGHMTEYKPTVRLATRDDVPRAVRTLAAAFADYPATRHTVDPDRHIERVTELQELFLTRVGLDIGKVWVADDGAAVAVWTTPESVEAGAVFAEIGPRMAELSGSRLAAQQQMEGLLAPHRPKEPAWFLATVGVSPDHQGKGLGSAVVLPGVEAAERAGVPAFLETSAPRNLPFYERLGFTVTADVEVPEGPRTWCMTRKPGA

SEQ ID NO: 4034 - protein, 923 aa, Artificial Sequence
  Synthetic Polypeptide
MALPVTALLLPLALLLHAARPACEVQLLESGGGLIQPGGSLRLSCAASGFTFSSHAMTWVRQAPGKGLEWVSAISGSGDYTHYADSVKGRFTISRDNSKNTVYLQMNSLRAEDSAVYYCAKDEDGGSLLGHRGQGTLVTVSSGTGGGGSGGGGSGGGGSEFGSLELWVSQPPEIRTLEGSSAFLPCSFNASQGRLAIGSVTWFRDEVVPGKEVRNGTPEFRGRLAPLASSRFLHDHQAELHIRDVRGHDASIYVCRVEVLGLGVGTGNGTRLVVEKEHPQLGAGTVLLLRAGFYAVSFLSVAVGSTVYYQGKCLTWKGPRRQLPAVVPAPLPPPCGSSAHLLPPVPGGRAKRSGSGATNFSLLKQAGDVEENPGPTSATMDWIWRILFLVGAATGAHSGPEVQLVESGGGLVQAGGSLRLSCAASGRTFSMGWFRQAPGKEREFVAAITYSGGSPYYADSVKGRFTISRDNAKNTVYLQMNSLKPEDTAVYYCAANPTYGSDWNAENWGQGTQVTVSSGSGGGGSGGGGSGGGGSFEGSTRIGWLLLQAPRWVFKEEDPIHLRCHSWKNTALHKVTYLQNGKGRKYFHHNSDFYIPKATLKDSGSYFCRGLVGSKNVSSETVNITITQGLAVPTISSFFPPGYQVSFCLVMVLLFAVDTGLYFSVKTNIRSSTRDWKDHKFKWRKDPQDKRAKRSGSGVKQTLNFDLLKLAGDVESNPGPSRGHMTEYKPTVRLATRDDVPRAVRTLAAAFADYPATRHTVDPDRHIERVTELQELFLTRVGLDIGKVWVADDGAAVAVWTTPESVEAGAVFAEIGPRMAELSGSRLAAQQQMEGLLAPHRPKEPAWFLATVGVSPDHQGKGLGSAVVLPGVEAAERAGVPAFLETSAPRNLPFYERLGFTVTADVEVPEGPRTWCMTRKPGA

SEQ ID NO: 4035 - protein, 1074 aa, Artificial Sequence
  Synthetic Polypeptide
MALPVTALLLPLALLLHAARPDIQMTQSPSSLSASVGDRVTITCKASDHINNWLAWYQQKPGQAPKLLIYGATTLETGVPSRFSGSGSGTDYTLTISSLQPEDFATYYCQQSWNTPWTFGQGTKLEIKRLEGQPKANPTVTLFPPSSEELQANKATLVCLISDFYPGAVTVAWKADGSPVKAGVETTKPSKQSNNKYAASSYLSLTPEQWKSHRSYSCQVTHEGSTVEKTVAPTECSGSLWVSQPPEIRTLEGSSAFLPCSFNASQGRLAIGSVTWFRDEVVPGKEVRNGTPEFRGRLAPLASSRFLHDHQAELHIRDVRGHDASIYVCRVEVLGLGVGTGNGTRLVVEKEHPQLGAGTVLLLRAGFYAVSFLSVAVGSTVYYQGKCLTWKGPRRQLPAVVPAPLPPPCGSSAHLLPPVPGGRAKRSGSGATNFSLLKQAGDVEENPGPTSMDWIWRILFLVGAATGAHSFEQVQLQQPGAELVKPGASVKMSCKASGYAFSSYWINWMKQKPGQGLEWIGQIYPGDGDTNYNGKFKGRATLTADTSSSTAYMQLSSLTSEDSAVYFCARSITTVVGCAMDYWGQGTSVTVSSTRASTKGPSVFPLAPSSKSTSGGTAALGCLVKDYFPEPVTVSWNSGALTSGVHTFPAVLQSSGLYSLSSVVTVPSSSLGTQTYICNVNHKPSNTKVDKRVEPKSCGTIGWLLLQAPRWVFKEEDPIHLRCHSWKNTALHKVTYLQNGKGRKYFHHNSDFYIPKATLKDSGSYFCRGLVGSKNVSSETVNITITQGLAVPTISSFFPPGYQVSFCLVMVLLFAVDTGLYFSVKTNIRSSTRDWKDHKFKWRKDPQDKRAKRSGSGVKQTLNFDLLKLAGDVESNPGPSRGGIHTMATYEVLCEVARKLGTDDREVVLFLLNVFIPQPTLAQLIGALRALKEEGRLTFPLLAECLFRAGRRDLLRDLLHLDPRFLERHLAGTMSYFSPYQLTVLHVDGELCARDIRSLIFLSKDTIGSRSTPQTFLHWVYCMENLDLLGPTDVDALMSMLRSLSRVDLQRQVQTLMGLHLSGPSHSQHYRHTP

SEQ ID NO: 4036 - protein, 1127 aa, Artificial Sequence
  Synthetic Polypeptide
MALPVTALLLPLALLLHAARPDIQMTQSPSSLSASVGDRVTITCKASDHINNWLAWYQQKPGQAPKLLIYGATTLETGVPSRFSGSGSGTDYTLTISSLQPEDFATYYCQQSWNTPWTFGQGTKLEIKRLEGQPKANPTVTLFPPSSEELQANKATLVCLISDFYPGAVTVAWKADGSPVKAGVETTKPSKQSNNKYAASSYLSLTPEQWKSHRSYSCQVTHEGSTVEKTVAPTECSGSLWVSQPPEIRTLEGSSAFLPCSFNASQGRLAIGSVTWFRDEVVPGKEVRNGTPEFRGRLAPLASSRFLHDHQAELHIRDVRGHDASIYVCRVEVLGLGVGTGNGTRLVVEKEHPQLGAGTVLLLRAGFYAVSFLSVAVGSTVYYQGKCLTWKGPRRQLPAVVPAPLPPPCGSSAHLLPPVPGGRAKRSGSGATNFSLLKQAGDVEENPGPTSMDWIWRILFLVGAATGAHSFEQVQLQQPGAELVKPGASVKMSCKASGYAFSSYWINWMKQKPGQGLEWIGQIYPGDGDTNYNGKFKGRATLTADTSSSTAYMQLSSLTSEDSAVYFCARSITTVVGCAMDYWGQGTSVTVSSTRASTKGPSVFPLAPSSKSTSGGTAALGCLVKDYFPEPVTVSWNSGALTSGVHTFPAVLQSSGLYSLSSVVTVPSSSLGTQTYICNVNHKPSNTKVDKRVEPKSCGTIGWLLLQAPRWVFKEEDPIHLRCHSWKNTALHKVTYLQNGKGRKYFHHNSDFYIPKATLKDSGSYFCRGLVGSKNVSSETVNITITQGLAVPTISSFFPPGYQVSFCLVMVLLFAVDTGLYFSVKTNIRSSTRDWKDHKFKWRKDPQDKRAKRSGSGVKQTLNFDLLKLAGDVESNPGPSRGGIHTMSDSKEVPSLPFLRHLLEELDSHEDSLLLFLCHDAAPGCTTVTQALCSLSQQRKLTLAALVEMLYVLQRMDLLKSRFGLSKEGAEQLLGTSFLTRYRKLMVCVGEELDSSELRALRLFACNLNPSLSTALSESSRFVELVLALENVGLVSPSSVSVLADMLRTLRRLDLCQQLVEYEQQEQARYRYCYAASPSLPVRTLRRGHGASEHEQLCMPVQESSDSPELLRTPVQESSSDSPEQTT

SEQ ID NO: 4037 - protein, 1082 aa, Artificial Sequence
  Synthetic Polypeptide
MALPVTALLLPLALLLHAARPDIQMTQSPSSLSASVGDRVTITCKASDHINNWLAWYQQKPGQAPKLLIYGATTLETGVPSRFSGSGSGTDYTLTISSLQPEDFATYYCQQSWNTPWTFGQGTKLEIKRLEGQPKANPTVTLFPPSSEELQANKATLVCLISDFYPGAVTVAWKADGSPVKAGVETTKPSKQSNNKYAASSYLSLTPEQWKSHRSYSCQVTHEGSTVEKTVAPTECSGSLWVSQPPEIRTLEGSSAFLPCSFNASQGRLAIGSVTWFRDEVVPGKEVRNGTPEFRGRLAPLASSRFLHDHQAELHIRDVRGHDASIYVCRVEVLGLGVGTGNGTRLVVEKEHPQLGAGTVLLLRAGFYAVSFLSVAVGSTVYYQGKCLTWKGPRRQLPAVVPAPLPPPCGSSAHLLPPVPGGRAKRSGSGATNFSLLKQAGDVEENPGPTSMDWIWRILFLVGAATGAHSFEQVQLQQPGAELVKPGASVKMSCKASGYAFSSYWINWMKQKPGQGLEWIGQIYPGDGDTNYNGKFKGRATLTADTSSSTAYMQLSSLTSEDSAVYFCARSITTVVGCAMDYWGQGTSVTVSSTRASTKGPSVFPLAPSSKSTSGGTAALGCLVKDYFPEPVTVSWNSGALTSGVHTFPAVLQSSGLYSLSSVVTVPSSSLGTQTYICNVNHKPSNTKVDKRVEPKSCGTIGWLLLQAPRWVFKEEDPIHLRCHSWKNTALHKVTYLQNGKGRKYFHHNSDFYIPKATLKDSGSYFCRGLVGSKNVSSETVNITITQGLAVPTISSFFPPGYQVSFCLVMVLLFAVDTGLYFSVKTNIRSSTRDWKDHKFKWRKDPQDKRAKRSGSGVKQTLNFDLLKLAGDVESNPGPSRGHMTEYKPTVRLATRDDVPRAVRTLAAAFADYPATRHTVDPDRHIERVTELQELFLTRVGLDIGKVWVADDGAAVAVWTTPESVEAGAVFAEIGPRMAELSGSRLAAQQQMEGLLAPHRPKEPAWFLATVGVSPDHQGKGLGSAVVLPGVEAAERAGVPAFLETSAPRNLPFYERLGFTVTADVEVPEGPRTWCMTRKPGA

SEQ ID NO: 4038 - protein, 1219 aa, Artificial Sequence
  Synthetic Polypeptide
MALPVTALLLPLALLLHAARPEVQLVESGGGLVQAGGSLRLSCAASGRTFSMGWFRQAPGKEREFVAAITYSGGSPYYADSVKGRFTISRDNAKNTVYLQMNSLKPEDTAVYYCAANPTYGSDWNAENWGQGTQVTVSSGTGGGGSGGGGSGGGGSEFDIQMTQSPSSLSASVGDRVTITCKASDHINNWLAWYQQKPGQAPKLLIYGATTLETGVPSRFSGSGSGTDYTLTISSLQPEDFATYYCQQSWNTPWTFGQGTKLEIKRLEGQPKANPTVTLFPPSSEELQANKATLVCLISDFYPGAVTVAWKADGSPVKAGVETTKPSKQSNNKYAASSYLSLTPEQWKSHRSYSCQVTHEGSTVEKTVAPTECSGSLWVSQPPEIRTLEGSSAFLPCSFNASQGRLAIGSVTWFRDEVVPGKEVRNGTPEFRGRLAPLASSRFLHDHQAELHIRDVRGHDASIYVCRVEVLGLGVGTGNGTRLVVEKEHPQLGAGTVLLLRAGFYAVSFLSVAVGSTVYYQGKCLTWKGPRRQLPAVVPAPLPPPCGSSAHLLPPVPGGRAKRSGSGATNFSLLKQAGDVEENPGPTSMDWIWRILFLVGAATGAHSFEQVQLQQPGAELVKPGASVKMSCKASGYAFSSYWINWMKQKPGQGLEWIGQIYPGDGDTNYNGKFKGRATLTADTSSSTAYMQLSSLTSEDSAVYFCARSITTVVGCAMDYWGQGTSVTVSSTRASTKGPSVFPLAPSSKSTSGGTAALGCLVKDYFPEPVTVSWNSGALTSGVHTFPAVLQSSGLYSLSSVVTVPSSSLGTQTYICNVNHKPSNTKVDKRVEPKSCGTIGWLLLQAPRWVFKEEDPIHLRCHSWKNTALHKVTYLQNGKGRKYFHHNSDFYIPKATLKDSGSYFCRGLVGSKNVSSETVNITITQGLAVPTISSFFPPGYQVSFCLVMVLLFAVDTGLYFSVKTNIRSSTRDWKDHKFKWRKDPQDKRAKRSGSGVKQTLNFDLLKLAGDVESNPGPSRGHMTEYKPTVRLATRDDVPRAVRTLAAAFADYPATRHTVDPDRHIERVTELQELFLTRVGLDIGKVWVADDGAAVAVWTTPESVEAGAVFAEIGPRMAELSGSRLAAQQQMEGLLAPHRPKEPAWFLATVGVSPDHQGKGLGSAVVLPGVEAAERAGVPAFLETSAPRNLPFYERLGFTVTADVEVPEGPRTWCMTRKPGA

SEQ ID NO: 4039 - protein, 1356 aa, Artificial Sequence
  Synthetic Polypeptide
MALPVTALLLPLALLLHAARPEVQLVESGGGLVQAGGSLRLSCAASGRTFSMGWFRQAPGKEREFVAAITYSGGSPYYADSVKGRFTISRDNAKNTVYLQMNSLKPEDTAVYYCAANPTYGSDWNAENWGQGTQVTVSSGTGGGGSGGGGSGGGGSEFDIQMTQSPSSLSASVGDRVTITCKASDHINNWLAWYQQKPGQAPKLLIYGATTLETGVPSRFSGSGSGTDYTLTISSLQPEDFATYYCQQSWNTPWTFGQGTKLEIKRLEGQPKANPTVTLFPPSSEELQANKATLVCLISDFYPGAVTVAWKADGSPVKAGVETTKPSKQSNNKYAASSYLSLTPEQWKSHRSYSCQVTHEGSTVEKTVAPTECSGSLWVSQPPEIRTLEGSSAFLPCSFNASQGRLAIGSVTWFRDEVVPGKEVRNGTPEFRGRLAPLASSRFLHDHQAELHIRDVRGHDASIYVCRVEVLGLGVGTGNGTRLVVEKEHPQLGAGTVLLLRAGFYAVSFLSVAVGSTVYYQGKCLTWKGPRRQLPAVVPAPLPPPCGSSAHLLPPVPGGRAKRSGSGATNFSLLKQAGDVEENPGPTSMDWIWRILFLVGAATGAHSGPEVQLVESGGGLVQAGGSLRLSCAASGRTFTMGWFRQAPGKEREFVAAISLSPTLAYYADSVKGRFTISRDNAKNTVVLQMNSLKPEDTALYYCAADRKSVMSIRPDYWGQGTQVTVSSGSGGGGSGGGGSGGGGSFEQVQLQQPGAELVKPGASVKMSCKASGYAFSSYWINWMKQKPGQGLEWIGQIYPGDGDTNYNGKFKGRATLTADTSSSTAYMQLSSLTSEDSAVYFCARSITTVVGCAMDYWGQGTSVTVSSTRASTKGPSVFPLAPSSKSTSGGTAALGCLVKDYFPEPVTVSWNSGALTSGVHTFPAVLQSSGLYSLSSVVTVPSSSLGTQTYICNVNHKPSNTKVDKRVEPKSCGTIGWLLLQAPRWVFKEEDPIHLRCHSWKNTALHKVTYLQNGKGRKYFHHNSDFYIPKATLKDSGSYFCRGLVGSKNVSSETVNITITQGLAVPTISSFFPPGYQVSFCLVMVLLFAVDTGLYFSVKTNIRSSTRDWKDHKFKWRKDPQDKRAKRSGSGVKQTLNFDLLKLAGDVESNPGPSRGHMTEYKPTVRLATRDDVPRAVRTLAAAFADYPATRHTVDPDRHIERVTELQELFLTRVGLDIGKVWVADDGAAVAVWTTPESVEAGAVFAEIGPRMAELSGSRLAAQQQMEGLLAPHRPKEPAWFLATVGVSPDHQGKGLGSAVVLPGVEAAERAGVPAFLETSAPRNLPFYERLGFTVTADVEVPEGPRTWCMTRKPGA

SEQ ID NO: 4040 - protein, 1089 aa, Artificial Sequence
  Synthetic Polypeptide
MALPVTALLLPLALLLHAARPEVQLVESGGGLVQAGGSLRLSCAASGRTFSMGWFRQAPGKEREFVAAITYSGGSPYYADSVKGRFTISRDNAKNTVYLQMNSLKPEDTAVYYCAANPTYGSDWNAENWGQGTQVTVSSLEGQPKANPTVTLFPPSSEELQANKATLVCLISDFYPGAVTVAWKADGSPVKAGVETTKPSKQSNNKYAASSYLSLTPEQWKSHRSYSCQVTHEGSTVEKTVAPTECSGSLWVSQPPEIRTLEGSSAFLPCSFNASQGRLAIGSVTWFRDEVVPGKEVRNGTPEFRGRLAPLASSRFLHDHQAELHIRDVRGHDASIYVCRVEVLGLGVGTGNGTRLVVEKEHPQLGAGTVLLLRAGFYAVSFLSVAVGSTVYYQGKCLTWKGPRRQLPAVVPAPLPPPCGSSAHLLPPVPGGRAKRSGSGATNFSLLKQAGDVEENPGPTSMDWIWRILFLVGAATGAHSGPEVQLVESGGGLVQAGGSLRLSCAASGRTFTMGWFRQAPGKEREFVAAISLSPTLAYYADSVKGRFTISRDNAKNTVVLQMNSLKPEDTALYYCAADRKSVMSIRPDYWGQGTQVTVSSTRASTKGPSVFPLAPSSKSTSGGTAALGCLVKDYFPEPVTVSWNSGALTSGVHTFPAVLQSSGLYSLSSVVTVPSSSLGTQTYICNVNHKPSNTKVDKRVEPKSCGTIGWLLLQAPRWVFKEEDPIHLRCHSWKNTALHKVTYLQNGKGRKYFHHNSDFYIPKATLKDSGSYFCRGLVGSKNVSSETVNITITQGLAVPTISSFFPPGYQVSFCLVMVLLFAVDTGLYFSVKTNIRSSTRDWKDHKFKWRKDPQDKRAKRSGSGVKQTLNFDLLKLAGDVESNPGPSRGHMTEYKPTVRLATRDDVPRAVRTLAAAFADYPATRHTVDPDRHIERVTELQELFLTRVGLDIGKVWVADDGAAVAVWTTPESVEAGAVFAEIGPRMAELSGSRLAAQQQMEGLLAPHRPKEPAWFLATVGVSPDHQGKGLGSAVVLPGVEAAERAGVPAFLETSAPRNLPFYERLGFTVTADVEVPEGPRTWCMTRKPGA

SEQ ID NO: 4041 - protein, 1097 aa, Artificial Sequence
  Synthetic Polypeptide
MALPVTALLLPLALLLHAARPDIQMTQSPSSLSASVGDRVTITCKASDHINNWLAWYQQKPGQAPKLLIYGATTLETGVPSRFSGSGSGTDYTLTISSLQPEDFATYYCQQSWNTPWTFGQGTKLEIKRLEDLKNVFPPEVAVFEPSEAEISHTQKATLVCLATGFYPDHVELSWWVNGKEVHSGVSTDPQPLKEQPALNDSRYCLSSRLRVSATFWQNPRNHFRCQVQFYGLSENDEWTQDRAKPVTQIVSAEAWGRADCGSLWVSQPPEIRTLEGSSAFLPCSFNASQGRLAIGSVTWFRDEVVPGKEVRNGTPEFRGRLAPLASSRFLHDHQAELHIRDVRGHDASIYVCRVEVLGLGVGTGNGTRLVVEKEHPQLGAGTVLLLRAGFYAVSFLSVAVGSTVYYQGKCLTWKGPRRQLPAVVPAPLPPPCGSSAHLLPPVPGGRAKRSGSGATNFSLLKQAGDVEENPGPTSMDWIWRILFLVGAATGAHSFEQVQLQQPGAELVKPGASVKMSCKASGYAFSSYWINWMKQKPGQGLEWIGQIYPGDGDTNYNGKFKGRATLTADTSSSTAYMQLSSLTSEDSAVYFCARSITTVVGCAMDYWGQGTSVTVSSTRIQNPDPAVYQLRDSKSSDKSVCLFTDFDSQTNVSQSKDSDVYITDKTVLDMRSMDFKSNSAVAWSNKSDFACANAFNNSIIPEDTFFPSPESSCGTIGWLLLQAPRWVFKEEDPIHLRCHSWKNTALHKVTYLQNGKGRKYFHHNSDFYIPKATLKDSGSYFCRGLVGSKNVSSETVNITITQGLAVPTISSFFPPGYQVSFCLVMVLLFAVDTGLYFSVKTNIRSSTRDWKDHKFKWRKDPQDKRAKRSGSGVKQTLNFDLLKLAGDVESNPGPSRGHMTEYKPTVRLATRDDVPRAVRTLAAAFADYPATRHTVDPDRHIERVTELQELFLTRVGLDIGKVWVADDGAAVAVWTTPESVEAGAVFAEIGPRMAELSGSRLAAQQQMEGLLAPHRPKEPAWFLATVGVSPDHQGKGLGSAVVLPGVEAAERAGVPAFLETSAPRNLPFYERLGFTVTADVEVPEGPRTWCMTRKPGA

SEQ ID NO: 4042 - protein, 1234 aa, Artificial Sequence
  Synthetic Polypeptide
MALPVTALLLPLALLLHAARPEVQLVESGGGLVQAGGSLRLSCAASGRTFSMGWFRQAPGKEREFVAAITYSGGSPYYADSVKGRFTISRDNAKNTVYLQMNSLKPEDTAVYYCAANPTYGSDWNAENWGQGTQVTVSSGTGGGGSGGGGSGGGGSEFDIQMTQSPSSLSASVGDRVTITCKASDHINNWLAWYQQKPGQAPKLLIYGATTLETGVPSRFSGSGSGTDYTLTISSLQPEDFATYYCQQSWNTPWTFGQGTKLEIKRLEDLKNVFPPEVAVFEPSEAEISHTQKATLVCLATGFYPDHVELSWWVNGKEVHSGVSTDPQPLKEQPALNDSRYCLSSRLRVSATFWQNPRNHFRCQVQFYGLSENDEWTQDRAKPVTQIVSAEAWGRADCGSLWVSQPPEIRTLEGSSAFLPCSFNASQGRLAIGSVTWFRDEVVPGKEVRNGTPEFRGRLAPLASSRFLHDHQAELHIRDVRGHDASIYVCRVEVLGLGVGTGNGTRLVVEKEHPQLGAGTVLLLRAGFYAVSFLSVAVGSTVYYQGKCLTWKGPRRQLPAVVPAPLPPPCGSSAHLLPPVPGGRAKRSGSGATNFSLLKQAGDVEENPGPTSMDWIWRILFLVGAATGAHSFEQVQLQQPGAELVKPGASVKMSCKASGYAFSSYWINWMKQKPGQGLEWIGQIYPGDGDTNYNGKFKGRATLTADTSSSTAYMQLSSLTSEDSAVYFCARSITTVVGCAMDYWGQGTSVTVSSTRIQNPDPAVYQLRDSKSSDKSVCLFTDFDSQTNVSQSKDSDVYITDKTVLDMRSMDFKSNSAVAWSNKSDFACANAFNNSIIPEDTFFPSPESSCGTIGWLLLQAPRWVFKEEDPIHLRCHSWKNTALHKVTYLQNGKGRKYFHHNSDFYIPKATLKDSGSYFCRGLVGSKNVSSETVNITITQGLAVPTISSFFPPGYQVSFCLVMVLLFAVDTGLYFSVKTNIRSSTRDWKDHKFKWRKDPQDKRAKRSGSGVKQTLNFDLLKLAGDVESNPGPSRGHMTEYKPTVRLATRDDVPRAVRTLAAAFADYPATRHTVDPDRHIERVTELQELFLTRVGLDIGKVWVADDGAAVAVWTTPESVEAGAVFAEIGPRMAELSGSRLAAQQQMEGLLAPHRPKEPAWFLATVGVSPDHQGKGLGSAVVLPGVEAAERAGVPAFLETSAPRNLPFYERLGFTVTADVEVPEGPRTWCMTRKPGA

SEQ ID NO: 4043 - protein, 1371 aa, Artificial Sequence
  Synthetic Polypeptide
MALPVTALLLPLALLLHAARPEVQLVESGGGLVQAGGSLRLSCAASGRTFSMGWFRQAPGKEREFVAAITYSGGSPYYADSVKGRFTISRDNAKNTVYLQMNSLKPEDTAVYYCAANPTYGSDWNAENWGQGTQVTVSSGTGGGGSGGGGSGGGGSEFDIQMTQSPSSLSASVGDRVTITCKASDHINNWLAWYQQKPGQAPKLLIYGATTLETGVPSRFSGSGSGTDYTLTISSLQPEDFATYYCQQSWNTPWTFGQGTKLEIKRLEDLKNVFPPEVAVFEPSEAEISHTQKATLVCLATGFYPDHVELSWWVNGKEVHSGVSTDPQPLKEQPALNDSRYCLSSRLRVSATFWQNPRNHFRCQVQFYGLSENDEWTQDRAKPVTQIVSAEAWGRADCGSLWVSQPPEIRTLEGSSAFLPCSFNASQGRLAIGSVTWFRDEVVPGKEVRNGTPEFRGRLAPLASSRFLHDHQAELHIRDVRGHDASIYVCRVEVLGLGVGTGNGTRLVVEKEHPQLGAGTVLLLRAGFYAVSFLSVAVGSTVYYQGKCLTWKGPRRQLPAVVPAPLPPPCGSSAHLLPPVPGGRAKRSGSGATNFSLLKQAGDVEENPGPTSMDWIWRILFLVGAATGAHSGPEVQLVESGGGLVQAGGSLRLSCAASGRTFTMGWFRQAPGKEREFVAAISLSPTLAYYADSVKGRFTISRDNAKNTVVLQMNSLKPEDTALYYCAADRKSVMSIRPDYWGQGTQVTVSSGSGGGGSGGGGSGGGGSFEQVQLQQPGAELVKPGASVKMSCKASGYAFSSYWINWMKQKPGQGLEWIGQIYPGDGDTNYNGKFKGRATLTADTSSSTAYMQLSSLTSEDSAVYFCARSITTVVGCAMDYWGQGTSVTVSSTRIQNPDPAVYQLRDSKSSDKSVCLFTDFDSQTNVSQSKDSDVYITDKTVLDMRSMDFKSNSAVAWSNKSDFACANAFNNSIIPEDTFFPSPESSCGTIGWLLLQAPRWVFKEEDPIHLRCHSWKNTALHKVTYLQNGKGRKYFHHNSDFYIPKATLKDSGSYFCRGLVGSKNVSSETVNITITQGLAVPTISSFFPPGYQVSFCLVMVLLFAVDTGLYFSVKTNIRSSTRDWKDHKFKWRKDPQDKRAKRSGSGVKQTLNFDLLKLAGDVESNPGPSRGHMTEYKPTVRLATRDDVPRAVRTLAAAFADYPATRHTVDPDRHIERVTELQELFLTRVGLDIGKVWVADDGAAVAVWTTPESVEAGAVFAEIGPRMAELSGSRLAAQQQMEGLLAPHRPKEPAWFLATVGVSPDHQGKGLGSAVVLPGVEAAERAGVPAFLETSAPRNLPFYERLGFTVTADVEVPEGPRTWCMTRKPGA

SEQ ID NO: 4044 - protein, 1104 aa, Artificial Sequence
  Synthetic Polypeptide
MALPVTALLLPLALLLHAARPEVQLVESGGGLVQAGGSLRLSCAASGRTFSMGWFRQAPGKEREFVAAITYSGGSPYYADSVKGRFTISRDNAKNTVYLQMNSLKPEDTAVYYCAANPTYGSDWNAENWGQGTQVTVSSLEDLKNVFPPEVAVFEPSEAEISHTQKATLVCLATGFYPDHVELSWWVNGKEVHSGVSTDPQPLKEQPALNDSRYCLSSRLRVSATFWQNPRNHFRCQVQFYGLSENDEWTQDRAKPVTQIVSAEAWGRADCGSLWVSQPPEIRTLEGSSAFLPCSFNASQGRLAIGSVTWFRDEVVPGKEVRNGTPEFRGRLAPLASSRFLHDHQAELHIRDVRGHDASIYVCRVEVLGLGVGTGNGTRLVVEKEHPQLGAGTVLLLRAGFYAVSFLSVAVGSTVYYQGKCLTWKGPRRQLPAVVPAPLPPPCGSSAHLLPPVPGGRAKRSGSGATNFSLLKQAGDVEENPGPTSMDWIWRILFLVGAATGAHSGPEVQLVESGGGLVQAGGSLRLSCAASGRTFTMGWFRQAPGKEREFVAAISLSPTLAYYADSVKGRFTISRDNAKNTVVLQMNSLKPEDTALYYCAADRKSVMSIRPDYWGQGTQVTVSSTRIQNPDPAVYQLRDSKSSDKSVCLFTDFDSQTNVSQSKDSDVYITDKTVLDMRSMDFKSNSAVAWSNKSDFACANAFNNSIIPEDTFFPSPESSCGTIGWLLLQAPRWVFKEEDPIHLRCHSWKNTALHKVTYLQNGKGRKYFHHNSDFYIPKATLKDSGSYFCRGLVGSKNVSSETVNITITQGLAVPTISSFFPPGYQVSFCLVMVLLFAVDTGLYFSVKTNIRSSTRDWKDHKFKWRKDPQDKRAKRSGSGVKQTLNFDLLKLAGDVESNPGPSRGHMTEYKPTVRLATRDDVPRAVRTLAAAFADYPATRHTVDPDRHIERVTELQELFLTRVGLDIGKVWVADDGAAVAVWTTPESVEAGAVFAEIGPRMAELSGSRLAAQQQMEGLLAPHRPKEPAWFLATVGVSPDHQGKGLGSAVVLPGVEAAERAGVPAFLETSAPRNLPFYERLGFTVTADVEVPEGPRTWCMTRKPGA

SEQ ID NO: 4045 - protein, 578 aa, Artificial Sequence; identical to SEQ ID NO: 4006
  Synthetic Polypeptide

SEQ ID NO: 4046 - protein, 835 aa, Artificial Sequence
  Synthetic Polypeptide
MALPVTALLLPLALLLHAARPDIQMTQSPSSLSASVGDRVTITCKASDHINNWLAWYQQKPGQAPKLLIYGATTLETGVPSRFSGSGSGTDYTLTISSLQPEDFATYYCQQSWNTPWTFGQGTKLEIKRLEIGWLLLQAPRWVFKEEDPIHLRCHSWKNTALHKVTYLQNGKGRKYFHHNSDFYIPKATLKDSGSYFCRGLVGSKNVSSETVNITITQGLAVSTISSFFPPGYQVSFCLVMVLLFAVDTGLYFSVKTNIRSSTRDWKDHKFKWRKDPQDKRAKRSGSGATNFSLLKQAGDVEENPGPTSMDWIWRILFLVGAATGAHSFEQVQLQQPGAELVKPGASVKMSCKASGYAFSSYWINWMKQKPGQGLEWIGQIYPGDGDTNYNGKFKGRATLTADTSSSTAYMQLSSLTSEDSAVYFCARSITTVVGCAMDYWGQGTSVTVSSTRIGWLLLQAPRWVFKEEDPIHLRCHSWKNTALHKVTYLQNGKGRKYFHHNSDFYIPKATLKDSGSYFCRGLVGSKNVSSETVNITITQGLAVPTISSFFPPGYQVSFCLVMVLLFAVDTGLYFSVKTNIRSSTRDWKDHKFKWRKDPQDKRAKRSGSGVKQTLNFDLLKLAGDVESNPGPSRGHMTEYKPTVRLATRDDVPRAVRTLAAAFADYPATRHTVDPDRHIERVTELQELFLTRVGLDIGKVWVADDGAAVAVWTTPESVEAGAVFAEIGPRMAELSGSRLAAQQQMEGLLAPHRPKEPAWFLATVGVSPDHQGKGLGSAVVLPGVEAAERAGVPAFLETSAPRNLPFYERLGFTVTADVEVPEGPRTWCMTRKPGA

SEQ ID NO: 4047 - protein, 889 aa, Artificial Sequence
  Synthetic Polypeptide
MALPVTALLLPLALLLHAARPACEVQLLESGGGLIQPGGSLRLSCAASGFTFSSHAMTWVRQAPGKGLEWVSAISGSGDYTHYADSVKGRFTISRDNSKNTVYLQMNSLRAEDSAVYYCAKDEDGGSLLGHRGQGTLVTVSSGTGGGGSGGGGSGGGGSEFGSLEIGWLLLQAPRWVFKEEDPIHLRCHSWKNTALHKVTYLQNGKGRKYFHHNSDFYIPKATLKDSGSYFCRGLVGSKNVSSETVNITITQGLAVSTISSFFPPGYQVSFCLVMVLLFAVDTGLYFSVKTNIRSSTRDWKDHKFKWRKDPQDKRAKRSGSGATNFSLLKQAGDVEENPGPTSATMDWIWRILFLVGAATGAHSGPEVQLVESGGGLVQAGGSLRLSCAASGRTFSMGWFRQAPGKEREFVAAITYSGGSPYYADSVKGRFTISRDNAKNTVYLQMNSLKPEDTAVYYCAANPTYGSDWNAENWGQGTQVTVSSGSGGGGSGGGGSGGGGSFEGSTRIGWLLLQAPRWVFKEEDPIHLRCHSWKNTALHKVTYLQNGKGRKYFHHNSDFYIPKATLKDSGSYFCRGLVGSKNVSSETVNITITQGLAVPTISSFFPPGYQVSFCLVMVLLFAVDTGLYFSVKTNIRSSTRDWKDHKFKWRKDPQDKRAKRSGSGVKQTLNFDLLKLAGDVESNPGPSRGHMTEYKPTVRLATRDDVPRAVRTLAAAFADYPATRHTVDPDRHIERVTELQELFLTRVGLDIGKVWVADDGAAVAVWTTPESVEAGAVFAEIGPRMAELSGSRLAAQQQMEGLLAPHRPKEPAWFLATVGVSPDHQGKGLGSAVVLPGVEAAERAGVPAFLETSAPRNLPFYERLGFTVTADVEVPEGPRTWCMTRKPGA

SEQ ID NO: 4048 - protein, 1040 aa, Artificial Sequence
  Synthetic Polypeptide
MALPVTALLLPLALLLHAARPDIQMTQSPSSLSASVGDRVTITCKASDHINNWLAWYQQKPGQAPKLLIYGATTLETGVPSRFSGSGSGTDYTLTISSLQPEDFATYYCQQSWNTPWTFGQGTKLEIKRLEGQPKANPTVTLFPPSSEELQANKATLVCLISDFYPGAVTVAWKADGSPVKAGVETTKPSKQSNNKYAASSYLSLTPEQWKSHRSYSCQVTHEGSTVEKTVAPTECSGSIGWLLLQAPRWVFKEEDPIHLRCHSWKNTALHKVTYLQNGKGRKYFHHNSDFYIPKATLKDSGSYFCRGLVGSKNVSSETVNITITQGLAVSTISSFFPPGYQVSFCLVMVLLFAVDTGLYFSVKTNIRSSTRDWKDHKFKWRKDPQDKRAKRSGSGATNFSLLKQAGDVEENPGPTSMDWIWRILFLVGAATGAHSFEQVQLQQPGAELVKPGASVKMSCKASGYAFSSYWINWMKQKPGQGLEWIGQIYPGDGDTNYNGKFKGRATLTADTSSSTAYMQLSSLTSEDSAVYFCARSITTVVGCAMDYWGQGTSVTVSSTRASTKGPSVFPLAPSSKSTSGGTAALGCLVKDYFPEPVTVSWNSGALTSGVHTFPAVLQSSGLYSLSSVVTVPSSSLGTQTYICNVNHKPSNTKVDKRVEPKSCGTIGWLLLQAPRWVFKEEDPIHLRCHSWKNTALHKVTYLQNGKGRKYFHHNSDFYIPKATLKDSGSYFCRGLVGSKNVSSETVNITITQGLAVPTISSFFPPGYQVSFCLVMVLLFAVDTGLYFSVKTNIRSSTRDWKDHKFKWRKDPQDKRAKRSGSGVKQTLNFDLLKLAGDVESNPGPSRGGIHTMATYEVLCEVARKLGTDDREVVLFLLNVFIPQPTLAQLIGALRALKEEGRLTFPLLAECLFRAGRRDLLRDLLHLDPRFLERHLAGTMSYFSPYQLTVLHVDGELCARDIRSLIFLSKDTIGSRSTPQTFLHWVYCMENLDLLGPTDVDALMSMLRSLSRVDLQRQVQTLMGLHLSGPSHSQHYRHTP

SEQ ID NO: 4049 - protein, 1093 aa, Artificial Sequence
  Synthetic Polypeptide
MALPVTALLLPLALLLHAARPDIQMTQSPSSLSASVGDRVTITCKASDHINNWLAWYQQKPGQAPKLLIYGATTLETGVPSRFSGSGSGTDYTLTISSLQPEDFATYYCQQSWNTPWTFGQGTKLEIKRLEGQPKANPTVTLFPPSSEELQANKATLVCLISDFYPGAVTVAWKADGSPVKAGVETTKPSKQSNNKYAASSYLSLTPEQWKSHRSYSCQVTHEGSTVEKTVAPTECSGSIGWLLLQAPRWVFKEEDPIHLRCHSWKNTALHKVTYLQNGKGRKYFHHNSDFYIPKATLKDSGSYFCRGLVGSKNVSSETVNITITQGLAVSTISSFFPPGYQVSFCLVMVLLFAVDTGLYFSVKTNIRSSTRDWKDHKFKWRKDPQDKRAKRSGSGATNFSLLKQAGDVEENPGPTSMDWIWRILFLVGAATGAHSFEQVQLQQPGAELVKPGASVKMSCKASGYAFSSYWINWMKQKPGQGLEWIGQIYPGDGDTNYNGKFKGRATLTADTSSSTAYMQLSSLTSEDSAVYFCARSITTVVGCAMDYWGQGTSVTVSSTRASTKGPSVFPLAPSSKSTSGGTAALGCLVKDYFPEPVTVSWNSGALTSGVHTFPAVLQSSGLYSLSSVVTVPSSSLGTQTYICNVNHKPSNTKVDKRVEPKSCGTIGWLLLQAPRWVFKEEDPIHLRCHSWKNTALHKVTYLQNGKGRKYFHHNSDFYIPKATLKDSGSYFCRGLVGSKNVSSETVNITITQGLAVPTISSFFPPGYQVSFCLVMVLLFAVDTGLYFSVKTNIRSSTRDWKDHKFKWRKDPQDKRAKRSGSGVKQTLNFDLLKLAGDVESNPGPSRGGIHTMSDSKEVPSLPFLRHLLEELDSHEDSLLLFLCHDAAPGCTTVTQALCSLSQQRKLTLAALVEMLYVLQRMDLLKSRFGLSKEGAEQLLGTSFLTRYRKLMVCVGEELDSSELRALRLFACNLNPSLSTALSESSRFVELVLALENVGLVSPSSVSVLADMLRTLRRLDLCQQLVEYEQQEQARYRYCYAASPSLPVRTLRRGHGASEHEQLCMPVQESSDSPELLRTPVQESSSDSPEQTT

SEQ ID NO: 4050 - protein, 1048 aa, Artificial Sequence
  Synthetic Polypeptide
MALPVTALLLPLALLLHAARPDIQMTQSPSSLSASVGDRVTITCKASDHINNWLAWYQQKPGQAPKLLIYGATTLETGVPSRFSGSGSGTDYTLTISSLQPEDFATYYCQQSWNTPWTFGQGTKLEIKRLEGQPKANPTVTLFPPSSEELQANKATLVCLISDFYPGAVTVAWKADGSPVKAGVETTKPSKQSNNKYAASSYLSLTPEQWKSHRSYSCQVTHEGSTVEKTVAPTECSGSIGWLLLQAPRWVFKEEDPIHLRCHSWKNTALHKVTYLQNGKGRKYFHHNSDFYIPKATLKDSGSYFCRGLVGSKNVSSETVNITITQGLAVSTISSFFPPGYQVSFCLVMVLLFAVDTGLYFSVKTNIRSSTRDWKDHKFKWRKDPQDKRAKRSGSGATNFSLLKQAGDVEENPGPTSMDWIWRILFLVGAATGAHSFEQVQLQQPGAELVKPGASVKMSCKASGYAFSSYWINWMKQKPGQGLEWIGQIYPGDGDTNYNGKFKGRATLTADTSSSTAYMQLSSLTSEDSAVYFCARSITTVVGCAMDYWGQGTSVTVSSTRASTKGPSVFPLAPSSKSTSGGTAALGCLVKDYFPEPVTVSWNSGALTSGVHTFPAVLQSSGLYSLSSVVTVPSSSLGTQTYICNVNHKPSNTKVDKRVEPKSCGTIGWLLLQAPRWVFKEEDPIHLRCHSWKNTALHKVTYLQNGKGRKYFHHNSDFYIPKATLKDSGSYFCRGLVGSKNVSSETVNITITQGLAVPTISSFFPPGYQVSFCLVMVLLFAVDTGLYFSVKTNIRSSTRDWKDHKFKWRKDPQDKRAKRSGSGVKQTLNFDLLKLAGDVESNPGPSRGHMTEYKPTVRLATRDDVPRAVRTLAAAFADYPATRHTVDPDRHIERVTELQELFLTRVGLDIGKVWVADDGAAVAVWTTPESVEAGAVFAEIGPRMAELSGSRLAAQQQMEGLLAPHRPKEPAWFLATVGVSPDHQGKGLGSAVVLPGVEAAERAGVPAFLETSAPRNLPFYERLGFTVTADVEVPEGPRTWCMTRKPGA

SEQ ID NO: 4051 - protein, 1185 aa, Artificial Sequence
  Synthetic Polypeptide
MALPVTALLLPLALLLHAARPEVQLVESGGGLVQAGGSLRLSCAASGRTFSMGWFRQAPGKEREFVAAITYSGGSPYYADSVKGRFTISRDNAKNTVYLQMNSLKPEDTAVYYCAANPTYGSDWNAENWGQGTQVTVSSGTGGGGSGGGGSGGGGSEFDIQMTQSPSSLSASVGDRVTITCKASDHINNWLAWYQQKPGQAPKLLIYGATTLETGVPSRFSGSGSGTDYTLTISSLQPEDFATYYCQQSWNTPWTFGQGTKLEIKRLEGQPKANPTVTLFPPSSEELQANKATLVCLISDFYPGAVTVAWKADGSPVKAGVETTKPSKQSNNKYAASSYLSLTPEQWKSHRSYSCQVTHEGSTVEKTVAPTECSGSIGWLLLQAPRWVFKEEDPIHLRCHSWKNTALHKVTYLQNGKGRKYFHHNSDFYIPKATLKDSGSYFCRGLVGSKNVSSETVNITITQGLAVSTISSFFPPGYQVSFCLVMVLLFAVDTGLYFSVKTNIRSSTRDWKDHKFKWRKDPQDKRAKRSGSGATNFSLLKQAGDVEENPGPTSMDWIWRILFLVGAATGAHSFEQVQLQQPGAELVKPGASVKMSCKASGYAFSSYWINWMKQKPGQGLEWIGQIYPGDGDTNYNGKFKGRATLTADTSSSTAYMQLSSLTSEDSAVYFCARSITTVVGCAMDYWGQGTSVTVSSTRASTKGPSVFPLAPSSKSTSGGTAALGCLVKDYFPEPVTVSWNSGALTSGVHTFPAVLQSSGLYSLSSVVTVPSSSLGTQTYICNVNHKPSNTKVDKRVEPKSCGTIGWLLLQAPRWVFKEEDPIHLRCHSWKNTALHKVTYLQNGKGRKYFHHNSDFYIPKATLKDSGSYFCRGLVGSKNVSSETVNITITQGLAVPTISSFFPPGYQVSFCLVMVLLFAVDTGLYFSVKTNIRSSTRDWKDHKFKWRKDPQDKRAKRSGSGVKQTLNFDLLKLAGDVESNPGPSRGHMTEYKPTVRLATRDDVPRAVRTLAAAFADYPATRHTVDPDRHIERVTELQELFLTRVGLDIGKVWVADDGAAVAVWTTPESVEAGAVFAEIGPRMAELSGSRLAAQQQMEGLLAPHRPKEPAWFLATVGVSPDHQGKGLGSAVVLPGVEAAERAGVPAFLETSAPRNLPFYERLGFTVTADVEVPEGPRTWCMTRKPGA

SEQ ID NO: 4052 - protein, 1322 aa, Artificial Sequence
  Synthetic Polypeptide
MALPVTALLLPLALLLHAARPEVQLVESGGGLVQAGGSLRLSCAASGRTFSMGWFRQAPGKEREFVAAITYSGGSPYYADSVKGRFTISRDNAKNTVYLQMNSLKPEDTAVYYCAANPTYGSDWNAENWGQGTQVTVSSGTGGGGSGGGGSGGGGSEFDIQMTQSPSSLSASVGDRVTITCKASDHINNWLAWYQQKPGQAPKLLIYGATTLETGVPSRFSGSGSGTDYTLTISSLQPEDFATYYCQQSWNTPWTFGQGTKLEIKRLEGQPKANPTVTLFPPSSEELQANKATLVCLISDFYPGAVTVAWKADGSPVKAGVETTKPSKQSNNKYAASSYLSLTPEQWKSHRSYSCQVTHEGSTVEKTVAPTECSGSIGWLLLQAPRWVFKEEDPIHLRCHSWKNTALHKVTYLQNGKGRKYFHHNSDFYIPKATLKDSGSYFCRGLVGSKNVSSETVNITITQGLAVSTISSFFPPGYQVSFCLVMVLLFAVDTGLYFSVKTNIRSSTRDWKDHKFKWRKDPQDKRAKRSGSGATNFSLLKQAGDVEENPGPTSMDWIWRILFLVGAATGAHSGPEVQLVESGGGLVQAGGSLRLSCAASGRTFTMGWFRQAPGKEREFVAAISLSPTLAYYADSVKGRFTISRDNAKNTVVLQMNSLKPEDTALYYCAADRKSVMSIRPDYWGQGTQVTVSSGSGGGGSGGGGSGGGGSFEQVQLQQPGAELVKPGASVKMSCKASGYAFSSYWINWMKQKPGQGLEWIGQIYPGDGDTNYNGKFKGRATLTADTSSSTAYMQLSSLTSEDSAVYFCARSITTVVGCAMDYWGQGTSVTVSSTRASTKGPSVFPLAPSSKSTSGGTAALGCLVKDYFPEPVTVSWNSGALTSGVHTFPAVLQSSGLYSLSSVVTVPSSSLGTQTYICNVNHKPSNTKVDKRVEPKSCGTIGWLLLQAPRWVFKEEDPIHLRCHSWKNTALHKVTYLQNGKGRKYFHHNSDFYIPKATLKDSGSYFCRGLVGSKNVSSETVNITITQGLAVPTISSFFPPGYQVSFCLVMVLLFAVDTGLYFSVKTNIRSSTRDWKDHKFKWRKDPQDKRAKRSGSGVKQTLNFDLLKLAGDVESNPGPSRGHMTEYKPTVRLATRDDVPRAVRTLAAAFADYPATRHTVDPDRHIERVTELQELFLTRVGLDIGKVWVADDGAAVAVWTTPESVEAGAVFAEIGPRMAELSGSRLAAQQQMEGLLAPHRPKEPAWFLATVGVSPDHQGKGLGSAVVLPGVEAAERAGVPAFLETSAPRNLPFYERLGFTVTADVEVPEGPRTWCMTRKPGA

SEQ ID NO: 4053 - protein, 1055 aa, Artificial Sequence
  Synthetic Polypeptide
MALPVTALLLPLALLLHAARPEVQLVESGGGLVQAGGSLRLSCAASGRTFSMGWFRQAPGKEREFVAAITYSGGSPYYADSVKGRFTISRDNAKNTVYLQMNSLKPEDTAVYYCAANPTYGSDWNAENWGQGTQVTVSSLEGQPKANPTVTLFPPSSEELQANKATLVCLISDFYPGAVTVAWKADGSPVKAGVETTKPSKQSNNKYAASSYLSLTPEQWKSHRSYSCQVTHEGSTVEKTVAPTECSGSIGWLLLQAPRWVFKEEDPIHLRCHSWKNTALHKVTYLQNGKGRKYFHHNSDFYIPKATLKDSGSYFCRGLVGSKNVSSETVNITITQGLAVSTISSFFPPGYQVSFCLVMVLLFAVDTGLYFSVKTNIRSSTRDWKDHKFKWRKDPQDKRAKRSGSGATNFSLLKQAGDVEENPGPTSMDWIWRILFLVGAATGAHSGPEVQLVESGGGLVQAGGSLRLSCAASGRTFTMGWFRQAPGKEREFVAAISLSPTLAYYADSVKGRFTISRDNAKNTVVLQMNSLKPEDTALYYCAADRKSVMSIRPDYWGQGTQVTVSSTRASTKGPSVFPLAPSSKSTSGGTAALGCLVKDYFPEPVTVSWNSGALTSGVHTFPAVLQSSGLYSLSSVVTVPSSSLGTQTYICNVNHKPSNTKVDKRVEPKSCGTIGWLLLQAPRWVFKEEDPIHLRCHSWKNTALHKVTYLQNGKGRKYFHHNSDFYIPKATLKDSGSYFCRGLVGSKNVSSETVNITITQGLAVPTISSFFPPGYQVSFCLVMVLLFAVDTGLYFSVKTNIRSSTRDWKDHKFKWRKDPQDKRAKRSGSGVKQTLNFDLLKLAGDVESNPGPSRGHMTEYKPTVRLATRDDVPRAVRTLAAAFADYPATRHTVDPDRHIERVTELQELFLTRVGLDIGKVWVADDGAAVAVWTTPESVEAGAVFAEIGPRMAELSGSRLAAQQQMEGLLAPHRPKEPAWFLATVGVSPDHQGKGLGSAVVLPGVEAAERAGVPAFLETSAPRNLPFYERLGFTVTADVEVPEGPRTWCMTRKPGA

SEQ ID NO: 4054 - protein, 1063 aa, Artificial Sequence
  Synthetic Polypeptide
MALPVTALLLPLALLLHAARPDIQMTQSPSSLSASVGDRVTITCKASDHINNWLAWYQQKPGQAPKLLIYGATTLETGVPSRFSGSGSGTDYTLTISSLQPEDFATYYCQQSWNTPWTFGQGTKLEIKRLEDLKNVFPPEVAVFEPSEAEISHTQKATLVCLATGFYPDHVELSWWVNGKEVHSGVSTDPQPLKEQPALNDSRYCLSSRLRVSATFWQNPRNHFRCQVQFYGLSENDEWTQDRAKPVTQIVSAEAWGRADCGSIGWLLLQAPRWVFKEEDPIHLRCHSWKNTALHKVTYLQNGKGRKYFHHNSDFYIPKATLKDSGSYFCRGLVGSKNVSSETVNITITQGLAVSTISSFFPPGYQVSFCLVMVLLFAVDTGLYFSVKTNIRSSTRDWKDHKFKWRKDPQDKRAKRSGSGATNFSLLKQAGDVEENPGPTSMDWIWRILFLVGAATGAHSFEQVQLQQPGAELVKPGASVKMSCKASGYAFSSYWINWMKQKPGQGLEWIGQIYPGDGDTNYNGKFKGRATLTADTSSSTAYMQLSSLTSEDSAVYFCARSITTVVGCAMDYWGQGTSVTVSSTRIQNPDPAVYQLRDSKSSDKSVCLFTDFDSQTNVSQSKDSDVYITDKTVLDMRSMDFKSNSAVAWSNKSDFACANAFNNSIIPEDTFFPSPESSCGTIGWLLLQAPRWVFKEEDPIHLRCHSWKNTALHKVTYLQNGKGRKYFHHNSDFYIPKATLKDSGSYFCRGLVGSKNVSSETVNITITQGLAVPTISSFFPPGYQVSFCLVMVLLFAVDTGLYFSVKTNIRSSTRDWKDHKFKWRKDPQDKRAKRSGSGVKQTLNFDLLKLAGDVESNPGPSRGHMTEYKPTVRLATRDDVPRAVRTLAAAFADYPATRHTVDPDRHIERVTELQELFLTRVGLDIGKVWVADDGAAVAVWTTPESVEAGAVFAEIGPRMAELSGSRLAAQQQMEGLLAPHRPKEPAWFLATVGVSPDHQGKGLGSAVVLPGVEAAERAGVPAFLETSAPRNLPFYERLGFTVTADVEVPEGPRTWCMTRKPGA

SEQ ID NO: 4055 - protein, 1200 aa, Artificial Sequence
  Synthetic Polypeptide
MALPVTALLLPLALLLHAARPEVQLVESGGGLVQAGGSLRLSCAASGRTFSMGWFRQAPGKEREFVAAITYSGGSPYYADSVKGRFTISRDNAKNTVYLQMNSLKPEDTAVYYCAANPTYGSDWNAENWGQGTQVTVSSGTGGGGSGGGGSGGGGSEFDIQMTQSPSSLSASVGDRVTITCKASDHINNWLAWYQQKPGQAPKLLIYGATTLETGVPSRFSGSGSGTDYTLTISSLQPEDFATYYCQQSWNTPWTFGQGTKLEIKRLEDLKNVFPPEVAVFEPSEAEISHTQKATLVCLATGFYPDHVELSWWVNGKEVHSGVSTDPQPLKEQPALNDSRYCLSSRLRVSATFWQNPRNHFRCQVQFYGLSENDEWTQDRAKPVTQIVSAEAWGRADCGSIGWLLLQAPRWVFKEEDPIHLRCHSWKNTALHKVTYLQNGKGRKYFHHNSDFYIPKATLKDSGSYFCRGLVGSKNVSSETVNITITQGLAVSTISSFFPPGYQVSFCLVMVLLFAVDTGLYFSVKTNIRSSTRDWKDHKFKWRKDPQDKRAKRSGSGATNFSLLKQAGDVEENPGPTSMDWIWRILFLVGAATGAHSFEQVQLQQPGAELVKPGASVKMSCKASGYAFSSYWINWMKQKPGQGLEWIGQIYPGDGDTNYNGKFKGRATLTADTSSSTAYMQLSSLTSEDSAVYFCARSITTVVGCAMDYWGQGTSVTVSSTRIQNPDPAVYQLRDSKSSDKSVCLFTDFDSQTNVSQSKDSDVYITDKTVLDMRSMDFKSNSAVAWSNKSDFACANAFNNSIIPEDTFFPSPESSCGTIGWLLLQAPRWVFKEEDPIHLRCHSWKNTALHKVTYLQNGKGRKYFHHNSDFYIPKATLKDSGSYFCRGLVGSKNVSSETVNITITQGLAVPTISSFFPPGYQVSFCLVMVLLFAVDTGLYFSVKTNIRSSTRDWKDHKFKWRKDPQDKRAKRSGSGVKQTLNFDLLKLAGDVESNPGPSRGHMTEYKPTVRLATRDDVPRAVRTLAAAFADYPATRHTVDPDRHIERVTELQELFLTRVGLDIGKVWVADDGAAVAVWTTPESVEAGAVFAEIGPRMAELSGSRLAAQQQMEGLLAPHRPKEPAWFLATVGVSPDHQGKGLGSAVVLPGVEAAERAGVPAFLETSAPRNLPFYERLGFTVTADVEVPEGPRTWCMTRKPGA

SEQ ID NO: 4056 - protein, 1337 aa, Artificial Sequence
  Synthetic Polypeptide
MALPVTALLLPLALLLHAARPEVQLVESGGGLVQAGGSLRLSCAASGRTFSMGWFRQAPGKEREFVAAITYSGGSPYYADSVKGRFTISRDNAKNTVYLQMNSLKPEDTAVYYCAANPTYGSDWNAENWGQGTQVTVSSGTGGGGSGGGGSGGGGSEFDIQMTQSPSSLSASVGDRVTITCKASDHINNWLAWYQQKPGQAPKLLIYGATTLETGVPSRFSGSGSGTDYTLTISSLQPEDFATYYCQQSWNTPWTFGQGTKLEIKRLEDLKNVFPPEVAVFEPSEAEISHTQKATLVCLATGFYPDHVELSWWVNGKEVHSGVSTDPQPLKEQPALNDSRYCLSSRLRVSATFWQNPRNHFRCQVQFYGLSENDEWTQDRAKPVTQIVSAEAWGRADCGSIGWLLLQAPRWVFKEEDPIHLRCHSWKNTALHKVTYLQNGKGRKYFHHNSDFYIPKATLKDSGSYFCRGLVGSKNVSSETVNITITQGLAVSTISSFFPPGYQVSFCLVMVLLFAVDTGLYFSVKTNIRSSTRDWKDHKFKWRKDPQDKRAKRSGSGATNFSLLKQAGDVEENPGPTSMDWIWRILFLVGAATGAHSGPEVQLVESGGGLVQAGGSLRLSCAASGRTFTMGWFRQAPGKEREFVAAISLSPTLAYYADSVKGRFTISRDNAKNTVVLQMNSLKPEDTALYYCAADRKSVMSIRPDYWGQGTQVTVSSGSGGGGSGGGGSGGGGSFEQVQLQQPGAELVKPGASVKMSCKASGYAFSSYWINWMKQKPGQGLEWIGQIYPGDGDTNYNGKFKGRATLTADTSSSTAYMQLSSLTSEDSAVYFCARSITTVVGCAMDYWGQGTSVTVSSTRIQNPDPAVYQLRDSKSSDKSVCLFTDFDSQTNVSQSKDSDVYITDKTVLDMRSMDFKSNSAVAWSNKSDFACANAFNNSIIPEDTFFPSPESSCGTIGWLLLQAPRWVFKEEDPIHLRCHSWKNTALHKVTYLQNGKGRKYFHHNSDFYIPKATLKDSGSYFCRGLVGSKNVSSETVNITITQGLAVPTISSFFPPGYQVSFCLVMVLLFAVDTGLYFSVKTNIRSSTRDWKDHKFKWRKDPQDKRAKRSGSGVKQTLNFDLLKLAGDVESNPGPSRGHMTEYKPTVRLATRDDVPRAVRTLAAAFADYPATRHTVDPDRHIERVTELQELFLTRVGLDIGKVWVADDGAAVAVWTTPESVEAGAVFAEIGPRMAELSGSRLAAQQQMEGLLAPHRPKEPAWFLATVGVSPDHQGKGLGSAVVLPGVEAAERAGVPAFLETSAPRNLPFYERLGFTVTADVEVPEGPRTWCMTRKPGA

SEQ ID NO: 4057 - protein, 1070 aa, Artificial Sequence
  Synthetic Polypeptide
MALPVTALLLPLALLLHAARPEVQLVESGGGLVQAGGSLRLSCAASGRTFSMGWFRQAPGKEREFVAAITYSGGSPYYADSVKGRFTISRDNAKNTVYLQMNSLKPEDTAVYYCAANPTYGSDWNAENWGQGTQVTVSSLEDLKNVFPPEVAVFEPSEAEISHTQKATLVCLATGFYPDHVELSWWVNGKEVHSGVSTDPQPLKEQPALNDSRYCLSSRLRVSATFWQNPRNHFRCQVQFYGLSENDEWTQDRAKPVTQIVSAEAWGRADCGSIGWLLLQAPRWVFKEEDPIHLRCHSWKNTALHKVTYLQNGKGRKYFHHNSDFYIPKATLKDSGSYFCRGLVGSKNVSSETVNITITQGLAVSTISSFFPPGYQVSFCLVMVLLFAVDTGLYFSVKTNIRSSTRDWKDHKFKWRKDPQDKRAKRSGSGATNFSLLKQAGDVEENPGPTSMDWIWRILFLVGAATGAHSGPEVQLVESGGGLVQAGGSLRLSCAASGRTFTMGWFRQAPGKEREFVAAISLSPTLAYYADSVKGRFTISRDNAKNTVVLQMNSLKPEDTALYYCAADRKSVMSIRPDYWGQGTQVTVSSTRIQNPDPAVYQLRDSKSSDKSVCLFTDFDSQTNVSQSKDSDVYITDKTVLDMRSMDFKSNSAVAWSNKSDFACANAFNNSIIPEDTFFPSPESSCGTIGWLLLQAPRWVFKEEDPIHLRCHSWKNTALHKVTYLQNGKGRKYFHHNSDFYIPKATLKDSGSYFCRGLVGSKNVSSETVNITITQGLAVPTISSFFPPGYQVSFCLVMVLLFAVDTGLYFSVKTNIRSSTRDWKDHKFKWRKDPQDKRAKRSGSGVKQTLNFDLLKLAGDVESNPGPSRGHMTEYKPTVRLATRDDVPRAVRTLAAAFADYPATRHTVDPDRHIERVTELQELFLTRVGLDIGKVWVADDGAAVAVWTTPESVEAGAVFAEIGPRMAELSGSRLAAQQQMEGLLAPHRPKEPAWFLATVGVSPDHQGKGLGSAVVLPGVEAAERAGVPAFLETSAPRNLPFYERLGFTVTADVEVPEGPRTWCMTRKPGA

SEQ ID NO: 4058 - protein, 544 aa, Artificial Sequence
  Synthetic Polypeptide
MALPVTALLLPLALLLHAARPACEVQLLESGGGLIQPGGSLRLSCAASGFTFSSHAMTWVRQAPGKGLEWVSAISGSGDYTHYADSVKGRFTISRDNSKNTVYLQMNSLRAEDSAVYYCAKDEDGGSLLGHRGQGTLVTVSSGTGGGGSGGGGSGGGGSEFGSLEIGWLLLQAPRWVFKEEDPIHLRCHSWKNTALHKVTYLQNGKGRKYFHHNSDFYIPKATLKDSGSYFCRGLVGSKNVSSETVNITITQGLAVSTISSFFPPGYQVSFCLVMVLLFAVDTGLYFSVKTNIRSSTRDWKDHKFKWRKDPQDKRAKRSGSGATNFSLLKQAGDVEENPGPTRGHMTEYKPTVRLATRDDVPRAVRTLAAAFADYPATRHTVDPDRHIERVTELQELFLTRVGLDIGKVWVADDGAAVAVWTTPESVEAGAVFAEIGPRMAELSGSRLAAQQQMEGLLAPHRPKEPAWFLATVGVSPDHQGKGLGSAVVLPGVEAAERAGVPAFLETSAPRNLPFYERLGFTVTADVEVPEGPRTWCMTRKPGA

SEQ ID NO: 4059 - protein, 751 aa, Artificial Sequence
  Synthetic Polypeptide
MALPVTALLLPLALLLHAARPDIQMTQSPSSLSASVGDRVTITCKASDHINNWLAWYQQKPGQAPKLLIYGATTLETGVPSRFSGSGSGTDYTLTISSLQPEDFATYYCQQSWNTPWTFGQGTKLEIKRLEIGWLLLQAPRWVFKEEDPIHLRCHSWKNTALHKVTYLQNGKGRKYFHHNSDFYIPKATLKDSGSYFCRGLVGSKNVSSETVNITITQGLAVSTISSFFPPGYQVSFCLVMVLLFAVDTGLYFSVKTNIRSSTRDWKDHKFKWRKDPQDKRAKRSGSGATNFSLLKQAGDVEENPGPTSMDWIWRILFLVGAATGAHSFEQVQLQQPGAELVKPGASVKMSCKASGYAFSSYWINWMKQKPGQGLEWIGQIYPGDGDTNYNGKFKGRATLTADTSSSTAYMQLSSLTSEDSAVYFCARSITTVVGCAMDYWGQGTSVTVSSTRITQGLAVPTISSFFPPGYQVSFCLVMVLLFAVDTGLYFSVKTNIRSSTRDWKDHKFKWRKDPQDKRAKRSGSGVKQTLNFDLLKLAGDVESNPGPSRGHMTEYKPTVRLATRDDVPRAVRTLAAAFADYPATRHTVDPDRHIERVTELQELFLTRVGLDIGKVWVADDGAAVAVWTTPESVEAGAVFAEIGPRMAELSGSRLAAQQQMEGLLAPHRPKEPAWFLATVGVSPDHQGKGLGSAVVLPGVEAAERAGVPAFLETSAPRNLPFYERLGFTVTADVEVPEGPRTWCMTRKPGA

SEQ ID NO: 4060 - protein, 805 aa, Artificial Sequence
  Synthetic Polypeptide
MALPVTALLLPLALLLHAARPACEVQLLESGGGLIQPGGSLRLSCAASGFTFSSHAMTWVRQAPGKGLEWVSAISGSGDYTHYADSVKGRFTISRDNSKNTVYLQMNSLRAEDSAVYYCAKDEDGGSLLGHRGQGTLVTVSSGTGGGGSGGGGSGGGGSEFGSLEIGWLLLQAPRWVFKEEDPIHLRCHSWKNTALHKVTYLQNGKGRKYFHHNSDFYIPKATLKDSGSYFCRGLVGSKNVSSETVNITITQGLAVSTISSFFPPGYQVSFCLVMVLLFAVDTGLYFSVKTNIRSSTRDWKDHKFKWRKDPQDKRAKRSGSGATNFSLLKQAGDVEENPGPTSATMDWIWRILFLVGAATGAHSGPEVQLVESGGGLVQAGGSLRLSCAASGRTFSMGWFRQAPGKEREFVAAITYSGGSPYYADSVKGRFTISRDNAKNTVYLQMNSLKPEDTAVYYCAANPTYGSDWNAENWGQGTQVTVSSGSGGGGSGGGGSGGGGSFEGSTRITQGLAVPTISSFFPPGYQVSFCLVMVLLFAVDTGLYFSVKTNIRSSTRDWKDHKFKWRKDPQDKRAKRSGSGVKQTLNFDLLKLAGDVESNPGPSRGHMTEYKPTVRLATRDDVPRAVRTLAAAFADYPATRHTVDPDRHIERVTELQELFLTRVGLDIGKVWVADDGAAVAVWTTPESVEAGAVFAEIGPRMAELSGSRLAAQQQMEGLLAPHRPKEPAWFLATVGVSPDHQGKGLGSAVVLPGVEAAERAGVPAFLETSAPRNLPFYERLGFTVTADVEVPEGPRTWCMTRKPGA

SEQ ID NO: 4061 - protein, 956 aa, Artificial Sequence
  Synthetic Polypeptide
MALPVTALLLPLALLLHAARPDIQMTQSPSSLSASVGDRVTITCKASDHINNWLAWYQQKPGQAPKLLIYGATTLETGVPSRFSGSGSGTDYTLTISSLQPEDFATYYCQQSWNTPWTFGQGTKLEIKRLEGQPKANPTVTLFPPSSEELQANKATLVCLISDFYPGAVTVAWKADGSPVKAGVETTKPSKQSNNKYAASSYLSLTPEQWKSHRSYSCQVTHEGSTVEKTVAPTECSGSIGWLLLQAPRWVFKEEDPIHLRCHSWKNTALHKVTYLQNGKGRKYFHHNSDFYIPKATLKDSGSYFCRGLVGSKNVSSETVNITITQGLAVSTISSFFPPGYQVSFCLVMVLLFAVDTGLYFSVKTNIRSSTRDWKDHKFKWRKDPQDKRAKRSGSGATNFSLLKQAGDVEENPGPTSMDWIWRILFLVGAATGAHSFEQVQLQQPGAELVKPGASVKMSCKASGYAFSSYWINWMKQKPGQGLEWIGQIYPGDGDTNYNGKFKGRATLTADTSSSTAYMQLSSLTSEDSAVYFCARSITTVVGCAMDYWGQGTSVTVSSTRASTKGPSVFPLAPSSKSTSGGTAALGCLVKDYFPEPVTVSWNSGALTSGVHTFPAVLQSSGLYSLSSVVTVPSSSLGTQTYICNVNHKPSNTKVDKRVEPKSCGTITQGLAVPTISSFFPPGYQVSFCLVMVLLFAVDTGLYFSVKTNIRSSTRDWKDHKFKWRKDPQDKRAKRSGSGVKQTLNFDLLKLAGDVESNPGPSRGGIHTMATYEVLCEVARKLGTDDREVVLFLLNVFIPQPTLAQLIGALRALKEEGRLTFPLLAECLFRAGRRDLLRDLLHLDPRFLERHLAGTMSYFSPYQLTVLHVDGELCARDIRSLIFLSKDTIGSRSTPQTFLHWVYCMENLDLLGPTDVDALMSMLRSLSRVDLQRQVQTLMGLHLSGPSHSQHYRHTP

SEQ ID NO: 4062 - protein, 1009 aa, Artificial Sequence
  Synthetic Polypeptide
MALPVTALLLPLALLLHAARPDIQMTQSPSSLSASVGDRVTITCKASDHINNWLAWYQQKPGQAPKLLIYGATTLETGVPSRFSGSGSGTDYTLTISSLQPEDFATYYCQQSWNTPWTFGQGTKLEIKRLEGQPKANPTVTLFPPSSEELQANKATLVCLISDFYPGAVTVAWKADGSPVKAGVETTKPSKQSNNKYAASSYLSLTPEQWKSHRSYSCQVTHEGSTVEKTVAPTECSGSIGWLLLQAPRWVFKEEDPIHLRCHSWKNTALHKVTYLQNGKGRKYFHHNSDFYIPKATLKDSGSYFCRGLVGSKNVSSETVNITITQGLAVSTISSFFPPGYQVSFCLVMVLLFAVDTGLYFSVKTNIRSSTRDWKDHKFKWRKDPQDKRAKRSGSGATNFSLLKQAGDVEENPGPTSMDWIWRILFLVGAATGAHSFEQVQLQQPGAELVKPGASVKMSCKASGYAFSSYWINWMKQKPGQGLEWIGQIYPGDGDTNYNGKFKGRATLTADTSSSTAYMQLSSLTSEDSAVYFCARSITTVVGCAMDYWGQGTSVTVSSTRASTKGPSVFPLAPSSKSTSGGTAALGCLVKDYFPEPVTVSWNSGALTSGVHTFPAVLQSSGLYSLSSVVTVPSSSLGTQTYICNVNHKPSNTKVDKRVEPKSCGTITQGLAVPTISSFFPPGYQVSFCLVMVLLFAVDTGLYFSVKTNIRSSTRDWKDHKFKWRKDPQDKRAKRSGSGVKQTLNFDLLKLAGDVESNPGPSRGGIHTMSDSKEVPSLPFLRHLLEELDSHEDSLLLFLCHDAAPGCTTVTQALCSLSQQRKLTLAALVEMLYVLQRMDLLKSRFGLSKEGAEQLLGTSFLTRYRKLMVCVGEELDSSELRALRLFACNLNPSLSTALSESSRFVELVLALENVGLVSPSSVSVLADMLRTLRRLDLCQQLVEYEQQEQARYRYCYAASPSLPVRTLRRGHGASEHEQLCMPVQESSDSPELLRTPVQESSSDSPEQTT

SEQ ID NO: 4063 - protein, 964 aa, Artificial Sequence
  Synthetic Polypeptide
MALPVTALLLPLALLLHAARPDIQMTQSPSSLSASVGDRVTITCKASDHINNWLAWYQQKPGQAPKLLIYGATTLETGVPSRFSGSGSGTDYTLTISSLQPEDFATYYCQQSWNTPWTFGQGTKLEIKRLEGQPKANPTVTLFPPSSEELQANKATLVCLISDFYPGAVTVAWKADGSPVKAGVETTKPSKQSNNKYAASSYLSLTPEQWKSHRSYSCQVTHEGSTVEKTVAPTECSGSIGWLLLQAPRWVFKEEDPIHLRCHSWKNTALHKVTYLQNGKGRKYFHHNSDFYIPKATLKDSGSYFCRGLVGSKNVSSETVNITITQGLAVSTISSFFPPGYQVSFCLVMVLLFAVDTGLYFSVKTNIRSSTRDWKDHKFKWRKDPQDKRAKRSGSGATNFSLLKQAGDVEENPGPTSMDWIWRILFLVGAATGAHSFEQVQLQQPGAELVKPGASVKMSCKASGYAFSSYWINWMKQKPGQGLEWIGQIYPGDGDTNYNGKFKGRATLTADTSSSTAYMQLSSLTSEDSAVYFCARSITTVVGCAMDYWGQGTSVTVSSTRASTKGPSVFPLAPSSKSTSGGTAALGCLVKDYFPEPVTVSWNSGALTSGVHTFPAVLQSSGLYSLSSVVTVPSSSLGTQTYICNVNHKPSNTKVDKRVEPKSCGTITQGLAVPTISSFFPPGYQVSFCLVMVLLFAVDTGLYFSVKTNIRSSTRDWKDHKFKWRKDPQDKRAKRSGSGVKQTLNFDLLKLAGDVESNPGPSRGHMTEYKPTVRLATRDDVPRAVRTLAAAFADYPATRHTVDPDRHIERVTELQELFLTRVGLDIGKVWVADDGAAVAVWTTPESVEAGAVFAEIGPRMAELSGSRLAAQQQMEGLLAPHRPKEPAWFLATVGVSPDHQGKGLGSAVVLPGVEAAERAGVPAFLETSAPRNLPFYERLGFTVTADVEVPEGPRTWCMTRKPGA

SEQ ID NO: 4064 - protein, 1101 aa, Artificial Sequence
  Synthetic Polypeptide
MALPVTALLLPLALLLHAARPEVQLVESGGGLVQAGGSLRLSCAASGRTFSMGWFRQAPGKEREFVAAITYSGGSPYYADSVKGRFTISRDNAKNTVYLQMNSLKPEDTAVYYCAANPTYGSDWNAENWGQGTQVTVSSGTGGGGSGGGGSGGGGSEFDIQMTQSPSSLSASVGDRVTITCKASDHINNWLAWYQQKPGQAPKLLIYGATTLETGVPSRFSGSGSGTDYTLTISSLQPEDFATYYCQQSWNTPWTFGQGTKLEIKRLEGQPKANPTVTLFPPSSEELQANKATLVCLISDFYPGAVTVAWKADGSPVKAGVETTKPSKQSNNKYAASSYLSLTPEQWKSHRSYSCQVTHEGSTVEKTVAPTECSGSIGWLLLQAPRWVFKEEDPIHLRCHSWKNTALHKVTYLQNGKGRKYFHHNSDFYIPKATLKDSGSYFCRGLVGSKNVSSETVNITITQGLAVSTISSFFPPGYQVSFCLVMVLLFAVDTGLYFSVKTNIRSSTRDWKDHKFKWRKDPQDKRAKRSGSGATNFSLLKQAGDVEENPGPTSMDWIWRILFLVGAATGAHSFEQVQLQQPGAELVKPGASVKMSCKASGYAFSSYWINWMKQKPGQGLEWIGQIYPGDGDTNYNGKFKGRATLTADTSSSTAYMQLSSLTSEDSAVYFCARSITTVVGCAMDYWGQGTSVTVSSTRASTKGPSVFPLAPSSKSTSGGTAALGCLVKDYFPEPVTVSWNSGALTSGVHTFPAVLQSSGLYSLSSVVTVPSSSLGTQTYICNVNHKPSNTKVDKRVEPKSCGTITQGLAVPTISSFFPPGYQVSFCLVMVLLFAVDTGLYFSVKTNIRSSTRDWKDHKFKWRKDPQDKRAKRSGSGVKQTLNFDLLKLAGDVESNPGPSRGHMTEYKPTVRLATRDDVPRAVRTLAAAFADYPATRHTVDPDRHIERVTELQELFLTRVGLDIGKVWVADDGAAVAVWTTPESVEAGAVFAEIGPRMAELSGSRLAAQQQMEGLLAPHRPKEPAWFLATVGVSPDHQGKGLGSAVVLPGVEAAERAGVPAFLETSAPRNLPFYERLGFTVTADVEVPEGPRTWCMTRKPGA

SEQ ID NO: 4065 - protein, 1238 aa, Artificial Sequence
  Synthetic Polypeptide
MALPVTALLLPLALLLHAARPEVQLVESGGGLVQAGGSLRLSCAASGRTFSMGWFRQAPGKEREFVAAITYSGGSPYYADSVKGRFTISRDNAKNTVYLQMNSLKPEDTAVYYCAANPTYGSDWNAENWGQGTQVTVSSGTGGGGSGGGGSGGGGSEFDIQMTQSPSSLSASVGDRVTITCKASDHINNWLAWYQQKPGQAPKLLIYGATTLETGVPSRFSGSGSGTDYTLTISSLQPEDFATYYCQQSWNTPWTFGQGTKLEIKRLEGQPKANPTVTLFPPSSEELQANKATLVCLISDFYPGAVTVAWKADGSPVKAGVETTKPSKQSNNKYAASSYLSLTPEQWKSHRSYSCQVTHEGSTVEKTVAPTECSGSIGWLLLQAPRWVFKEEDPIHLRCHSWKNTALHKVTYLQNGKGRKYFHHNSDFYIPKATLKDSGSYFCRGLVGSKNVSSETVNITITQGLAVSTISSFFPPGYQVSFCLVMVLLFAVDTGLYFSVKTNIRSSTRDWKDHKFKWRKDPQDKRAKRSGSGATNFSLLKQAGDVEENPGPTSMDWIWRILFLVGAATGAHSGPEVQLVESGGGLVQAGGSLRLSCAASGRTFTMGWFRQAPGKEREFVAAISLSPTLAYYADSVKGRFTISRDNAKNTVVLQMNSLKPEDTALYYCAADRKSVMSIRPDYWGQGTQVTVSSGSGGGGSGGGGSGGGGSFEQVQLQQPGAELVKPGASVKMSCKASGYAFSSYWINWMKQKPGQGLEWIGQIYPGDGDTNYNGKFKGRATLTADTSSSTAYMQLSSLTSEDSAVYFCARSITTVVGCAMDYWGQGTSVTVSSTRASTKGPSVFPLAPSSKSTSGGTAALGCLVKDYFPEPVTVSWNSGALTSGVHTFPAVLQSSGLYSLSSVVTVPSSSLGTQTYICNVNHKPSNTKVDKRVEPKSCGTITQGLAVPTISSFFPPGYQVSFCLVMVLLFAVDTGLYFSVKTNIRSSTRDWKDHKFKWRKDPQDKRAKRSGSGVKQTLNFDLLKLAGDVESNPGPSRGHMTEYKPTVRLATRDDVPRAVRTLAAAFADYPATRHTVDPDRHIERVTELQELFLTRVGLDIGKVWVADDGAAVAVWTTPESVEAGAVFAEIGPRMAELSGSRLAAQQQMEGLLAPHRPKEPAWFLATVGVSPDHQGKGLGSAVVLPGVEAAERAGVPAFLETSAPRNLPFYERLGFTVTADVEVPEGPRTWCMTRKPGA

SEQ ID NO: 4066 - protein, 971 aa, Artificial Sequence
  Synthetic Polypeptide
MALPVTALLLPLALLLHAARPEVQLVESGGGLVQAGGSLRLSCAASGRTFSMGWFRQAPGKEREFVAAITYSGGSPYYADSVKGRFTISRDNAKNTVYLQMNSLKPEDTAVYYCAANPTYGSDWNAENWGQGTQVTVSSLEGQPKANPTVTLFPPSSEELQANKATLVCLISDFYPGAVTVAWKADGSPVKAGVETTKPSKQSNNKYAASSYLSLTPEQWKSHRSYSCQVTHEGSTVEKTVAPTECSGSIGWLLLQAPRWVFKEEDPIHLRCHSWKNTALHKVTYLQNGKGRKYFHHNSDFYIPKATLKDSGSYFCRGLVGSKNVSSETVNITITQGLAVSTISSFFPPGYQVSFCLVMVLLFAVDTGLYFSVKTNIRSSTRDWKDHKFKWRKDPQDKRAKRSGSGATNFSLLKQAGDVEENPGPTSMDWIWRILFLVGAATGAHSGPEVQLVESGGGLVQAGGSLRLSCAASGRTFTMGWFRQAPGKEREFVAAISLSPTLAYYADSVKGRFTISRDNAKNTVVLQMNSLKPEDTALYYCAADRKSVMSIRPDYWGQGTQVTVSSTRASTKGPSVFPLAPSSKSTSGGTAALGCLVKDYFPEPVTVSWNSGALTSGVHTFPAVLQSSGLYSLSSVVTVPSSSLGTQTYICNVNHKPSNTKVDKRVEPKSCGTITQGLAVPTISSFFPPGYQVSFCLVMVLLFAVDTGLYFSVKTNIRSSTRDWKDHKFKWRKDPQDKRAKRSGSGVKQTLNFDLLKLAGDVESNPGPSRGHMTEYKPTVRLATRDDVPRAVRTLAAAFADYPATRHTVDPDRHIERVTELQELFLTRVGLDIGKVWVADDGAAVAVWTTPESVEAGAVFAEIGPRMAELSGSRLAAQQQMEGLLAPHRPKEPAWFLATVGVSPDHQGKGLGSAVVLPGVEAAERAGVPAFLETSAPRNLPFYERLGFTVTADVEVPEGPRTWCMTRKPGA

SEQ ID NO: 4067 - protein, 979 aa, Artificial Sequence
  Synthetic Polypeptide
MALPVTALLLPLALLLHAARPDIQMTQSPSSLSASVGDRVTITCKASDHINNWLAWYQQKPGQAPKLLIYGATTLETGVPSRFSGSGSGTDYTLTISSLQPEDFATYYCQQSWNTPWTFGQGTKLEIKRLEDLKNVFPPEVAVFEPSEAEISHTQKATLVCLATGFYPDHVELSWWVNGKEVHSGVSTDPQPLKEQPALNDSRYCLSSRLRVSATFWQNPRNHFRCQVQFYGLSENDEWTQDRAKPVTQIVSAEAWGRADCGSIGWLLLQAPRWVFKEEDPIHLRCHSWKNTALHKVTYLQNGKGRKYFHHNSDFYIPKATLKDSGSYFCRGLVGSKNVSSETVNITITQGLAVSTISSFFPPGYQVSFCLVMVLLFAVDTGLYFSVKTNIRSSTRDWKDHKFKWRKDPQDKRAKRSGSGATNFSLLKQAGDVEENPGPTSMDWIWRILFLVGAATGAHSFEQVQLQQPGAELVKPGASVKMSCKASGYAFSSYWINWMKQKPGQGLEWIGQIYPGDGDTNYNGKFKGRATLTADTSSSTAYMQLSSLTSEDSAVYFCARSITTVVGCAMDYWGQGTSVTVSSTRIQNPDPAVYQLRDSKSSDKSVCLFTDFDSQTNVSQSKDSDVYITDKTVLDMRSMDFKSNSAVAWSNKSDFACANAFNNSIIPEDTFFPSPESSCGTITQGLAVPTISSFFPPGYQVSFCLVMVLLFAVDTGLYFSVKTNIRSSTRDWKDHKFKWRKDPQDKRAKRSGSGVKQTLNFDLLKLAGDVESNPGPSRGHMTEYKPTVRLATRDDVPRAVRTLAAAFADYPATRHTVDPDRHIERVTELQELFLTRVGLDIGKVWVADDGAAVAVWTTPESVEAGAVFAEIGPRMAELSGSRLAAQQQMEGLLAPHRPKEPAWFLATVGVSPDHQGKGLGSAVVLPGVEAAERAGVPAFLETSAPRNLPFYERLGFTVTADVEVPEGPRTWCMTRKPGA

SEQ ID NO: 4068 - protein, 1116 aa, Artificial Sequence
  Synthetic Polypeptide
MALPVTALLLPLALLLHAARPEVQLVESGGGLVQAGGSLRLSCAASGRTFSMGWFRQAPGKEREFVAAITYSGGSPYYADSVKGRFTISRDNAKNTVYLQMNSLKPEDTAVYYCAANPTYGSDWNAENWGQGTQVTVSSGTGGGGSGGGGSGGGGSEFDIQMTQSPSSLSASVGDRVTITCKASDHINNWLAWYQQKPGQAPKLLIYGATTLETGVPSRFSGSGSGTDYTLTISSLQPEDFATYYCQQSWNTPWTFGQGTKLEIKRLEDLKNVFPPEVAVFEPSEAEISHTQKATLVCLATGFYPDHVELSWWVNGKEVHSGVSTDPQPLKEQPALNDSRYCLSSRLRVSATFWQNPRNHFRCQVQFYGLSENDEWTQDRAKPVTQIVSAEAWGRADCGSIGWLLLQAPRWVFKEEDPIHLRCHSWKNTALHKVTYLQNGKGRKYFHHNSDFYIPKATLKDSGSYFCRGLVGSKNVSSETVNITITQGLAVSTISSFFPPGYQVSFCLVMVLLFAVDTGLYFSVKTNIRSSTRDWKDHKFKWRKDPQDKRAKRSGSGATNFSLLKQAGDVEENPGPTSMDWIWRILFLVGAATGAHSFEQVQLQQPGAELVKPGASVKMSCKASGYAFSSYWINWMKQKPGQGLEWIGQIYPGDGDTNYNGKFKGRATLTADTSSSTAYMQLSSLTSEDSAVYFCARSITTVVGCAMDYWGQGTSVTVSSTRIQNPDPAVYQLRDSKSSDKSVCLFTDFDSQTNVSQSKDSDVYITDKTVLDMRSMDFKSNSAVAWSNKSDFACANAFNNSIIPEDTFFPSPESSCGTITQGLAVPTISSFFPPGYQVSFCLVMVLLFAVDTGLYFSVKTNIRSSTRDWKDHKFKWRKDPQDKRAKRSGSGVKQTLNFDLLKLAGDVESNPGPSRGHMTEYKPTVRLATRDDVPRAVRTLAAAFADYPATRHTVDPDRHIERVTELQELFLTRVGLDIGKVWVADDGAAVAVWTTPESVEAGAVFAEIGPRMAELSGSRLAAQQQMEGLLAPHRPKEPAWFLATVGVSPDHQGKGLGSAVVLPGVEAAERAGVPAFLETSAPRNLPFYERLGFTVTADVEVPEGPRTWCMTRKPGA

SEQ ID NO: 4069 - protein, 1253 aa, Artificial Sequence
  Synthetic Polypeptide
MALPVTALLLPLALLLHAARPEVQLVESGGGLVQAGGSLRLSCAASGRTFSMGWFRQAPGKEREFVAAITYSGGSPYYADSVKGRFTISRDNAKNTVYLQMNSLKPEDTAVYYCAANPTYGSDWNAENWGQGTQVTVSSGTGGGGSGGGGSGGGGSEFDIQMTQSPSSLSASVGDRVTITCKASDHINNWLAWYQQKPGQAPKLLIYGATTLETGVPSRFSGSGSGTDYTLTISSLQPEDFATYYCQQSWNTPWTFGQGTKLEIKRLEDLKNVFPPEVAVFEPSEAEISHTQKATLVCLATGFYPDHVELSWWVNGKEVHSGVSTDPQPLKEQPALNDSRYCLSSRLRVSATFWQNPRNHFRCQVQFYGLSENDEWTQDRAKPVTQIVSAEAWGRADCGSIGWLLLQAPRWVFKEEDPIHLRCHSWKNTALHKVTYLQNGKGRKYFHHNSDFYIPKATLKDSGSYFCRGLVGSKNVSSETVNITITQGLAVSTISSFFPPGYQVSFCLVMVLLFAVDTGLYFSVKTNIRSSTRDWKDHKFKWRKDPQDKRAKRSGSGATNFSLLKQAGDVEENPGPTSMDWIWRILFLVGAATGAHSGPEVQLVESGGGLVQAGGSLRLSCAASGRTFTMGWFRQAPGKEREFVAAISLSPTLAYYADSVKGRFTISRDNAKNTVVLQMNSLKPEDTALYYCAADRKSVMSIRPDYWGQGTQVTVSSGSGGGGSGGGGSGGGGSFEQVQLQQPGAELVKPGASVKMSCKASGYAFSSYWINWMKQKPGQGLEWIGQIYPGDGDTNYNGKFKGRATLTADTSSSTAYMQLSSLTSEDSAVYFCARSITTVVGCAMDYWGQGTSVTVSSTRIQNPDPAVYQLRDSKSSDKSVCLFTDFDSQTNVSQSKDSDVYITDKTVLDMRSMDFKSNSAVAWSNKSDFACANAFNNSIIPEDTFFPSPESSCGTITQGLAVPTISSFFPPGYQVSFCLVMVLLFAVDTGLYFSVKTNIRSSTRDWKDHKFKWRKDPQDKRAKRSGSGVKQTLNFDLLKLAGDVESNPGPSRGHMTEYKPTVRLATRDDVPRAVRTLAAAFADYPATRHTVDPDRHIERVTELQELFLTRVGLDIGKVWVADDGAAVAVWTTPESVEAGAVFAEIGPRMAELSGSRLAAQQQMEGLLAPHRPKEPAWFLATVGVSPDHQGKGLGSAVVLPGVEAAERAGVPAFLETSAPRNLPFYERLGFTVTADVEVPEGPRTWCMTRKPGA

SEQ ID NO: 4070 - protein, 986 aa, Artificial Sequence
  Synthetic Polypeptide
MALPVTALLLPLALLLHAARPEVQLVESGGGLVQAGGSLRLSCAASGRTFSMGWFRQAPGKEREFVAAITYSGGSPYYADSVKGRFTISRDNAKNTVYLQMNSLKPEDTAVYYCAANPTYGSDWNAENWGQGTQVTVSSLEDLKNVFPPEVAVFEPSEAEISHTQKATLVCLATGFYPDHVELSWWVNGKEVHSGVSTDPQPLKEQPALNDSRYCLSSRLRVSATFWQNPRNHFRCQVQFYGLSENDEWTQDRAKPVTQIVSAEAWGRADCGSIGWLLLQAPRWVFKEEDPIHLRCHSWKNTALHKVTYLQNGKGRKYFHHNSDFYIPKATLKDSGSYFCRGLVGSKNVSSETVNITITQGLAVSTISSFFPPGYQVSFCLVMVLLFAVDTGLYFSVKTNIRSSTRDWKDHKFKWRKDPQDKRAKRSGSGATNFSLLKQAGDVEENPGPTSMDWIWRILFLVGAATGAHSGPEVQLVESGGGLVQAGGSLRLSCAASGRTFTMGWFRQAPGKEREFVAAISLSPTLAYYADSVKGRFTISRDNAKNTVVLQMNSLKPEDTALYYCAADRKSVMSIRPDYWGQGTQVTVSSTRIQNPDPAVYQLRDSKSSDKSVCLFTDFDSQTNVSQSKDSDVYITDKTVLDMRSMDFKSNSAVAWSNKSDFACANAFNNSIIPEDTFFPSPESSCGTITQGLAVPTISSFFPPGYQVSFCLVMVLLFAVDTGLYFSVKTNIRSSTRDWKDHKFKWRKDPQDKRAKRSGSGVKQTLNFDLLKLAGDVESNPGPSRGHMTEYKPTVRLATRDDVPRAVRTLAAAFADYPATRHTVDPDRHIERVTELQELFLTRVGLDIGKVWVADDGAAVAVWTTPESVEAGAVFAEIGPRMAELSGSRLAAQQQMEGLLAPHRPKEPAWFLATVGVSPDHQGKGLGSAVVLPGVEAAERAGVPAFLETSAPRNLPFYERLGFTVTADVEVPEGPRTWCMTRKPGA

SEQ ID NO: 4071 - protein, 544 aa, Artificial Sequence; identical to SEQ ID NO: 4058
  Synthetic Polypeptide

SEQ ID NO: 4072 - protein, 667 aa, Artificial Sequence
  Synthetic Polypeptide
MALPVTALLLPLALLLHAARPDIQMTQSPSSLSASVGDRVTITCKASDHINNWLAWYQQKPGQAPKLLIYGATTLETGVPSRFSGSGSGTDYTLTISSLQPEDFATYYCQQSWNTPWTFGQGTKLEIKRLEITQGLAVSTISSFFPPGYQVSFCLVMVLLFAVDTGLYFSVKTNIRSSTRDWKDHKFKWRKDPQDKRAKRSGSGATNFSLLKQAGDVEENPGPTSMDWIWRILFLVGAATGAHSFEQVQLQQPGAELVKPGASVKMSCKASGYAFSSYWINWMKQKPGQGLEWIGQIYPGDGDTNYNGKFKGRATLTADTSSSTAYMQLSSLTSEDSAVYFCARSITTVVGCAMDYWGQGTSVTVSSTRITQGLAVPTISSFFPPGYQVSFCLVMVLLFAVDTGLYFSVKTNIRSSTRDWKDHKFKWRKDPQDKRAKRSGSGVKQTLNFDLLKLAGDVESNPGPSRGHMTEYKPTVRLATRDDVPRAVRTLAAAFADYPATRHTVDPDRHIERVTELQELFLTRVGLDIGKVWVADDGAAVAVWTTPESVEAGAVFAEIGPRMAELSGSRLAAQQQMEGLLAPHRPKEPAWFLATVGVSPDHQGKGLGSAVVLPGVEAAERAGVPAFLETSAPRNLPFYERLGFTVTADVEVPEGPRTWCMTRKPGA

SEQ ID NO: 4073 - protein, 721 aa, Artificial Sequence
  Synthetic Polypeptide
MALPVTALLLPLALLLHAARPACEVQLLESGGGLIQPGGSLRLSCAASGFTFSSHAMTWVRQAPGKGLEWVSAISGSGDYTHYADSVKGRFTISRDNSKNTVYLQMNSLRAEDSAVYYCAKDEDGGSLLGHRGQGTLVTVSSGTGGGGSGGGGSGGGGSEFGSLEITQGLAVSTISSFFPPGYQVSFCLVMVLLFAVDTGLYFSVKTNIRSSTRDWKDHKFKWRKDPQDKRAKRSGSGATNFSLLKQAGDVEENPGPTSATMDWIWRILFLVGAATGAHSGPEVQLVESGGGLVQAGGSLRLSCAASGRTFSMGWFRQAPGKEREFVAAITYSGGSPYYADSVKGRFTISRDNAKNTVYLQMNSLKPEDTAVYYCAANPTYGSDWNAENWGQGTQVTVSSGSGGGGSGGGGSGGGGSFEGSTRITQGLAVPTISSFFPPGYQVSFCLVMVLLFAVDTGLYFSVKTNIRSSTRDWKDHKFKWRKDPQDKRAKRSGSGVKQTLNFDLLKLAGDVESNPGPSRGHMTEYKPTVRLATRDDVPRAVRTLAAAFADYPATRHTVDPDRHIERVTELQELFLTRVGLDIGKVWVADDGAAVAVWTTPESVEAGAVFAEIGPRMAELSGSRLAAQQQMEGLLAPHRPKEPAWFLATVGVSPDHQGKGLGSAVVLPGVEAAERAGVPAFLETSAPRNLPFYERLGFTVTADVEVPEGPRTWCMTRKPGA

SEQ ID NO: 4074 - protein, 872 aa, Artificial Sequence
  Synthetic Polypeptide
MALPVTALLLPLALLLHAARPDIQMTQSPSSLSASVGDRVTITCKASDHINNWLAWYQQKPGQAPKLLIYGATTLETGVPSRFSGSGSGTDYTLTISSLQPEDFATYYCQQSWNTPWTFGQGTKLEIKRLEGQPKANPTVTLFPPSSEELQANKATLVCLISDFYPGAVTVAWKADGSPVKAGVETTKPSKQSNNKYAASSYLSLTPEQWKSHRSYSCQVTHEGSTVEKTVAPTECSGSITQGLAVSTISSFFPPGYQVSFCLVMVLLFAVDTGLYFSVKTNIRSSTRDWKDHKFKWRKDPQDKRAKRSGSGATNFSLLKQAGDVEENPGPTSMDWIWRILFLVGAATGAHSFEQVQLQQPGAELVKPGASVKMSCKASGYAFSSYWINWMKQKPGQGLEWIGQIYPGDGDTNYNGKFKGRATLTADTSSSTAYMQLSSLTSEDSAVYFCARSITTVVGCAMDYWGQGTSVTVSSTRASTKGPSVFPLAPSSKSTSGGTAALGCLVKDYFPEPVTVSWNSGALTSGVHTFPAVLQSSGLYSLSSVVTVPSSSLGTQTYICNVNHKPSNTKVDKRVEPKSCGTITQGLAVPTISSFFPPGYQVSFCLVMVLLFAVDTGLYFSVKTNIRSSTRDWKDHKFKWRKDPQDKRAKRSGSGVKQTLNFDLLKLAGDVESNPGPSRGGIHTMATYEVLCEVARKLGTDDREVVLFLLNVFIPQPTLAQLIGALRALKEEGRLTFPLLAECLFRAGRRDLLRDLLHLDPRFLERHLAGTMSYFSPYQLTVLHVDGELCARDIRSLIFLSKDTIGSRSTPQTFLHWVYCMENLDLLGPTDVDALMSMLRSLSRVDLQRQVQTLMGLHLSGPSHSQHYRHTP

SEQ ID NO: 4075 - protein, 925 aa, Artificial Sequence
  Synthetic Polypeptide
MALPVTALLLPLALLLHAARPDIQMTQSPSSLSASVGDRVTITCKASDHINNWLAWYQQKPGQAPKLLIYGATTLETGVPSRFSGSGSGTDYTLTISSLQPEDFATYYCQQSWNTPWTFGQGTKLEIKRLEGQPKANPTVTLFPPSSEELQANKATLVCLISDFYPGAVTVAWKADGSPVKAGVETTKPSKQSNNKYAASSYLSLTPEQWKSHRSYSCQVTHEGSTVEKTVAPTECSGSITQGLAVSTISSFFPPGYQVSFCLVMVLLFAVDTGLYFSVKTNIRSSTRDWKDHKFKWRKDPQDKRAKRSGSGATNFSLLKQAGDVEENPGPTSMDWIWRILFLVGAATGAHSFEQVQLQQPGAELVKPGASVKMSCKASGYAFSSYWINWMKQKPGQGLEWIGQIYPGDGDTNYNGKFKGRATLTADTSSSTAYMQLSSLTSEDSAVYFCARSITTVVGCAMDYWGQGTSVTVSSTRASTKGPSVFPLAPSSKSTSGGTAALGCLVKDYFPEPVTVSWNSGALTSGVHTFPAVLQSSGLYSLSSVVTVPSSSLGTQTYICNVNHKPSNTKVDKRVEPKSCGTITQGLAVPTISSFFPPGYQVSFCLVMVLLFAVDTGLYFSVKTNIRSSTRDWKDHKFKWRKDPQDKRAKRSGSGVKQTLNFDLLKLAGDVESNPGPSRGGIHTMSDSKEVPSLPFLRHLLEELDSHEDSLLLFLCHDAAPGCTTVTQALCSLSQQRKLTLAALVEMLYVLQRMDLLKSRFGLSKEGAEQLLGTSFLTRYRKLMVCVGEELDSSELRALRLFACNLNPSLSTALSESSRFVELVLALENVGLVSPSSVSVLADMLRTLRRLDLCQQLVEYEQQEQARYRYCYAASPSLPVRTLRRGHGASEHEQLCMPVQESSDSPELLRTPVQESSSDSPEQTT

SEQ ID NO: 4076 - protein, 880 aa, Artificial Sequence
  Synthetic Polypeptide
MALPVTALLLPLALLLHAARPDIQMTQSPSSLSASVGDRVTITCKASDHINNWLAWYQQKPGQAPKLLIYGATTLETGVPSRFSGSGSGTDYTLTISSLQPEDFATYYCQQSWNTPWTFGQGTKLEIKRLEGQPKANPTVTLFPPSSEELQANKATLVCLISDFYPGAVTVAWKADGSPVKAGVETTKPSKQSNNKYAASSYLSLTPEQWKSHRSYSCQVTHEGSTVEKTVAPTECSGSITQGLAVSTISSFFPPGYQVSFCLVMVLLFAVDTGLYFSVKTNIRSSTRDWKDHKFKWRKDPQDKRAKRSGSGATNFSLLKQAGDVEENPGPTSMDWIWRILFLVGAATGAHSFEQVQLQQPGAELVKPGASVKMSCKASGYAFSSYWINWMKQKPGQGLEWIGQIYPGDGDTNYNGKFKGRATLTADTSSSTAYMQLSSLTSEDSAVYFCARSITTVVGCAMDYWGQGTSVTVSSTRASTKGPSVFPLAPSSKSTSGGTAALGCLVKDYFPEPVTVSWNSGALTSGVHTFPAVLQSSGLYSLSSVVTVPSSSLGTQTYICNVNHKPSNTKVDKRVEPKSCGTITQGLAVPTISSFFPPGYQVSFCLVMVLLFAVDTGLYFSVKTNIRSSTRDWKDHKFKWRKDPQDKRAKRSGSGVKQTLNFDLLKLAGDVESNPGPSRGHMTEYKPTVRLATRDDVPRAVRTLAAAFADYPATRHTVDPDRHIERVTELQELFLTRVGLDIGKVWVADDGAAVAVWTTPESVEAGAVFAEIGPRMAELSGSRLAAQQQMEGLLAPHRPKEPAWFLATVGVSPDHQGKGLGSAVVLPGVEAAERAGVPAFLETSAPRNLPFYERLGFTVTADVEVPEGPRTWCMTRKPGA

SEQ ID NO: 4077 - protein, 1017 aa, Artificial Sequence
  Synthetic Polypeptide
MALPVTALLLPLALLLHAARPEVQLVESGGGLVQAGGSLRLSCAASGRTFSMGWFRQAPGKEREFVAAITYSGGSPYYADSVKGRFTISRDNAKNTVYLQMNSLKPEDTAVYYCAANPTYGSDWNAENWGQGTQVTVSSGTGGGGSGGGGSGGGGSEFDIQMTQSPSSLSASVGDRVTITCKASDHINNWLAWYQQKPGQAPKLLIYGATTLETGVPSRFSGSGSGTDYTLTISSLQPEDFATYYCQQSWNTPWTFGQGTKLEIKRLEGQPKANPTVTLFPPSSEELQANKATLVCLISDFYPGAVTVAWKADGSPVKAGVETTKPSKQSNNKYAASSYLSLTPEQWKSHRSYSCQVTHEGSTVEKTVAPTECSGSITQGLAVSTISSFFPPGYQVSFCLVMVLLFAVDTGLYFSVKTNIRSSTRDWKDHKFKWRKDPQDKRAKRSGSGATNFSLLKQAGDVEENPGPTSMDWIWRILFLVGAATGAHSFEQVQLQQPGAELVKPGASVKMSCKASGYAFSSYWINWMKQKPGQGLEWIGQIYPGDGDTNYNGKFKGRATLTADTSSSTAYMQLSSLTSEDSAVYFCARSITTVVGCAMDYWGQGTSVTVSSTRASTKGPSVFPLAPSSKSTSGGTAALGCLVKDYFPEPVTVSWNSGALTSGVHTFPAVLQSSGLYSLSSVVTVPSSSLGTQTYICNVNHKPSNTKVDKRVEPKSCGTITQGLAVPTISSFFPPGYQVSFCLVMVLLFAVDTGLYFSVKTNIRSSTRDWKDHKFKWRKDPQDKRAKRSGSGVKQTLNFDLLKLAGDVESNPGPSRGHMTEYKPTVRLATRDDVPRAVRTLAAAFADYPATRHTVDPDRHIERVTELQELFLTRVGLDIGKVWVADDGAAVAVWTTPESVEAGAVFAEIGPRMAELSGSRLAAQQQMEGLLAPHRPKEPAWFLATVGVSPDHQGKGLGSAVVLPGVEAAERAGVPAFLETSAPRNLPFYERLGFTVTADVEVPEGPRTWCMTRKPGA

SEQ ID NO: 4078 - protein, 1154 aa, Artificial Sequence
  Synthetic Polypeptide
MALPVTALLLPLALLLHAARPEVQLVESGGGLVQAGGSLRLSCAASGRTFSMGWFRQAPGKEREFVAAITYSGGSPYYADSVKGRFTISRDNAKNTVYLQMNSLKPEDTAVYYCAANPTYGSDWNAENWGQGTQVTVSSGTGGGGSGGGGSGGGGSEFDIQMTQSPSSLSASVGDRVTITCKASDHINNWLAWYQQKPGQAPKLLIYGATTLETGVPSRFSGSGSGTDYTLTISSLQPEDFATYYCQQSWNTPWTFGQGTKLEIKRLEGQPKANPTVTLFPPSSEELQANKATLVCLISDFYPGAVTVAWKADGSPVKAGVETTKPSKQSNNKYAASSYLSLTPEQWKSHRSYSCQVTHEGSTVEKTVAPTECSGSITQGLAVSTISSFFPPGYQVSFCLVMVLLFAVDTGLYFSVKTNIRSSTRDWKDHKFKWRKDPQDKRAKRSGSGATNFSLLKQAGDVEENPGPTSMDWIWRILFLVGAATGAHSGPEVQLVESGGGLVQAGGSLRLSCAASGRTFTMGWFRQAPGKEREFVAAISLSPTLAYYADSVKGRFTISRDNAKNTVVLQMNSLKPEDTALYYCAADRKSVMSIRPDYWGQGTQVTVSSGSGGGGSGGGGSGGGGSFEQVQLQQPGAELVKPGASVKMSCKASGYAFSSYWINWMKQKPGQGLEWIGQIYPGDGDTNYNGKFKGRATLTADTSSSTAYMQLSSLTSEDSAVYFCARSITTVVGCAMDYWGQGTSVTVSSTRASTKGPSVFPLAPSSKSTSGGTAALGCLVKDYFPEPVTVSWNSGALTSGVHTFPAVLQSSGLYSLSSVVTVPSSSLGTQTYICNVNHKPSNTKVDKRVEPKSCGTITQGLAVPTISSFFPPGYQVSFCLVMVLLFAVDTGLYFSVKTNIRSSTRDWKDHKFKWRKDPQDKRAKRSGSGVKQTLNFDLLKLAGDVESNPGPSRGHMTEYKPTVRLATRDDVPRAVRTLAAAFADYPATRHTVDPDRHIERVTELQELFLTRVGLDIGKVWVADDGAAVAVWTTPESVEAGAVFAEIGPRMAELSGSRLAAQQQMEGLLAPHRPKEPAWFLATVGVSPDHQGKGLGSAVVLPGVEAAERAGVPAFLETSAPRNLPFYERLGFTVTADVEVPEGPRTWCMTRKPGA

SEQ ID NO: 4079 - protein, 887 aa, Artificial Sequence
  Synthetic Polypeptide
MALPVTALLLPLALLLHAARPEVQLVESGGGLVQAGGSLRLSCAASGRTFSMGWFRQAPGKEREFVAAITYSGGSPYYADSVKGRFTISRDNAKNTVYLQMNSLKPEDTAVYYCAANPTYGSDWNAENWGQGTQVTVSSLEGQPKANPTVTLFPPSSEELQANKATLVCLISDFYPGAVTVAWKADGSPVKAGVETTKPSKQSNNKYAASSYLSLTPEQWKSHRSYSCQVTHEGSTVEKTVAPTECSGSITQGLAVSTISSFFPPGYQVSFCLVMVLLFAVDTGLYFSVKTNIRSSTRDWKDHKFKWRKDPQDKRAKRSGSGATNFSLLKQAGDVEENPGPTSMDWIWRILFLVGAATGAHSGPEVQLVESGGGLVQAGGSLRLSCAASGRTFTMGWFRQAPGKEREFVAAISLSPTLAYYADSVKGRFTISRDNAKNTVVLQMNSLKPEDTALYYCAADRKSVMSIRPDYWGQGTQVTVSSTRASTKGPSVFPLAPSSKSTSGGTAALGCLVKDYFPEPVTVSWNSGALTSGVHTFPAVLQSSGLYSLSSVVTVPSSSLGTQTYICNVNHKPSNTKVDKRVEPKSCGTITQGLAVPTISSFFPPGYQVSFCLVMVLLFAVDTGLYFSVKTNIRSSTRDWKDHKFKWRKDPQDKRAKRSGSGVKQTLNFDLLKLAGDVESNPGPSRGHMTEYKPTVRLATRDDVPRAVRTLAAAFADYPATRHTVDPDRHIERVTELQELFLTRVGLDIGKVWVADDGAAVAVWTTPESVEAGAVFAEIGPRMAELSGSRLAAQQQMEGLLAPHRPKEPAWFLATVGVSPDHQGKGLGSAVVLPGVEAAERAGVPAFLETSAPRNLPFYERLGFTVTADVEVPEGPRTWCMTRKPGA

SEQ ID NO: 4080 - protein, 895 aa, Artificial Sequence
  Synthetic Polypeptide
MALPVTALLLPLALLLHAARPDIQMTQSPSSLSASVGDRVTITCKASDHINNWLAWYQQKPGQAPKLLIYGATTLETGVPSRFSGSGSGTDYTLTISSLQPEDFATYYCQQSWNTPWTFGQGTKLEIKRLEDLKNVFPPEVAVFEPSEAEISHTQKATLVCLATGFYPDHVELSWWVNGKEVHSGVSTDPQPLKEQPALNDSRYCLSSRLRVSATFWQNPRNHFRCQVQFYGLSENDEWTQDRAKPVTQIVSAEAWGRADCGSITQGLAVSTISSFFPPGYQVSFCLVMVLLFAVDTGLYFSVKTNIRSSTRDWKDHKFKWRKDPQDKRAKRSGSGATNFSLLKQAGDVEENPGPTSMDWIWRILFLVGAATGAHSFEQVQLQQPGAELVKPGASVKMSCKASGYAFSSYWINWMKQKPGQGLEWIGQIYPGDGDTNYNGKFKGRATLTADTSSSTAYMQLSSLTSEDSAVYFCARSITTVVGCAMDYWGQGTSVTVSSTRIQNPDPAVYQLRDSKSSDKSVCLFTDFDSQTNVSQSKDSDVYITDKTVLDMRSMDFKSNSAVAWSNKSDFACANAFNNSIIPEDTFFPSPESSCGTITQGLAVPTISSFFPPGYQVSFCLVMVLLFAVDTGLYFSVKTNIRSSTRDWKDHKFKWRKDPQDKRAKRSGSGVKQTLNFDLLKLAGDVESNPGPSRGHMTEYKPTVRLATRDDVPRAVRTLAAAFADYPATRHTVDPDRHIERVTELQELFLTRVGLDIGKVWVADDGAAVAVWTTPESVEAGAVFAEIGPRMAELSGSRLAAQQQMEGLLAPHRPKEPAWFLATVGVSPDHQGKGLGSAVVLPGVEAAERAGVPAFLETSAPRNLPFYERLGFTVTADVEVPEGPRTWCMTRKPGA

SEQ ID NO: 4081 - protein, 1032 aa, Artificial Sequence
  Synthetic Polypeptide
MALPVTALLLPLALLLHAARPEVQLVESGGGLVQAGGSLRLSCAASGRTFSMGWFRQAPGKEREFVAAITYSGGSPYYADSVKGRFTISRDNAKNTVYLQMNSLKPEDTAVYYCAANPTYGSDWNAENWGQGTQVTVSSGTGGGGSGGGGSGGGGSEFDIQMTQSPSSLSASVGDRVTITCKASDHINNWLAWYQQKPGQAPKLLIYGATTLETGVPSRFSGSGSGTDYTLTISSLQPEDFATYYCQQSWNTPWTFGQGTKLEIKRLEDLKNVFPPEVAVFEPSEAEISHTQKATLVCLATGFYPDHVELSWWVNGKEVHSGVSTDPQPLKEQPALNDSRYCLSSRLRVSATFWQNPRNHFRCQVQFYGLSENDEWTQDRAKPVTQIVSAEAWGRADCGSITQGLAVSTISSFFPPGYQVSFCLVMVLLFAVDTGLYFSVKTNIRSSTRDWKDHKFKWRKDPQDKRAKRSGSGATNFSLLKQAGDVEENPGPTSMDWIWRILFLVGAATGAHSFEQVQLQQPGAELVKPGASVKMSCKASGYAFSSYWINWMKQKPGQGLEWIGQIYPGDGDTNYNGKFKGRATLTADTSSSTAYMQLSSLTSEDSAVYFCARSITTVVGCAMDYWGQGTSVTVSSTRIQNPDPAVYQLRDSKSSDKSVCLFTDFDSQTNVSQSKDSDVYITDKTVLDMRSMDFKSNSAVAWSNKSDFACANAFNNSIIPEDTFFPSPESSCGTITQGLAVPTISSFFPPGYQVSFCLVMVLLFAVDTGLYFSVKTNIRSSTRDWKDHKFKWRKDPQDKRAKRSGSGVKQTLNFDLLKLAGDVESNPGPSRGHMTEYKPTVRLATRDDVPRAVRTLAAAFADYPATRHTVDPDRHIERVTELQELFLTRVGLDIGKVWVADDGAAVAVWTTPESVEAGAVFAEIGPRMAELSGSRLAAQQQMEGLLAPHRPKEPAWFLATVGVSPDHQGKGLGSAVVLPGVEAAERAGVPAFLETSAPRNLPFYERLGFTVTADVEVPEGPRTWCMTRKPGA

SEQ ID NO: 4082 - protein, 1169 aa, Artificial Sequence
  Synthetic Polypeptide
MALPVTALLLPLALLLHAARPEVQLVESGGGLVQAGGSLRLSCAASGRTFSMGWFRQAPGKEREFVAAITYSGGSPYYADSVKGRFTISRDNAKNTVYLQMNSLKPEDTAVYYCAANPTYGSDWNAENWGQGTQVTVSSGTGGGGSGGGGSGGGGSEFDIQMTQSPSSLSASVGDRVTITCKASDHINNWLAWYQQKPGQAPKLLIYGATTLETGVPSRFSGSGSGTDYTLTISSLQPEDFATYYCQQSWNTPWTFGQGTKLEIKRLEDLKNVFPPEVAVFEPSEAEISHTQKATLVCLATGFYPDHVELSWWVNGKEVHSGVSTDPQPLKEQPALNDSRYCLSSRLRVSATFWQNPRNHFRCQVQFYGLSENDEWTQDRAKPVTQIVSAEAWGRADCGSITQGLAVSTISSFFPPGYQVSFCLVMVLLFAVDTGLYFSVKTNIRSSTRDWKDHKFKWRKDPQDKRAKRSGSGATNFSLLKQAGDVEENPGPTSMDWIWRILFLVGAATGAHSGPEVQLVESGGGLVQAGGSLRLSCAASGRTFTMGWFRQAPGKEREFVAAISLSPTLAYYADSVKGRFTISRDNAKNTVVLQMNSLKPEDTALYYCAADRKSVMSIRPDYWGQGTQVTVSSGSGGGGSGGGGSGGGGSFEQVQLQQPGAELVKPGASVKMSCKASGYAFSSYWINWMKQKPGQGLEWIGQIYPGDGDTNYNGKFKGRATLTADTSSSTAYMQLSSLTSEDSAVYFCARSITTVVGCAMDYWGQGTSVTVSSTRIQNPDPAVYQLRDSKSSDKSVCLFTDFDSQTNVSQSKDSDVYITDKTVLDMRSMDFKSNSAVAWSNKSDFACANAFNNSIIPEDTFFPSPESSCGTITQGLAVPTISSFFPPGYQVSFCLVMVLLFAVDTGLYFSVKTNIRSSTRDWKDHKFKWRKDPQDKRAKRSGSGVKQTLNFDLLKLAGDVESNPGPSRGHMTEYKPTVRLATRDDVPRAVRTLAAAFADYPATRHTVDPDRHIERVTELQELFLTRVGLDIGKVWVADDGAAVAVWTTPESVEAGAVFAEIGPRMAELSGSRLAAQQQMEGLLAPHRPKEPAWFLATVGVSPDHQGKGLGSAVVLPGVEAAERAGVPAFLETSAPRNLPFYERLGFTVTADVEVPEGPRTWCMTRKPGA

SEQ ID NO: 4083 - protein, 902 aa, Artificial Sequence
  Synthetic Polypeptide
MALPVTALLLPLALLLHAARPEVQLVESGGGLVQAGGSLRLSCAASGRTFSMGWFRQAPGKEREFVAAITYSGGSPYYADSVKGRFTISRDNAKNTVYLQMNSLKPEDTAVYYCAANPTYGSDWNAENWGQGTQVTVSSLEDLKNVFPPEVAVFEPSEAEISHTQKATLVCLATGFYPDHVELSWWVNGKEVHSGVSTDPQPLKEQPALNDSRYCLSSRLRVSATFWQNPRNHFRCQVQFYGLSENDEWTQDRAKPVTQIVSAEAWGRADCGSITQGLAVSTISSFFPPGYQVSFCLVMVLLFAVDTGLYFSVKTNIRSSTRDWKDHKFKWRKDPQDKRAKRSGSGATNFSLLKQAGDVEENPGPTSMDWIWRILFLVGAATGAHSGPEVQLVESGGGLVQAGGSLRLSCAASGRTFTMGWFRQAPGKEREFVAAISLSPTLAYYADSVKGRFTISRDNAKNTVVLQMNSLKPEDTALYYCAADRKSVMSIRPDYWGQGTQVTVSSTRIQNPDPAVYQLRDSKSSDKSVCLFTDFDSQTNVSQSKDSDVYITDKTVLDMRSMDFKSNSAVAWSNKSDFACANAFNNSIIPEDTFFPSPESSCGTITQGLAVPTISSFFPPGYQVSFCLVMVLLFAVDTGLYFSVKTNIRSSTRDWKDHKFKWRKDPQDKRAKRSGSGVKQTLNFDLLKLAGDVESNPGPSRGHMTEYKPTVRLATRDDVPRAVRTLAAAFADYPATRHTVDPDRHIERVTELQELFLTRVGLDIGKVWVADDGAAVAVWTTPESVEAGAVFAEIGPRMAELSGSRLAAQQQMEGLLAPHRPKEPAWFLATVGVSPDHQGKGLGSAVVLPGVEAAERAGVPAFLETSAPRNLPFYERLGFTVTADVEVPEGPRTWCMTRKPGA

SEQ ID NO: 4084 - protein, 460 aa, Artificial Sequence
  Synthetic Polypeptide
MALPVTALLLPLALLLHAARPACEVQLLESGGGLIQPGGSLRLSCAASGFTFSSHAMTWVRQAPGKGLEWVSAISGSGDYTHYADSVKGRFTISRDNSKNTVYLQMNSLRAEDSAVYYCAKDEDGGSLLGHRGQGTLVTVSSGTGGGGSGGGGSGGGGSEFGSLEITQGLAVSTISSFFPPGYQVSFCLVMVLLFAVDTGLYFSVKTNIRSSTRDWKDHKFKWRKDPQDKRAKRSGSGATNFSLLKQAGDVEENPGPTRGHMTEYKPTVRLATRDDVPRAVRTLAAAFADYPATRHTVDPDRHIERVTELQELFLTRVGLDIGKVWVADDGAAVAVWTTPESVEAGAVFAEIGPRMAELSGSRLAAQQQMEGLLAPHRPKEPAWFLATVGVSPDHQGKGLGSAVVLPGVEAAERAGVPAFLETSAPRNLPFYERLGFTVTADVEVPEGPRTWCMTRKPGA

SEQ ID NO: 4085 - protein, 761 aa, Artificial Sequence
  Synthetic Polypeptide
MALPVTALLLPLALLLHAARPDIQMTQSPSSLSASVGDRVTITCKASDHINNWLAWYQQKPGQAPKLLIYGATTLETGVPSRFSGSGSGTDYTLTISSLQPEDFATYYCQQSWNTPWTFGQGTKLEIKRLEIGWLLLQAPRWVFKEEDPIHLRCHSWKNTALHKVTYLQNGKGRKYFHHNSDFYIPKATLKDSGSYFCRGLVGSKNVSSETVNITITQGLAVSTISSFFPPGYQVSFCLVMVLLFAVDTGLYFSVKTNIRSSTRDWKDHKFKWRKDPQDKRAKRSGSGATNFSLLKQAGDVEENPGPTSMDWIWRILFLVGAATGAHSFEQVQLQQPGAELVKPGASVKMSCKASGYAFSSYWINWMKQKPGQGLEWIGQIYPGDGDTNYNGKFKGRATLTADTSSSTAYMQLSSLTSEDSAVYFCARSITTVVGCAMDYWGQGTSVTVSSTRVEKEHPQLGAGTVLLLRAGFYAVSFLSVAVGSTVYYQGKCLTWKGPRRQLPAVVPAPLPPPCGSSAHLLPPVPGGRAKRSGSGVKQTLNFDLLKLAGDVESNPGPSRGHMTEYKPTVRLATRDDVPRAVRTLAAAFADYPATRHTVDPDRHIERVTELQELFLTRVGLDIGKVWVADDGAAVAVWTTPESVEAGAVFAEIGPRMAELSGSRLAAQQQMEGLLAPHRPKEPAWFLATVGVSPDHQGKGLGSAVVLPGVEAAERAGVPAFLETSAPRNLPFYERLGFTVTADVEVPEGPRTWCMTRKPGA

SEQ ID NO: 4086 - protein, 815 aa, Artificial Sequence
  Synthetic Polypeptide
MALPVTALLLPLALLLHAARPACEVQLLESGGGLIQPGGSLRLSCAASGFTFSSHAMTWVRQAPGKGLEWVSAISGSGDYTHYADSVKGRFTISRDNSKNTVYLQMNSLRAEDSAVYYCAKDEDGGSLLGHRGQGTLVTVSSGTGGGGSGGGGSGGGGSEFGSLEIGWLLLQAPRWVFKEEDPIHLRCHSWKNTALHKVTYLQNGKGRKYFHHNSDFYIPKATLKDSGSYFCRGLVGSKNVSSETVNITITQGLAVSTISSFFPPGYQVSFCLVMVLLFAVDTGLYFSVKTNIRSSTRDWKDHKFKWRKDPQDKRAKRSGSGATNFSLLKQAGDVEENPGPTSATMDWIWRILFLVGAATGAHSGPEVQLVESGGGLVQAGGSLRLSCAASGRTFSMGWFRQAPGKEREFVAAITYSGGSPYYADSVKGRFTISRDNAKNTVYLQMNSLKPEDTAVYYCAANPTYGSDWNAENWGQGTQVTVSSGSGGGGSGGGGSGGGGSFEGSTRVEKEHPQLGAGTVLLLRAGFYAVSFLSVAVGSTVYYQGKCLTWKGPRRQLPAVVPAPLPPPCGSSAHLLPPVPGGRAKRSGSGVKQTLNFDLLKLAGDVESNPGPSRGHMTEYKPTVRLATRDDVPRAVRTLAAAFADYPATRHTVDPDRHIERVTELQELFLTRVGLDIGKVWVADDGAAVAVWTTPESVEAGAVFAEIGPRMAELSGSRLAAQQQMEGLLAPHRPKEPAWFLATVGVSPDHQGKGLGSAVVLPGVEAAERAGVPAFLETSAPRNLPFYERLGFTVTADVEVPEGPRTWCMTRKPGA

SEQ ID NO: 4087 - protein, 966 aa, Artificial Sequence
  Synthetic Polypeptide
MALPVTALLLPLALLLHAARPDIQMTQSPSSLSASVGDRVTITCKASDHINNWLAWYQQKPGQAPKLLIYGATTLETGVPSRFSGSGSGTDYTLTISSLQPEDFATYYCQQSWNTPWTFGQGTKLEIKRLEGQPKANPTVTLFPPSSEELQANKATLVCLISDFYPGAVTVAWKADGSPVKAGVETTKPSKQSNNKYAASSYLSLTPEQWKSHRSYSCQVTHEGSTVEKTVAPTECSGSIGWLLLQAPRWVFKEEDPIHLRCHSWKNTALHKVTYLQNGKGRKYFHHNSDFYIPKATLKDSGSYFCRGLVGSKNVSSETVNITITQGLAVSTISSFFPPGYQVSFCLVMVLLFAVDTGLYFSVKTNIRSSTRDWKDHKFKWRKDPQDKRAKRSGSGATNFSLLKQAGDVEENPGPTSMDWIWRILFLVGAATGAHSFEQVQLQQPGAELVKPGASVKMSCKASGYAFSSYWINWMKQKPGQGLEWIGQIYPGDGDTNYNGKFKGRATLTADTSSSTAYMQLSSLTSEDSAVYFCARSITTVVGCAMDYWGQGTSVTVSSTRASTKGPSVFPLAPSSKSTSGGTAALGCLVKDYFPEPVTVSWNSGALTSGVHTFPAVLQSSGLYSLSSVVTVPSSSLGTQTYICNVNHKPSNTKVDKRVEPKSCGTVEKEHPQLGAGTVLLLRAGFYAVSFLSVAVGSTVYYQGKCLTWKGPRRQLPAVVPAPLPPPCGSSAHLLPPVPGGRAKRSGSGVKQTLNFDLLKLAGDVESNPGPSRGGIHTMATYEVLCEVARKLGTDDREVVLFLLNVFIPQPTLAQLIGALRALKEEGRLTFPLLAECLFRAGRRDLLRDLLHLDPRFLERHLAGTMSYFSPYQLTVLHVDGELCARDIRSLIFLSKDTIGSRSTPQTFLHWVYCMENLDLLGPTDVDALMSMLRSLSRVDLQRQVQTLMGLHLSGPSHSQHYRHTP

SEQ ID NO: 4088 - protein, 1019 aa, Artificial Sequence
  Synthetic Polypeptide
MALPVTALLLPLALLLHAARPDIQMTQSPSSLSASVGDRVTITCKASDHINNWLAWYQQKPGQAPKLLIYGATTLETGVPSRFSGSGSGTDYTLTISSLQPEDFATYYCQQSWNTPWTFGQGTKLEIKRLEGQPKANPTVTLFPPSSEELQANKATLVCLISDFYPGAVTVAWKADGSPVKAGVETTKPSKQSNNKYAASSYLSLTPEQWKSHRSYSCQVTHEGSTVEKTVAPTECSGSIGWLLLQAPRWVFKEEDPIHLRCHSWKNTALHKVTYLQNGKGRKYFHHNSDFYIPKATLKDSGSYFCRGLVGSKNVSSETVNITITQGLAVSTISSFFPPGYQVSFCLVMVLLFAVDTGLYFSVKTNIRSSTRDWKDHKFKWRKDPQDKRAKRSGSGATNFSLLKQAGDVEENPGPTSMDWIWRILFLVGAATGAHSFEQVQLQQPGAELVKPGASVKMSCKASGYAFSSYWINWMKQKPGQGLEWIGQIYPGDGDTNYNGKFKGRATLTADTSSSTAYMQLSSLTSEDSAVYFCARSITTVVGCAMDYWGQGTSVTVSSTRASTKGPSVFPLAPSSKSTSGGTAALGCLVKDYFPEPVTVSWNSGALTSGVHTFPAVLQSSGLYSLSSVVTVPSSSLGTQTYICNVNHKPSNTKVDKRVEPKSCGTVEKEHPQLGAGTVLLLRAGFYAVSFLSVAVGSTVYYQGKCLTWKGPRRQLPAVVPAPLPPPCGSSAHLLPPVPGGRAKRSGSGVKQTLNFDLLKLAGDVESNPGPSRGGIHTMSDSKEVPSLPFLRHLLEELDSHEDSLLLFLCHDAAPGCTTVTQALCSLSQQRKLTLAALVEMLYVLQRMDLLKSRFGLSKEGAEQLLGTSFLTRYRKLMVCVGEELDSSELRALRLFACNLNPSLSTALSESSRFVELVLALENVGLVSPSSVSVLADMLRTLRRLDLCQQLVEYEQQEQARYRYCYAASPSLPVRTLRRGHGASEHEQLCMPVQESSDSPELLRTPVQESSSDSPEQTT

SEQ ID NO: 4089 - protein, 974 aa, Artificial Sequence
  Synthetic Polypeptide
MALPVTALLLPLALLLHAARPDIQMTQSPSSLSASVGDRVTITCKASDHINNWLAWYQQKPGQAPKLLIYGATTLETGVPSRFSGSGSGTDYTLTISSLQPEDFATYYCQQSWNTPWTFGQGTKLEIKRLEGQPKANPTVTLFPPSSEELQANKATLVCLISDFYPGAVTVAWKADGSPVKAGVETTKPSKQSNNKYAASSYLSLTPEQWKSHRSYSCQVTHEGSTVEKTVAPTECSGSIGWLLLQAPRWVFKEEDPIHLRCHSWKNTALHKVTYLQNGKGRKYFHHNSDFYIPKATLKDSGSYFCRGLVGSKNVSSETVNITITQGLAVSTISSFFPPGYQVSFCLVMVLLFAVDTGLYFSVKTNIRSSTRDWKDHKFKWRKDPQDKRAKRSGSGATNFSLLKQAGDVEENPGPTSMDWIWRILFLVGAATGAHSFEQVQLQQPGAELVKPGASVKMSCKASGYAFSSYWINWMKQKPGQGLEWIGQIYPGDGDTNYNGKFKGRATLTADTSSSTAYMQLSSLTSEDSAVYFCARSITTVVGCAMDYWGQGTSVTVSSTRASTKGPSVFPLAPSSKSTSGGTAALGCLVKDYFPEPVTVSWNSGALTSGVHTFPAVLQSSGLYSLSSVVTVPSSSLGTQTYICNVNHKPSNTKVDKRVEPKSCGTVEKEHPQLGAGTVLLLRAGFYAVSFLSVAVGSTVYYQGKCLTWKGPRRQLPAVVPAPLPPPCGSSAHLLPPVPGGRAKRSGSGVKQTLNFDLLKLAGDVESNPGPSRGHMTEYKPTVRLATRDDVPRAVRTLAAAFADYPATRHTVDPDRHIERVTELQELFLTRVGLDIGKVWVADDGAAVAVWTTPESVEAGAVFAEIGPRMAELSGSRLAAQQQMEGLLAPHRPKEPAWFLATVGVSPDHQGKGLGSAVVLPGVEAAERAGVPAFLETSAPRNLPFYERLGFTVTADVEVPEGPRTWCMTRKPGA

SEQ ID NO: 4090 - protein, 1111 aa, Artificial Sequence
  Synthetic Polypeptide
MALPVTALLLPLALLLHAARPEVQLVESGGGLVQAGGSLRLSCAASGRTFSMGWFRQAPGKEREFVAAITYSGGSPYYADSVKGRFTISRDNAKNTVYLQMNSLKPEDTAVYYCAANPTYGSDWNAENWGQGTQVTVSSGTGGGGSGGGGSGGGGSEFDIQMTQSPSSLSASVGDRVTITCKASDHINNWLAWYQQKPGQAPKLLIYGATTLETGVPSRFSGSGSGTDYTLTISSLQPEDFATYYCQQSWNTPWTFGQGTKLEIKRLEGQPKANPTVTLFPPSSEELQANKATLVCLISDFYPGAVTVAWKADGSPVKAGVETTKPSKQSNNKYAASSYLSLTPEQWKSHRSYSCQVTHEGSTVEKTVAPTECSGSIGWLLLQAPRWVFKEEDPIHLRCHSWKNTALHKVTYLQNGKGRKYFHHNSDFYIPKATLKDSGSYFCRGLVGSKNVSSETVNITITQGLAVSTISSFFPPGYQVSFCLVMVLLFAVDTGLYFSVKTNIRSSTRDWKDHKFKWRKDPQDKRAKRSGSGATNFSLLKQAGDVEENPGPTSMDWIWRILFLVGAATGAHSFEQVQLQQPGAELVKPGASVKMSCKASGYAFSSYWINWMKQKPGQGLEWIGQIYPGDGDTNYNGKFKGRATLTADTSSSTAYMQLSSLTSEDSAVYFCARSITTVVGCAMDYWGQGTSVTVSSTRASTKGPSVFPLAPSSKSTSGGTAALGCLVKDYFPEPVTVSWNSGALTSGVHTFPAVLQSSGLYSLSSVVTVPSSSLGTQTYICNVNHKPSNTKVDKRVEPKSCGTVEKEHPQLGAGTVLLLRAGFYAVSFLSVAVGSTVYYQGKCLTWKGPRRQLPAVVPAPLPPPCGSSAHLLPPVPGGRAKRSGSGVKQTLNFDLLKLAGDVESNPGPSRGHMTEYKPTVRLATRDDVPRAVRTLAAAFADYPATRHTVDPDRHIERVTELQELFLTRVGLDIGKVWVADDGAAVAVWTTPESVEAGAVFAEIGPRMAELSGSRLAAQQQMEGLLAPHRPKEPAWFLATVGVSPDHQGKGLGSAVVLPGVEAAERAGVPAFLETSAPRNLPFYERLGFTVTADVEVPEGPRTWCMTRKPGA

SEQ ID NO: 4091 - protein, 1248 aa, Artificial Sequence
  Synthetic Polypeptide
MALPVTALLLPLALLLHAARPEVQLVESGGGLVQAGGSLRLSCAASGRTFSMGWFRQAPGKEREFVAAITYSGGSPYYADSVKGRFTISRDNAKNTVYLQMNSLKPEDTAVYYCAANPTYGSDWNAENWGQGTQVTVSSGTGGGGSGGGGSGGGGSEFDIQMTQSPSSLSASVGDRVTITCKASDHINNWLAWYQQKPGQAPKLLIYGATTLETGVPSRFSGSGSGTDYTLTISSLQPEDFATYYCQQSWNTPWTFGQGTKLEIKRLEGQPKANPTVTLFPPSSEELQANKATLVCLISDFYPGAVTVAWKADGSPVKAGVETTKPSKQSNNKYAASSYLSLTPEQWKSHRSYSCQVTHEGSTVEKTVAPTECSGSIGWLLLQAPRWVFKEEDPIHLRCHSWKNTALHKVTYLQNGKGRKYFHHNSDFYIPKATLKDSGSYFCRGLVGSKNVSSETVNITITQGLAVSTISSFFPPGYQVSFCLVMVLLFAVDTGLYFSVKTNIRSSTRDWKDHKFKWRKDPQDKRAKRSGSGATNFSLLKQAGDVEENPGPTSMDWIWRILFLVGAATGAHSGPEVQLVESGGGLVQAGGSLRLSCAASGRTFTMGWFRQAPGKEREFVAAISLSPTLAYYADSVKGRFTISRDNAKNTVVLQMNSLKPEDTALYYCAADRKSVMSIRPDYWGQGTQVTVSSGSGGGGSGGGGSGGGGSFEQVQLQQPGAELVKPGASVKMSCKASGYAFSSYWINWMKQKPGQGLEWIGQIYPGDGDTNYNGKFKGRATLTADTSSSTAYMQLSSLTSEDSAVYFCARSITTVVGCAMDYWGQGTSVTVSSTRASTKGPSVFPLAPSSKSTSGGTAALGCLVKDYFPEPVTVSWNSGALTSGVHTFPAVLQSSGLYSLSSVVTVPSSSLGTQTYICNVNHKPSNTKVDKRVEPKSCGTVEKEHPQLGAGTVLLLRAGFYAVSFLSVAVGSTVYYQGKCLTWKGPRRQLPAVVPAPLPPPCGSSAHLLPPVPGGRAKRSGSGVKQTLNFDLLKLAGDVESNPGPSRGHMTEYKPTVRLATRDDVPRAVRTLAAAFADYPATRHTVDPDRHIERVTELQELFLTRVGLDIGKVWVADDGAAVAVWTTPESVEAGAVFAEIGPRMAELSGSRLAAQQQMEGLLAPHRPKEPAWFLATVGVSPDHQGKGLGSAVVLPGVEAAERAGVPAFLETSAPRNLPFYERLGFTVTADVEVPEGPRTWCMTRKPGA

SEQ ID NO: 4092 - protein, 981 aa, Artificial Sequence
  Synthetic Polypeptide
MALPVTALLLPLALLLHAARPEVQLVESGGGLVQAGGSLRLSCAASGRTFSMGWFRQAPGKEREFVAAITYSGGSPYYADSVKGRFTISRDNAKNTVYLQMNSLKPEDTAVYYCAANPTYGSDWNAENWGQGTQVTVSSLEGQPKANPTVTLFPPSSEELQANKATLVCLISDFYPGAVTVAWKADGSPVKAGVETTKPSKQSNNKYAASSYLSLTPEQWKSHRSYSCQVTHEGSTVEKTVAPTECSGSIGWLLLQAPRWVFKEEDPIHLRCHSWKNTALHKVTYLQNGKGRKYFHHNSDFYIPKATLKDSGSYFCRGLVGSKNVSSETVNITITQGLAVSTISSFFPPGYQVSFCLVMVLLFAVDTGLYFSVKTNIRSSTRDWKDHKFKWRKDPQDKRAKRSGSGATNFSLLKQAGDVEENPGPTSMDWIWRILFLVGAATGAHSGPEVQLVESGGGLVQAGGSLRLSCAASGRTFTMGWFRQAPGKEREFVAAISLSPTLAYYADSVKGRFTISRDNAKNTVVLQMNSLKPEDTALYYCAADRKSVMSIRPDYWGQGTQVTVSSTRASTKGPSVFPLAPSSKSTSGGTAALGCLVKDYFPEPVTVSWNSGALTSGVHTFPAVLQSSGLYSLSSVVTVPSSSLGTQTYICNVNHKPSNTKVDKRVEPKSCGTVEKEHPQLGAGTVLLLRAGFYAVSFLSVAVGSTVYYQGKCLTWKGPRRQLPAVVPAPLPPPCGSSAHLLPPVPGGRAKRSGSGVKQTLNFDLLKLAGDVESNPGPSRGHMTEYKPTVRLATRDDVPRAVRTLAAAFADYPATRHTVDPDRHIERVTELQELFLTRVGLDIGKVWVADDGAAVAVWTTPESVEAGAVFAEIGPRMAELSGSRLAAQQQMEGLLAPHRPKEPAWFLATVGVSPDHQGKGLGSAVVLPGVEAAERAGVPAFLETSAPRNLPFYERLGFTVTADVEVPEGPRTWCMTRKPGA

SEQ ID NO: 4093 - protein, 989 aa, Artificial Sequence
  Synthetic Polypeptide
MALPVTALLLPLALLLHAARPDIQMTQSPSSLSASVGDRVTITCKASDHINNWLAWYQQKPGQAPKLLIYGATTLETGVPSRFSGSGSGTDYTLTISSLQPEDFATYYCQQSWNTPWTFGQGTKLEIKRLEDLKNVFPPEVAVFEPSEAEISHTQKATLVCLATGFYPDHVELSWWVNGKEVHSGVSTDPQPLKEQPALNDSRYCLSSRLRVSATFWQNPRNHFRCQVQFYGLSENDEWTQDRAKPVTQIVSAEAWGRADCGSIGWLLLQAPRWVFKEEDPIHLRCHSWKNTALHKVTYLQNGKGRKYFHHNSDFYIPKATLKDSGSYFCRGLVGSKNVSSETVNITITQGLAVSTISSFFPPGYQVSFCLVMVLLFAVDTGLYFSVKTNIRSSTRDWKDHKFKWRKDPQDKRAKRSGSGATNFSLLKQAGDVEENPGPTSMDWIWRILFLVGAATGAHSFEQVQLQQPGAELVKPGASVKMSCKASGYAFSSYWINWMKQKPGQGLEWIGQIYPGDGDTNYNGKFKGRATLTADTSSSTAYMQLSSLTSEDSAVYFCARSITTVVGCAMDYWGQGTSVTVSSTRIQNPDPAVYQLRDSKSSDKSVCLFTDFDSQTNVSQSKDSDVYITDKTVLDMRSMDFKSNSAVAWSNKSDFACANAFNNSIIPEDTFFPSPESSCGTVEKEHPQLGAGTVLLLRAGFYAVSFLSVAVGSTVYYQGKCLTWKGPRRQLPAVVPAPLPPPCGSSAHLLPPVPGGRAKRSGSGVKQTLNFDLLKLAGDVESNPGPSRGHMTEYKPTVRLATRDDVPRAVRTLAAAFADYPATRHTVDPDRHIERVTELQELFLTRVGLDIGKVWVADDGAAVAVWTTPESVEAGAVFAEIGPRMAELSGSRLAAQQQMEGLLAPHRPKEPAWFLATVGVSPDHQGKGLGSAVVLPGVEAAERAGVPAFLETSAPRNLPFYERLGFTVTADVEVPEGPRTWCMTRKPGA

SEQ ID NO: 4094 - protein, 1126 aa, Artificial Sequence
  Synthetic Polypeptide
MALPVTALLLPLALLLHAARPEVQLVESGGGLVQAGGSLRLSCAASGRTFSMGWFRQAPGKEREFVAAITYSGGSPYYADSVKGRFTISRDNAKNTVYLQMNSLKPEDTAVYYCAANPTYGSDWNAENWGQGTQVTVSSGTGGGGSGGGGSGGGGSEFDIQMTQSPSSLSASVGDRVTITCKASDHINNWLAWYQQKPGQAPKLLIYGATTLETGVPSRFSGSGSGTDYTLTISSLQPEDFATYYCQQSWNTPWTFGQGTKLEIKRLEDLKNVFPPEVAVFEPSEAEISHTQKATLVCLATGFYPDHVELSWWVNGKEVHSGVSTDPQPLKEQPALNDSRYCLSSRLRVSATFWQNPRNHFRCQVQFYGLSENDEWTQDRAKPVTQIVSAEAWGRADCGSIGWLLLQAPRWVFKEEDPIHLRCHSWKNTALHKVTYLQNGKGRKYFHHNSDFYIPKATLKDSGSYFCRGLVGSKNVSSETVNITITQGLAVSTISSFFPPGYQVSFCLVMVLLFAVDTGLYFSVKTNIRSSTRDWKDHKFKWRKDPQDKRAKRSGSGATNFSLLKQAGDVEENPGPTSMDWIWRILFLVGAATGAHSFEQVQLQQPGAELVKPGASVKMSCKASGYAFSSYWINWMKQKPGQGLEWIGQIYPGDGDTNYNGKFKGRATLTADTSSSTAYMQLSSLTSEDSAVYFCARSITTVVGCAMDYWGQGTSVTVSSTRIQNPDPAVYQLRDSKSSDKSVCLFTDFDSQTNVSQSKDSDVYITDKTVLDMRSMDFKSNSAVAWSNKSDFACANAFNNSIIPEDTFFPSPESSCGTVEKEHPQLGAGTVLLLRAGFYAVSFLSVAVGSTVYYQGKCLTWKGPRRQLPAVVPAPLPPPCGSSAHLLPPVPGGRAKRSGSGVKQTLNFDLLKLAGDVESNPGPSRGHMTEYKPTVRLATRDDVPRAVRTLAAAFADYPATRHTVDPDRHIERVTELQELFLTRVGLDIGKVWVADDGAAVAVWTTPESVEAGAVFAEIGPRMAELSGSRLAAQQQMEGLLAPHRPKEPAWFLATVGVSPDHQGKGLGSAVVLPGVEAAERAGVPAFLETSAPRNLPFYERLGFTVTADVEVPEGPRTWCMTRKPGA

SEQ ID NO: 4095 - protein, 1263 aa, Artificial Sequence
  Synthetic Polypeptide
MALPVTALLLPLALLLHAARPEVQLVESGGGLVQAGGSLRLSCAASGRTFSMGWFRQAPGKEREFVAAITYSGGSPYYADSVKGRFTISRDNAKNTVYLQMNSLKPEDTAVYYCAANPTYGSDWNAENWGQGTQVTVSSGTGGGGSGGGGSGGGGSEFDIQMTQSPSSLSASVGDRVTITCKASDHINNWLAWYQQKPGQAPKLLIYGATTLETGVPSRFSGSGSGTDYTLTISSLQPEDFATYYCQQSWNTPWTFGQGTKLEIKRLEDLKNVFPPEVAVFEPSEAEISHTQKATLVCLATGFYPDHVELSWWVNGKEVHSGVSTDPQPLKEQPALNDSRYCLSSRLRVSATFWQNPRNHFRCQVQFYGLSENDEWTQDRAKPVTQIVSAEAWGRADCGSIGWLLLQAPRWVFKEEDPIHLRCHSWKNTALHKVTYLQNGKGRKYFHHNSDFYIPKATLKDSGSYFCRGLVGSKNVSSETVNITITQGLAVSTISSFFPPGYQVSFCLVMVLLFAVDTGLYFSVKTNIRSSTRDWKDHKFKWRKDPQDKRAKRSGSGATNFSLLKQAGDVEENPGPTSMDWIWRILFLVGAATGAHSGPEVQLVESGGGLVQAGGSLRLSCAASGRTFTMGWFRQAPGKEREFVAAISLSPTLAYYADSVKGRFTISRDNAKNTVVLQMNSLKPEDTALYYCAADRKSVMSIRPDYWGQGTQVTVSSGSGGGGSGGGGSGGGGSFEQVQLQQPGAELVKPGASVKMSCKASGYAFSSYWINWMKQKPGQGLEWIGQIYPGDGDTNYNGKFKGRATLTADTSSSTAYMQLSSLTSEDSAVYFCARSITTVVGCAMDYWGQGTSVTVSSTRIQNPDPAVYQLRDSKSSDKSVCLFTDFDSQTNVSQSKDSDVYITDKTVLDMRSMDFKSNSAVAWSNKSDFACANAFNNSIIPEDTFFPSPESSCGTVEKEHPQLGAGTVLLLRAGFYAVSFLSVAVGSTVYYQGKCLTWKGPRRQLPAVVPAPLPPPCGSSAHLLPPVPGGRAKRSGSGVKQTLNFDLLKLAGDVESNPGPSRGHMTEYKPTVRLATRDDVPRAVRTLAAAFADYPATRHTVDPDRHIERVTELQELFLTRVGLDIGKVWVADDGAAVAVWTTPESVEAGAVFAEIGPRMAELSGSRLAAQQQMEGLLAPHRPKEPAWFLATVGVSPDHQGKGLGSAVVLPGVEAAERAGVPAFLETSAPRNLPFYERLGFTVTADVEVPEGPRTWCMTRKPGA

SEQ ID NO: 4096 - protein, 996 aa, Artificial Sequence
  Synthetic Polypeptide
MALPVTALLLPLALLLHAARPEVQLVESGGGLVQAGGSLRLSCAASGRTFSMGWFRQAPGKEREFVAAITYSGGSPYYADSVKGRFTISRDNAKNTVYLQMNSLKPEDTAVYYCAANPTYGSDWNAENWGQGTQVTVSSLEDLKNVFPPEVAVFEPSEAEISHTQKATLVCLATGFYPDHVELSWWVNGKEVHSGVSTDPQPLKEQPALNDSRYCLSSRLRVSATFWQNPRNHFRCQVQFYGLSENDEWTQDRAKPVTQIVSAEAWGRADCGSIGWLLLQAPRWVFKEEDPIHLRCHSWKNTALHKVTYLQNGKGRKYFHHNSDFYIPKATLKDSGSYFCRGLVGSKNVSSETVNITITQGLAVSTISSFFPPGYQVSFCLVMVLLFAVDTGLYFSVKTNIRSSTRDWKDHKFKWRKDPQDKRAKRSGSGATNFSLLKQAGDVEENPGPTSMDWIWRILFLVGAATGAHSGPEVQLVESGGGLVQAGGSLRLSCAASGRTFTMGWFRQAPGKEREFVAAISLSPTLAYYADSVKGRFTISRDNAKNTVVLQMNSLKPEDTALYYCAADRKSVMSIRPDYWGQGTQVTVSSTRIQNPDPAVYQLRDSKSSDKSVCLFTDFDSQTNVSQSKDSDVYITDKTVLDMRSMDFKSNSAVAWSNKSDFACANAFNNSIIPEDTFFPSPESSCGTVEKEHPQLGAGTVLLLRAGFYAVSFLSVAVGSTVYYQGKCLTWKGPRRQLPAVVPAPLPPPCGSSAHLLPPVPGGRAKRSGSGVKQTLNFDLLKLAGDVESNPGPSRGHMTEYKPTVRLATRDDVPRAVRTLAAAFADYPATRHTVDPDRHIERVTELQELFLTRVGLDIGKVWVADDGAAVAVWTTPESVEAGAVFAEIGPRMAELSGSRLAAQQQMEGLLAPHRPKEPAWFLATVGVSPDHQGKGLGSAVVLPGVEAAERAGVPAFLETSAPRNLPFYERLGFTVTADVEVPEGPRTWCMTRKPGA

SEQ ID NO: 4097 - protein, 544 aa, Artificial Sequence; identical to SEQ ID NO: 4058
  Synthetic Polypeptide

SEQ ID NO: 4098 - protein, 688 aa, Artificial Sequence
  Synthetic Polypeptide
MALPVTALLLPLALLLHAARPDIQMTQSPSSLSASVGDRVTITCKASDHINNWLAWYQQKPGQAPKLLIYGATTLETGVPSRFSGSGSGTDYTLTISSLQPEDFATYYCQQSWNTPWTFGQGTKLEIKRLEVVEKEHPQLGAGTVLLLRAGFYAVSFLSVAVGSTVYYQGKCLTWKGPRRQLPAVVPAPLPPPCGSSAHLLPPVPGGRAKRSGSGATNFSLLKQAGDVEENPGPTSMDWIWRILFLVGAATGAHSFEQVQLQQPGAELVKPGASVKMSCKASGYAFSSYWINWMKQKPGQGLEWIGQIYPGDGDTNYNGKFKGRATLTADTSSSTAYMQLSSLTSEDSAVYFCARSITTVVGCAMDYWGQGTSVTVSSTRVEKEHPQLGAGTVLLLRAGFYAVSFLSVAVGSTVYYQGKCLTWKGPRRQLPAVVPAPLPPPCGSSAHLLPPVPGGRAKRSGSGVKQTLNFDLLKLAGDVESNPGPSRGHMTEYKPTVRLATRDDVPRAVRTLAAAFADYPATRHTVDPDRHIERVTELQELFLTRVGLDIGKVWVADDGAAVAVWTTPESVEAGAVFAEIGPRMAELSGSRLAAQQQMEGLLAPHRPKEPAWFLATVGVSPDHQGKGLGSAVVLPGVEAAERAGVPAFLETSAPRNLPFYERLGFTVTADVEVPEGPRTWCMTRKPGA

SEQ ID NO: 4099 - protein, 742 aa, Artificial Sequence
  Synthetic Polypeptide
MALPVTALLLPLALLLHAARPACEVQLLESGGGLIQPGGSLRLSCAASGFTFSSHAMTWVRQAPGKGLEWVSAISGSGDYTHYADSVKGRFTISRDNSKNTVYLQMNSLRAEDSAVYYCAKDEDGGSLLGHRGQGTLVTVSSGTGGGGSGGGGSGGGGSEFGSLEVVEKEHPQLGAGTVLLLRAGFYAVSFLSVAVGSTVYYQGKCLTWKGPRRQLPAVVPAPLPPPCGSSAHLLPPVPGGRAKRSGSGATNFSLLKQAGDVEENPGPTSATMDWIWRILFLVGAATGAHSGPEVQLVESGGGLVQAGGSLRLSCAASGRTFSMGWFRQAPGKEREFVAAITYSGGSPYYADSVKGRFTISRDNAKNTVYLQMNSLKPEDTAVYYCAANPTYGSDWNAENWGQGTQVTVSSGSGGGGSGGGGSGGGGSFEGSTRVEKEHPQLGAGTVLLLRAGFYAVSFLSVAVGSTVYYQGKCLTWKGPRRQLPAVVPAPLPPPCGSSAHLLPPVPGGRAKRSGSGVKQTLNFDLLKLAGDVESNPGPSRGHMTEYKPTVRLATRDDVPRAVRTLAAAFADYPATRHTVDPDRHIERVTELQELFLTRVGLDIGKVWVADDGAAVAVWTTPESVEAGAVFAEIGPRMAELSGSRLAAQQQMEGLLAPHRPKEPAWFLATVGVSPDHQGKGLGSAVVLPGVEAAERAGVPAFLETSAPRNLPFYERLGFTVTADVEVPEGPRTWCMTRKPGA

SEQ ID NO: 4100 - protein, 893 aa, Artificial Sequence
  Synthetic Polypeptide
MALPVTALLLPLALLLHAARPDIQMTQSPSSLSASVGDRVTITCKASDHINNWLAWYQQKPGQAPKLLIYGATTLETGVPSRFSGSGSGTDYTLTISSLQPEDFATYYCQQSWNTPWTFGQGTKLEIKRLEGQPKANPTVTLFPPSSEELQANKATLVCLISDFYPGAVTVAWKADGSPVKAGVETTKPSKQSNNKYAASSYLSLTPEQWKSHRSYSCQVTHEGSTVEKTVAPTECSGSVVEKEHPQLGAGTVLLLRAGFYAVSFLSVAVGSTVYYQGKCLTWKGPRRQLPAVVPAPLPPPCGSSAHLLPPVPGGRAKRSGSGATNFSLLKQAGDVEENPGPTSMDWIWRILFLVGAATGAHSFEQVQLQQPGAELVKPGASVKMSCKASGYAFSSYWINWMKQKPGQGLEWIGQIYPGDGDTNYNGKFKGRATLTADTSSSTAYMQLSSLTSEDSAVYFCARSITTVVGCAMDYWGQGTSVTVSSTRASTKGPSVFPLAPSSKSTSGGTAALGCLVKDYFPEPVTVSWNSGALTSGVHTFPAVLQSSGLYSLSSVVTVPSSSLGTQTYICNVNHKPSNTKVDKRVEPKSCGTVEKEHPQLGAGTVLLLRAGFYAVSFLSVAVGSTVYYQGKCLTWKGPRRQLPAVVPAPLPPPCGSSAHLLPPVPGGRAKRSGSGVKQTLNFDLLKLAGDVESNPGPSRGGIHTMATYEVLCEVARKLGTDDREVVLFLLNVFIPQPTLAQLIGALRALKEEGRLTFPLLAECLFRAGRRDLLRDLLHLDPRFLERHLAGTMSYFSPYQLTVLHVDGELCARDIRSLIFLSKDTIGSRSTPQTFLHWVYCMENLDLLGPTDVDALMSMLRSLSRVDLQRQVQTLMGLHLSGPSHSQHYRHTP

SEQ ID NO: 4101 - protein, 946 aa, Artificial Sequence
  Synthetic Polypeptide
MALPVTALLLPLALLLHAARPDIQMTQSPSSLSASVGDRVTITCKASDHINNWLAWYQQKPGQAPKLLIYGATTLETGVPSRFSGSGSGTDYTLTISSLQPEDFATYYCQQSWNTPWTFGQGTKLEIKRLEGQPKANPTVTLFPPSSEELQANKATLVCLISDFYPGAVTVAWKADGSPVKAGVETTKPSKQSNNKYAASSYLSLTPEQWKSHRSYSCQVTHEGSTVEKTVAPTECSGSVVEKEHPQLGAGTVLLLRAGFYAVSFLSVAVGSTVYYQGKCLTWKGPRRQLPAVVPAPLPPPCGSSAHLLPPVPGGRAKRSGSGATNFSLLKQAGDVEENPGPTSMDWIWRILFLVGAATGAHSFEQVQLQQPGAELVKPGASVKMSCKASGYAFSSYWINWMKQKPGQGLEWIGQIYPGDGDTNYNGKFKGRATLTADTSSSTAYMQLSSLTSEDSAVYFCARSITTVVGCAMDYWGQGTSVTVSSTRASTKGPSVFPLAPSSKSTSGGTAALGCLVKDYFPEPVTVSWNSGALTSGVHTFPAVLQSSGLYSLSSVVTVPSSSLGTQTYICNVNHKPSNTKVDKRVEPKSCGTVEKEHPQLGAGTVLLLRAGFYAVSFLSVAVGSTVYYQGKCLTWKGPRRQLPAVVPAPLPPPCGSSAHLLPPVPGGRAKRSGSGVKQTLNFDLLKLAGDVESNPGPSRGGIHTMSDSKEVPSLPFLRHLLEELDSHEDSLLLFLCHDAAPGCTTVTQALCSLSQQRKLTLAALVEMLYVLQRMDLLKSRFGLSKEGAEQLLGTSFLTRYRKLMVCVGEELDSSELRALRLFACNLNPSLSTALSESSRFVELVLALENVGLVSPSSVSVLADMLRTLRRLDLCQQLVEYEQQEQARYRYCYAASPSLPVRTLRRGHGASEHEQLCMPVQESSDSPELLRTPVQESSSDSPEQTT

SEQ ID NO: 4102 - protein, 901 aa, Artificial Sequence
  Synthetic Polypeptide
MALPVTALLLPLALLLHAARPDIQMTQSPSSLSASVGDRVTITCKASDHINNWLAWYQQKPGQAPKLLIYGATTLETGVPSRFSGSGSGTDYTLTISSLQPEDFATYYCQQSWNTPWTFGQGTKLEIKRLEGQPKANPTVTLFPPSSEELQANKATLVCLISDFYPGAVTVAWKADGSPVKAGVETTKPSKQSNNKYAASSYLSLTPEQWKSHRSYSCQVTHEGSTVEKTVAPTECSGSVVEKEHPQLGAGTVLLLRAGFYAVSFLSVAVGSTVYYQGKCLTWKGPRRQLPAVVPAPLPPPCGSSAHLLPPVPGGRAKRSGSGATNFSLLKQAGDVEENPGPTSMDWIWRILFLVGAATGAHSFEQVQLQQPGAELVKPGASVKMSCKASGYAFSSYWINWMKQKPGQGLEWIGQIYPGDGDTNYNGKFKGRATLTADTSSSTAYMQLSSLTSEDSAVYFCARSITTVVGCAMDYWGQGTSVTVSSTRASTKGPSVFPLAPSSKSTSGGTAALGCLVKDYFPEPVTVSWNSGALTSGVHTFPAVLQSSGLYSLSSVVTVPSSSLGTQTYICNVNHKPSNTKVDKRVEPKSCGTVEKEHPQLGAGTVLLLRAGFYAVSFLSVAVGSTVYYQGKCLTWKGPRRQLPAVVPAPLPPPCGSSAHLLPPVPGGRAKRSGSGVKQTLNFDLLKLAGDVESNPGPSRGHMTEYKPTVRLATRDDVPRAVRTLAAAFADYPATRHTVDPDRHIERVTELQELFLTRVGLDIGKVWVADDGAAVAVWTTPESVEAGAVFAEIGPRMAELSGSRLAAQQQMEGLLAPHRPKEPAWFLATVGVSPDHQGKGLGSAVVLPGVEAAERAGVPAFLETSAPRNLPFYERLGFTVTADVEVPEGPRTWCMTRKPGA

SEQ ID NO: 4103 - protein, 1038 aa, Artificial Sequence
  Synthetic Polypeptide
MALPVTALLLPLALLLHAARPEVQLVESGGGLVQAGGSLRLSCAASGRTFSMGWFRQAPGKEREFVAAITYSGGSPYYADSVKGRFTISRDNAKNTVYLQMNSLKPEDTAVYYCAANPTYGSDWNAENWGQGTQVTVSSGTGGGGSGGGGSGGGGSEFDIQMTQSPSSLSASVGDRVTITCKASDHINNWLAWYQQKPGQAPKLLIYGATTLETGVPSRFSGSGSGTDYTLTISSLQPEDFATYYCQQSWNTPWTFGQGTKLEIKRLEGQPKANPTVTLFPPSSEELQANKATLVCLISDFYPGAVTVAWKADGSPVKAGVETTKPSKQSNNKYAASSYLSLTPEQWKSHRSYSCQVTHEGSTVEKTVAPTECSGSVVEKEHPQLGAGTVLLLRAGFYAVSFLSVAVGSTVYYQGKCLTWKGPRRQLPAVVPAPLPPPCGSSAHLLPPVPGGRAKRSGSGATNFSLLKQAGDVEENPGPTSMDWIWRILFLVGAATGAHSFEQVQLQQPGAELVKPGASVKMSCKASGYAFSSYWINWMKQKPGQGLEWIGQIYPGDGDTNYNGKFKGRATLTADTSSSTAYMQLSSLTSEDSAVYFCARSITTVVGCAMDYWGQGTSVTVSSTRASTKGPSVFPLAPSSKSTSGGTAALGCLVKDYFPEPVTVSWNSGALTSGVHTFPAVLQSSGLYSLSSVVTVPSSSLGTQTYICNVNHKPSNTKVDKRVEPKSCGTVEKEHPQLGAGTVLLLRAGFYAVSFLSVAVGSTVYYQGKCLTWKGPRRQLPAVVPAPLPPPCGSSAHLLPPVPGGRAKRSGSGVKQTLNFDLLKLAGDVESNPGPSRGHMTEYKPTVRLATRDDVPRAVRTLAAAFADYPATRHTVDPDRHIERVTELQELFLTRVGLDIGKVWVADDGAAVAVWTTPESVEAGAVFAEIGPRMAELSGSRLAAQQQMEGLLAPHRPKEPAWFLATVGVSPDHQGKGLGSAVVLPGVEAAERAGVPAFLETSAPRNLPFYERLGFTVTADVEVPEGPRTWCMTRKPGA

SEQ ID NO: 4104 - protein, 1175 aa, Artificial Sequence
  Synthetic Polypeptide
MALPVTALLLPLALLLHAARPEVQLVESGGGLVQAGGSLRLSCAASGRTFSMGWFRQAPGKEREFVAAITYSGGSPYYADSVKGRFTISRDNAKNTVYLQMNSLKPEDTAVYYCAANPTYGSDWNAENWGQGTQVTVSSGTGGGGSGGGGSGGGGSEFDIQMTQSPSSLSASVGDRVTITCKASDHINNWLAWYQQKPGQAPKLLIYGATTLETGVPSRFSGSGSGTDYTLTISSLQPEDFATYYCQQSWNTPWTFGQGTKLEIKRLEGQPKANPTVTLFPPSSEELQANKATLVCLISDFYPGAVTVAWKADGSPVKAGVETTKPSKQSNNKYAASSYLSLTPEQWKSHRSYSCQVTHEGSTVEKTVAPTECSGSVVEKEHPQLGAGTVLLLRAGFYAVSFLSVAVGSTVYYQGKCLTWKGPRRQLPAVVPAPLPPPCGSSAHLLPPVPGGRAKRSGSGATNFSLLKQAGDVEENPGPTSMDWIWRILFLVGAATGAHSGPEVQLVESGGGLVQAGGSLRLSCAASGRTFTMGWFRQAPGKEREFVAAISLSPTLAYYADSVKGRFTISRDNAKNTVVLQMNSLKPEDTALYYCAADRKSVMSIRPDYWGQGTQVTVSSGSGGGGSGGGGSGGGGSFEQVQLQQPGAELVKPGASVKMSCKASGYAFSSYWINWMKQKPGQGLEWIGQIYPGDGDTNYNGKFKGRATLTADTSSSTAYMQLSSLTSEDSAVYFCARSITTVVGCAMDYWGQGTSVTVSSTRASTKGPSVFPLAPSSKSTSGGTAALGCLVKDYFPEPVTVSWNSGALTSGVHTFPAVLQSSGLYSLSSVVTVPSSSLGTQTYICNVNHKPSNTKVDKRVEPKSCGTVEKEHPQLGAGTVLLLRAGFYAVSFLSVAVGSTVYYQGKCLTWKGPRRQLPAVVPAPLPPPCGSSAHLLPPVPGGRAKRSGSGVKQTLNFDLLKLAGDVESNPGPSRGHMTEYKPTVRLATRDDVPRAVRTLAAAFADYPATRHTVDPDRHIERVTELQELFLTRVGLDIGKVWVADDGAAVAVWTTPESVEAGAVFAEIGPRMAELSGSRLAAQQQMEGLLAPHRPKEPAWFLATVGVSPDHQGKGLGSAVVLPGVEAAERAGVPAFLETSAPRNLPFYERLGFTVTADVEVPEGPRTWCMTRKPGA

SEQ ID NO: 4105 - protein, 908 aa, Artificial Sequence
  Synthetic Polypeptide
MALPVTALLLPLALLLHAARPEVQLVESGGGLVQAGGSLRLSCAASGRTFSMGWFRQAPGKEREFVAAITYSGGSPYYADSVKGRFTISRDNAKNTVYLQMNSLKPEDTAVYYCAANPTYGSDWNAENWGQGTQVTVSSLEGQPKANPTVTLFPPSSEELQANKATLVCLISDFYPGAVTVAWKADGSPVKAGVETTKPSKQSNNKYAASSYLSLTPEQWKSHRSYSCQVTHEGSTVEKTVAPTECSGSVVEKEHPQLGAGTVLLLRAGFYAVSFLSVAVGSTVYYQGKCLTWKGPRRQLPAVVPAPLPPPCGSSAHLLPPVPGGRAKRSGSGATNFSLLKQAGDVEENPGPTSMDWIWRILFLVGAATGAHSGPEVQLVESGGGLVQAGGSLRLSCAASGRTFTMGWFRQAPGKEREFVAAISLSPTLAYYADSVKGRFTISRDNAKNTVVLQMNSLKPEDTALYYCAADRKSVMSIRPDYWGQGTQVTVSSTRASTKGPSVFPLAPSSKSTSGGTAALGCLVKDYFPEPVTVSWNSGALTSGVHTFPAVLQSSGLYSLSSVVTVPSSSLGTQTYICNVNHKPSNTKVDKRVEPKSCGTVEKEHPQLGAGTVLLLRAGFYAVSFLSVAVGSTVYYQGKCLTWKGPRRQLPAVVPAPLPPPCGSSAHLLPPVPGGRAKRSGSGVKQTLNFDLLKLAGDVESNPGPSRGHMTEYKPTVRLATRDDVPRAVRTLAAAFADYPATRHTVDPDRHIERVTELQELFLTRVGLDIGKVWVADDGAAVAVWTTPESVEAGAVFAEIGPRMAELSGSRLAAQQQMEGLLAPHRPKEPAWFLATVGVSPDHQGKGLGSAVVLPGVEAAERAGVPAFLETSAPRNLPFYERLGFTVTADVEVPEGPRTWCMTRKPGA

SEQ ID NO: 4106 - protein, 916 aa, Artificial Sequence
  Synthetic Polypeptide
MALPVTALLLPLALLLHAARPDIQMTQSPSSLSASVGDRVTITCKASDHINNWLAWYQQKPGQAPKLLIYGATTLETGVPSRFSGSGSGTDYTLTISSLQPEDFATYYCQQSWNTPWTFGQGTKLEIKRLEDLKNVFPPEVAVFEPSEAEISHTQKATLVCLATGFYPDHVELSWWVNGKEVHSGVSTDPQPLKEQPALNDSRYCLSSRLRVSATFWQNPRNHFRCQVQFYGLSENDEWTQDRAKPVTQIVSAEAWGRADCGSVVEKEHPQLGAGTVLLLRAGFYAVSFLSVAVGSTVYYQGKCLTWKGPRRQLPAVVPAPLPPPCGSSAHLLPPVPGGRAKRSGSGATNFSLLKQAGDVEENPGPTSMDWIWRILFLVGAATGAHSFEQVQLQQPGAELVKPGASVKMSCKASGYAFSSYWINWMKQKPGQGLEWIGQIYPGDGDTNYNGKFKGRATLTADTSSSTAYMQLSSLTSEDSAVYFCARSITTVVGCAMDYWGQGTSVTVSSTRIQNPDPAVYQLRDSKSSDKSVCLFTDFDSQTNVSQSKDSDVYITDKTVLDMRSMDFKSNSAVAWSNKSDFACANAFNNSIIPEDTFFPSPESSCGTVEKEHPQLGAGTVLLLRAGFYAVSFLSVAVGSTVYYQGKCLTWKGPRRQLPAVVPAPLPPPCGSSAHLLPPVPGGRAKRSGSGVKQTLNFDLLKLAGDVESNPGPSRGHMTEYKPTVRLATRDDVPRAVRTLAAAFADYPATRHTVDPDRHIERVTELQELFLTRVGLDIGKVWVADDGAAVAVWTTPESVEAGAVFAEIGPRMAELSGSRLAAQQQMEGLLAPHRPKEPAWFLATVGVSPDHQGKGLGSAVVLPGVEAAERAGVPAFLETSAPRNLPFYERLGFTVTADVEVPEGPRTWCMTRKPGA

SEQ ID NO: 4107 - protein, 1053 aa, Artificial Sequence
  Synthetic Polypeptide
MALPVTALLLPLALLLHAARPEVQLVESGGGLVQAGGSLRLSCAASGRTFSMGWFRQAPGKEREFVAAITYSGGSPYYADSVKGRFTISRDNAKNTVYLQMNSLKPEDTAVYYCAANPTYGSDWNAENWGQGTQVTVSSGTGGGGSGGGGSGGGGSEFDIQMTQSPSSLSASVGDRVTITCKASDHINNWLAWYQQKPGQAPKLLIYGATTLETGVPSRFSGSGSGTDYTLTISSLQPEDFATYYCQQSWNTPWTFGQGTKLEIKRLEDLKNVFPPEVAVFEPSEAEISHTQKATLVCLATGFYPDHVELSWWVNGKEVHSGVSTDPQPLKEQPALNDSRYCLSSRLRVSATFWQNPRNHFRCQVQFYGLSENDEWTQDRAKPVTQIVSAEAWGRADCGSVVEKEHPQLGAGTVLLLRAGFYAVSFLSVAVGSTVYYQGKCLTWKGPRRQLPAVVPAPLPPPCGSSAHLLPPVPGGRAKRSGSGATNFSLLKQAGDVEENPGPTSMDWIWRILFLVGAATGAHSFEQVQLQQPGAELVKPGASVKMSCKASGYAFSSYWINWMKQKPGQGLEWIGQIYPGDGDTNYNGKFKGRATLTADTSSSTAYMQLSSLTSEDSAVYFCARSITTVVGCAMDYWGQGTSVTVSSTRIQNPDPAVYQLRDSKSSDKSVCLFTDFDSQTNVSQSKDSDVYITDKTVLDMRSMDFKSNSAVAWSNKSDFACANAFNNSIIPEDTFFPSPESSCGTVEKEHPQLGAGTVLLLRAGFYAVSFLSVAVGSTVYYQGKCLTWKGPRRQLPAVVPAPLPPPCGSSAHLLPPVPGGRAKRSGSGVKQTLNFDLLKLAGDVESNPGPSRGHMTEYKPTVRLATRDDVPRAVRTLAAAFADYPATRHTVDPDRHIERVTELQELFLTRVGLDIGKVWVADDGAAVAVWTTPESVEAGAVFAEIGPRMAELSGSRLAAQQQMEGLLAPHRPKEPAWFLATVGVSPDHQGKGLGSAVVLPGVEAAERAGVPAFLETSAPRNLPFYERLGFTVTADVEVPEGPRTWCMTRKPGA

SEQ ID NO: 4108 - protein, 1190 aa, Artificial Sequence
  Synthetic Polypeptide
MALPVTALLLPLALLLHAARPEVQLVESGGGLVQAGGSLRLSCAASGRTFSMGWFRQAPGKEREFVAAITYSGGSPYYADSVKGRFTISRDNAKNTVYLQMNSLKPEDTAVYYCAANPTYGSDWNAENWGQGTQVTVSSGTGGGGSGGGGSGGGGSEFDIQMTQSPSSLSASVGDRVTITCKASDHINNWLAWYQQKPGQAPKLLIYGATTLETGVPSRFSGSGSGTDYTLTISSLQPEDFATYYCQQSWNTPWTFGQGTKLEIKRLEDLKNVFPPEVAVFEPSEAEISHTQKATLVCLATGFYPDHVELSWWVNGKEVHSGVSTDPQPLKEQPALNDSRYCLSSRLRVSATFWQNPRNHFRCQVQFYGLSENDEWTQDRAKPVTQIVSAEAWGRADCGSVVEKEHPQLGAGTVLLLRAGFYAVSFLSVAVGSTVYYQGKCLTWKGPRRQLPAVVPAPLPPPCGSSAHLLPPVPGGRAKRSGSGATNFSLLKQAGDVEENPGPTSMDWIWRILFLVGAATGAHSGPEVQLVESGGGLVQAGGSLRLSCAASGRTFTMGWFRQAPGKEREFVAAISLSPTLAYYADSVKGRFTISRDNAKNTVVLQMNSLKPEDTALYYCAADRKSVMSIRPDYWGQGTQVTVSSGSGGGGSGGGGSGGGGSFEQVQLQQPGAELVKPGASVKMSCKASGYAFSSYWINWMKQKPGQGLEWIGQIYPGDGDTNYNGKFKGRATLTADTSSSTAYMQLSSLTSEDSAVYFCARSITTVVGCAMDYWGQGTSVTVSSTRIQNPDPAVYQLRDSKSSDKSVCLFTDFDSQTNVSQSKDSDVYITDKTVLDMRSMDFKSNSAVAWSNKSDFACANAFNNSIIPEDTFFPSPESSCGTVEKEHPQLGAGTVLLLRAGFYAVSFLSVAVGSTVYYQGKCLTWKGPRRQLPAVVPAPLPPPCGSSAHLLPPVPGGRAKRSGSGVKQTLNFDLLKLAGDVESNPGPSRGHMTEYKPTVRLATRDDVPRAVRTLAAAFADYPATRHTVDPDRHIERVTELQELFLTRVGLDIGKVWVADDGAAVAVWTTPESVEAGAVFAEIGPRMAELSGSRLAAQQQMEGLLAPHRPKEPAWFLATVGVSPDHQGKGLGSAVVLPGVEAAERAGVPAFLETSAPRNLPFYERLGFTVTADVEVPEGPRTWCMTRKPGA

SEQ ID NO: 4109 - protein, 923 aa, Artificial Sequence
  Synthetic Polypeptide
MALPVTALLLPLALLLHAARPEVQLVESGGGLVQAGGSLRLSCAASGRTFSMGWFRQAPGKEREFVAAITYSGGSPYYADSVKGRFTISRDNAKNTVYLQMNSLKPEDTAVYYCAANPTYGSDWNAENWGQGTQVTVSSLEDLKNVFPPEVAVFEPSEAEISHTQKATLVCLATGFYPDHVELSWWVNGKEVHSGVSTDPQPLKEQPALNDSRYCLSSRLRVSATFWQNPRNHFRCQVQFYGLSENDEWTQDRAKPVTQIVSAEAWGRADCGSVVEKEHPQLGAGTVLLLRAGFYAVSFLSVAVGSTVYYQGKCLTWKGPRRQLPAVVPAPLPPPCGSSAHLLPPVPGGRAKRSGSGATNFSLLKQAGDVEENPGPTSMDWIWRILFLVGAATGAHSGPEVQLVESGGGLVQAGGSLRLSCAASGRTFTMGWFRQAPGKEREFVAAISLSPTLAYYADSVKGRFTISRDNAKNTVVLQMNSLKPEDTALYYCAADRKSVMSIRPDYWGQGTQVTVSSTRIQNPDPAVYQLRDSKSSDKSVCLFTDFDSQTNVSQSKDSDVYITDKTVLDMRSMDFKSNSAVAWSNKSDFACANAFNNSIIPEDTFFPSPESSCGTVEKEHPQLGAGTVLLLRAGFYAVSFLSVAVGSTVYYQGKCLTWKGPRRQLPAVVPAPLPPPCGSSAHLLPPVPGGRAKRSGSGVKQTLNFDLLKLAGDVESNPGPSRGHMTEYKPTVRLATRDDVPRAVRTLAAAFADYPATRHTVDPDRHIERVTELQELFLTRVGLDIGKVWVADDGAAVAVWTTPESVEAGAVFAEIGPRMAELSGSRLAAQQQMEGLLAPHRPKEPAWFLATVGVSPDHQGKGLGSAVVLPGVEAAERAGVPAFLETSAPRNLPFYERLGFTVTADVEVPEGPRTWCMTRKPGA

SEQ ID NO: 4110 - protein, 471 aa, Artificial Sequence
  Synthetic Polypeptide
MALPVTALLLPLALLLHAARPACEVQLLESGGGLIQPGGSLRLSCAASGFTFSSHAMTWVRQAPGKGLEWVSAISGSGDYTHYADSVKGRFTISRDNSKNTVYLQMNSLRAEDSAVYYCAKDEDGGSLLGHRGQGTLVTVSSGTGGGGSGGGGSGGGGSEFGSLEVVEKEHPQLGAGTVLLLRAGFYAVSFLSVAVGSTVYYQGKCLTWKGPRRQLPAVVPAPLPPPCGSSAHLLPPVPGGRAKRSGSGATNFSLLKQAGDVEENPGPTRGHMTEYKPTVRLATRDDVPRAVRTLAAAFADYPATRHTVDPDRHIERVTELQELFLTRVGLDIGKVWVADDGAAVAVWTTPESVEAGAVFAEIGPRMAELSGSRLAAQQQMEGLLAPHRPKEPAWFLATVGVSPDHQGKGLGSAVVLPGVEAAERAGVPAFLETSAPRNLPFYERLGFTVTADVEVPEGPRTWCMTRKPGA

SEQ ID NO: 4111 - protein, 941 aa, Artificial Sequence
  Synthetic Polypeptide
MALPVTALLLPLALLLHAARPDIQMTQSPSSLSASVGDRVTITCKASDHINNWLAWYQQKPGQAPKLLIYGATTLETGVPSRFSGSGSGTDYTLTISSLQPEDFATYYCQQSWNTPWTFGQGTKLEIKRLEIGWLLLQAPRWVFKEEDPIHLRCHSWKNTALHKVTYLQNGKGRKYFHHNSDFYIPKATLKDSGSYFCRGLVGSKNVSSETVNITITQGLAVSTISSFFPPGYQVSFCLVMVLLFAVDTGLYFSVKTNIRSSTRDWKDHKFKWRKDPQDKRAKRSGSGATNFSLLKQAGDVEENPGPTSMDWIWRILFLVGAATGAHSFEQVQLQQPGAELVKPGASVKMSCKASGYAFSSYWINWMKQKPGQGLEWIGQIYPGDGDTNYNGKFKGRATLTADTSSSTAYMQLSSLTSEDSAVYFCARSITTVVGCAMDYWGQGTSVTVSSTRQSKAQVLQSVAGQTLTVRCQYPPTGSLYEKKGWCKEASALVCIRLVTSSKPRTMAWTSRFTIWDDPDAGFFTVTMTDLREEDSGHYWCRIYRPSDNSVSKSVRFYLVVSPASASTQTSWTPRDLVSSQTQTQSCVPPTAGARQAPESPSTIPVPSQPQNSTLRPGPAAPIALVPVFCGLLVAKSLVLSALLVWWGDIWWKTMMELRSLDTQKATCHLQQVTDLPWTSVSSPVEREILYHTVARTKISDDDDEHTLRAKRSGSGVKQTLNFDLLKLAGDVESNPGPSRGHMTEYKPTVRLATRDDVPRAVRTLAAAFADYPATRHTVDPDRHIERVTELQELFLTRVGLDIGKVWVADDGAAVAVWTTPESVEAGAVFAEIGPRMAELSGSRLAAQQQMEGLLAPHRPKEPAWFLATVGVSPDHQGKGLGSAVVLPGVEAAERAGVPAFLETSAPRNLPFYERLGFTVTADVEVPEGPRTWCMTRKPGA

SEQ ID NO: 4112 - protein, 995 aa, Artificial Sequence
  Synthetic Polypeptide
MALPVTALLLPLALLLHAARPACEVQLLESGGGLIQPGGSLRLSCAASGFTFSSHAMTWVRQAPGKGLEWVSAISGSGDYTHYADSVKGRFTISRDNSKNTVYLQMNSLRAEDSAVYYCAKDEDGGSLLGHRGQGTLVTVSSGTGGGGSGGGGSGGGGSEFGSLEIGWLLLQAPRWVFKEEDPIHLRCHSWKNTALHKVTYLQNGKGRKYFHHNSDFYIPKATLKDSGSYFCRGLVGSKNVSSETVNITITQGLAVSTISSFFPPGYQVSFCLVMVLLFAVDTGLYFSVKTNIRSSTRDWKDHKFKWRKDPQDKRAKRSGSGATNFSLLKQAGDVEENPGPTSATMDWIWRILFLVGAATGAHSGPEVQLVESGGGLVQAGGSLRLSCAASGRTFSMGWFRQAPGKEREFVAAITYSGGSPYYADSVKGRFTISRDNAKNTVYLQMNSLKPEDTAVYYCAANPTYGSDWNAENWGQGTQVTVSSGSGGGGSGGGGSGGGGSFEGSTRQSKAQVLQSVAGQTLTVRCQYPPTGSLYEKKGWCKEASALVCIRLVTSSKPRTMAWTSRFTIWDDPDAGFFTVTMTDLREEDSGHYWCRIYRPSDNSVSKSVRFYLVVSPASASTQTSWTPRDLVSSQTQTQSCVPPTAGARQAPESPSTIPVPSQPQNSTLRPGPAAPIALVPVFCGLLVAKSLVLSALLVWWGDIWWKTMMELRSLDTQKATCHLQQVTDLPWTSVSSPVEREILYHTVARTKISDDDDEHTLRAKRSGSGVKQTLNFDLLKLAGDVESNPGPSRGHMTEYKPTVRLATRDDVPRAVRTLAAAFADYPATRHTVDPDRHIERVTELQELFLTRVGLDIGKVWVADDGAAVAVWTTPESVEAGAVFAEIGPRMAELSGSRLAAQQQMEGLLAPHRPKEPAWFLATVGVSPDHQGKGLGSAVVLPGVEAAERAGVPAFLETSAPRNLPFYERLGFTVTADVEVPEGPRTWCMTRKPGA

SEQ ID NO: 4113 - protein, 1146 aa, Artificial Sequence
  Synthetic Polypeptide
MALPVTALLLPLALLLHAARPDIQMTQSPSSLSASVGDRVTITCKASDHINNWLAWYQQKPGQAPKLLIYGATTLETGVPSRFSGSGSGTDYTLTISSLQPEDFATYYCQQSWNTPWTFGQGTKLEIKRLEGQPKANPTVTLFPPSSEELQANKATLVCLISDFYPGAVTVAWKADGSPVKAGVETTKPSKQSNNKYAASSYLSLTPEQWKSHRSYSCQVTHEGSTVEKTVAPTECSGSIGWLLLQAPRWVFKEEDPIHLRCHSWKNTALHKVTYLQNGKGRKYFHHNSDFYIPKATLKDSGSYFCRGLVGSKNVSSETVNITITQGLAVSTISSFFPPGYQVSFCLVMVLLFAVDTGLYFSVKTNIRSSTRDWKDHKFKWRKDPQDKRAKRSGSGATNFSLLKQAGDVEENPGPTSMDWIWRILFLVGAATGAHSFEQVQLQQPGAELVKPGASVKMSCKASGYAFSSYWINWMKQKPGQGLEWIGQIYPGDGDTNYNGKFKGRATLTADTSSSTAYMQLSSLTSEDSAVYFCARSITTVVGCAMDYWGQGTSVTVSSTRASTKGPSVFPLAPSSKSTSGGTAALGCLVKDYFPEPVTVSWNSGALTSGVHTFPAVLQSSGLYSLSSVVTVPSSSLGTQTYICNVNHKPSNTKVDKRVEPKSCGTQSKAQVLQSVAGQTLTVRCQYPPTGSLYEKKGWCKEASALVCIRLVTSSKPRTMAWTSRFTIWDDPDAGFFTVTMTDLREEDSGHYWCRIYRPSDNSVSKSVRFYLVVSPASASTQTSWTPRDLVSSQTQTQSCVPPTAGARQAPESPSTIPVPSQPQNSTLRPGPAAPIALVPVFCGLLVAKSLVLSALLVWWGDIWWKTMMELRSLDTQKATCHLQQVTDLPWTSVSSPVEREILYHTVARTKISDDDDEHTLRAKRSGSGVKQTLNFDLLKLAGDVESNPGPSRGGIHTMATYEVLCEVARKLGTDDREVVLFLLNVFIPQPTLAQLIGALRALKEEGRLTFPLLAECLFRAGRRDLLRDLLHLDPRFLERHLAGTMSYFSPYQLTVLHVDGELCARDIRSLIFLSKDTIGSRSTPQTFLHWVYCMENLDLLGPTDVDALMSMLRSLSRVDLQRQVQTLMGLHLSGPSHSQHYRHTP

SEQ ID NO: 4114 - protein, 1199 aa, Artificial Sequence
  Synthetic Polypeptide
MALPVTALLLPLALLLHAARPDIQMTQSPSSLSASVGDRVTITCKASDHINNWLAWYQQKPGQAPKLLIYGATTLETGVPSRFSGSGSGTDYTLTISSLQPEDFATYYCQQSWNTPWTFGQGTKLEIKRLEGQPKANPTVTLFPPSSEELQANKATLVCLISDFYPGAVTVAWKADGSPVKAGVETTKPSKQSNNKYAASSYLSLTPEQWKSHRSYSCQVTHEGSTVEKTVAPTECSGSIGWLLLQAPRWVFKEEDPIHLRCHSWKNTALHKVTYLQNGKGRKYFHHNSDFYIPKATLKDSGSYFCRGLVGSKNVSSETVNITITQGLAVSTISSFFPPGYQVSFCLVMVLLFAVDTGLYFSVKTNIRSSTRDWKDHKFKWRKDPQDKRAKRSGSGATNFSLLKQAGDVEENPGPTSMDWIWRILFLVGAATGAHSFEQVQLQQPGAELVKPGASVKMSCKASGYAFSSYWINWMKQKPGQGLEWIGQIYPGDGDTNYNGKFKGRATLTADTSSSTAYMQLSSLTSEDSAVYFCARSITTVVGCAMDYWGQGTSVTVSSTRASTKGPSVFPLAPSSKSTSGGTAALGCLVKDYFPEPVTVSWNSGALTSGVHTFPAVLQSSGLYSLSSVVTVPSSSLGTQTYICNVNHKPSNTKVDKRVEPKSCGTQSKAQVLQSVAGQTLTVRCQYPPTGSLYEKKGWCKEASALVCIRLVTSSKPRTMAWTSRFTIWDDPDAGFFTVTMTDLREEDSGHYWCRIYRPSDNSVSKSVRFYLVVSPASASTQTSWTPRDLVSSQTQTQSCVPPTAGARQAPESPSTIPVPSQPQNSTLRPGPAAPIALVPVFCGLLVAKSLVLSALLVWWGDIWWKTMMELRSLDTQKATCHLQQVTDLPWTSVSSPVEREILYHTVARTKISDDDDEHTLRAKRSGSGVKQTLNFDLLKLAGDVESNPGPSRGGIHTMSDSKEVPSLPFLRHLLEELDSHEDSLLLFLCHDAAPGCTTVTQALCSLSQQRKLTLAALVEMLYVLQRMDLLKSRFGLSKEGAEQLLGTSFLTRYRKLMVCVGEELDSSELRALRLFACNLNPSLSTALSESSRFVELVLALENVGLVSPSSVSVLADMLRTLRRLDLCQQLVEYEQQEQARYRYCYAASPSLPVRTLRRGHGASEHEQLCMPVQESSDSPELLRTPVQESSSDSPEQTT

SEQ ID NO: 4115 - protein, 1154 aa, Artificial Sequence
  Synthetic Polypeptide
MALPVTALLLPLALLLHAARPDIQMTQSPSSLSASVGDRVTITCKASDHINNWLAWYQQKPGQAPKLLIYGATTLETGVPSRFSGSGSGTDYTLTISSLQPEDFATYYCQQSWNTPWTFGQGTKLEIKRLEGQPKANPTVTLFPPSSEELQANKATLVCLISDFYPGAVTVAWKADGSPVKAGVETTKPSKQSNNKYAASSYLSLTPEQWKSHRSYSCQVTHEGSTVEKTVAPTECSGSIGWLLLQAPRWVFKEEDPIHLRCHSWKNTALHKVTYLQNGKGRKYFHHNSDFYIPKATLKDSGSYFCRGLVGSKNVSSETVNITITQGLAVSTISSFFPPGYQVSFCLVMVLLFAVDTGLYFSVKTNIRSSTRDWKDHKFKWRKDPQDKRAKRSGSGATNFSLLKQAGDVEENPGPTSMDWIWRILFLVGAATGAHSFEQVQLQQPGAELVKPGASVKMSCKASGYAFSSYWINWMKQKPGQGLEWIGQIYPGDGDTNYNGKFKGRATLTADTSSSTAYMQLSSLTSEDSAVYFCARSITTVVGCAMDYWGQGTSVTVSSTRASTKGPSVFPLAPSSKSTSGGTAALGCLVKDYFPEPVTVSWNSGALTSGVHTFPAVLQSSGLYSLSSVVTVPSSSLGTQTYICNVNHKPSNTKVDKRVEPKSCGTQSKAQVLQSVAGQTLTVRCQYPPTGSLYEKKGWCKEASALVCIRLVTSSKPRTMAWTSRFTIWDDPDAGFFTVTMTDLREEDSGHYWCRIYRPSDNSVSKSVRFYLVVSPASASTQTSWTPRDLVSSQTQTQSCVPPTAGARQAPESPSTIPVPSQPQNSTLRPGPAAPIALVPVFCGLLVAKSLVLSALLVWWGDIWWKTMMELRSLDTQKATCHLQQVTDLPWTSVSSPVEREILYHTVARTKISDDDDEHTLRAKRSGSGVKQTLNFDLLKLAGDVESNPGPSRGHMTEYKPTVRLATRDDVPRAVRTLAAAFADYPATRHTVDPDRHIERVTELQELFLTRVGLDIGKVWVADDGAAVAVWTTPESVEAGAVFAEIGPRMAELSGSRLAAQQQMEGLLAPHRPKEPAWFLATVGVSPDHQGKGLGSAVVLPGVEAAERAGVPAFLETSAPRNLPFYERLGFTVTADVEVPEGPRTWCMTRKPGA

SEQ ID NO: 4116 - protein, 1291 aa, Artificial Sequence
  Synthetic Polypeptide
MALPVTALLLPLALLLHAARPEVQLVESGGGLVQAGGSLRLSCAASGRTFSMGWFRQAPGKEREFVAAITYSGGSPYYADSVKGRFTISRDNAKNTVYLQMNSLKPEDTAVYYCAANPTYGSDWNAENWGQGTQVTVSSGTGGGGSGGGGSGGGGSEFDIQMTQSPSSLSASVGDRVTITCKASDHINNWLAWYQQKPGQAPKLLIYGATTLETGVPSRFSGSGSGTDYTLTISSLQPEDFATYYCQQSWNTPWTFGQGTKLEIKRLEGQPKANPTVTLFPPSSEELQANKATLVCLISDFYPGAVTVAWKADGSPVKAGVETTKPSKQSNNKYAASSYLSLTPEQWKSHRSYSCQVTHEGSTVEKTVAPTECSGSIGWLLLQAPRWVFKEEDPIHLRCHSWKNTALHKVTYLQNGKGRKYFHHNSDFYIPKATLKDSGSYFCRGLVGSKNVSSETVNITITQGLAVSTISSFFPPGYQVSFCLVMVLLFAVDTGLYFSVKTNIRSSTRDWKDHKFKWRKDPQDKRAKRSGSGATNFSLLKQAGDVEENPGPTSMDWIWRILFLVGAATGAHSFEQVQLQQPGAELVKPGASVKMSCKASGYAFSSYWINWMKQKPGQGLEWIGQIYPGDGDTNYNGKFKGRATLTADTSSSTAYMQLSSLTSEDSAVYFCARSITTVVGCAMDYWGQGTSVTVSSTRASTKGPSVFPLAPSSKSTSGGTAALGCLVKDYFPEPVTVSWNSGALTSGVHTFPAVLQSSGLYSLSSVVTVPSSSLGTQTYICNVNHKPSNTKVDKRVEPKSCGTQSKAQVLQSVAGQTLTVRCQYPPTGSLYEKKGWCKEASALVCIRLVTSSKPRTMAWTSRFTIWDDPDAGFFTVTMTDLREEDSGHYWCRIYRPSDNSVSKSVRFYLVVSPASASTQTSWTPRDLVSSQTQTQSCVPPTAGARQAPESPSTIPVPSQPQNSTLRPGPAAPIALVPVFCGLLVAKSLVLSALLVWWGDIWWKTMMELRSLDTQKATCHLQQVTDLPWTSVSSPVEREILYHTVARTKISDDDDEHTLRAKRSGSGVKQTLNFDLLKLAGDVESNPGPSRGHMTEYKPTVRLATRDDVPRAVRTLAAAFADYPATRHTVDPDRHIERVTELQELFLTRVGLDIGKVWVADDGAAVAVWTTPESVEAGAVFAEIGPRMAELSGSRLAAQQQMEGLLAPHRPKEPAWFLATVGVSPDHQGKGLGSAVVLPGVEAAERAGVPAFLETSAPRNLPFYERLGFTVTADVEVPEGPRTWCMTRKPGA

SEQ ID NO: 4117 - protein, 1428 aa, Artificial Sequence
  Synthetic Polypeptide
MALPVTALLLPLALLLHAARPEVQLVESGGGLVQAGGSLRLSCAASGRTFSMGWFRQAPGKEREFVAAITYSGGSPYYADSVKGRFTISRDNAKNTVYLQMNSLKPEDTAVYYCAANPTYGSDWNAENWGQGTQVTVSSGTGGGGSGGGGSGGGGSEFDIQMTQSPSSLSASVGDRVTITCKASDHINNWLAWYQQKPGQAPKLLIYGATTLETGVPSRFSGSGSGTDYTLTISSLQPEDFATYYCQQSWNTPWTFGQGTKLEIKRLEGQPKANPTVTLFPPSSEELQANKATLVCLISDFYPGAVTVAWKADGSPVKAGVETTKPSKQSNNKYAASSYLSLTPEQWKSHRSYSCQVTHEGSTVEKTVAPTECSGSIGWLLLQAPRWVFKEEDPIHLRCHSWKNTALHKVTYLQNGKGRKYFHHNSDFYIPKATLKDSGSYFCRGLVGSKNVSSETVNITITQGLAVSTISSFFPPGYQVSFCLVMVLLFAVDTGLYFSVKTNIRSSTRDWKDHKFKWRKDPQDKRAKRSGSGATNFSLLKQAGDVEENPGPTSMDWIWRILFLVGAATGAHSGPEVQLVESGGGLVQAGGSLRLSCAASGRTFTMGWFRQAPGKEREFVAAISLSPTLAYYADSVKGRFTISRDNAKNTVVLQMNSLKPEDTALYYCAADRKSVMSIRPDYWGQGTQVTVSSGSGGGGSGGGGSGGGGSFEQVQLQQPGAELVKPGASVKMSCKASGYAFSSYWINWMKQKPGQGLEWIGQIYPGDGDTNYNGKFKGRATLTADTSSSTAYMQLSSLTSEDSAVYFCARSITTVVGCAMDYWGQGTSVTVSSTRASTKGPSVFPLAPSSKSTSGGTAALGCLVKDYFPEPVTVSWNSGALTSGVHTFPAVLQSSGLYSLSSVVTVPSSSLGTQTYICNVNHKPSNTKVDKRVEPKSCGTQSKAQVLQSVAGQTLTVRCQYPPTGSLYEKKGWCKEASALVCIRLVTSSKPRTMAWTSRFTIWDDPDAGFFTVTMTDLREEDSGHYWCRIYRPSDNSVSKSVRFYLVVSPASASTQTSWTPRDLVSSQTQTQSCVPPTAGARQAPESPSTIPVPSQPQNSTLRPGPAAPIALVPVFCGLLVAKSLVLSALLVWWGDIWWKTMMELRSLDTQKATCHLQQVTDLPWTSVSSPVEREILYHTVARTKISDDDDEHTLRAKRSGSGVKQTLNFDLLKLAGDVESNPGPSRGHMTEYKPTVRLATRDDVPRAVRTLAAAFADYPATRHTVDPDRHIERVTELQELFLTRVGLDIGKVWVADDGAAVAVWTTPESVEAGAVFAEIGPRMAELSGSRLAAQQQMEGLLAPHRPKEPAWFLATVGVSPDHQGKGLGSAVVLPGVEAAERAGVPAFLETSAPRNLPFYERLGFTVTADVEVPEGPRTWCMTRKPGA

SEQ ID NO: 4118 - protein, 1161 aa, Artificial Sequence
  Synthetic Polypeptide
MALPVTALLLPLALLLHAARPEVQLVESGGGLVQAGGSLRLSCAASGRTFSMGWFRQAPGKEREFVAAITYSGGSPYYADSVKGRFTISRDNAKNTVYLQMNSLKPEDTAVYYCAANPTYGSDWNAENWGQGTQVTVSSLEGQPKANPTVTLFPPSSEELQANKATLVCLISDFYPGAVTVAWKADGSPVKAGVETTKPSKQSNNKYAASSYLSLTPEQWKSHRSYSCQVTHEGSTVEKTVAPTECSGSIGWLLLQAPRWVFKEEDPIHLRCHSWKNTALHKVTYLQNGKGRKYFHHNSDFYIPKATLKDSGSYFCRGLVGSKNVSSETVNITITQGLAVSTISSFFPPGYQVSFCLVMVLLFAVDTGLYFSVKTNIRSSTRDWKDHKFKWRKDPQDKRAKRSGSGATNFSLLKQAGDVEENPGPTSMDWIWRILFLVGAATGAHSGPEVQLVESGGGLVQAGGSLRLSCAASGRTFTMGWFRQAPGKEREFVAAISLSPTLAYYADSVKGRFTISRDNAKNTVVLQMNSLKPEDTALYYCAADRKSVMSIRPDYWGQGTQVTVSSTRASTKGPSVFPLAPSSKSTSGGTAALGCLVKDYFPEPVTVSWNSGALTSGVHTFPAVLQSSGLYSLSSVVTVPSSSLGTQTYICNVNHKPSNTKVDKRVEPKSCGTQSKAQVLQSVAGQTLTVRCQYPPTGSLYEKKGWCKEASALVCIRLVTSSKPRTMAWTSRFTIWDDPDAGFFTVTMTDLREEDSGHYWCRIYRPSDNSVSKSVRFYLVVSPASASTQTSWTPRDLVSSQTQTQSCVPPTAGARQAPESPSTIPVPSQPQNSTLRPGPAAPIALVPVFCGLLVAKSLVLSALLVWWGDIWWKTMMELRSLDTQKATCHLQQVTDLPWTSVSSPVEREILYHTVARTKISDDDDEHTLRAKRSGSGVKQTLNFDLLKLAGDVESNPGPSRGHMTEYKPTVRLATRDDVPRAVRTLAAAFADYPATRHTVDPDRHIERVTELQELFLTRVGLDIGKVWVADDGAAVAVWTTPESVEAGAVFAEIGPRMAELSGSRLAAQQQMEGLLAPHRPKEPAWFLATVGVSPDHQGKGLGSAVVLPGVEAAERAGVPAFLETSAPRNLPFYERLGFTVTADVEVPEGPRTWCMTRKPGA

SEQ ID NO: 4119 - protein, 1169 aa, Artificial Sequence
  Synthetic Polypeptide
MALPVTALLLPLALLLHAARPDIQMTQSPSSLSASVGDRVTITCKASDHINNWLAWYQQKPGQAPKLLIYGATTLETGVPSRFSGSGSGTDYTLTISSLQPEDFATYYCQQSWNTPWTFGQGTKLEIKRLEDLKNVFPPEVAVFEPSEAEISHTQKATLVCLATGFYPDHVELSWWVNGKEVHSGVSTDPQPLKEQPALNDSRYCLSSRLRVSATFWQNPRNHFRCQVQFYGLSENDEWTQDRAKPVTQIVSAEAWGRADCGSIGWLLLQAPRWVFKEEDPIHLRCHSWKNTALHKVTYLQNGKGRKYFHHNSDFYIPKATLKDSGSYFCRGLVGSKNVSSETVNITITQGLAVSTISSFFPPGYQVSFCLVMVLLFAVDTGLYFSVKTNIRSSTRDWKDHKFKWRKDPQDKRAKRSGSGATNFSLLKQAGDVEENPGPTSMDWIWRILFLVGAATGAHSFEQVQLQQPGAELVKPGASVKMSCKASGYAFSSYWINWMKQKPGQGLEWIGQIYPGDGDTNYNGKFKGRATLTADTSSSTAYMQLSSLTSEDSAVYFCARSITTVVGCAMDYWGQGTSVTVSSTRIQNPDPAVYQLRDSKSSDKSVCLFTDFDSQTNVSQSKDSDVYITDKTVLDMRSMDFKSNSAVAWSNKSDFACANAFNNSIIPEDTFFPSPESSCGTQSKAQVLQSVAGQTLTVRCQYPPTGSLYEKKGWCKEASALVCIRLVTSSKPRTMAWTSRFTIWDDPDAGFFTVTMTDLREEDSGHYWCRIYRPSDNSVSKSVRFYLVVSPASASTQTSWTPRDLVSSQTQTQSCVPPTAGARQAPESPSTIPVPSQPQNSTLRPGPAAPIALVPVFCGLLVAKSLVLSALLVWWGDIWWKTMMELRSLDTQKATCHLQQVTDLPWTSVSSPVEREILYHTVARTKISDDDDEHTLRAKRSGSGVKQTLNFDLLKLAGDVESNPGPSRGHMTEYKPTVRLATRDDVPRAVRTLAAAFADYPATRHTVDPDRHIERVTELQELFLTRVGLDIGKVWVADDGAAVAVWTTPESVEAGAVFAEIGPRMAELSGSRLAAQQQMEGLLAPHRPKEPAWFLATVGVSPDHQGKGLGSAVVLPGVEAAERAGVPAFLETSAPRNLPFYERLGFTVTADVEVPEGPRTWCMTRKPGA

SEQ ID NO: 4120 - protein, 1306 aa, Artificial Sequence
  Synthetic Polypeptide
MALPVTALLLPLALLLHAARPEVQLVESGGGLVQAGGSLRLSCAASGRTFSMGWFRQAPGKEREFVAAITYSGGSPYYADSVKGRFTISRDNAKNTVYLQMNSLKPEDTAVYYCAANPTYGSDWNAENWGQGTQVTVSSGTGGGGSGGGGSGGGGSEFDIQMTQSPSSLSASVGDRVTITCKASDHINNWLAWYQQKPGQAPKLLIYGATTLETGVPSRFSGSGSGTDYTLTISSLQPEDFATYYCQQSWNTPWTFGQGTKLEIKRLEDLKNVFPPEVAVFEPSEAEISHTQKATLVCLATGFYPDHVELSWWVNGKEVHSGVSTDPQPLKEQPALNDSRYCLSSRLRVSATFWQNPRNHFRCQVQFYGLSENDEWTQDRAKPVTQIVSAEAWGRADCGSIGWLLLQAPRWVFKEEDPIHLRCHSWKNTALHKVTYLQNGKGRKYFHHNSDFYIPKATLKDSGSYFCRGLVGSKNVSSETVNITITQGLAVSTISSFFPPGYQVSFCLVMVLLFAVDTGLYFSVKTNIRSSTRDWKDHKFKWRKDPQDKRAKRSGSGATNFSLLKQAGDVEENPGPTSMDWIWRILFLVGAATGAHSFEQVQLQQPGAELVKPGASVKMSCKASGYAFSSYWINWMKQKPGQGLEWIGQIYPGDGDTNYNGKFKGRATLTADTSSSTAYMQLSSLTSEDSAVYFCARSITTVVGCAMDYWGQGTSVTVSSTRIQNPDPAVYQLRDSKSSDKSVCLFTDFDSQTNVSQSKDSDVYITDKTVLDMRSMDFKSNSAVAWSNKSDFACANAFNNSIIPEDTFFPSPESSCGTQSKAQVLQSVAGQTLTVRCQYPPTGSLYEKKGWCKEASALVCIRLVTSSKPRTMAWTSRFTIWDDPDAGFFTVTMTDLREEDSGHYWCRIYRPSDNSVSKSVRFYLVVSPASASTQTSWTPRDLVSSQTQTQSCVPPTAGARQAPESPSTIPVPSQPQNSTLRPGPAAPIALVPVFCGLLVAKSLVLSALLVWWGDIWWKTMMELRSLDTQKATCHLQQVTDLPWTSVSSPVEREILYHTVARTKISDDDDEHTLRAKRSGSGVKQTLNFDLLKLAGDVESNPGPSRGHMTEYKPTVRLATRDDVPRAVRTLAAAFADYPATRHTVDPDRHIERVTELQELFLTRVGLDIGKVWVADDGAAVAVWTTPESVEAGAVFAEIGPRMAELSGSRLAAQQQMEGLLAPHRPKEPAWFLATVGVSPDHQGKGLGSAVVLPGVEAAERAGVPAFLETSAPRNLPFYERLGFTVTADVEVPEGPRTWCMTRKPGA

SEQ ID NO: 4121 - protein, 1443 aa, Artificial Sequence
  Synthetic Polypeptide
MALPVTALLLPLALLLHAARPEVQLVESGGGLVQAGGSLRLSCAASGRTFSMGWFRQAPGKEREFVAAITYSGGSPYYADSVKGRFTISRDNAKNTVYLQMNSLKPEDTAVYYCAANPTYGSDWNAENWGQGTQVTVSSGTGGGGSGGGGSGGGGSEFDIQMTQSPSSLSASVGDRVTITCKASDHINNWLAWYQQKPGQAPKLLIYGATTLETGVPSRFSGSGSGTDYTLTISSLQPEDFATYYCQQSWNTPWTFGQGTKLEIKRLEDLKNVFPPEVAVFEPSEAEISHTQKATLVCLATGFYPDHVELSWWVNGKEVHSGVSTDPQPLKEQPALNDSRYCLSSRLRVSATFWQNPRNHFRCQVQFYGLSENDEWTQDRAKPVTQIVSAEAWGRADCGSIGWLLLQAPRWVFKEEDPIHLRCHSWKNTALHKVTYLQNGKGRKYFHHNSDFYIPKATLKDSGSYFCRGLVGSKNVSSETVNITITQGLAVSTISSFFPPGYQVSFCLVMVLLFAVDTGLYFSVKTNIRSSTRDWKDHKFKWRKDPQDKRAKRSGSGATNFSLLKQAGDVEENPGPTSMDWIWRILFLVGAATGAHSGPEVQLVESGGGLVQAGGSLRLSCAASGRTFTMGWFRQAPGKEREFVAAISLSPTLAYYADSVKGRFTISRDNAKNTVVLQMNSLKPEDTALYYCAADRKSVMSIRPDYWGQGTQVTVSSGSGGGGSGGGGSGGGGSFEQVQLQQPGAELVKPGASVKMSCKASGYAFSSYWINWMKQKPGQGLEWIGQIYPGDGDTNYNGKFKGRATLTADTSSSTAYMQLSSLTSEDSAVYFCARSITTVVGCAMDYWGQGTSVTVSSTRIQNPDPAVYQLRDSKSSDKSVCLFTDFDSQTNVSQSKDSDVYITDKTVLDMRSMDFKSNSAVAWSNKSDFACANAFNNSIIPEDTFFPSPESSCGTQSKAQVLQSVAGQTLTVRCQYPPTGSLYEKKGWCKEASALVCIRLVTSSKPRTMAWTSRFTIWDDPDAGFFTVTMTDLREEDSGHYWCRIYRPSDNSVSKSVRFYLVVSPASASTQTSWTPRDLVSSQTQTQSCVPPTAGARQAPESPSTIPVPSQPQNSTLRPGPAAPIALVPVFCGLLVAKSLVLSALLVWWGDIWWKTMMELRSLDTQKATCHLQQVTDLPWTSVSSPVEREILYHTVARTKISDDDDEHTLRAKRSGSGVKQTLNFDLLKLAGDVESNPGPSRGHMTEYKPTVRLATRDDVPRAVRTLAAAFADYPATRHTVDPDRHIERVTELQELFLTRVGLDIGKVWVADDGAAVAVWTTPESVEAGAVFAEIGPRMAELSGSRLAAQQQMEGLLAPHRPKEPAWFLATVGVSPDHQGKGLGSAVVLPGVEAAERAGVPAFLETSAPRNLPFYERLGFTVTADVEVPEGPRTWCMTRKPGA

SEQ ID NO: 4122 - protein, 1176 aa, Artificial Sequence
  Synthetic Polypeptide
MALPVTALLLPLALLLHAARPEVQLVESGGGLVQAGGSLRLSCAASGRTFSMGWFRQAPGKEREFVAAITYSGGSPYYADSVKGRFTISRDNAKNTVYLQMNSLKPEDTAVYYCAANPTYGSDWNAENWGQGTQVTVSSLEDLKNVFPPEVAVFEPSEAEISHTQKATLVCLATGFYPDHVELSWWVNGKEVHSGVSTDPQPLKEQPALNDSRYCLSSRLRVSATFWQNPRNHFRCQVQFYGLSENDEWTQDRAKPVTQIVSAEAWGRADCGSIGWLLLQAPRWVFKEEDPIHLRCHSWKNTALHKVTYLQNGKGRKYFHHNSDFYIPKATLKDSGSYFCRGLVGSKNVSSETVNITITQGLAVSTISSFFPPGYQVSFCLVMVLLFAVDTGLYFSVKTNIRSSTRDWKDHKFKWRKDPQDKRAKRSGSGATNFSLLKQAGDVEENPGPTSMDWIWRILFLVGAATGAHSGPEVQLVESGGGLVQAGGSLRLSCAASGRTFTMGWFRQAPGKEREFVAAISLSPTLAYYADSVKGRFTISRDNAKNTVVLQMNSLKPEDTALYYCAADRKSVMSIRPDYWGQGTQVTVSSTRIQNPDPAVYQLRDSKSSDKSVCLFTDFDSQTNVSQSKDSDVYITDKTVLDMRSMDFKSNSAVAWSNKSDFACANAFNNSIIPEDTFFPSPESSCGTQSKAQVLQSVAGQTLTVRCQYPPTGSLYEKKGWCKEASALVCIRLVTSSKPRTMAWTSRFTIWDDPDAGFFTVTMTDLREEDSGHYWCRIYRPSDNSVSKSVRFYLVVSPASASTQTSWTPRDLVSSQTQTQSCVPPTAGARQAPESPSTIPVPSQPQNSTLRPGPAAPIALVPVFCGLLVAKSLVLSALLVWWGDIWWKTMMELRSLDTQKATCHLQQVTDLPWTSVSSPVEREILYHTVARTKISDDDDEHTLRAKRSGSGVKQTLNFDLLKLAGDVESNPGPSRGHMTEYKPTVRLATRDDVPRAVRTLAAAFADYPATRHTVDPDRHIERVTELQELFLTRVGLDIGKVWVADDGAAVAVWTTPESVEAGAVFAEIGPRMAELSGSRLAAQQQMEGLLAPHRPKEPAWFLATVGVSPDHQGKGLGSAVVLPGVEAAERAGVPAFLETSAPRNLPFYERLGFTVTADVEVPEGPRTWCMTRKPGA

SEQ ID NO: 4123 - protein, 544 aa, Artificial Sequence; identical to SEQ ID NO: 4058
  Synthetic Polypeptide

SEQ ID NO: 4124 - protein, 1047 aa, Artificial Sequence
  Synthetic Polypeptide
MALPVTALLLPLALLLHAARPDIQMTQSPSSLSASVGDRVTITCKASDHINNWLAWYQQKPGQAPKLLIYGATTLETGVPSRFSGSGSGTDYTLTISSLQPEDFATYYCQQSWNTPWTFGQGTKLEIKRLEQSKAQVLQSVAGQTLTVRCQYPPTGSLYEKKGWCKEASALVCIRLVTSSKPRTMAWTSRFTIWDDPDAGFFTVTMTDLREEDSGHYWCRIYRPSDNSVSKSVRFYLVVSPASASTQTSWTPRDLVSSQTQTQSCVPPTAGARQAPESPSTIPVPSQPQNSTLRPGPAAPIALVPVFCGLLVAKSLVLSALLVWWGDIWWKTMMELRSLDTQKATCHLQQVTDLPWTSVSSPVEREILYHTVARTKISDDDDEHTLRAKRSGSGATNFSLLKQAGDVEENPGPTSMDWIWRILFLVGAATGAHSFEQVQLQQPGAELVKPGASVKMSCKASGYAFSSYWINWMKQKPGQGLEWIGQIYPGDGDTNYNGKFKGRATLTADTSSSTAYMQLSSLTSEDSAVYFCARSITTVVGCAMDYWGQGTSVTVSSTRQSKAQVLQSVAGQTLTVRCQYPPTGSLYEKKGWCKEASALVCIRLVTSSKPRTMAWTSRFTIWDDPDAGFFTVTMTDLREEDSGHYWCRIYRPSDNSVSKSVRFYLVVSPASASTQTSWTPRDLVSSQTQTQSCVPPTAGARQAPESPSTIPVPSQPQNSTLRPGPAAPIALVPVFCGLLVAKSLVLSALLVWWGDIWWKTMMELRSLDTQKATCHLQQVTDLPWTSVSSPVEREILYHTVARTKISDDDDEHTLRAKRSGSGVKQTLNFDLLKLAGDVESNPGPSRGHMTEYKPTVRLATRDDVPRAVRTLAAAFADYPATRHTVDPDRHIERVTELQELFLTRVGLDIGKVWVADDGAAVAVWTTPESVEAGAVFAEIGPRMAELSGSRLAAQQQMEGLLAPHRPKEPAWFLATVGVSPDHQGKGLGSAVVLPGVEAAERAGVPAFLETSAPRNLPFYERLGFTVTADVEVPEGPRTWCMTRKPGA

SEQ ID NO: 4125 - protein, 1101 aa, Artificial Sequence
  Synthetic Polypeptide
MALPVTALLLPLALLLHAARPACEVQLLESGGGLIQPGGSLRLSCAASGFTFSSHAMTWVRQAPGKGLEWVSAISGSGDYTHYADSVKGRFTISRDNSKNTVYLQMNSLRAEDSAVYYCAKDEDGGSLLGHRGQGTLVTVSSGTGGGGSGGGGSGGGGSEFGSLEQSKAQVLQSVAGQTLTVRCQYPPTGSLYEKKGWCKEASALVCIRLVTSSKPRTMAWTSRFTIWDDPDAGFFTVTMTDLREEDSGHYWCRIYRPSDNSVSKSVRFYLVVSPASASTQTSWTPRDLVSSQTQTQSCVPPTAGARQAPESPSTIPVPSQPQNSTLRPGPAAPIALVPVFCGLLVAKSLVLSALLVWWGDIWWKTMMELRSLDTQKATCHLQQVTDLPWTSVSSPVEREILYHTVARTKISDDDDEHTLRAKRSGSGATNFSLLKQAGDVEENPGPTSATMDWIWRILFLVGAATGAHSGPEVQLVESGGGLVQAGGSLRLSCAASGRTFSMGWFRQAPGKEREFVAAITYSGGSPYYADSVKGRFTISRDNAKNTVYLQMNSLKPEDTAVYYCAANPTYGSDWNAENWGQGTQVTVSSGSGGGGSGGGGSGGGGSFEGSTRQSKAQVLQSVAGQTLTVRCQYPPTGSLYEKKGWCKEASALVCIRLVTSSKPRTMAWTSRFTIWDDPDAGFFTVTMTDLREEDSGHYWCRIYRPSDNSVSKSVRFYLVVSPASASTQTSWTPRDLVSSQTQTQSCVPPTAGARQAPESPSTIPVPSQPQNSTLRPGPAAPIALVPVFCGLLVAKSLVLSALLVWWGDIWWKTMMELRSLDTQKATCHLQQVTDLPWTSVSSPVEREILYHTVARTKISDDDDEHTLRAKRSGSGVKQTLNFDLLKLAGDVESNPGPSRGHMTEYKPTVRLATRDDVPRAVRTLAAAFADYPATRHTVDPDRHIERVTELQELFLTRVGLDIGKVWVADDGAAVAVWTTPESVEAGAVFAEIGPRMAELSGSRLAAQQQMEGLLAPHRPKEPAWFLATVGVSPDHQGKGLGSAVVLPGVEAAERAGVPAFLETSAPRNLPFYERLGFTVTADVEVPEGPRTWCMTRKPGA

SEQ ID NO: 4126 - protein, 1252 aa, Artificial Sequence
  Synthetic Polypeptide
MALPVTALLLPLALLLHAARPDIQMTQSPSSLSASVGDRVTITCKASDHINNWLAWYQQKPGQAPKLLIYGATTLETGVPSRFSGSGSGTDYTLTISSLQPEDFATYYCQQSWNTPWTFGQGTKLEIKRLEGQPKANPTVTLFPPSSEELQANKATLVCLISDFYPGAVTVAWKADGSPVKAGVETTKPSKQSNNKYAASSYLSLTPEQWKSHRSYSCQVTHEGSTVEKTVAPTECSGSQSKAQVLQSVAGQTLTVRCQYPPTGSLYEKKGWCKEASALVCIRLVTSSKPRTMAWTSRFTIWDDPDAGFFTVTMTDLREEDSGHYWCRIYRPSDNSVSKSVRFYLVVSPASASTQTSWTPRDLVSSQTQTQSCVPPTAGARQAPESPSTIPVPSQPQNSTLRPGPAAPIALVPVFCGLLVAKSLVLSALLVWWGDIWWKTMMELRSLDTQKATCHLQQVTDLPWTSVSSPVEREILYHTVARTKISDDDDEHTLRAKRSGSGATNFSLLKQAGDVEENPGPTSMDWIWRILFLVGAATGAHSFEQVQLQQPGAELVKPGASVKMSCKASGYAFSSYWINWMKQKPGQGLEWIGQIYPGDGDTNYNGKFKGRATLTADTSSSTAYMQLSSLTSEDSAVYFCARSITTVVGCAMDYWGQGTSVTVSSTRASTKGPSVFPLAPSSKSTSGGTAALGCLVKDYFPEPVTVSWNSGALTSGVHTFPAVLQSSGLYSLSSVVTVPSSSLGTQTYICNVNHKPSNTKVDKRVEPKSCGTQSKAQVLQSVAGQTLTVRCQYPPTGSLYEKKGWCKEASALVCIRLVTSSKPRTMAWTSRFTIWDDPDAGFFTVTMTDLREEDSGHYWCRIYRPSDNSVSKSVRFYLVVSPASASTQTSWTPRDLVSSQTQTQSCVPPTAGARQAPESPSTIPVPSQPQNSTLRPGPAAPIALVPVFCGLLVAKSLVLSALLVWWGDIWWKTMMELRSLDTQKATCHLQQVTDLPWTSVSSPVEREILYHTVARTKISDDDDEHTLRAKRSGSGVKQTLNFDLLKLAGDVESNPGPSRGGIHTMATYEVLCEVARKLGTDDREVVLFLLNVFIPQPTLAQLIGALRALKEEGRLTFPLLAECLFRAGRRDLLRDLLHLDPRFLERHLAGTMSYFSPYQLTVLHVDGELCARDIRSLIFLSKDTIGSRSTPQTFLHWVYCMENLDLLGPTDVDALMSMLRSLSRVDLQRQVQTLMGLHLSGPSHSQHYRHTP

SEQ ID NO: 4127 - protein, 1305 aa, Artificial Sequence
  Synthetic Polypeptide
MALPVTALLLPLALLLHAARPDIQMTQSPSSLSASVGDRVTITCKASDHINNWLAWYQQKPGQAPKLLIYGATTLETGVPSRFSGSGSGTDYTLTISSLQPEDFATYYCQQSWNTPWTFGQGTKLEIKRLEGQPKANPTVTLFPPSSEELQANKATLVCLISDFYPGAVTVAWKADGSPVKAGVETTKPSKQSNNKYAASSYLSLTPEQWKSHRSYSCQVTHEGSTVEKTVAPTECSGSQSKAQVLQSVAGQTLTVRCQYPPTGSLYEKKGWCKEASALVCIRLVTSSKPRTMAWTSRFTIWDDPDAGFFTVTMTDLREEDSGHYWCRIYRPSDNSVSKSVRFYLVVSPASASTQTSWTPRDLVSSQTQTQSCVPPTAGARQAPESPSTIPVPSQPQNSTLRPGPAAPIALVPVFCGLLVAKSLVLSALLVWWGDIWWKTMMELRSLDTQKATCHLQQVTDLPWTSVSSPVEREILYHTVARTKISDDDDEHTLRAKRSGSGATNFSLLKQAGDVEENPGPTSMDWIWRILFLVGAATGAHSFEQVQLQQPGAELVKPGASVKMSCKASGYAFSSYWINWMKQKPGQGLEWIGQIYPGDGDTNYNGKFKGRATLTADTSSSTAYMQLSSLTSEDSAVYFCARSITTVVGCAMDYWGQGTSVTVSSTRASTKGPSVFPLAPSSKSTSGGTAALGCLVKDYFPEPVTVSWNSGALTSGVHTFPAVLQSSGLYSLSSVVTVPSSSLGTQTYICNVNHKPSNTKVDKRVEPKSCGTQSKAQVLQSVAGQTLTVRCQYPPTGSLYEKKGWCKEASALVCIRLVTSSKPRTMAWTSRFTIWDDPDAGFFTVTMTDLREEDSGHYWCRIYRPSDNSVSKSVRFYLVVSPASASTQTSWTPRDLVSSQTQTQSCVPPTAGARQAPESPSTIPVPSQPQNSTLRPGPAAPIALVPVFCGLLVAKSLVLSALLVWWGDIWWKTMMELRSLDTQKATCHLQQVTDLPWTSVSSPVEREILYHTVARTKISDDDDEHTLRAKRSGSGVKQTLNFDLLKLAGDVESNPGPSRGGIHTMSDSKEVPSLPFLRHLLEELDSHEDSLLLFLCHDAAPGCTTVTQALCSLSQQRKLTLAALVEMLYVLQRMDLLKSRFGLSKEGAEQLLGTSFLTRYRKLMVCVGEELDSSELRALRLFACNLNPSLSTALSESSRFVELVLALENVGLVSPSSVSVLADMLRTLRRLDLCQQLVEYEQQEQARYRYCYAASPSLPVRTLRRGHGASEHEQLCMPVQESSDSPELLRTPVQESSSDSPEQTT

SEQ ID NO: 4128 - protein, 1260 aa, Artificial Sequence
  Synthetic Polypeptide
MALPVTALLLPLALLLHAARPDIQMTQSPSSLSASVGDRVTITCKASDHINNWLAWYQQKPGQAPKLLIYGATTLETGVPSRFSGSGSGTDYTLTISSLQPEDFATYYCQQSWNTPWTFGQGTKLEIKRLEGQPKANPTVTLFPPSSEELQANKATLVCLISDFYPGAVTVAWKADGSPVKAGVETTKPSKQSNNKYAASSYLSLTPEQWKSHRSYSCQVTHEGSTVEKTVAPTECSGSQSKAQVLQSVAGQTLTVRCQYPPTGSLYEKKGWCKEASALVCIRLVTSSKPRTMAWTSRFTIWDDPDAGFFTVTMTDLREEDSGHYWCRIYRPSDNSVSKSVRFYLVVSPASASTQTSWTPRDLVSSQTQTQSCVPPTAGARQAPESPSTIPVPSQPQNSTLRPGPAAPIALVPVFCGLLVAKSLVLSALLVWWGDIWWKTMMELRSLDTQKATCHLQQVTDLPWTSVSSPVEREILYHTVARTKISDDDDEHTLRAKRSGSGATNFSLLKQAGDVEENPGPTSMDWIWRILFLVGAATGAHSFEQVQLQQPGAELVKPGASVKMSCKASGYAFSSYWINWMKQKPGQGLEWIGQIYPGDGDTNYNGKFKGRATLTADTSSSTAYMQLSSLTSEDSAVYFCARSITTVVGCAMDYWGQGTSVTVSSTRASTKGPSVFPLAPSSKSTSGGTAALGCLVKDYFPEPVTVSWNSGALTSGVHTFPAVLQSSGLYSLSSVVTVPSSSLGTQTYICNVNHKPSNTKVDKRVEPKSCGTQSKAQVLQSVAGQTLTVRCQYPPTGSLYEKKGWCKEASALVCIRLVTSSKPRTMAWTSRFTIWDDPDAGFFTVTMTDLREEDSGHYWCRIYRPSDNSVSKSVRFYLVVSPASASTQTSWTPRDLVSSQTQTQSCVPPTAGARQAPESPSTIPVPSQPQNSTLRPGPAAPIALVPVFCGLLVAKSLVLSALLVWWGDIWWKTMMELRSLDTQKATCHLQQVTDLPWTSVSSPVEREILYHTVARTKISDDDDEHTLRAKRSGSGVKQTLNFDLLKLAGDVESNPGPSRGHMTEYKPTVRLATRDDVPRAVRTLAAAFADYPATRHTVDPDRHIERVTELQELFLTRVGLDIGKVWVADDGAAVAVWTTPESVEAGAVFAEIGPRMAELSGSRLAAQQQMEGLLAPHRPKEPAWFLATVGVSPDHQGKGLGSAVVLPGVEAAERAGVPAFLETSAPRNLPFYERLGFTVTADVEVPEGPRTWCMTRKPGA

SEQ ID NO: 4129 - protein, 1397 aa, Artificial Sequence
  Synthetic Polypeptide
MALPVTALLLPLALLLHAARPEVQLVESGGGLVQAGGSLRLSCAASGRTFSMGWFRQAPGKEREFVAAITYSGGSPYYADSVKGRFTISRDNAKNTVYLQMNSLKPEDTAVYYCAANPTYGSDWNAENWGQGTQVTVSSGTGGGGSGGGGSGGGGSEFDIQMTQSPSSLSASVGDRVTITCKASDHINNWLAWYQQKPGQAPKLLIYGATTLETGVPSRFSGSGSGTDYTLTISSLQPEDFATYYCQQSWNTPWTFGQGTKLEIKRLEGQPKANPTVTLFPPSSEELQANKATLVCLISDFYPGAVTVAWKADGSPVKAGVETTKPSKQSNNKYAASSYLSLTPEQWKSHRSYSCQVTHEGSTVEKTVAPTECSGSQSKAQVLQSVAGQTLTVRCQYPPTGSLYEKKGWCKEASALVCIRLVTSSKPRTMAWTSRFTIWDDPDAGFFTVTMTDLREEDSGHYWCRIYRPSDNSVSKSVRFYLVVSPASASTQTSWTPRDLVSSQTQTQSCVPPTAGARQAPESPSTIPVPSQPQNSTLRPGPAAPIALVPVFCGLLVAKSLVLSALLVWWGDIWWKTMMELRSLDTQKATCHLQQVTDLPWTSVSSPVEREILYHTVARTKISDDDDEHTLRAKRSGSGATNFSLLKQAGDVEENPGPTSMDWIWRILFLVGAATGAHSFEQVQLQQPGAELVKPGASVKMSCKASGYAFSSYWINWMKQKPGQGLEWIGQIYPGDGDTNYNGKFKGRATLTADTSSSTAYMQLSSLTSEDSAVYFCARSITTVVGCAMDYWGQGTSVTVSSTRASTKGPSVFPLAPSSKSTSGGTAALGCLVKDYFPEPVTVSWNSGALTSGVHTFPAVLQSSGLYSLSSVVTVPSSSLGTQTYICNVNHKPSNTKVDKRVEPKSCGTQSKAQVLQSVAGQTLTVRCQYPPTGSLYEKKGWCKEASALVCIRLVTSSKPRTMAWTSRFTIWDDPDAGFFTVTMTDLREEDSGHYWCRIYRPSDNSVSKSVRFYLVVSPASASTQTSWTPRDLVSSQTQTQSCVPPTAGARQAPESPSTIPVPSQPQNSTLRPGPAAPIALVPVFCGLLVAKSLVLSALLVWWGDIWWKTMMELRSLDTQKATCHLQQVTDLPWTSVSSPVEREILYHTVARTKISDDDDEHTLRAKRSGSGVKQTLNFDLLKLAGDVESNPGPSRGHMTEYKPTVRLATRDDVPRAVRTLAAAFADYPATRHTVDPDRHIERVTELQELFLTRVGLDIGKVWVADDGAAVAVWTTPESVEAGAVFAEIGPRMAELSGSRLAAQQQMEGLLAPHRPKEPAWFLATVGVSPDHQGKGLGSAVVLPGVEAAERAGVPAFLETSAPRNLPFYERLGFTVTADVEVPEGPRTWCMTRKPGA

SEQ ID NO: 4130 - protein, 1534 aa, Artificial Sequence
  Synthetic Polypeptide
MALPVTALLLPLALLLHAARPEVQLVESGGGLVQAGGSLRLSCAASGRTFSMGWFRQAPGKEREFVAAITYSGGSPYYADSVKGRFTISRDNAKNTVYLQMNSLKPEDTAVYYCAANPTYGSDWNAENWGQGTQVTVSSGTGGGGSGGGGSGGGGSEFDIQMTQSPSSLSASVGDRVTITCKASDHINNWLAWYQQKPGQAPKLLIYGATTLETGVPSRFSGSGSGTDYTLTISSLQPEDFATYYCQQSWNTPWTFGQGTKLEIKRLEGQPKANPTVTLFPPSSEELQANKATLVCLISDFYPGAVTVAWKADGSPVKAGVETTKPSKQSNNKYAASSYLSLTPEQWKSHRSYSCQVTHEGSTVEKTVAPTECSGSQSKAQVLQSVAGQTLTVRCQYPPTGSLYEKKGWCKEASALVCIRLVTSSKPRTMAWTSRFTIWDDPDAGFFTVTMTDLREEDSGHYWCRIYRPSDNSVSKSVRFYLVVSPASASTQTSWTPRDLVSSQTQTQSCVPPTAGARQAPESPSTIPVPSQPQNSTLRPGPAAPIALVPVFCGLLVAKSLVLSALLVWWGDIWWKTMMELRSLDTQKATCHLQQVTDLPWTSVSSPVEREILYHTVARTKISDDDDEHTLRAKRSGSGATNFSLLKQAGDVEENPGPTSMDWIWRILFLVGAATGAHSGPEVQLVESGGGLVQAGGSLRLSCAASGRTFTMGWFRQAPGKEREFVAAISLSPTLAYYADSVKGRFTISRDNAKNTVVLQMNSLKPEDTALYYCAADRKSVMSIRPDYWGQGTQVTVSSGSGGGGSGGGGSGGGGSFEQVQLQQPGAELVKPGASVKMSCKASGYAFSSYWINWMKQKPGQGLEWIGQIYPGDGDTNYNGKFKGRATLTADTSSSTAYMQLSSLTSEDSAVYFCARSITTVVGCAMDYWGQGTSVTVSSTRASTKGPSVFPLAPSSKSTSGGTAALGCLVKDYFPEPVTVSWNSGALTSGVHTFPAVLQSSGLYSLSSVVTVPSSSLGTQTYICNVNHKPSNTKVDKRVEPKSCGTQSKAQVLQSVAGQTLTVRCQYPPTGSLYEKKGWCKEASALVCIRLVTSSKPRTMAWTSRFTIWDDPDAGFFTVTMTDLREEDSGHYWCRIYRPSDNSVSKSVRFYLVVSPASASTQTSWTPRDLVSSQTQTQSCVPPTAGARQAPESPSTIPVPSQPQNSTLRPGPAAPIALVPVFCGLLVAKSLVLSALLVWWGDIWWKTMMELRSLDTQKATCHLQQVTDLPWTSVSSPVEREILYHTVARTKISDDDDEHTLRAKRSGSGVKQTLNFDLLKLAGDVESNPGPSRGHMTEYKPTVRLATRDDVPRAVRTLAAAFADYPATRHTVDPDRHIERVTELQELFLTRVGLDIGKVWVADDGAAVAVWTTPESVEAGAVFAEIGPRMAELSGSRLAAQQQMEGLLAPHRPKEPAWFLATVGVSPDHQGKGLGSAVVLPGVEAAERAGVPAFLETSAPRNLPFYERLGFTVTADVEVPEGPRTWCMTRKPGA

SEQ ID NO: 4131 - protein, 1267 aa, Artificial Sequence
  Synthetic Polypeptide
MALPVTALLLPLALLLHAARPEVQLVESGGGLVQAGGSLRLSCAASGRTFSMGWFRQAPGKEREFVAAITYSGGSPYYADSVKGRFTISRDNAKNTVYLQMNSLKPEDTAVYYCAANPTYGSDWNAENWGQGTQVTVSSLEGQPKANPTVTLFPPSSEELQANKATLVCLISDFYPGAVTVAWKADGSPVKAGVETTKPSKQSNNKYAASSYLSLTPEQWKSHRSYSCQVTHEGSTVEKTVAPTECSGSQSKAQVLQSVAGQTLTVRCQYPPTGSLYEKKGWCKEASALVCIRLVTSSKPRTMAWTSRFTIWDDPDAGFFTVTMTDLREEDSGHYWCRIYRPSDNSVSKSVRFYLVVSPASASTQTSWTPRDLVSSQTQTQSCVPPTAGARQAPESPSTIPVPSQPQNSTLRPGPAAPIALVPVFCGLLVAKSLVLSALLVWWGDIWWKTMMELRSLDTQKATCHLQQVTDLPWTSVSSPVEREILYHTVARTKISDDDDEHTLRAKRSGSGATNFSLLKQAGDVEENPGPTSMDWIWRILFLVGAATGAHSGPEVQLVESGGGLVQAGGSLRLSCAASGRTFTMGWFRQAPGKEREFVAAISLSPTLAYYADSVKGRFTISRDNAKNTVVLQMNSLKPEDTALYYCAADRKSVMSIRPDYWGQGTQVTVSSTRASTKGPSVFPLAPSSKSTSGGTAALGCLVKDYFPEPVTVSWNSGALTSGVHTFPAVLQSSGLYSLSSVVTVPSSSLGTQTYICNVNHKPSNTKVDKRVEPKSCGTQSKAQVLQSVAGQTLTVRCQYPPTGSLYEKKGWCKEASALVCIRLVTSSKPRTMAWTSRFTIWDDPDAGFFTVTMTDLREEDSGHYWCRIYRPSDNSVSKSVRFYLVVSPASASTQTSWTPRDLVSSQTQTQSCVPPTAGARQAPESPSTIPVPSQPQNSTLRPGPAAPIALVPVFCGLLVAKSLVLSALLVWWGDIWWKTMMELRSLDTQKATCHLQQVTDLPWTSVSSPVEREILYHTVARTKISDDDDEHTLRAKRSGSGVKQTLNFDLLKLAGDVESNPGPSRGHMTEYKPTVRLATRDDVPRAVRTLAAAFADYPATRHTVDPDRHIERVTELQELFLTRVGLDIGKVWVADDGAAVAVWTTPESVEAGAVFAEIGPRMAELSGSRLAAQQQMEGLLAPHRPKEPAWFLATVGVSPDHQGKGLGSAVVLPGVEAAERAGVPAFLETSAPRNLPFYERLGFTVTADVEVPEGPRTWCMTRKPGA

SEQ ID NO: 4132 - protein, 1275 aa, Artificial Sequence
  Synthetic Polypeptide
MALPVTALLLPLALLLHAARPDIQMTQSPSSLSASVGDRVTITCKASDHINNWLAWYQQKPGQAPKLLIYGATTLETGVPSRFSGSGSGTDYTLTISSLQPEDFATYYCQQSWNTPWTFGQGTKLEIKRLEDLKNVFPPEVAVFEPSEAEISHTQKATLVCLATGFYPDHVELSWWVNGKEVHSGVSTDPQPLKEQPALNDSRYCLSSRLRVSATFWQNPRNHFRCQVQFYGLSENDEWTQDRAKPVTQIVSAEAWGRADCGSQSKAQVLQSVAGQTLTVRCQYPPTGSLYEKKGWCKEASALVCIRLVTSSKPRTMAWTSRFTIWDDPDAGFFTVTMTDLREEDSGHYWCRIYRPSDNSVSKSVRFYLVVSPASASTQTSWTPRDLVSSQTQTQSCVPPTAGARQAPESPSTIPVPSQPQNSTLRPGPAAPIALVPVFCGLLVAKSLVLSALLVWWGDIWWKTMMELRSLDTQKATCHLQQVTDLPWTSVSSPVEREILYHTVARTKISDDDDEHTLRAKRSGSGATNFSLLKQAGDVEENPGPTSMDWIWRILFLVGAATGAHSFEQVQLQQPGAELVKPGASVKMSCKASGYAFSSYWINWMKQKPGQGLEWIGQIYPGDGDTNYNGKFKGRATLTADTSSSTAYMQLSSLTSEDSAVYFCARSITTVVGCAMDYWGQGTSVTVSSTRIQNPDPAVYQLRDSKSSDKSVCLFTDFDSQTNVSQSKDSDVYITDKTVLDMRSMDFKSNSAVAWSNKSDFACANAFNNSIIPEDTFFPSPESSCGTQSKAQVLQSVAGQTLTVRCQYPPTGSLYEKKGWCKEASALVCIRLVTSSKPRTMAWTSRFTIWDDPDAGFFTVTMTDLREEDSGHYWCRIYRPSDNSVSKSVRFYLVVSPASASTQTSWTPRDLVSSQTQTQSCVPPTAGARQAPESPSTIPVPSQPQNSTLRPGPAAPIALVPVFCGLLVAKSLVLSALLVWWGDIWWKTMMELRSLDTQKATCHLQQVTDLPWTSVSSPVEREILYHTVARTKISDDDDEHTLRAKRSGSGVKQTLNFDLLKLAGDVESNPGPSRGHMTEYKPTVRLATRDDVPRAVRTLAAAFADYPATRHTVDPDRHIERVTELQELFLTRVGLDIGKVWVADDGAAVAVWTTPESVEAGAVFAEIGPRMAELSGSRLAAQQQMEGLLAPHRPKEPAWFLATVGVSPDHQGKGLGSAVVLPGVEAAERAGVPAFLETSAPRNLPFYERLGFTVTADVEVPEGPRTWCMTRKPGA

SEQ ID NO: 4133 - protein, 1412 aa, Artificial Sequence
  Synthetic Polypeptide
MALPVTALLLPLALLLHAARPEVQLVESGGGLVQAGGSLRLSCAASGRTFSMGWFRQAPGKEREFVAAITYSGGSPYYADSVKGRFTISRDNAKNTVYLQMNSLKPEDTAVYYCAANPTYGSDWNAENWGQGTQVTVSSGTGGGGSGGGGSGGGGSEFDIQMTQSPSSLSASVGDRVTITCKASDHINNWLAWYQQKPGQAPKLLIYGATTLETGVPSRFSGSGSGTDYTLTISSLQPEDFATYYCQQSWNTPWTFGQGTKLEIKRLEDLKNVFPPEVAVFEPSEAEISHTQKATLVCLATGFYPDHVELSWWVNGKEVHSGVSTDPQPLKEQPALNDSRYCLSSRLRVSATFWQNPRNHFRCQVQFYGLSENDEWTQDRAKPVTQIVSAEAWGRADCGSQSKAQVLQSVAGQTLTVRCQYPPTGSLYEKKGWCKEASALVCIRLVTSSKPRTMAWTSRFTIWDDPDAGFFTVTMTDLREEDSGHYWCRIYRPSDNSVSKSVRFYLVVSPASASTQTSWTPRDLVSSQTQTQSCVPPTAGARQAPESPSTIPVPSQPQNSTLRPGPAAPIALVPVFCGLLVAKSLVLSALLVWWGDIWWKTMMELRSLDTQKATCHLQQVTDLPWTSVSSPVEREILYHTVARTKISDDDDEHTLRAKRSGSGATNFSLLKQAGDVEENPGPTSMDWIWRILFLVGAATGAHSFEQVQLQQPGAELVKPGASVKMSCKASGYAFSSYWINWMKQKPGQGLEWIGQIYPGDGDTNYNGKFKGRATLTADTSSSTAYMQLSSLTSEDSAVYFCARSITTVVGCAMDYWGQGTSVTVSSTRIQNPDPAVYQLRDSKSSDKSVCLFTDFDSQTNVSQSKDSDVYITDKTVLDMRSMDFKSNSAVAWSNKSDFACANAFNNSIIPEDTFFPSPESSCGTQSKAQVLQSVAGQTLTVRCQYPPTGSLYEKKGWCKEASALVCIRLVTSSKPRTMAWTSRFTIWDDPDAGFFTVTMTDLREEDSGHYWCRIYRPSDNSVSKSVRFYLVVSPASASTQTSWTPRDLVSSQTQTQSCVPPTAGARQAPESPSTIPVPSQPQNSTLRPGPAAPIALVPVFCGLLVAKSLVLSALLVWWGDIWWKTMMELRSLDTQKATCHLQQVTDLPWTSVSSPVEREILYHTVARTKISDDDDEHTLRAKRSGSGVKQTLNFDLLKLAGDVESNPGPSRGHMTEYKPTVRLATRDDVPRAVRTLAAAFADYPATRHTVDPDRHIERVTELQELFLTRVGLDIGKVWVADDGAAVAVWTTPESVEAGAVFAEIGPRMAELSGSRLAAQQQMEGLLAPHRPKEPAWFLATVGVSPDHQGKGLGSAVVLPGVEAAERAGVPAFLETSAPRNLPFYERLGFTVTADVEVPEGPRTWCMTRKPGA

SEQ ID NO: 4134 - protein, 1549 aa, Artificial Sequence
  Synthetic Polypeptide
MALPVTALLLPLALLLHAARPEVQLVESGGGLVQAGGSLRLSCAASGRTFSMGWFRQAPGKEREFVAAITYSGGSPYYADSVKGRFTISRDNAKNTVYLQMNSLKPEDTAVYYCAANPTYGSDWNAENWGQGTQVTVSSGTGGGGSGGGGSGGGGSEFDIQMTQSPSSLSASVGDRVTITCKASDHINNWLAWYQQKPGQAPKLLIYGATTLETGVPSRFSGSGSGTDYTLTISSLQPEDFATYYCQQSWNTPWTFGQGTKLEIKRLEDLKNVFPPEVAVFEPSEAEISHTQKATLVCLATGFYPDHVELSWWVNGKEVHSGVSTDPQPLKEQPALNDSRYCLSSRLRVSATFWQNPRNHFRCQVQFYGLSENDEWTQDRAKPVTQIVSAEAWGRADCGSQSKAQVLQSVAGQTLTVRCQYPPTGSLYEKKGWCKEASALVCIRLVTSSKPRTMAWTSRFTIWDDPDAGFFTVTMTDLREEDSGHYWCRIYRPSDNSVSKSVRFYLVVSPASASTQTSWTPRDLVSSQTQTQSCVPPTAGARQAPESPSTIPVPSQPQNSTLRPGPAAPIALVPVFCGLLVAKSLVLSALLVWWGDIWWKTMMELRSLDTQKATCHLQQVTDLPWTSVSSPVEREILYHTVARTKISDDDDEHTLRAKRSGSGATNFSLLKQAGDVEENPGPTSMDWIWRILFLVGAATGAHSGPEVQLVESGGGLVQAGGSLRLSCAASGRTFTMGWFRQAPGKEREFVAAISLSPTLAYYADSVKGRFTISRDNAKNTVVLQMNSLKPEDTALYYCAADRKSVMSIRPDYWGQGTQVTVSSGSGGGGSGGGGSGGGGSFEQVQLQQPGAELVKPGASVKMSCKASGYAFSSYWINWMKQKPGQGLEWIGQIYPGDGDTNYNGKFKGRATLTADTSSSTAYMQLSSLTSEDSAVYFCARSITTVVGCAMDYWGQGTSVTVSSTRIQNPDPAVYQLRDSKSSDKSVCLFTDFDSQTNVSQSKDSDVYITDKTVLDMRSMDFKSNSAVAWSNKSDFACANAFNNSIIPEDTFFPSPESSCGTQSKAQVLQSVAGQTLTVRCQYPPTGSLYEKKGWCKEASALVCIRLVTSSKPRTMAWTSRFTIWDDPDAGFFTVTMTDLREEDSGHYWCRIYRPSDNSVSKSVRFYLVVSPASASTQTSWTPRDLVSSQTQTQSCVPPTAGARQAPESPSTIPVPSQPQNSTLRPGPAAPIALVPVFCGLLVAKSLVLSALLVWWGDIWWKTMMELRSLDTQKATCHLQQVTDLPWTSVSSPVEREILYHTVARTKISDDDDEHTLRAKRSGSGVKQTLNFDLLKLAGDVESNPGPSRGHMTEYKPTVRLATRDDVPRAVRTLAAAFADYPATRHTVDPDRHIERVTELQELFLTRVGLDIGKVWVADDGAAVAVWTTPESVEAGAVFAEIGPRMAELSGSRLAAQQQMEGLLAPHRPKEPAWFLATVGVSPDHQGKGLGSAVVLPGVEAAERAGVPAFLETSAPRNLPFYERLGFTVTADVEVPEGPRTWCMTRKPGA

SEQ ID NO: 4135 - protein, 1282 aa, Artificial Sequence
  Synthetic Polypeptide
MALPVTALLLPLALLLHAARPEVQLVESGGGLVQAGGSLRLSCAASGRTFSMGWFRQAPGKEREFVAAITYSGGSPYYADSVKGRFTISRDNAKNTVYLQMNSLKPEDTAVYYCAANPTYGSDWNAENWGQGTQVTVSSLEDLKNVFPPEVAVFEPSEAEISHTQKATLVCLATGFYPDHVELSWWVNGKEVHSGVSTDPQPLKEQPALNDSRYCLSSRLRVSATFWQNPRNHFRCQVQFYGLSENDEWTQDRAKPVTQIVSAEAWGRADCGSQSKAQVLQSVAGQTLTVRCQYPPTGSLYEKKGWCKEASALVCIRLVTSSKPRTMAWTSRFTIWDDPDAGFFTVTMTDLREEDSGHYWCRIYRPSDNSVSKSVRFYLVVSPASASTQTSWTPRDLVSSQTQTQSCVPPTAGARQAPESPSTIPVPSQPQNSTLRPGPAAPIALVPVFCGLLVAKSLVLSALLVWWGDIWWKTMMELRSLDTQKATCHLQQVTDLPWTSVSSPVEREILYHTVARTKISDDDDEHTLRAKRSGSGATNFSLLKQAGDVEENPGPTSMDWIWRILFLVGAATGAHSGPEVQLVESGGGLVQAGGSLRLSCAASGRTFTMGWFRQAPGKEREFVAAISLSPTLAYYADSVKGRFTISRDNAKNTVVLQMNSLKPEDTALYYCAADRKSVMSIRPDYWGQGTQVTVSSTRIQNPDPAVYQLRDSKSSDKSVCLFTDFDSQTNVSQSKDSDVYITDKTVLDMRSMDFKSNSAVAWSNKSDFACANAFNNSIIPEDTFFPSPESSCGTQSKAQVLQSVAGQTLTVRCQYPPTGSLYEKKGWCKEASALVCIRLVTSSKPRTMAWTSRFTIWDDPDAGFFTVTMTDLREEDSGHYWCRIYRPSDNSVSKSVRFYLVVSPASASTQTSWTPRDLVSSQTQTQSCVPPTAGARQAPESPSTIPVPSQPQNSTLRPGPAAPIALVPVFCGLLVAKSLVLSALLVWWGDIWWKTMMELRSLDTQKATCHLQQVTDLPWTSVSSPVEREILYHTVARTKISDDDDEHTLRAKRSGSGVKQTLNFDLLKLAGDVESNPGPSRGHMTEYKPTVRLATRDDVPRAVRTLAAAFADYPATRHTVDPDRHIERVTELQELFLTRVGLDIGKVWVADDGAAVAVWTTPESVEAGAVFAEIGPRMAELSGSRLAAQQQMEGLLAPHRPKEPAWFLATVGVSPDHQGKGLGSAVVLPGVEAAERAGVPAFLETSAPRNLPFYERLGFTVTADVEVPEGPRTWCMTRKPGA

SEQ ID NO: 4136 - protein, 650 aa, Artificial Sequence
  Synthetic Polypeptide
MALPVTALLLPLALLLHAARPACEVQLLESGGGLIQPGGSLRLSCAASGFTFSSHAMTWVRQAPGKGLEWVSAISGSGDYTHYADSVKGRFTISRDNSKNTVYLQMNSLRAEDSAVYYCAKDEDGGSLLGHRGQGTLVTVSSGTGGGGSGGGGSGGGGSEFGSLEQSKAQVLQSVAGQTLTVRCQYPPTGSLYEKKGWCKEASALVCIRLVTSSKPRTMAWTSRFTIWDDPDAGFFTVTMTDLREEDSGHYWCRIYRPSDNSVSKSVRFYLVVSPASASTQTSWTPRDLVSSQTQTQSCVPPTAGARQAPESPSTIPVPSQPQNSTLRPGPAAPIALVPVFCGLLVAKSLVLSALLVWWGDIWWKTMMELRSLDTQKATCHLQQVTDLPWTSVSSPVEREILYHTVARTKISDDDDEHTLRAKRSGSGATNFSLLKQAGDVEENPGPTRGHMTEYKPTVRLATRDDVPRAVRTLAAAFADYPATRHTVDPDRHIERVTELQELFLTRVGLDIGKVWVADDGAAVAVWTTPESVEAGAVFAEIGPRMAELSGSRLAAQQQMEGLLAPHRPKEPAWFLATVGVSPDHQGKGLGSAVVLPGVEAAERAGVPAFLETSAPRNLPFYERLGFTVTADVEVPEGPRTWCMTRKPGA

SEQ ID NO: 4137 - protein, 842 aa, Artificial Sequence
  Synthetic Polypeptide
MALPVTALLLPLALLLHAARPDIQMTQSPSSLSASVGDRVTITCKASDHINNWLAWYQQKPGQAPKLLIYGATTLETGVPSRFSGSGSGTDYTLTISSLQPEDFATYYCQQSWNTPWTFGQGTKLEIKRLEIGWLLLQAPRWVFKEEDPIHLRCHSWKNTALHKVTYLQNGKGRKYFHHNSDFYIPKATLKDSGSYFCRGLVGSKNVSSETVNITITQGLAVSTISSFFPPGYQVSFCLVMVLLFAVDTGLYFSVKTNIRSSTRDWKDHKFKWRKDPQDKRAKRSGSGATNFSLLKQAGDVEENPGPTSMDWIWRILFLVGAATGAHSFEQVQLQQPGAELVKPGASVKMSCKASGYAFSSYWINWMKQKPGQGLEWIGQIYPGDGDTNYNGKFKGRATLTADTSSSTAYMQLSSLTSEDSAVYFCARSITTVVGCAMDYWGQGTSVTVSSTRKSVRFYLVVSPASASTQTSWTPRDLVSSQTQTQSCVPPTAGARQAPESPSTIPVPSQPQNSTLRPGPAAPIALVPVFCGLLVAKSLVLSALLVWWGDIWWKTMMELRSLDTQKATCHLQQVTDLPWTSVSSPVEREILYHTVARTKISDDDDEHTLRAKRSGSGVKQTLNFDLLKLAGDVESNPGPSRGHMTEYKPTVRLATRDDVPRAVRTLAAAFADYPATRHTVDPDRHIERVTELQELFLTRVGLDIGKVWVADDGAAVAVWTTPESVEAGAVFAEIGPRMAELSGSRLAAQQQMEGLLAPHRPKEPAWFLATVGVSPDHQGKGLGSAVVLPGVEAAERAGVPAFLETSAPRNLPFYERLGFTVTADVEVPEGPRTWCMTRKPGA

SEQ ID NO: 4138 - protein, 896 aa, Artificial Sequence
  Synthetic Polypeptide
MALPVTALLLPLALLLHAARPACEVQLLESGGGLIQPGGSLRLSCAASGFTFSSHAMTWVRQAPGKGLEWVSAISGSGDYTHYADSVKGRFTISRDNSKNTVYLQMNSLRAEDSAVYYCAKDEDGGSLLGHRGQGTLVTVSSGTGGGGSGGGGSGGGGSEFGSLEIGWLLLQAPRWVFKEEDPIHLRCHSWKNTALHKVTYLQNGKGRKYFHHNSDFYIPKATLKDSGSYFCRGLVGSKNVSSETVNITITQGLAVSTISSFFPPGYQVSFCLVMVLLFAVDTGLYFSVKTNIRSSTRDWKDHKFKWRKDPQDKRAKRSGSGATNFSLLKQAGDVEENPGPTSATMDWIWRILFLVGAATGAHSGPEVQLVESGGGLVQAGGSLRLSCAASGRTFSMGWFRQAPGKEREFVAAITYSGGSPYYADSVKGRFTISRDNAKNTVYLQMNSLKPEDTAVYYCAANPTYGSDWNAENWGQGTQVTVSSGSGGGGSGGGGSGGGGSFEGSTRKSVRFYLVVSPASASTQTSWTPRDLVSSQTQTQSCVPPTAGARQAPESPSTIPVPSQPQNSTLRPGPAAPIALVPVFCGLLVAKSLVLSALLVWWGDIWWKTMMELRSLDTQKATCHLQQVTDLPWTSVSSPVEREILYHTVARTKISDDDDEHTLRAKRSGSGVKQTLNFDLLKLAGDVESNPGPSRGHMTEYKPTVRLATRDDVPRAVRTLAAAFADYPATRHTVDPDRHIERVTELQELFLTRVGLDIGKVWVADDGAAVAVWTTPESVEAGAVFAEIGPRMAELSGSRLAAQQQMEGLLAPHRPKEPAWFLATVGVSPDHQGKGLGSAVVLPGVEAAERAGVPAFLETSAPRNLPFYERLGFTVTADVEVPEGPRTWCMTRKPGA

SEQ ID NO: 4139 - protein, 1047 aa, Artificial Sequence
  Synthetic Polypeptide
MALPVTALLLPLALLLHAARPDIQMTQSPSSLSASVGDRVTITCKASDHINNWLAWYQQKPGQAPKLLIYGATTLETGVPSRFSGSGSGTDYTLTISSLQPEDFATYYCQQSWNTPWTFGQGTKLEIKRLEGQPKANPTVTLFPPSSEELQANKATLVCLISDFYPGAVTVAWKADGSPVKAGVETTKPSKQSNNKYAASSYLSLTPEQWKSHRSYSCQVTHEGSTVEKTVAPTECSGSIGWLLLQAPRWVFKEEDPIHLRCHSWKNTALHKVTYLQNGKGRKYFHHNSDFYIPKATLKDSGSYFCRGLVGSKNVSSETVNITITQGLAVSTISSFFPPGYQVSFCLVMVLLFAVDTGLYFSVKTNIRSSTRDWKDHKFKWRKDPQDKRAKRSGSGATNFSLLKQAGDVEENPGPTSMDWIWRILFLVGAATGAHSFEQVQLQQPGAELVKPGASVKMSCKASGYAFSSYWINWMKQKPGQGLEWIGQIYPGDGDTNYNGKFKGRATLTADTSSSTAYMQLSSLTSEDSAVYFCARSITTVVGCAMDYWGQGTSVTVSSTRASTKGPSVFPLAPSSKSTSGGTAALGCLVKDYFPEPVTVSWNSGALTSGVHTFPAVLQSSGLYSLSSVVTVPSSSLGTQTYICNVNHKPSNTKVDKRVEPKSCGTKSVRFYLVVSPASASTQTSWTPRDLVSSQTQTQSCVPPTAGARQAPESPSTIPVPSQPQNSTLRPGPAAPIALVPVFCGLLVAKSLVLSALLVWWGDIWWKTMMELRSLDTQKATCHLQQVTDLPWTSVSSPVEREILYHTVARTKISDDDDEHTLRAKRSGSGVKQTLNFDLLKLAGDVESNPGPSRGGIHTMATYEVLCEVARKLGTDDREVVLFLLNVFIPQPTLAQLIGALRALKEEGRLTFPLLAECLFRAGRRDLLRDLLHLDPRFLERHLAGTMSYFSPYQLTVLHVDGELCARDIRSLIFLSKDTIGSRSTPQTFLHWVYCMENLDLLGPTDVDALMSMLRSLSRVDLQRQVQTLMGLHLSGPSHSQHYRHTP

SEQ ID NO: 4140 - protein, 1100 aa, Artificial Sequence
  Synthetic Polypeptide
MALPVTALLLPLALLLHAARPDIQMTQSPSSLSASVGDRVTITCKASDHINNWLAWYQQKPGQAPKLLIYGATTLETGVPSRFSGSGSGTDYTLTISSLQPEDFATYYCQQSWNTPWTFGQGTKLEIKRLEGQPKANPTVTLFPPSSEELQANKATLVCLISDFYPGAVTVAWKADGSPVKAGVETTKPSKQSNNKYAASSYLSLTPEQWKSHRSYSCQVTHEGSTVEKTVAPTECSGSIGWLLLQAPRWVFKEEDPIHLRCHSWKNTALHKVTYLQNGKGRKYFHHNSDFYIPKATLKDSGSYFCRGLVGSKNVSSETVNITITQGLAVSTISSFFPPGYQVSFCLVMVLLFAVDTGLYFSVKTNIRSSTRDWKDHKFKWRKDPQDKRAKRSGSGATNFSLLKQAGDVEENPGPTSMDWIWRILFLVGAATGAHSFEQVQLQQPGAELVKPGASVKMSCKASGYAFSSYWINWMKQKPGQGLEWIGQIYPGDGDTNYNGKFKGRATLTADTSSSTAYMQLSSLTSEDSAVYFCARSITTVVGCAMDYWGQGTSVTVSSTRASTKGPSVFPLAPSSKSTSGGTAALGCLVKDYFPEPVTVSWNSGALTSGVHTFPAVLQSSGLYSLSSVVTVPSSSLGTQTYICNVNHKPSNTKVDKRVEPKSCGTKSVRFYLVVSPASASTQTSWTPRDLVSSQTQTQSCVPPTAGARQAPESPSTIPVPSQPQNSTLRPGPAAPIALVPVFCGLLVAKSLVLSALLVWWGDIWWKTMMELRSLDTQKATCHLQQVTDLPWTSVSSPVEREILYHTVARTKISDDDDEHTLRAKRSGSGVKQTLNFDLLKLAGDVESNPGPSRGGIHTMSDSKEVPSLPFLRHLLEELDSHEDSLLLFLCHDAAPGCTTVTQALCSLSQQRKLTLAALVEMLYVLQRMDLLKSRFGLSKEGAEQLLGTSFLTRYRKLMVCVGEELDSSELRALRLFACNLNPSLSTALSESSRFVELVLALENVGLVSPSSVSVLADMLRTLRRLDLCQQLVEYEQQEQARYRYCYAASPSLPVRTLRRGHGASEHEQLCMPVQESSDSPELLRTPVQESSSDSPEQTT

SEQ ID NO: 4141 - protein, 1055 aa, Artificial Sequence
  Synthetic Polypeptide
MALPVTALLLPLALLLHAARPDIQMTQSPSSLSASVGDRVTITCKASDHINNWLAWYQQKPGQAPKLLIYGATTLETGVPSRFSGSGSGTDYTLTISSLQPEDFATYYCQQSWNTPWTFGQGTKLEIKRLEGQPKANPTVTLFPPSSEELQANKATLVCLISDFYPGAVTVAWKADGSPVKAGVETTKPSKQSNNKYAASSYLSLTPEQWKSHRSYSCQVTHEGSTVEKTVAPTECSGSIGWLLLQAPRWVFKEEDPIHLRCHSWKNTALHKVTYLQNGKGRKYFHHNSDFYIPKATLKDSGSYFCRGLVGSKNVSSETVNITITQGLAVSTISSFFPPGYQVSFCLVMVLLFAVDTGLYFSVKTNIRSSTRDWKDHKFKWRKDPQDKRAKRSGSGATNFSLLKQAGDVEENPGPTSMDWIWRILFLVGAATGAHSFEQVQLQQPGAELVKPGASVKMSCKASGYAFSSYWINWMKQKPGQGLEWIGQIYPGDGDTNYNGKFKGRATLTADTSSSTAYMQLSSLTSEDSAVYFCARSITTVVGCAMDYWGQGTSVTVSSTRASTKGPSVFPLAPSSKSTSGGTAALGCLVKDYFPEPVTVSWNSGALTSGVHTFPAVLQSSGLYSLSSVVTVPSSSLGTQTYICNVNHKPSNTKVDKRVEPKSCGTKSVRFYLVVSPASASTQTSWTPRDLVSSQTQTQSCVPPTAGARQAPESPSTIPVPSQPQNSTLRPGPAAPIALVPVFCGLLVAKSLVLSALLVWWGDIWWKTMMELRSLDTQKATCHLQQVTDLPWTSVSSPVEREILYHTVARTKISDDDDEHTLRAKRSGSGVKQTLNFDLLKLAGDVESNPGPSRGHMTEYKPTVRLATRDDVPRAVRTLAAAFADYPATRHTVDPDRHIERVTELQELFLTRVGLDIGKVWVADDGAAVAVWTTPESVEAGAVFAEIGPRMAELSGSRLAAQQQMEGLLAPHRPKEPAWFLATVGVSPDHQGKGLGSAVVLPGVEAAERAGVPAFLETSAPRNLPFYERLGFTVTADVEVPEGPRTWCMTRKPGA

SEQ ID NO: 4142 - protein, 1192 aa, Artificial Sequence
  Synthetic Polypeptide
MALPVTALLLPLALLLHAARPEVQLVESGGGLVQAGGSLRLSCAASGRTFSMGWFRQAPGKEREFVAAITYSGGSPYYADSVKGRFTISRDNAKNTVYLQMNSLKPEDTAVYYCAANPTYGSDWNAENWGQGTQVTVSSGTGGGGSGGGGSGGGGSEFDIQMTQSPSSLSASVGDRVTITCKASDHINNWLAWYQQKPGQAPKLLIYGATTLETGVPSRFSGSGSGTDYTLTISSLQPEDFATYYCQQSWNTPWTFGQGTKLEIKRLEGQPKANPTVTLFPPSSEELQANKATLVCLISDFYPGAVTVAWKADGSPVKAGVETTKPSKQSNNKYAASSYLSLTPEQWKSHRSYSCQVTHEGSTVEKTVAPTECSGSIGWLLLQAPRWVFKEEDPIHLRCHSWKNTALHKVTYLQNGKGRKYFHHNSDFYIPKATLKDSGSYFCRGLVGSKNVSSETVNITITQGLAVSTISSFFPPGYQVSFCLVMVLLFAVDTGLYFSVKTNIRSSTRDWKDHKFKWRKDPQDKRAKRSGSGATNFSLLKQAGDVEENPGPTSMDWIWRILFLVGAATGAHSFEQVQLQQPGAELVKPGASVKMSCKASGYAFSSYWINWMKQKPGQGLEWIGQIYPGDGDTNYNGKFKGRATLTADTSSSTAYMQLSSLTSEDSAVYFCARSITTVVGCAMDYWGQGTSVTVSSTRASTKGPSVFPLAPSSKSTSGGTAALGCLVKDYFPEPVTVSWNSGALTSGVHTFPAVLQSSGLYSLSSVVTVPSSSLGTQTYICNVNHKPSNTKVDKRVEPKSCGTKSVRFYLVVSPASASTQTSWTPRDLVSSQTQTQSCVPPTAGARQAPESPSTIPVPSQPQNSTLRPGPAAPIALVPVFCGLLVAKSLVLSALLVWWGDIWWKTMMELRSLDTQKATCHLQQVTDLPWTSVSSPVEREILYHTVARTKISDDDDEHTLRAKRSGSGVKQTLNFDLLKLAGDVESNPGPSRGHMTEYKPTVRLATRDDVPRAVRTLAAAFADYPATRHTVDPDRHIERVTELQELFLTRVGLDIGKVWVADDGAAVAVWTTPESVEAGAVFAEIGPRMAELSGSRLAAQQQMEGLLAPHRPKEPAWFLATVGVSPDHQGKGLGSAVVLPGVEAAERAGVPAFLETSAPRNLPFYERLGFTVTADVEVPEGPRTWCMTRKPGA

SEQ ID NO: 4143 - protein, 1329 aa, Artificial Sequence
  Synthetic Polypeptide
MALPVTALLLPLALLLHAARPEVQLVESGGGLVQAGGSLRLSCAASGRTFSMGWFRQAPGKEREFVAAITYSGGSPYYADSVKGRFTISRDNAKNTVYLQMNSLKPEDTAVYYCAANPTYGSDWNAENWGQGTQVTVSSGTGGGGSGGGGSGGGGSEFDIQMTQSPSSLSASVGDRVTITCKASDHINNWLAWYQQKPGQAPKLLIYGATTLETGVPSRFSGSGSGTDYTLTISSLQPEDFATYYCQQSWNTPWTFGQGTKLEIKRLEGQPKANPTVTLFPPSSEELQANKATLVCLISDFYPGAVTVAWKADGSPVKAGVETTKPSKQSNNKYAASSYLSLTPEQWKSHRSYSCQVTHEGSTVEKTVAPTECSGSIGWLLLQAPRWVFKEEDPIHLRCHSWKNTALHKVTYLQNGKGRKYFHHNSDFYIPKATLKDSGSYFCRGLVGSKNVSSETVNITITQGLAVSTISSFFPPGYQVSFCLVMVLLFAVDTGLYFSVKTNIRSSTRDWKDHKFKWRKDPQDKRAKRSGSGATNFSLLKQAGDVEENPGPTSMDWIWRILFLVGAATGAHSGPEVQLVESGGGLVQAGGSLRLSCAASGRTFTMGWFRQAPGKEREFVAAISLSPTLAYYADSVKGRFTISRDNAKNTVVLQMNSLKPEDTALYYCAADRKSVMSIRPDYWGQGTQVTVSSGSGGGGSGGGGSGGGGSFEQVQLQQPGAELVKPGASVKMSCKASGYAFSSYWINWMKQKPGQGLEWIGQIYPGDGDTNYNGKFKGRATLTADTSSSTAYMQLSSLTSEDSAVYFCARSITTVVGCAMDYWGQGTSVTVSSTRASTKGPSVFPLAPSSKSTSGGTAALGCLVKDYFPEPVTVSWNSGALTSGVHTFPAVLQSSGLYSLSSVVTVPSSSLGTQTYICNVNHKPSNTKVDKRVEPKSCGTKSVRFYLVVSPASASTQTSWTPRDLVSSQTQTQSCVPPTAGARQAPESPSTIPVPSQPQNSTLRPGPAAPIALVPVFCGLLVAKSLVLSALLVWWGDIWWKTMMELRSLDTQKATCHLQQVTDLPWTSVSSPVEREILYHTVARTKISDDDDEHTLRAKRSGSGVKQTLNFDLLKLAGDVESNPGPSRGHMTEYKPTVRLATRDDVPRAVRTLAAAFADYPATRHTVDPDRHIERVTELQELFLTRVGLDIGKVWVADDGAAVAVWTTPESVEAGAVFAEIGPRMAELSGSRLAAQQQMEGLLAPHRPKEPAWFLATVGVSPDHQGKGLGSAVVLPGVEAAERAGVPAFLETSAPRNLPFYERLGFTVTADVEVPEGPRTWCMTRKPGA

SEQ ID NO: 4144 - protein, 1062 aa, Artificial Sequence
  Synthetic Polypeptide
MALPVTALLLPLALLLHAARPEVQLVESGGGLVQAGGSLRLSCAASGRTFSMGWFRQAPGKEREFVAAITYSGGSPYYADSVKGRFTISRDNAKNTVYLQMNSLKPEDTAVYYCAANPTYGSDWNAENWGQGTQVTVSSLEGQPKANPTVTLFPPSSEELQANKATLVCLISDFYPGAVTVAWKADGSPVKAGVETTKPSKQSNNKYAASSYLSLTPEQWKSHRSYSCQVTHEGSTVEKTVAPTECSGSIGWLLLQAPRWVFKEEDPIHLRCHSWKNTALHKVTYLQNGKGRKYFHHNSDFYIPKATLKDSGSYFCRGLVGSKNVSSETVNITITQGLAVSTISSFFPPGYQVSFCLVMVLLFAVDTGLYFSVKTNIRSSTRDWKDHKFKWRKDPQDKRAKRSGSGATNFSLLKQAGDVEENPGPTSMDWIWRILFLVGAATGAHSGPEVQLVESGGGLVQAGGSLRLSCAASGRTFTMGWFRQAPGKEREFVAAISLSPTLAYYADSVKGRFTISRDNAKNTVVLQMNSLKPEDTALYYCAADRKSVMSIRPDYWGQGTQVTVSSTRASTKGPSVFPLAPSSKSTSGGTAALGCLVKDYFPEPVTVSWNSGALTSGVHTFPAVLQSSGLYSLSSVVTVPSSSLGTQTYICNVNHKPSNTKVDKRVEPKSCGTKSVRFYLVVSPASASTQTSWTPRDLVSSQTQTQSCVPPTAGARQAPESPSTIPVPSQPQNSTLRPGPAAPIALVPVFCGLLVAKSLVLSALLVWWGDIWWKTMMELRSLDTQKATCHLQQVTDLPWTSVSSPVEREILYHTVARTKISDDDDEHTLRAKRSGSGVKQTLNFDLLKLAGDVESNPGPSRGHMTEYKPTVRLATRDDVPRAVRTLAAAFADYPATRHTVDPDRHIERVTELQELFLTRVGLDIGKVWVADDGAAVAVWTTPESVEAGAVFAEIGPRMAELSGSRLAAQQQMEGLLAPHRPKEPAWFLATVGVSPDHQGKGLGSAVVLPGVEAAERAGVPAFLETSAPRNLPFYERLGFTVTADVEVPEGPRTWCMTRKPGA

SEQ ID NO: 4145 - protein, 1070 aa, Artificial Sequence
  Synthetic Polypeptide
MALPVTALLLPLALLLHAARPDIQMTQSPSSLSASVGDRVTITCKASDHINNWLAWYQQKPGQAPKLLIYGATTLETGVPSRFSGSGSGTDYTLTISSLQPEDFATYYCQQSWNTPWTFGQGTKLEIKRLEDLKNVFPPEVAVFEPSEAEISHTQKATLVCLATGFYPDHVELSWWVNGKEVHSGVSTDPQPLKEQPALNDSRYCLSSRLRVSATFWQNPRNHFRCQVQFYGLSENDEWTQDRAKPVTQIVSAEAWGRADCGSIGWLLLQAPRWVFKEEDPIHLRCHSWKNTALHKVTYLQNGKGRKYFHHNSDFYIPKATLKDSGSYFCRGLVGSKNVSSETVNITITQGLAVSTISSFFPPGYQVSFCLVMVLLFAVDTGLYFSVKTNIRSSTRDWKDHKFKWRKDPQDKRAKRSGSGATNFSLLKQAGDVEENPGPTSMDWIWRILFLVGAATGAHSFEQVQLQQPGAELVKPGASVKMSCKASGYAFSSYWINWMKQKPGQGLEWIGQIYPGDGDTNYNGKFKGRATLTADTSSSTAYMQLSSLTSEDSAVYFCARSITTVVGCAMDYWGQGTSVTVSSTRIQNPDPAVYQLRDSKSSDKSVCLFTDFDSQTNVSQSKDSDVYITDKTVLDMRSMDFKSNSAVAWSNKSDFACANAFNNSIIPEDTFFPSPESSCGTKSVRFYLVVSPASASTQTSWTPRDLVSSQTQTQSCVPPTAGARQAPESPSTIPVPSQPQNSTLRPGPAAPIALVPVFCGLLVAKSLVLSALLVWWGDIWWKTMMELRSLDTQKATCHLQQVTDLPWTSVSSPVEREILYHTVARTKISDDDDEHTLRAKRSGSGVKQTLNFDLLKLAGDVESNPGPSRGHMTEYKPTVRLATRDDVPRAVRTLAAAFADYPATRHTVDPDRHIERVTELQELFLTRVGLDIGKVWVADDGAAVAVWTTPESVEAGAVFAEIGPRMAELSGSRLAAQQQMEGLLAPHRPKEPAWFLATVGVSPDHQGKGLGSAVVLPGVEAAERAGVPAFLETSAPRNLPFYERLGFTVTADVEVPEGPRTWCMTRKPGA

SEQ ID NO: 4146 - protein, 1207 aa, Artificial Sequence
  Synthetic Polypeptide
MALPVTALLLPLALLLHAARPEVQLVESGGGLVQAGGSLRLSCAASGRTFSMGWFRQAPGKEREFVAAITYSGGSPYYADSVKGRFTISRDNAKNTVYLQMNSLKPEDTAVYYCAANPTYGSDWNAENWGQGTQVTVSSGTGGGGSGGGGSGGGGSEFDIQMTQSPSSLSASVGDRVTITCKASDHINNWLAWYQQKPGQAPKLLIYGATTLETGVPSRFSGSGSGTDYTLTISSLQPEDFATYYCQQSWNTPWTFGQGTKLEIKRLEDLKNVFPPEVAVFEPSEAEISHTQKATLVCLATGFYPDHVELSWWVNGKEVHSGVSTDPQPLKEQPALNDSRYCLSSRLRVSATFWQNPRNHFRCQVQFYGLSENDEWTQDRAKPVTQIVSAEAWGRADCGSIGWLLLQAPRWVFKEEDPIHLRCHSWKNTALHKVTYLQNGKGRKYFHHNSDFYIPKATLKDSGSYFCRGLVGSKNVSSETVNITITQGLAVSTISSFFPPGYQVSFCLVMVLLFAVDTGLYFSVKTNIRSSTRDWKDHKFKWRKDPQDKRAKRSGSGATNFSLLKQAGDVEENPGPTSMDWIWRILFLVGAATGAHSFEQVQLQQPGAELVKPGASVKMSCKASGYAFSSYWINWMKQKPGQGLEWIGQIYPGDGDTNYNGKFKGRATLTADTSSSTAYMQLSSLTSEDSAVYFCARSITTVVGCAMDYWGQGTSVTVSSTRIQNPDPAVYQLRDSKSSDKSVCLFTDFDSQTNVSQSKDSDVYITDKTVLDMRSMDFKSNSAVAWSNKSDFACANAFNNSIIPEDTFFPSPESSCGTKSVRFYLVVSPASASTQTSWTPRDLVSSQTQTQSCVPPTAGARQAPESPSTIPVPSQPQNSTLRPGPAAPIALVPVFCGLLVAKSLVLSALLVWWGDIWWKTMMELRSLDTQKATCHLQQVTDLPWTSVSSPVEREILYHTVARTKISDDDDEHTLRAKRSGSGVKQTLNFDLLKLAGDVESNPGPSRGHMTEYKPTVRLATRDDVPRAVRTLAAAFADYPATRHTVDPDRHIERVTELQELFLTRVGLDIGKVWVADDGAAVAVWTTPESVEAGAVFAEIGPRMAELSGSRLAAQQQMEGLLAPHRPKEPAWFLATVGVSPDHQGKGLGSAVVLPGVEAAERAGVPAFLETSAPRNLPFYERLGFTVTADVEVPEGPRTWCMTRKPGA

SEQ ID NO: 4147 - protein, 1344 aa, Artificial Sequence
  Synthetic Polypeptide
MALPVTALLLPLALLLHAARPEVQLVESGGGLVQAGGSLRLSCAASGRTFSMGWFRQAPGKEREFVAAITYSGGSPYYADSVKGRFTISRDNAKNTVYLQMNSLKPEDTAVYYCAANPTYGSDWNAENWGQGTQVTVSSGTGGGGSGGGGSGGGGSEFDIQMTQSPSSLSASVGDRVTITCKASDHINNWLAWYQQKPGQAPKLLIYGATTLETGVPSRFSGSGSGTDYTLTISSLQPEDFATYYCQQSWNTPWTFGQGTKLEIKRLEDLKNVFPPEVAVFEPSEAEISHTQKATLVCLATGFYPDHVELSWWVNGKEVHSGVSTDPQPLKEQPALNDSRYCLSSRLRVSATFWQNPRNHFRCQVQFYGLSENDEWTQDRAKPVTQIVSAEAWGRADCGSIGWLLLQAPRWVFKEEDPIHLRCHSWKNTALHKVTYLQNGKGRKYFHHNSDFYIPKATLKDSGSYFCRGLVGSKNVSSETVNITITQGLAVSTISSFFPPGYQVSFCLVMVLLFAVDTGLYFSVKTNIRSSTRDWKDHKFKWRKDPQDKRAKRSGSGATNFSLLKQAGDVEENPGPTSMDWIWRILFLVGAATGAHSGPEVQLVESGGGLVQAGGSLRLSCAASGRTFTMGWFRQAPGKEREFVAAISLSPTLAYYADSVKGRFTISRDNAKNTVVLQMNSLKPEDTALYYCAADRKSVMSIRPDYWGQGTQVTVSSGSGGGGSGGGGSGGGGSFEQVQLQQPGAELVKPGASVKMSCKASGYAFSSYWINWMKQKPGQGLEWIGQIYPGDGDTNYNGKFKGRATLTADTSSSTAYMQLSSLTSEDSAVYFCARSITTVVGCAMDYWGQGTSVTVSSTRIQNPDPAVYQLRDSKSSDKSVCLFTDFDSQTNVSQSKDSDVYITDKTVLDMRSMDFKSNSAVAWSNKSDFACANAFNNSIIPEDTFFPSPESSCGTKSVRFYLVVSPASASTQTSWTPRDLVSSQTQTQSCVPPTAGARQAPESPSTIPVPSQPQNSTLRPGPAAPIALVPVFCGLLVAKSLVLSALLVWWGDIWWKTMMELRSLDTQKATCHLQQVTDLPWTSVSSPVEREILYHTVARTKISDDDDEHTLRAKRSGSGVKQTLNFDLLKLAGDVESNPGPSRGHMTEYKPTVRLATRDDVPRAVRTLAAAFADYPATRHTVDPDRHIERVTELQELFLTRVGLDIGKVWVADDGAAVAVWTTPESVEAGAVFAEIGPRMAELSGSRLAAQQQMEGLLAPHRPKEPAWFLATVGVSPDHQGKGLGSAVVLPGVEAAERAGVPAFLETSAPRNLPFYERLGFTVTADVEVPEGPRTWCMTRKPGA

SEQ ID NO: 4148 - protein, 1077 aa, Artificial Sequence
  Synthetic Polypeptide
MALPVTALLLPLALLLHAARPEVQLVESGGGLVQAGGSLRLSCAASGRTFSMGWFRQAPGKEREFVAAITYSGGSPYYADSVKGRFTISRDNAKNTVYLQMNSLKPEDTAVYYCAANPTYGSDWNAENWGQGTQVTVSSLEDLKNVFPPEVAVFEPSEAEISHTQKATLVCLATGFYPDHVELSWWVNGKEVHSGVSTDPQPLKEQPALNDSRYCLSSRLRVSATFWQNPRNHFRCQVQFYGLSENDEWTQDRAKPVTQIVSAEAWGRADCGSIGWLLLQAPRWVFKEEDPIHLRCHSWKNTALHKVTYLQNGKGRKYFHHNSDFYIPKATLKDSGSYFCRGLVGSKNVSSETVNITITQGLAVSTISSFFPPGYQVSFCLVMVLLFAVDTGLYFSVKTNIRSSTRDWKDHKFKWRKDPQDKRAKRSGSGATNFSLLKQAGDVEENPGPTSMDWIWRILFLVGAATGAHSGPEVQLVESGGGLVQAGGSLRLSCAASGRTFTMGWFRQAPGKEREFVAAISLSPTLAYYADSVKGRFTISRDNAKNTVVLQMNSLKPEDTALYYCAADRKSVMSIRPDYWGQGTQVTVSSTRIQNPDPAVYQLRDSKSSDKSVCLFTDFDSQTNVSQSKDSDVYITDKTVLDMRSMDFKSNSAVAWSNKSDFACANAFNNSIIPEDTFFPSPESSCGTKSVRFYLVVSPASASTQTSWTPRDLVSSQTQTQSCVPPTAGARQAPESPSTIPVPSQPQNSTLRPGPAAPIALVPVFCGLLVAKSLVLSALLVWWGDIWWKTMMELRSLDTQKATCHLQQVTDLPWTSVSSPVEREILYHTVARTKISDDDDEHTLRAKRSGSGVKQTLNFDLLKLAGDVESNPGPSRGHMTEYKPTVRLATRDDVPRAVRTLAAAFADYPATRHTVDPDRHIERVTELQELFLTRVGLDIGKVWVADDGAAVAVWTTPESVEAGAVFAEIGPRMAELSGSRLAAQQQMEGLLAPHRPKEPAWFLATVGVSPDHQGKGLGSAVVLPGVEAAERAGVPAFLETSAPRNLPFYERLGFTVTADVEVPEGPRTWCMTRKPGA

SEQ ID NO: 4149 - protein, 544 aa, Artificial Sequence; identical to SEQ ID NO: 4058
  Synthetic Polypeptide

SEQ ID NO: 4150 - protein, 849 aa, Artificial Sequence
  Synthetic Polypeptide
MALPVTALLLPLALLLHAARPDIQMTQSPSSLSASVGDRVTITCKASDHINNWLAWYQQKPGQAPKLLIYGATTLETGVPSRFSGSGSGTDYTLTISSLQPEDFATYYCQQSWNTPWTFGQGTKLEIKRLEKSVRFYLVVSPASASTQTSWTPRDLVSSQTQTQSCVPPTAGARQAPESPSTIPVPSQPQNSTLRPGPAAPIALVPVFCGLLVAKSLVLSALLVWWGDIWWKTMMELRSLDTQKATCHLQQVTDLPWTSVSSPVEREILYHTVARTKISDDDDEHTLRAKRSGSGATNFSLLKQAGDVEENPGPTSMDWIWRILFLVGAATGAHSFEQVQLQQPGAELVKPGASVKMSCKASGYAFSSYWINWMKQKPGQGLEWIGQIYPGDGDTNYNGKFKGRATLTADTSSSTAYMQLSSLTSEDSAVYFCARSITTVVGCAMDYWGQGTSVTVSSTRKSVRFYLVVSPASASTQTSWTPRDLVSSQTQTQSCVPPTAGARQAPESPSTIPVPSQPQNSTLRPGPAAPIALVPVFCGLLVAKSLVLSALLVWWGDIWWKTMMELRSLDTQKATCHLQQVTDLPWTSVSSPVEREILYHTVARTKISDDDDEHTLRAKRSGSGVKQTLNFDLLKLAGDVESNPGPSRGHMTEYKPTVRLATRDDVPRAVRTLAAAFADYPATRHTVDPDRHIERVTELQELFLTRVGLDIGKVWVADDGAAVAVWTTPESVEAGAVFAEIGPRMAELSGSRLAAQQQMEGLLAPHRPKEPAWFLATVGVSPDHQGKGLGSAVVLPGVEAAERAGVPAFLETSAPRNLPFYERLGFTVTADVEVPEGPRTWCMTRKPGA

SEQ ID NO: 4151 - protein, 903 aa, Artificial Sequence
  Synthetic Polypeptide
MALPVTALLLPLALLLHAARPACEVQLLESGGGLIQPGGSLRLSCAASGFTFSSHAMTWVRQAPGKGLEWVSAISGSGDYTHYADSVKGRFTISRDNSKNTVYLQMNSLRAEDSAVYYCAKDEDGGSLLGHRGQGTLVTVSSGTGGGGSGGGGSGGGGSEFGSLEKSVRFYLVVSPASASTQTSWTPRDLVSSQTQTQSCVPPTAGARQAPESPSTIPVPSQPQNSTLRPGPAAPIALVPVFCGLLVAKSLVLSALLVWWGDIWWKTMMELRSLDTQKATCHLQQVTDLPWTSVSSPVEREILYHTVARTKISDDDDEHTLRAKRSGSGATNFSLLKQAGDVEENPGPTSATMDWIWRILFLVGAATGAHSGPEVQLVESGGGLVQAGGSLRLSCAASGRTFSMGWFRQAPGKEREFVAAITYSGGSPYYADSVKGRFTISRDNAKNTVYLQMNSLKPEDTAVYYCAANPTYGSDWNAENWGQGTQVTVSSGSGGGGSGGGGSGGGGSFEGSTRKSVRFYLVVSPASASTQTSWTPRDLVSSQTQTQSCVPPTAGARQAPESPSTIPVPSQPQNSTLRPGPAAPIALVPVFCGLLVAKSLVLSALLVWWGDIWWKTMMELRSLDTQKATCHLQQVTDLPWTSVSSPVEREILYHTVARTKISDDDDEHTLRAKRSGSGVKQTLNFDLLKLAGDVESNPGPSRGHMTEYKPTVRLATRDDVPRAVRTLAAAFADYPATRHTVDPDRHIERVTELQELFLTRVGLDIGKVWVADDGAAVAVWTTPESVEAGAVFAEIGPRMAELSGSRLAAQQQMEGLLAPHRPKEPAWFLATVGVSPDHQGKGLGSAVVLPGVEAAERAGVPAFLETSAPRNLPFYERLGFTVTADVEVPEGPRTWCMTRKPGA

SEQ ID NO: 4152 - protein, 1054 aa, Artificial Sequence
  Synthetic Polypeptide
MALPVTALLLPLALLLHAARPDIQMTQSPSSLSASVGDRVTITCKASDHINNWLAWYQQKPGQAPKLLIYGATTLETGVPSRFSGSGSGTDYTLTISSLQPEDFATYYCQQSWNTPWTFGQGTKLEIKRLEGQPKANPTVTLFPPSSEELQANKATLVCLISDFYPGAVTVAWKADGSPVKAGVETTKPSKQSNNKYAASSYLSLTPEQWKSHRSYSCQVTHEGSTVEKTVAPTECSGSKSVRFYLVVSPASASTQTSWTPRDLVSSQTQTQSCVPPTAGARQAPESPSTIPVPSQPQNSTLRPGPAAPIALVPVFCGLLVAKSLVLSALLVWWGDIWWKTMMELRSLDTQKATCHLQQVTDLPWTSVSSPVEREILYHTVARTKISDDDDEHTLRAKRSGSGATNFSLLKQAGDVEENPGPTSMDWIWRILFLVGAATGAHSFEQVQLQQPGAELVKPGASVKMSCKASGYAFSSYWINWMKQKPGQGLEWIGQIYPGDGDTNYNGKFKGRATLTADTSSSTAYMQLSSLTSEDSAVYFCARSITTVVGCAMDYWGQGTSVTVSSTRASTKGPSVFPLAPSSKSTSGGTAALGCLVKDYFPEPVTVSWNSGALTSGVHTFPAVLQSSGLYSLSSVVTVPSSSLGTQTYICNVNHKPSNTKVDKRVEPKSCGTKSVRFYLVVSPASASTQTSWTPRDLVSSQTQTQSCVPPTAGARQAPESPSTIPVPSQPQNSTLRPGPAAPIALVPVFCGLLVAKSLVLSALLVWWGDIWWKTMMELRSLDTQKATCHLQQVTDLPWTSVSSPVEREILYHTVARTKISDDDDEHTLRAKRSGSGVKQTLNFDLLKLAGDVESNPGPSRGGIHTMATYEVLCEVARKLGTDDREVVLFLLNVFIPQPTLAQLIGALRALKEEGRLTFPLLAECLFRAGRRDLLRDLLHLDPRFLERHLAGTMSYFSPYQLTVLHVDGELCARDIRSLIFLSKDTIGSRSTPQTFLHWVYCMENLDLLGPTDVDALMSMLRSLSRVDLQRQVQTLMGLHLSGPSHSQHYRHTP

SEQ ID NO: 4153 - protein, 1107 aa, Artificial Sequence
  Synthetic Polypeptide
MALPVTALLLPLALLLHAARPDIQMTQSPSSLSASVGDRVTITCKASDHINNWLAWYQQKPGQAPKLLIYGATTLETGVPSRFSGSGSGTDYTLTISSLQPEDFATYYCQQSWNTPWTFGQGTKLEIKRLEGQPKANPTVTLFPPSSEELQANKATLVCLISDFYPGAVTVAWKADGSPVKAGVETTKPSKQSNNKYAASSYLSLTPEQWKSHRSYSCQVTHEGSTVEKTVAPTECSGSKSVRFYLVVSPASASTQTSWTPRDLVSSQTQTQSCVPPTAGARQAPESPSTIPVPSQPQNSTLRPGPAAPIALVPVFCGLLVAKSLVLSALLVWWGDIWWKTMMELRSLDTQKATCHLQQVTDLPWTSVSSPVEREILYHTVARTKISDDDDEHTLRAKRSGSGATNFSLLKQAGDVEENPGPTSMDWIWRILFLVGAATGAHSFEQVQLQQPGAELVKPGASVKMSCKASGYAFSSYWINWMKQKPGQGLEWIGQIYPGDGDTNYNGKFKGRATLTADTSSSTAYMQLSSLTSEDSAVYFCARSITTVVGCAMDYWGQGTSVTVSSTRASTKGPSVFPLAPSSKSTSGGTAALGCLVKDYFPEPVTVSWNSGALTSGVHTFPAVLQSSGLYSLSSVVTVPSSSLGTQTYICNVNHKPSNTKVDKRVEPKSCGTKSVRFYLVVSPASASTQTSWTPRDLVSSQTQTQSCVPPTAGARQAPESPSTIPVPSQPQNSTLRPGPAAPIALVPVFCGLLVAKSLVLSALLVWWGDIWWKTMMELRSLDTQKATCHLQQVTDLPWTSVSSPVEREILYHTVARTKISDDDDEHTLRAKRSGSGVKQTLNFDLLKLAGDVESNPGPSRGGIHTMSDSKEVPSLPFLRHLLEELDSHEDSLLLFLCHDAAPGCTTVTQALCSLSQQRKLTLAALVEMLYVLQRMDLLKSRFGLSKEGAEQLLGTSFLTRYRKLMVCVGEELDSSELRALRLFACNLNPSLSTALSESSRFVELVLALENVGLVSPSSVSVLADMLRTLRRLDLCQQLVEYEQQEQARYRYCYAASPSLPVRTLRRGHGASEHEQLCMPVQESSDSPELLRTPVQESSSDSPEQTT

SEQ ID NO: 4154 - protein, 1062 aa, Artificial Sequence
  Synthetic Polypeptide
MALPVTALLLPLALLLHAARPDIQMTQSPSSLSASVGDRVTITCKASDHINNWLAWYQQKPGQAPKLLIYGATTLETGVPSRFSGSGSGTDYTLTISSLQPEDFATYYCQQSWNTPWTFGQGTKLEIKRLEGQPKANPTVTLFPPSSEELQANKATLVCLISDFYPGAVTVAWKADGSPVKAGVETTKPSKQSNNKYAASSYLSLTPEQWKSHRSYSCQVTHEGSTVEKTVAPTECSGSKSVRFYLVVSPASASTQTSWTPRDLVSSQTQTQSCVPPTAGARQAPESPSTIPVPSQPQNSTLRPGPAAPIALVPVFCGLLVAKSLVLSALLVWWGDIWWKTMMELRSLDTQKATCHLQQVTDLPWTSVSSPVEREILYHTVARTKISDDDDEHTLRAKRSGSGATNFSLLKQAGDVEENPGPTSMDWIWRILFLVGAATGAHSFEQVQLQQPGAELVKPGASVKMSCKASGYAFSSYWINWMKQKPGQGLEWIGQIYPGDGDTNYNGKFKGRATLTADTSSSTAYMQLSSLTSEDSAVYFCARSITTVVGCAMDYWGQGTSVTVSSTRASTKGPSVFPLAPSSKSTSGGTAALGCLVKDYFPEPVTVSWNSGALTSGVHTFPAVLQSSGLYSLSSVVTVPSSSLGTQTYICNVNHKPSNTKVDKRVEPKSCGTKSVRFYLVVSPASASTQTSWTPRDLVSSQTQTQSCVPPTAGARQAPESPSTIPVPSQPQNSTLRPGPAAPIALVPVFCGLLVAKSLVLSALLVWWGDIWWKTMMELRSLDTQKATCHLQQVTDLPWTSVSSPVEREILYHTVARTKISDDDDEHTLRAKRSGSGVKQTLNFDLLKLAGDVESNPGPSRGHMTEYKPTVRLATRDDVPRAVRTLAAAFADYPATRHTVDPDRHIERVTELQELFLTRVGLDIGKVWVADDGAAVAVWTTPESVEAGAVFAEIGPRMAELSGSRLAAQQQMEGLLAPHRPKEPAWFLATVGVSPDHQGKGLGSAVVLPGVEAAERAGVPAFLETSAPRNLPFYERLGFTVTADVEVPEGPRTWCMTRKPGA

SEQ ID NO: 4155 - protein, 1199 aa, Artificial Sequence
  Synthetic Polypeptide
MALPVTALLLPLALLLHAARPEVQLVESGGGLVQAGGSLRLSCAASGRTFSMGWFRQAPGKEREFVAAITYSGGSPYYADSVKGRFTISRDNAKNTVYLQMNSLKPEDTAVYYCAANPTYGSDWNAENWGQGTQVTVSSGTGGGGSGGGGSGGGGSEFDIQMTQSPSSLSASVGDRVTITCKASDHINNWLAWYQQKPGQAPKLLIYGATTLETGVPSRFSGSGSGTDYTLTISSLQPEDFATYYCQQSWNTPWTFGQGTKLEIKRLEGQPKANPTVTLFPPSSEELQANKATLVCLISDFYPGAVTVAWKADGSPVKAGVETTKPSKQSNNKYAASSYLSLTPEQWKSHRSYSCQVTHEGSTVEKTVAPTECSGSKSVRFYLVVSPASASTQTSWTPRDLVSSQTQTQSCVPPTAGARQAPESPSTIPVPSQPQNSTLRPGPAAPIALVPVFCGLLVAKSLVLSALLVWWGDIWWKTMMELRSLDTQKATCHLQQVTDLPWTSVSSPVEREILYHTVARTKISDDDDEHTLRAKRSGSGATNFSLLKQAGDVEENPGPTSMDWIWRILFLVGAATGAHSFEQVQLQQPGAELVKPGASVKMSCKASGYAFSSYWINWMKQKPGQGLEWIGQIYPGDGDTNYNGKFKGRATLTADTSSSTAYMQLSSLTSEDSAVYFCARSITTVVGCAMDYWGQGTSVTVSSTRASTKGPSVFPLAPSSKSTSGGTAALGCLVKDYFPEPVTVSWNSGALTSGVHTFPAVLQSSGLYSLSSVVTVPSSSLGTQTYICNVNHKPSNTKVDKRVEPKSCGTKSVRFYLVVSPASASTQTSWTPRDLVSSQTQTQSCVPPTAGARQAPESPSTIPVPSQPQNSTLRPGPAAPIALVPVFCGLLVAKSLVLSALLVWWGDIWWKTMMELRSLDTQKATCHLQQVTDLPWTSVSSPVEREILYHTVARTKISDDDDEHTLRAKRSGSGVKQTLNFDLLKLAGDVESNPGPSRGHMTEYKPTVRLATRDDVPRAVRTLAAAFADYPATRHTVDPDRHIERVTELQELFLTRVGLDIGKVWVADDGAAVAVWTTPESVEAGAVFAEIGPRMAELSGSRLAAQQQMEGLLAPHRPKEPAWFLATVGVSPDHQGKGLGSAVVLPGVEAAERAGVPAFLETSAPRNLPFYERLGFTVTADVEVPEGPRTWCMTRKPGA

SEQ ID NO: 4156 - protein, 1336 aa, Artificial Sequence
  Synthetic Polypeptide
MALPVTALLLPLALLLHAARPEVQLVESGGGLVQAGGSLRLSCAASGRTFSMGWFRQAPGKEREFVAAITYSGGSPYYADSVKGRFTISRDNAKNTVYLQMNSLKPEDTAVYYCAANPTYGSDWNAENWGQGTQVTVSSGTGGGGSGGGGSGGGGSEFDIQMTQSPSSLSASVGDRVTITCKASDHINNWLAWYQQKPGQAPKLLIYGATTLETGVPSRFSGSGSGTDYTLTISSLQPEDFATYYCQQSWNTPWTFGQGTKLEIKRLEGQPKANPTVTLFPPSSEELQANKATLVCLISDFYPGAVTVAWKADGSPVKAGVETTKPSKQSNNKYAASSYLSLTPEQWKSHRSYSCQVTHEGSTVEKTVAPTECSGSKSVRFYLVVSPASASTQTSWTPRDLVSSQTQTQSCVPPTAGARQAPESPSTIPVPSQPQNSTLRPGPAAPIALVPVFCGLLVAKSLVLSALLVWWGDIWWKTMMELRSLDTQKATCHLQQVTDLPWTSVSSPVEREILYHTVARTKISDDDDEHTLRAKRSGSGATNFSLLKQAGDVEENPGPTSMDWIWRILFLVGAATGAHSGPEVQLVESGGGLVQAGGSLRLSCAASGRTFTMGWFRQAPGKEREFVAAISLSPTLAYYADSVKGRFTISRDNAKNTVVLQMNSLKPEDTALYYCAADRKSVMSIRPDYWGQGTQVTVSSGSGGGGSGGGGSGGGGSFEQVQLQQPGAELVKPGASVKMSCKASGYAFSSYWINWMKQKPGQGLEWIGQIYPGDGDTNYNGKFKGRATLTADTSSSTAYMQLSSLTSEDSAVYFCARSITTVVGCAMDYWGQGTSVTVSSTRASTKGPSVFPLAPSSKSTSGGTAALGCLVKDYFPEPVTVSWNSGALTSGVHTFPAVLQSSGLYSLSSVVTVPSSSLGTQTYICNVNHKPSNTKVDKRVEPKSCGTKSVRFYLVVSPASASTQTSWTPRDLVSSQTQTQSCVPPTAGARQAPESPSTIPVPSQPQNSTLRPGPAAPIALVPVFCGLLVAKSLVLSALLVWWGDIWWKTMMELRSLDTQKATCHLQQVTDLPWTSVSSPVEREILYHTVARTKISDDDDEHTLRAKRSGSGVKQTLNFDLLKLAGDVESNPGPSRGHMTEYKPTVRLATRDDVPRAVRTLAAAFADYPATRHTVDPDRHIERVTELQELFLTRVGLDIGKVWVADDGAAVAVWTTPESVEAGAVFAEIGPRMAELSGSRLAAQQQMEGLLAPHRPKEPAWFLATVGVSPDHQGKGLGSAVVLPGVEAAERAGVPAFLETSAPRNLPFYERLGFTVTADVEVPEGPRTWCMTRKPGA

SEQ ID NO: 4157 - protein, 1069 aa, Artificial Sequence
  Synthetic Polypeptide
MALPVTALLLPLALLLHAARPEVQLVESGGGLVQAGGSLRLSCAASGRTFSMGWFRQAPGKEREFVAAITYSGGSPYYADSVKGRFTISRDNAKNTVYLQMNSLKPEDTAVYYCAANPTYGSDWNAENWGQGTQVTVSSLEGQPKANPTVTLFPPSSEELQANKATLVCLISDFYPGAVTVAWKADGSPVKAGVETTKPSKQSNNKYAASSYLSLTPEQWKSHRSYSCQVTHEGSTVEKTVAPTECSGSKSVRFYLVVSPASASTQTSWTPRDLVSSQTQTQSCVPPTAGARQAPESPSTIPVPSQPQNSTLRPGPAAPIALVPVFCGLLVAKSLVLSALLVWWGDIWWKTMMELRSLDTQKATCHLQQVTDLPWTSVSSPVEREILYHTVARTKISDDDDEHTLRAKRSGSGATNFSLLKQAGDVEENPGPTSMDWIWRILFLVGAATGAHSGPEVQLVESGGGLVQAGGSLRLSCAASGRTFTMGWFRQAPGKEREFVAAISLSPTLAYYADSVKGRFTISRDNAKNTVVLQMNSLKPEDTALYYCAADRKSVMSIRPDYWGQGTQVTVSSTRASTKGPSVFPLAPSSKSTSGGTAALGCLVKDYFPEPVTVSWNSGALTSGVHTFPAVLQSSGLYSLSSVVTVPSSSLGTQTYICNVNHKPSNTKVDKRVEPKSCGTKSVRFYLVVSPASASTQTSWTPRDLVSSQTQTQSCVPPTAGARQAPESPSTIPVPSQPQNSTLRPGPAAPIALVPVFCGLLVAKSLVLSALLVWWGDIWWKTMMELRSLDTQKATCHLQQVTDLPWTSVSSPVEREILYHTVARTKISDDDDEHTLRAKRSGSGVKQTLNFDLLKLAGDVESNPGPSRGHMTEYKPTVRLATRDDVPRAVRTLAAAFADYPATRHTVDPDRHIERVTELQELFLTRVGLDIGKVWVADDGAAVAVWTTPESVEAGAVFAEIGPRMAELSGSRLAAQQQMEGLLAPHRPKEPAWFLATVGVSPDHQGKGLGSAVVLPGVEAAERAGVPAFLETSAPRNLPFYERLGFTVTADVEVPEGPRTWCMTRKPGA

SEQ ID NO: 4158 - protein, 1077 aa, Artificial Sequence
  Synthetic Polypeptide
MALPVTALLLPLALLLHAARPDIQMTQSPSSLSASVGDRVTITCKASDHINNWLAWYQQKPGQAPKLLIYGATTLETGVPSRFSGSGSGTDYTLTISSLQPEDFATYYCQQSWNTPWTFGQGTKLEIKRLEDLKNVFPPEVAVFEPSEAEISHTQKATLVCLATGFYPDHVELSWWVNGKEVHSGVSTDPQPLKEQPALNDSRYCLSSRLRVSATFWQNPRNHFRCQVQFYGLSENDEWTQDRAKPVTQIVSAEAWGRADCGSKSVRFYLVVSPASASTQTSWTPRDLVSSQTQTQSCVPPTAGARQAPESPSTIPVPSQPQNSTLRPGPAAPIALVPVFCGLLVAKSLVLSALLVWWGDIWWKTMMELRSLDTQKATCHLQQVTDLPWTSVSSPVEREILYHTVARTKISDDDDEHTLRAKRSGSGATNFSLLKQAGDVEENPGPTSMDWIWRILFLVGAATGAHSFEQVQLQQPGAELVKPGASVKMSCKASGYAFSSYWINWMKQKPGQGLEWIGQIYPGDGDTNYNGKFKGRATLTADTSSSTAYMQLSSLTSEDSAVYFCARSITTVVGCAMDYWGQGTSVTVSSTRIQNPDPAVYQLRDSKSSDKSVCLFTDFDSQTNVSQSKDSDVYITDKTVLDMRSMDFKSNSAVAWSNKSDFACANAFNNSIIPEDTFFPSPESSCGTKSVRFYLVVSPASASTQTSWTPRDLVSSQTQTQSCVPPTAGARQAPESPSTIPVPSQPQNSTLRPGPAAPIALVPVFCGLLVAKSLVLSALLVWWGDIWWKTMMELRSLDTQKATCHLQQVTDLPWTSVSSPVEREILYHTVARTKISDDDDEHTLRAKRSGSGVKQTLNFDLLKLAGDVESNPGPSRGHMTEYKPTVRLATRDDVPRAVRTLAAAFADYPATRHTVDPDRHIERVTELQELFLTRVGLDIGKVWVADDGAAVAVWTTPESVEAGAVFAEIGPRMAELSGSRLAAQQQMEGLLAPHRPKEPAWFLATVGVSPDHQGKGLGSAVVLPGVEAAERAGVPAFLETSAPRNLPFYERLGFTVTADVEVPEGPRTWCMTRKPGA

SEQ ID NO: 4159 - protein, 1214 aa, Artificial Sequence
  Synthetic Polypeptide
MALPVTALLLPLALLLHAARPEVQLVESGGGLVQAGGSLRLSCAASGRTFSMGWFRQAPGKEREFVAAITYSGGSPYYADSVKGRFTISRDNAKNTVYLQMNSLKPEDTAVYYCAANPTYGSDWNAENWGQGTQVTVSSGTGGGGSGGGGSGGGGSEFDIQMTQSPSSLSASVGDRVTITCKASDHINNWLAWYQQKPGQAPKLLIYGATTLETGVPSRFSGSGSGTDYTLTISSLQPEDFATYYCQQSWNTPWTFGQGTKLEIKRLEDLKNVFPPEVAVFEPSEAEISHTQKATLVCLATGFYPDHVELSWWVNGKEVHSGVSTDPQPLKEQPALNDSRYCLSSRLRVSATFWQNPRNHFRCQVQFYGLSENDEWTQDRAKPVTQIVSAEAWGRADCGSKSVRFYLVVSPASASTQTSWTPRDLVSSQTQTQSCVPPTAGARQAPESPSTIPVPSQPQNSTLRPGPAAPIALVPVFCGLLVAKSLVLSALLVWWGDIWWKTMMELRSLDTQKATCHLQQVTDLPWTSVSSPVEREILYHTVARTKISDDDDEHTLRAKRSGSGATNFSLLKQAGDVEENPGPTSMDWIWRILFLVGAATGAHSFEQVQLQQPGAELVKPGASVKMSCKASGYAFSSYWINWMKQKPGQGLEWIGQIYPGDGDTNYNGKFKGRATLTADTSSSTAYMQLSSLTSEDSAVYFCARSITTVVGCAMDYWGQGTSVTVSSTRIQNPDPAVYQLRDSKSSDKSVCLFTDFDSQTNVSQSKDSDVYITDKTVLDMRSMDFKSNSAVAWSNKSDFACANAFNNSIIPEDTFFPSPESSCGTKSVRFYLVVSPASASTQTSWTPRDLVSSQTQTQSCVPPTAGARQAPESPSTIPVPSQPQNSTLRPGPAAPIALVPVFCGLLVAKSLVLSALLVWWGDIWWKTMMELRSLDTQKATCHLQQVTDLPWTSVSSPVEREILYHTVARTKISDDDDEHTLRAKRSGSGVKQTLNFDLLKLAGDVESNPGPSRGHMTEYKPTVRLATRDDVPRAVRTLAAAFADYPATRHTVDPDRHIERVTELQELFLTRVGLDIGKVWVADDGAAVAVWTTPESVEAGAVFAEIGPRMAELSGSRLAAQQQMEGLLAPHRPKEPAWFLATVGVSPDHQGKGLGSAVVLPGVEAAERAGVPAFLETSAPRNLPFYERLGFTVTADVEVPEGPRTWCMTRKPGA

SEQ ID NO: 4160 - protein, 1351 aa, Artificial Sequence
  Synthetic Polypeptide
MALPVTALLLPLALLLHAARPEVQLVESGGGLVQAGGSLRLSCAASGRTFSMGWFRQAPGKEREFVAAITYSGGSPYYADSVKGRFTISRDNAKNTVYLQMNSLKPEDTAVYYCAANPTYGSDWNAENWGQGTQVTVSSGTGGGGSGGGGSGGGGSEFDIQMTQSPSSLSASVGDRVTITCKASDHINNWLAWYQQKPGQAPKLLIYGATTLETGVPSRFSGSGSGTDYTLTISSLQPEDFATYYCQQSWNTPWTFGQGTKLEIKRLEDLKNVFPPEVAVFEPSEAEISHTQKATLVCLATGFYPDHVELSWWVNGKEVHSGVSTDPQPLKEQPALNDSRYCLSSRLRVSATFWQNPRNHFRCQVQFYGLSENDEWTQDRAKPVTQIVSAEAWGRADCGSKSVRFYLVVSPASASTQTSWTPRDLVSSQTQTQSCVPPTAGARQAPESPSTIPVPSQPQNSTLRPGPAAPIALVPVFCGLLVAKSLVLSALLVWWGDIWWKTMMELRSLDTQKATCHLQQVTDLPWTSVSSPVEREILYHTVARTKISDDDDEHTLRAKRSGSGATNFSLLKQAGDVEENPGPTSMDWIWRILFLVGAATGAHSGPEVQLVESGGGLVQAGGSLRLSCAASGRTFTMGWFRQAPGKEREFVAAISLSPTLAYYADSVKGRFTISRDNAKNTVVLQMNSLKPEDTALYYCAADRKSVMSIRPDYWGQGTQVTVSSGSGGGGSGGGGSGGGGSFEQVQLQQPGAELVKPGASVKMSCKASGYAFSSYWINWMKQKPGQGLEWIGQIYPGDGDTNYNGKFKGRATLTADTSSSTAYMQLSSLTSEDSAVYFCARSITTVVGCAMDYWGQGTSVTVSSTRIQNPDPAVYQLRDSKSSDKSVCLFTDFDSQTNVSQSKDSDVYITDKTVLDMRSMDFKSNSAVAWSNKSDFACANAFNNSIIPEDTFFPSPESSCGTKSVRFYLVVSPASASTQTSWTPRDLVSSQTQTQSCVPPTAGARQAPESPSTIPVPSQPQNSTLRPGPAAPIALVPVFCGLLVAKSLVLSALLVWWGDIWWKTMMELRSLDTQKATCHLQQVTDLPWTSVSSPVEREILYHTVARTKISDDDDEHTLRAKRSGSGVKQTLNFDLLKLAGDVESNPGPSRGHMTEYKPTVRLATRDDVPRAVRTLAAAFADYPATRHTVDPDRHIERVTELQELFLTRVGLDIGKVWVADDGAAVAVWTTPESVEAGAVFAEIGPRMAELSGSRLAAQQQMEGLLAPHRPKEPAWFLATVGVSPDHQGKGLGSAVVLPGVEAAERAGVPAFLETSAPRNLPFYERLGFTVTADVEVPEGPRTWCMTRKPGA

SEQ ID NO: 4161 - protein, 1084 aa, Artificial Sequence
  Synthetic Polypeptide
MALPVTALLLPLALLLHAARPEVQLVESGGGLVQAGGSLRLSCAASGRTFSMGWFRQAPGKEREFVAAITYSGGSPYYADSVKGRFTISRDNAKNTVYLQMNSLKPEDTAVYYCAANPTYGSDWNAENWGQGTQVTVSSLEDLKNVFPPEVAVFEPSEAEISHTQKATLVCLATGFYPDHVELSWWVNGKEVHSGVSTDPQPLKEQPALNDSRYCLSSRLRVSATFWQNPRNHFRCQVQFYGLSENDEWTQDRAKPVTQIVSAEAWGRADCGSKSVRFYLVVSPASASTQTSWTPRDLVSSQTQTQSCVPPTAGARQAPESPSTIPVPSQPQNSTLRPGPAAPIALVPVFCGLLVAKSLVLSALLVWWGDIWWKTMMELRSLDTQKATCHLQQVTDLPWTSVSSPVEREILYHTVARTKISDDDDEHTLRAKRSGSGATNFSLLKQAGDVEENPGPTSMDWIWRILFLVGAATGAHSGPEVQLVESGGGLVQAGGSLRLSCAASGRTFTMGWFRQAPGKEREFVAAISLSPTLAYYADSVKGRFTISRDNAKNTVVLQMNSLKPEDTALYYCAADRKSVMSIRPDYWGQGTQVTVSSTRIQNPDPAVYQLRDSKSSDKSVCLFTDFDSQTNVSQSKDSDVYITDKTVLDMRSMDFKSNSAVAWSNKSDFACANAFNNSIIPEDTFFPSPESSCGTKSVRFYLVVSPASASTQTSWTPRDLVSSQTQTQSCVPPTAGARQAPESPSTIPVPSQPQNSTLRPGPAAPIALVPVFCGLLVAKSLVLSALLVWWGDIWWKTMMELRSLDTQKATCHLQQVTDLPWTSVSSPVEREILYHTVARTKISDDDDEHTLRAKRSGSGVKQTLNFDLLKLAGDVESNPGPSRGHMTEYKPTVRLATRDDVPRAVRTLAAAFADYPATRHTVDPDRHIERVTELQELFLTRVGLDIGKVWVADDGAAVAVWTTPESVEAGAVFAEIGPRMAELSGSRLAAQQQMEGLLAPHRPKEPAWFLATVGVSPDHQGKGLGSAVVLPGVEAAERAGVPAFLETSAPRNLPFYERLGFTVTADVEVPEGPRTWCMTRKPGA

SEQ ID NO: 4162 - protein, 551 aa, Artificial Sequence
  Synthetic Polypeptide
MALPVTALLLPLALLLHAARPACEVQLLESGGGLIQPGGSLRLSCAASGFTFSSHAMTWVRQAPGKGLEWVSAISGSGDYTHYADSVKGRFTISRDNSKNTVYLQMNSLRAEDSAVYYCAKDEDGGSLLGHRGQGTLVTVSSGTGGGGSGGGGSGGGGSEFGSLEKSVRFYLVVSPASASTQTSWTPRDLVSSQTQTQSCVPPTAGARQAPESPSTIPVPSQPQNSTLRPGPAAPIALVPVFCGLLVAKSLVLSALLVWWGDIWWKTMMELRSLDTQKATCHLQQVTDLPWTSVSSPVEREILYHTVARTKISDDDDEHTLRAKRSGSGATNFSLLKQAGDVEENPGPTRGHMTEYKPTVRLATRDDVPRAVRTLAAAFADYPATRHTVDPDRHIERVTELQELFLTRVGLDIGKVWVADDGAAVAVWTTPESVEAGAVFAEIGPRMAELSGSRLAAQQQMEGLLAPHRPKEPAWFLATVGVSPDHQGKGLGSAVVLPGVEAAERAGVPAFLETSAPRNLPFYERLGFTVTADVEVPEGPRTWCMTRKPGA

SEQ ID NO: 4163 - protein, 969 aa, Artificial Sequence
  Synthetic Polypeptide
MALPVTALLLPLALLLHAARPDIQMTQSPSSLSASVGDRVTITCKASDHINNWLAWYQQKPGQAPKLLIYGATTLETGVPSRFSGSGSGTDYTLTISSLQPEDFATYYCQQSWNTPWTFGQGTKLEIKRLEIGWLLLQAPRWVFKEEDPIHLRCHSWKNTALHKVTYLQNGKGRKYFHHNSDFYIPKATLKDSGSYFCRGLVGSKNVSSETVNITITQGLAVSTISSFFPPGYQVSFCLVMVLLFAVDTGLYFSVKTNIRSSTRDWKDHKFKWRKDPQDKRAKRSGSGATNFSLLKQAGDVEENPGPTSMDWIWRILFLVGAATGAHSFEQVQLQQPGAELVKPGASVKMSCKASGYAFSSYWINWMKQKPGQGLEWIGQIYPGDGDTNYNGKFKGRATLTADTSSSTAYMQLSSLTSEDSAVYFCARSITTVVGCAMDYWGQGTSVTVSSTRQQQTLPKPFIWAEPHFMVPKEKQVTICCQGNYGAVEYQLHFEGSLFAVDRPKPPERINKVQFYIPDMNSRMAGQYSCIYRVGELWSEPSNLLDLVVTEMYDTPTLSVHPGPEVISGEKVTFYCRLDTATSMFLLLKEGRSSHVQRGYGKVQAEFPLGPVTTAHRGTYRCFGSYNNHAWSFPSEPVKLLVTGDIENTSLAPEDPTFPADTWGTYLLTTETGLQKDHALWDHTAQNLLRMGLAFLVLVALVWFLVEDWLSRKRTRERASRASTWEGRRRLNTQTLRAKRSGSGVKQTLNFDLLKLAGDVESNPGPSRGHMTEYKPTVRLATRDDVPRAVRTLAAAFADYPATRHTVDPDRHIERVTELQELFLTRVGLDIGKVWVADDGAAVAVWTTPESVEAGAVFAEIGPRMAELSGSRLAAQQQMEGLLAPHRPKEPAWFLATVGVSPDHQGKGLGSAVVLPGVEAAERAGVPAFLETSAPRNLPFYERLGFTVTADVEVPEGPRTWCMTRKPGA

SEQ ID NO: 4164 - protein, 1023 aa, Artificial Sequence
  Synthetic Polypeptide
MALPVTALLLPLALLLHAARPACEVQLLESGGGLIQPGGSLRLSCAASGFTFSSHAMTWVRQAPGKGLEWVSAISGSGDYTHYADSVKGRFTISRDNSKNTVYLQMNSLRAEDSAVYYCAKDEDGGSLLGHRGQGTLVTVSSGTGGGGSGGGGSGGGGSEFGSLEIGWLLLQAPRWVFKEEDPIHLRCHSWKNTALHKVTYLQNGKGRKYFHHNSDFYIPKATLKDSGSYFCRGLVGSKNVSSETVNITITQGLAVSTISSFFPPGYQVSFCLVMVLLFAVDTGLYFSVKTNIRSSTRDWKDHKFKWRKDPQDKRAKRSGSGATNFSLLKQAGDVEENPGPTSATMDWIWRILFLVGAATGAHSGPEVQLVESGGGLVQAGGSLRLSCAASGRTFSMGWFRQAPGKEREFVAAITYSGGSPYYADSVKGRFTISRDNAKNTVYLQMNSLKPEDTAVYYCAANPTYGSDWNAENWGQGTQVTVSSGSGGGGSGGGGSGGGGSFEGSTRQQQTLPKPFIWAEPHFMVPKEKQVTICCQGNYGAVEYQLHFEGSLFAVDRPKPPERINKVQFYIPDMNSRMAGQYSCIYRVGELWSEPSNLLDLVVTEMYDTPTLSVHPGPEVISGEKVTFYCRLDTATSMFLLLKEGRSSHVQRGYGKVQAEFPLGPVTTAHRGTYRCFGSYNNHAWSFPSEPVKLLVTGDIENTSLAPEDPTFPADTWGTYLLTTETGLQKDHALWDHTAQNLLRMGLAFLVLVALVWFLVEDWLSRKRTRERASRASTWEGRRRLNTQTLRAKRSGSGVKQTLNFDLLKLAGDVESNPGPSRGHMTEYKPTVRLATRDDVPRAVRTLAAAFADYPATRHTVDPDRHIERVTELQELFLTRVGLDIGKVWVADDGAAVAVWTTPESVEAGAVFAEIGPRMAELSGSRLAAQQQMEGLLAPHRPKEPAWFLATVGVSPDHQGKGLGSAVVLPGVEAAERAGVPAFLETSAPRNLPFYERLGFTVTADVEVPEGPRTWCMTRKPGA

SEQ ID NO: 4165 - protein, 1174 aa, Artificial Sequence
  Synthetic Polypeptide
MALPVTALLLPLALLLHAARPDIQMTQSPSSLSASVGDRVTITCKASDHINNWLAWYQQKPGQAPKLLIYGATTLETGVPSRFSGSGSGTDYTLTISSLQPEDFATYYCQQSWNTPWTFGQGTKLEIKRLEGQPKANPTVTLFPPSSEELQANKATLVCLISDFYPGAVTVAWKADGSPVKAGVETTKPSKQSNNKYAASSYLSLTPEQWKSHRSYSCQVTHEGSTVEKTVAPTECSGSIGWLLLQAPRWVFKEEDPIHLRCHSWKNTALHKVTYLQNGKGRKYFHHNSDFYIPKATLKDSGSYFCRGLVGSKNVSSETVNITITQGLAVSTISSFFPPGYQVSFCLVMVLLFAVDTGLYFSVKTNIRSSTRDWKDHKFKWRKDPQDKRAKRSGSGATNFSLLKQAGDVEENPGPTSMDWIWRILFLVGAATGAHSFEQVQLQQPGAELVKPGASVKMSCKASGYAFSSYWINWMKQKPGQGLEWIGQIYPGDGDTNYNGKFKGRATLTADTSSSTAYMQLSSLTSEDSAVYFCARSITTVVGCAMDYWGQGTSVTVSSTRASTKGPSVFPLAPSSKSTSGGTAALGCLVKDYFPEPVTVSWNSGALTSGVHTFPAVLQSSGLYSLSSVVTVPSSSLGTQTYICNVNHKPSNTKVDKRVEPKSCGTQQQTLPKPFIWAEPHFMVPKEKQVTICCQGNYGAVEYQLHFEGSLFAVDRPKPPERINKVQFYIPDMNSRMAGQYSCIYRVGELWSEPSNLLDLVVTEMYDTPTLSVHPGPEVISGEKVTFYCRLDTATSMFLLLKEGRSSHVQRGYGKVQAEFPLGPVTTAHRGTYRCFGSYNNHAWSFPSEPVKLLVTGDIENTSLAPEDPTFPADTWGTYLLTTETGLQKDHALWDHTAQNLLRMGLAFLVLVALVWFLVEDWLSRKRTRERASRASTWEGRRRLNTQTLRAKRSGSGVKQTLNFDLLKLAGDVESNPGPSRGGIHTMATYEVLCEVARKLGTDDREVVLFLLNVFIPQPTLAQLIGALRALKEEGRLTFPLLAECLFRAGRRDLLRDLLHLDPRFLERHLAGTMSYFSPYQLTVLHVDGELCARDIRSLIFLSKDTIGSRSTPQTFLHWVYCMENLDLLGPTDVDALMSMLRSLSRVDLQRQVQTLMGLHLSGPSHSQHYRHTP

SEQ ID NO: 4166 - protein, 1227 aa, Artificial Sequence
  Synthetic Polypeptide
MALPVTALLLPLALLLHAARPDIQMTQSPSSLSASVGDRVTITCKASDHINNWLAWYQQKPGQAPKLLIYGATTLETGVPSRFSGSGSGTDYTLTISSLQPEDFATYYCQQSWNTPWTFGQGTKLEIKRLEGQPKANPTVTLFPPSSEELQANKATLVCLISDFYPGAVTVAWKADGSPVKAGVETTKPSKQSNNKYAASSYLSLTPEQWKSHRSYSCQVTHEGSTVEKTVAPTECSGSIGWLLLQAPRWVFKEEDPIHLRCHSWKNTALHKVTYLQNGKGRKYFHHNSDFYIPKATLKDSGSYFCRGLVGSKNVSSETVNITITQGLAVSTISSFFPPGYQVSFCLVMVLLFAVDTGLYFSVKTNIRSSTRDWKDHKFKWRKDPQDKRAKRSGSGATNFSLLKQAGDVEENPGPTSMDWIWRILFLVGAATGAHSFEQVQLQQPGAELVKPGASVKMSCKASGYAFSSYWINWMKQKPGQGLEWIGQIYPGDGDTNYNGKFKGRATLTADTSSSTAYMQLSSLTSEDSAVYFCARSITTVVGCAMDYWGQGTSVTVSSTRASTKGPSVFPLAPSSKSTSGGTAALGCLVKDYFPEPVTVSWNSGALTSGVHTFPAVLQSSGLYSLSSVVTVPSSSLGTQTYICNVNHKPSNTKVDKRVEPKSCGTQQQTLPKPFIWAEPHFMVPKEKQVTICCQGNYGAVEYQLHFEGSLFAVDRPKPPERINKVQFYIPDMNSRMAGQYSCIYRVGELWSEPSNLLDLVVTEMYDTPTLSVHPGPEVISGEKVTFYCRLDTATSMFLLLKEGRSSHVQRGYGKVQAEFPLGPVTTAHRGTYRCFGSYNNHAWSFPSEPVKLLVTGDIENTSLAPEDPTFPADTWGTYLLTTETGLQKDHALWDHTAQNLLRMGLAFLVLVALVWFLVEDWLSRKRTRERASRASTWEGRRRLNTQTLRAKRSGSGVKQTLNFDLLKLAGDVESNPGPSRGGIHTMSDSKEVPSLPFLRHLLEELDSHEDSLLLFLCHDAAPGCTTVTQALCSLSQQRKLTLAALVEMLYVLQRMDLLKSRFGLSKEGAEQLLGTSFLTRYRKLMVCVGEELDSSELRALRLFACNLNPSLSTALSESSRFVELVLALENVGLVSPSSVSVLADMLRTLRRLDLCQQLVEYEQQEQARYRYCYAASPSLPVRTLRRGHGASEHEQLCMPVQESSDSPELLRTPVQESSSDSPEQTT

SEQ ID NO: 4167 - protein, 1182 aa, Artificial Sequence
  Synthetic Polypeptide
MALPVTALLLPLALLLHAARPDIQMTQSPSSLSASVGDRVTITCKASDHINNWLAWYQQKPGQAPKLLIYGATTLETGVPSRFSGSGSGTDYTLTISSLQPEDFATYYCQQSWNTPWTFGQGTKLEIKRLEGQPKANPTVTLFPPSSEELQANKATLVCLISDFYPGAVTVAWKADGSPVKAGVETTKPSKQSNNKYAASSYLSLTPEQWKSHRSYSCQVTHEGSTVEKTVAPTECSGSIGWLLLQAPRWVFKEEDPIHLRCHSWKNTALHKVTYLQNGKGRKYFHHNSDFYIPKATLKDSGSYFCRGLVGSKNVSSETVNITITQGLAVSTISSFFPPGYQVSFCLVMVLLFAVDTGLYFSVKTNIRSSTRDWKDHKFKWRKDPQDKRAKRSGSGATNFSLLKQAGDVEENPGPTSMDWIWRILFLVGAATGAHSFEQVQLQQPGAELVKPGASVKMSCKASGYAFSSYWINWMKQKPGQGLEWIGQIYPGDGDTNYNGKFKGRATLTADTSSSTAYMQLSSLTSEDSAVYFCARSITTVVGCAMDYWGQGTSVTVSSTRASTKGPSVFPLAPSSKSTSGGTAALGCLVKDYFPEPVTVSWNSGALTSGVHTFPAVLQSSGLYSLSSVVTVPSSSLGTQTYICNVNHKPSNTKVDKRVEPKSCGTQQQTLPKPFIWAEPHFMVPKEKQVTICCQGNYGAVEYQLHFEGSLFAVDRPKPPERINKVQFYIPDMNSRMAGQYSCIYRVGELWSEPSNLLDLVVTEMYDTPTLSVHPGPEVISGEKVTFYCRLDTATSMFLLLKEGRSSHVQRGYGKVQAEFPLGPVTTAHRGTYRCFGSYNNHAWSFPSEPVKLLVTGDIENTSLAPEDPTFPADTWGTYLLTTETGLQKDHALWDHTAQNLLRMGLAFLVLVALVWFLVEDWLSRKRTRERASRASTWEGRRRLNTQTLRAKRSGSGVKQTLNFDLLKLAGDVESNPGPSRGHMTEYKPTVRLATRDDVPRAVRTLAAAFADYPATRHTVDPDRHIERVTELQELFLTRVGLDIGKVWVADDGAAVAVWTTPESVEAGAVFAEIGPRMAELSGSRLAAQQQMEGLLAPHRPKEPAWFLATVGVSPDHQGKGLGSAVVLPGVEAAERAGVPAFLETSAPRNLPFYERLGFTVTADVEVPEGPRTWCMTRKPGA

SEQ ID NO: 4168 - protein, 1319 aa, Artificial Sequence
  Synthetic Polypeptide
MALPVTALLLPLALLLHAARPEVQLVESGGGLVQAGGSLRLSCAASGRTFSMGWFRQAPGKEREFVAAITYSGGSPYYADSVKGRFTISRDNAKNTVYLQMNSLKPEDTAVYYCAANPTYGSDWNAENWGQGTQVTVSSGTGGGGSGGGGSGGGGSEFDIQMTQSPSSLSASVGDRVTITCKASDHINNWLAWYQQKPGQAPKLLIYGATTLETGVPSRFSGSGSGTDYTLTISSLQPEDFATYYCQQSWNTPWTFGQGTKLEIKRLEGQPKANPTVTLFPPSSEELQANKATLVCLISDFYPGAVTVAWKADGSPVKAGVETTKPSKQSNNKYAASSYLSLTPEQWKSHRSYSCQVTHEGSTVEKTVAPTECSGSIGWLLLQAPRWVFKEEDPIHLRCHSWKNTALHKVTYLQNGKGRKYFHHNSDFYIPKATLKDSGSYFCRGLVGSKNVSSETVNITITQGLAVSTISSFFPPGYQVSFCLVMVLLFAVDTGLYFSVKTNIRSSTRDWKDHKFKWRKDPQDKRAKRSGSGATNFSLLKQAGDVEENPGPTSMDWIWRILFLVGAATGAHSFEQVQLQQPGAELVKPGASVKMSCKASGYAFSSYWINWMKQKPGQGLEWIGQIYPGDGDTNYNGKFKGRATLTADTSSSTAYMQLSSLTSEDSAVYFCARSITTVVGCAMDYWGQGTSVTVSSTRASTKGPSVFPLAPSSKSTSGGTAALGCLVKDYFPEPVTVSWNSGALTSGVHTFPAVLQSSGLYSLSSVVTVPSSSLGTQTYICNVNHKPSNTKVDKRVEPKSCGTQQQTLPKPFIWAEPHFMVPKEKQVTICCQGNYGAVEYQLHFEGSLFAVDRPKPPERINKVQFYIPDMNSRMAGQYSCIYRVGELWSEPSNLLDLVVTEMYDTPTLSVHPGPEVISGEKVTFYCRLDTATSMFLLLKEGRSSHVQRGYGKVQAEFPLGPVTTAHRGTYRCFGSYNNHAWSFPSEPVKLLVTGDIENTSLAPEDPTFPADTWGTYLLTTETGLQKDHALWDHTAQNLLRMGLAFLVLVALVWFLVEDWLSRKRTRERASRASTWEGRRRLNTQTLRAKRSGSGVKQTLNFDLLKLAGDVESNPGPSRGHMTEYKPTVRLATRDDVPRAVRTLAAAFADYPATRHTVDPDRHIERVTELQELFLTRVGLDIGKVWVADDGAAVAVWTTPESVEAGAVFAEIGPRMAELSGSRLAAQQQMEGLLAPHRPKEPAWFLATVGVSPDHQGKGLGSAVVLPGVEAAERAGVPAFLETSAPRNLPFYERLGFTVTADVEVPEGPRTWCMTRKPGA

SEQ ID NO: 4169 - protein, 1456 aa, Artificial Sequence
  Synthetic Polypeptide
MALPVTALLLPLALLLHAARPEVQLVESGGGLVQAGGSLRLSCAASGRTFSMGWFRQAPGKEREFVAAITYSGGSPYYADSVKGRFTISRDNAKNTVYLQMNSLKPEDTAVYYCAANPTYGSDWNAENWGQGTQVTVSSGTGGGGSGGGGSGGGGSEFDIQMTQSPSSLSASVGDRVTITCKASDHINNWLAWYQQKPGQAPKLLIYGATTLETGVPSRFSGSGSGTDYTLTISSLQPEDFATYYCQQSWNTPWTFGQGTKLEIKRLEGQPKANPTVTLFPPSSEELQANKATLVCLISDFYPGAVTVAWKADGSPVKAGVETTKPSKQSNNKYAASSYLSLTPEQWKSHRSYSCQVTHEGSTVEKTVAPTECSGSIGWLLLQAPRWVFKEEDPIHLRCHSWKNTALHKVTYLQNGKGRKYFHHNSDFYIPKATLKDSGSYFCRGLVGSKNVSSETVNITITQGLAVSTISSFFPPGYQVSFCLVMVLLFAVDTGLYFSVKTNIRSSTRDWKDHKFKWRKDPQDKRAKRSGSGATNFSLLKQAGDVEENPGPTSMDWIWRILFLVGAATGAHSGPEVQLVESGGGLVQAGGSLRLSCAASGRTFTMGWFRQAPGKEREFVAAISLSPTLAYYADSVKGRFTISRDNAKNTVVLQMNSLKPEDTALYYCAADRKSVMSIRPDYWGQGTQVTVSSGSGGGGSGGGGSGGGGSFEQVQLQQPGAELVKPGASVKMSCKASGYAFSSYWINWMKQKPGQGLEWIGQIYPGDGDTNYNGKFKGRATLTADTSSSTAYMQLSSLTSEDSAVYFCARSITTVVGCAMDYWGQGTSVTVSSTRASTKGPSVFPLAPSSKSTSGGTAALGCLVKDYFPEPVTVSWNSGALTSGVHTFPAVLQSSGLYSLSSVVTVPSSSLGTQTYICNVNHKPSNTKVDKRVEPKSCGTQQQTLPKPFIWAEPHFMVPKEKQVTICCQGNYGAVEYQLHFEGSLFAVDRPKPPERINKVQFYIPDMNSRMAGQYSCIYRVGELWSEPSNLLDLVVTEMYDTPTLSVHPGPEVISGEKVTFYCRLDTATSMFLLLKEGRSSHVQRGYGKVQAEFPLGPVTTAHRGTYRCFGSYNNHAWSFPSEPVKLLVTGDIENTSLAPEDPTFPADTWGTYLLTTETGLQKDHALWDHTAQNLLRMGLAFLVLVALVWFLVEDWLSRKRTRERASRASTWEGRRRLNTQTLRAKRSGSGVKQTLNFDLLKLAGDVESNPGPSRGHMTEYKPTVRLATRDDVPRAVRTLAAAFADYPATRHTVDPDRHIERVTELQELFLTRVGLDIGKVWVADDGAAVAVWTTPESVEAGAVFAEIGPRMAELSGSRLAAQQQMEGLLAPHRPKEPAWFLATVGVSPDHQGKGLGSAVVLPGVEAAERAGVPAFLETSAPRNLPFYERLGFTVTADVEVPEGPRTWCMTRKPGA

SEQ ID NO: 4170 - protein, 1189 aa, Artificial Sequence
  Synthetic Polypeptide
MALPVTALLLPLALLLHAARPEVQLVESGGGLVQAGGSLRLSCAASGRTFSMGWFRQAPGKEREFVAAITYSGGSPYYADSVKGRFTISRDNAKNTVYLQMNSLKPEDTAVYYCAANPTYGSDWNAENWGQGTQVTVSSLEGQPKANPTVTLFPPSSEELQANKATLVCLISDFYPGAVTVAWKADGSPVKAGVETTKPSKQSNNKYAASSYLSLTPEQWKSHRSYSCQVTHEGSTVEKTVAPTECSGSIGWLLLQAPRWVFKEEDPIHLRCHSWKNTALHKVTYLQNGKGRKYFHHNSDFYIPKATLKDSGSYFCRGLVGSKNVSSETVNITITQGLAVSTISSFFPPGYQVSFCLVMVLLFAVDTGLYFSVKTNIRSSTRDWKDHKFKWRKDPQDKRAKRSGSGATNFSLLKQAGDVEENPGPTSMDWIWRILFLVGAATGAHSGPEVQLVESGGGLVQAGGSLRLSCAASGRTFTMGWFRQAPGKEREFVAAISLSPTLAYYADSVKGRFTISRDNAKNTVVLQMNSLKPEDTALYYCAADRKSVMSIRPDYWGQGTQVTVSSTRASTKGPSVFPLAPSSKSTSGGTAALGCLVKDYFPEPVTVSWNSGALTSGVHTFPAVLQSSGLYSLSSVVTVPSSSLGTQTYICNVNHKPSNTKVDKRVEPKSCGTQQQTLPKPFIWAEPHFMVPKEKQVTICCQGNYGAVEYQLHFEGSLFAVDRPKPPERINKVQFYIPDMNSRMAGQYSCIYRVGELWSEPSNLLDLVVTEMYDTPTLSVHPGPEVISGEKVTFYCRLDTATSMFLLLKEGRSSHVQRGYGKVQAEFPLGPVTTAHRGTYRCFGSYNNHAWSFPSEPVKLLVTGDIENTSLAPEDPTFPADTWGTYLLTTETGLQKDHALWDHTAQNLLRMGLAFLVLVALVWFLVEDWLSRKRTRERASRASTWEGRRRLNTQTLRAKRSGSGVKQTLNFDLLKLAGDVESNPGPSRGHMTEYKPTVRLATRDDVPRAVRTLAAAFADYPATRHTVDPDRHIERVTELQELFLTRVGLDIGKVWVADDGAAVAVWTTPESVEAGAVFAEIGPRMAELSGSRLAAQQQMEGLLAPHRPKEPAWFLATVGVSPDHQGKGLGSAVVLPGVEAAERAGVPAFLETSAPRNLPFYERLGFTVTADVEVPEGPRTWCMTRKPGA

SEQ ID NO: 4171 - protein, 1197 aa, Artificial Sequence
  Synthetic Polypeptide
MALPVTALLLPLALLLHAARPDIQMTQSPSSLSASVGDRVTITCKASDHINNWLAWYQQKPGQAPKLLIYGATTLETGVPSRFSGSGSGTDYTLTISSLQPEDFATYYCQQSWNTPWTFGQGTKLEIKRLEDLKNVFPPEVAVFEPSEAEISHTQKATLVCLATGFYPDHVELSWWVNGKEVHSGVSTDPQPLKEQPALNDSRYCLSSRLRVSATFWQNPRNHFRCQVQFYGLSENDEWTQDRAKPVTQIVSAEAWGRADCGSIGWLLLQAPRWVFKEEDPIHLRCHSWKNTALHKVTYLQNGKGRKYFHHNSDFYIPKATLKDSGSYFCRGLVGSKNVSSETVNITITQGLAVSTISSFFPPGYQVSFCLVMVLLFAVDTGLYFSVKTNIRSSTRDWKDHKFKWRKDPQDKRAKRSGSGATNFSLLKQAGDVEENPGPTSMDWIWRILFLVGAATGAHSFEQVQLQQPGAELVKPGASVKMSCKASGYAFSSYWINWMKQKPGQGLEWIGQIYPGDGDTNYNGKFKGRATLTADTSSSTAYMQLSSLTSEDSAVYFCARSITTVVGCAMDYWGQGTSVTVSSTRIQNPDPAVYQLRDSKSSDKSVCLFTDFDSQTNVSQSKDSDVYITDKTVLDMRSMDFKSNSAVAWSNKSDFACANAFNNSIIPEDTFFPSPESSCGTQQQTLPKPFIWAEPHFMVPKEKQVTICCQGNYGAVEYQLHFEGSLFAVDRPKPPERINKVQFYIPDMNSRMAGQYSCIYRVGELWSEPSNLLDLVVTEMYDTPTLSVHPGPEVISGEKVTFYCRLDTATSMFLLLKEGRSSHVQRGYGKVQAEFPLGPVTTAHRGTYRCFGSYNNHAWSFPSEPVKLLVTGDIENTSLAPEDPTFPADTWGTYLLTTETGLQKDHALWDHTAQNLLRMGLAFLVLVALVWFLVEDWLSRKRTRERASRASTWEGRRRLNTQTLRAKRSGSGVKQTLNFDLLKLAGDVESNPGPSRGHMTEYKPTVRLATRDDVPRAVRTLAAAFADYPATRHTVDPDRHIERVTELQELFLTRVGLDIGKVWVADDGAAVAVWTTPESVEAGAVFAEIGPRMAELSGSRLAAQQQMEGLLAPHRPKEPAWFLATVGVSPDHQGKGLGSAVVLPGVEAAERAGVPAFLETSAPRNLPFYERLGFTVTADVEVPEGPRTWCMTRKPGA

SEQ ID NO: 4172 - protein, 1334 aa, Artificial Sequence
  Synthetic Polypeptide
MALPVTALLLPLALLLHAARPEVQLVESGGGLVQAGGSLRLSCAASGRTFSMGWFRQAPGKEREFVAAITYSGGSPYYADSVKGRFTISRDNAKNTVYLQMNSLKPEDTAVYYCAANPTYGSDWNAENWGQGTQVTVSSGTGGGGSGGGGSGGGGSEFDIQMTQSPSSLSASVGDRVTITCKASDHINNWLAWYQQKPGQAPKLLIYGATTLETGVPSRFSGSGSGTDYTLTISSLQPEDFATYYCQQSWNTPWTFGQGTKLEIKRLEDLKNVFPPEVAVFEPSEAEISHTQKATLVCLATGFYPDHVELSWWVNGKEVHSGVSTDPQPLKEQPALNDSRYCLSSRLRVSATFWQNPRNHFRCQVQFYGLSENDEWTQDRAKPVTQIVSAEAWGRADCGSIGWLLLQAPRWVFKEEDPIHLRCHSWKNTALHKVTYLQNGKGRKYFHHNSDFYIPKATLKDSGSYFCRGLVGSKNVSSETVNITITQGLAVSTISSFFPPGYQVSFCLVMVLLFAVDTGLYFSVKTNIRSSTRDWKDHKFKWRKDPQDKRAKRSGSGATNFSLLKQAGDVEENPGPTSMDWIWRILFLVGAATGAHSFEQVQLQQPGAELVKPGASVKMSCKASGYAFSSYWINWMKQKPGQGLEWIGQIYPGDGDTNYNGKFKGRATLTADTSSSTAYMQLSSLTSEDSAVYFCARSITTVVGCAMDYWGQGTSVTVSSTRIQNPDPAVYQLRDSKSSDKSVCLFTDFDSQTNVSQSKDSDVYITDKTVLDMRSMDFKSNSAVAWSNKSDFACANAFNNSIIPEDTFFPSPESSCGTQQQTLPKPFIWAEPHFMVPKEKQVTICCQGNYGAVEYQLHFEGSLFAVDRPKPPERINKVQFYIPDMNSRMAGQYSCIYRVGELWSEPSNLLDLVVTEMYDTPTLSVHPGPEVISGEKVTFYCRLDTATSMFLLLKEGRSSHVQRGYGKVQAEFPLGPVTTAHRGTYRCFGSYNNHAWSFPSEPVKLLVTGDIENTSLAPEDPTFPADTWGTYLLTTETGLQKDHALWDHTAQNLLRMGLAFLVLVALVWFLVEDWLSRKRTRERASRASTWEGRRRLNTQTLRAKRSGSGVKQTLNFDLLKLAGDVESNPGPSRGHMTEYKPTVRLATRDDVPRAVRTLAAAFADYPATRHTVDPDRHIERVTELQELFLTRVGLDIGKVWVADDGAAVAVWTTPESVEAGAVFAEIGPRMAELSGSRLAAQQQMEGLLAPHRPKEPAWFLATVGVSPDHQGKGLGSAVVLPGVEAAERAGVPAFLETSAPRNLPFYERLGFTVTADVEVPEGPRTWCMTRKPGA

SEQ ID NO: 4173 - protein, 1471 aa, Artificial Sequence
  Synthetic Polypeptide
MALPVTALLLPLALLLHAARPEVQLVESGGGLVQAGGSLRLSCAASGRTFSMGWFRQAPGKEREFVAAITYSGGSPYYADSVKGRFTISRDNAKNTVYLQMNSLKPEDTAVYYCAANPTYGSDWNAENWGQGTQVTVSSGTGGGGSGGGGSGGGGSEFDIQMTQSPSSLSASVGDRVTITCKASDHINNWLAWYQQKPGQAPKLLIYGATTLETGVPSRFSGSGSGTDYTLTISSLQPEDFATYYCQQSWNTPWTFGQGTKLEIKRLEDLKNVFPPEVAVFEPSEAEISHTQKATLVCLATGFYPDHVELSWWVNGKEVHSGVSTDPQPLKEQPALNDSRYCLSSRLRVSATFWQNPRNHFRCQVQFYGLSENDEWTQDRAKPVTQIVSAEAWGRADCGSIGWLLLQAPRWVFKEEDPIHLRCHSWKNTALHKVTYLQNGKGRKYFHHNSDFYIPKATLKDSGSYFCRGLVGSKNVSSETVNITITQGLAVSTISSFFPPGYQVSFCLVMVLLFAVDTGLYFSVKTNIRSSTRDWKDHKFKWRKDPQDKRAKRSGSGATNFSLLKQAGDVEENPGPTSMDWIWRILFLVGAATGAHSGPEVQLVESGGGLVQAGGSLRLSCAASGRTFTMGWFRQAPGKEREFVAAISLSPTLAYYADSVKGRFTISRDNAKNTVVLQMNSLKPEDTALYYCAADRKSVMSIRPDYWGQGTQVTVSSGSGGGGSGGGGSGGGGSFEQVQLQQPGAELVKPGASVKMSCKASGYAFSSYWINWMKQKPGQGLEWIGQIYPGDGDTNYNGKFKGRATLTADTSSSTAYMQLSSLTSEDSAVYFCARSITTVVGCAMDYWGQGTSVTVSSTRIQNPDPAVYQLRDSKSSDKSVCLFTDFDSQTNVSQSKDSDVYITDKTVLDMRSMDFKSNSAVAWSNKSDFACANAFNNSIIPEDTFFPSPESSCGTQQQTLPKPFIWAEPHFMVPKEKQVTICCQGNYGAVEYQLHFEGSLFAVDRPKPPERINKVQFYIPDMNSRMAGQYSCIYRVGELWSEPSNLLDLVVTEMYDTPTLSVHPGPEVISGEKVTFYCRLDTATSMFLLLKEGRSSHVQRGYGKVQAEFPLGPVTTAHRGTYRCFGSYNNHAWSFPSEPVKLLVTGDIENTSLAPEDPTFPADTWGTYLLTTETGLQKDHALWDHTAQNLLRMGLAFLVLVALVWFLVEDWLSRKRTRERASRASTWEGRRRLNTQTLRAKRSGSGVKQTLNFDLLKLAGDVESNPGPSRGHMTEYKPTVRLATRDDVPRAVRTLAAAFADYPATRHTVDPDRHIERVTELQELFLTRVGLDIGKVWVADDGAAVAVWTTPESVEAGAVFAEIGPRMAELSGSRLAAQQQMEGLLAPHRPKEPAWFLATVGVSPDHQGKGLGSAVVLPGVEAAERAGVPAFLETSAPRNLPFYERLGFTVTADVEVPEGPRTWCMTRKPGA

SEQ ID NO: 4174 - protein, 1204 aa, Artificial Sequence
  Synthetic Polypeptide
MALPVTALLLPLALLLHAARPEVQLVESGGGLVQAGGSLRLSCAASGRTFSMGWFRQAPGKEREFVAAITYSGGSPYYADSVKGRFTISRDNAKNTVYLQMNSLKPEDTAVYYCAANPTYGSDWNAENWGQGTQVTVSSLEDLKNVFPPEVAVFEPSEAEISHTQKATLVCLATGFYPDHVELSWWVNGKEVHSGVSTDPQPLKEQPALNDSRYCLSSRLRVSATFWQNPRNHFRCQVQFYGLSENDEWTQDRAKPVTQIVSAEAWGRADCGSIGWLLLQAPRWVFKEEDPIHLRCHSWKNTALHKVTYLQNGKGRKYFHHNSDFYIPKATLKDSGSYFCRGLVGSKNVSSETVNITITQGLAVSTISSFFPPGYQVSFCLVMVLLFAVDTGLYFSVKTNIRSSTRDWKDHKFKWRKDPQDKRAKRSGSGATNFSLLKQAGDVEENPGPTSMDWIWRILFLVGAATGAHSGPEVQLVESGGGLVQAGGSLRLSCAASGRTFTMGWFRQAPGKEREFVAAISLSPTLAYYADSVKGRFTISRDNAKNTVVLQMNSLKPEDTALYYCAADRKSVMSIRPDYWGQGTQVTVSSTRIQNPDPAVYQLRDSKSSDKSVCLFTDFDSQTNVSQSKDSDVYITDKTVLDMRSMDFKSNSAVAWSNKSDFACANAFNNSIIPEDTFFPSPESSCGTQQQTLPKPFIWAEPHFMVPKEKQVTICCQGNYGAVEYQLHFEGSLFAVDRPKPPERINKVQFYIPDMNSRMAGQYSCIYRVGELWSEPSNLLDLVVTEMYDTPTLSVHPGPEVISGEKVTFYCRLDTATSMFLLLKEGRSSHVQRGYGKVQAEFPLGPVTTAHRGTYRCFGSYNNHAWSFPSEPVKLLVTGDIENTSLAPEDPTFPADTWGTYLLTTETGLQKDHALWDHTAQNLLRMGLAFLVLVALVWFLVEDWLSRKRTRERASRASTWEGRRRLNTQTLRAKRSGSGVKQTLNFDLLKLAGDVESNPGPSRGHMTEYKPTVRLATRDDVPRAVRTLAAAFADYPATRHTVDPDRHIERVTELQELFLTRVGLDIGKVWVADDGAAVAVWTTPESVEAGAVFAEIGPRMAELSGSRLAAQQQMEGLLAPHRPKEPAWFLATVGVSPDHQGKGLGSAVVLPGVEAAERAGVPAFLETSAPRNLPFYERLGFTVTADVEVPEGPRTWCMTRKPGA

SEQ ID NO: 4175 - protein, 544 aa, Artificial Sequence; identical to SEQ ID NO: 4058
  Synthetic Polypeptide

SEQ ID NO: 4176 - protein, 1103 aa, Artificial Sequence
  Synthetic Polypeptide
MALPVTALLLPLALLLHAARPDIQMTQSPSSLSASVGDRVTITCKASDHINNWLAWYQQKPGQAPKLLIYGATTLETGVPSRFSGSGSGTDYTLTISSLQPEDFATYYCQQSWNTPWTFGQGTKLEIKRLEQQQTLPKPFIWAEPHFMVPKEKQVTICCQGNYGAVEYQLHFEGSLFAVDRPKPPERINKVQFYIPDMNSRMAGQYSCIYRVGELWSEPSNLLDLVVTEMYDTPTLSVHPGPEVISGEKVTFYCRLDTATSMFLLLKEGRSSHVQRGYGKVQAEFPLGPVTTAHRGTYRCFGSYNNHAWSFPSEPVKLLVTGDIENTSLAPEDPTFPADTWGTYLLTTETGLQKDHALWDHTAQNLLRMGLAFLVLVALVWFLVEDWLSRKRTRERASRASTWEGRRRLNTQTLRAKRSGSGATNFSLLKQAGDVEENPGPTSMDWIWRILFLVGAATGAHSFEQVQLQQPGAELVKPGASVKMSCKASGYAFSSYWINWMKQKPGQGLEWIGQIYPGDGDTNYNGKFKGRATLTADTSSSTAYMQLSSLTSEDSAVYFCARSITTVVGCAMDYWGQGTSVTVSSTRQQQTLPKPFIWAEPHFMVPKEKQVTICCQGNYGAVEYQLHFEGSLFAVDRPKPPERINKVQFYIPDMNSRMAGQYSCIYRVGELWSEPSNLLDLVVTEMYDTPTLSVHPGPEVISGEKVTFYCRLDTATSMFLLLKEGRSSHVQRGYGKVQAEFPLGPVTTAHRGTYRCFGSYNNHAWSFPSEPVKLLVTGDIENTSLAPEDPTFPADTWGTYLLTTETGLQKDHALWDHTAQNLLRMGLAFLVLVALVWFLVEDWLSRKRTRERASRASTWEGRRRLNTQTLRAKRSGSGVKQTLNFDLLKLAGDVESNPGPSRGHMTEYKPTVRLATRDDVPRAVRTLAAAFADYPATRHTVDPDRHIERVTELQELFLTRVGLDIGKVWVADDGAAVAVWTTPESVEAGAVFAEIGPRMAELSGSRLAAQQQMEGLLAPHRPKEPAWFLATVGVSPDHQGKGLGSAVVLPGVEAAERAGVPAFLETSAPRNLPFYERLGFTVTADVEVPEGPRTWCMTRKPGA

SEQ ID NO: 4177 - protein, 1157 aa, Artificial Sequence
  Synthetic Polypeptide
MALPVTALLLPLALLLHAARPACEVQLLESGGGLIQPGGSLRLSCAASGFTFSSHAMTWVRQAPGKGLEWVSAISGSGDYTHYADSVKGRFTISRDNSKNTVYLQMNSLRAEDSAVYYCAKDEDGGSLLGHRGQGTLVTVSSGTGGGGSGGGGSGGGGSEFGSLEQQQTLPKPFIWAEPHFMVPKEKQVTICCQGNYGAVEYQLHFEGSLFAVDRPKPPERINKVQFYIPDMNSRMAGQYSCIYRVGELWSEPSNLLDLVVTEMYDTPTLSVHPGPEVISGEKVTFYCRLDTATSMFLLLKEGRSSHVQRGYGKVQAEFPLGPVTTAHRGTYRCFGSYNNHAWSFPSEPVKLLVTGDIENTSLAPEDPTFPADTWGTYLLTTETGLQKDHALWDHTAQNLLRMGLAFLVLVALVWFLVEDWLSRKRTRERASRASTWEGRRRLNTQTLRAKRSGSGATNFSLLKQAGDVEENPGPTSATMDWIWRILFLVGAATGAHSGPEVQLVESGGGLVQAGGSLRLSCAASGRTFSMGWFRQAPGKEREFVAAITYSGGSPYYADSVKGRFTISRDNAKNTVYLQMNSLKPEDTAVYYCAANPTYGSDWNAENWGQGTQVTVSSGSGGGGSGGGGSGGGGSFEGSTRQQQTLPKPFIWAEPHFMVPKEKQVTICCQGNYGAVEYQLHFEGSLFAVDRPKPPERINKVQFYIPDMNSRMAGQYSCIYRVGELWSEPSNLLDLVVTEMYDTPTLSVHPGPEVISGEKVTFYCRLDTATSMFLLLKEGRSSHVQRGYGKVQAEFPLGPVTTAHRGTYRCFGSYNNHAWSFPSEPVKLLVTGDIENTSLAPEDPTFPADTWGTYLLTTETGLQKDHALWDHTAQNLLRMGLAFLVLVALVWFLVEDWLSRKRTRERASRASTWEGRRRLNTQTLRAKRSGSGVKQTLNFDLLKLAGDVESNPGPSRGHMTEYKPTVRLATRDDVPRAVRTLAAAFADYPATRHTVDPDRHIERVTELQELFLTRVGLDIGKVWVADDGAAVAVWTTPESVEAGAVFAEIGPRMAELSGSRLAAQQQMEGLLAPHRPKEPAWFLATVGVSPDHQGKGLGSAVVLPGVEAAERAGVPAFLETSAPRNLPFYERLGFTVTADVEVPEGPRTWCMTRKPGA

SEQ ID NO: 4178 - protein, 1308 aa, Artificial Sequence
  Synthetic Polypeptide
MALPVTALLLPLALLLHAARPDIQMTQSPSSLSASVGDRVTITCKASDHINNWLAWYQQKPGQAPKLLIYGATTLETGVPSRFSGSGSGTDYTLTISSLQPEDFATYYCQQSWNTPWTFGQGTKLEIKRLEGQPKANPTVTLFPPSSEELQANKATLVCLISDFYPGAVTVAWKADGSPVKAGVETTKPSKQSNNKYAASSYLSLTPEQWKSHRSYSCQVTHEGSTVEKTVAPTECSGSQQQTLPKPFIWAEPHFMVPKEKQVTICCQGNYGAVEYQLHFEGSLFAVDRPKPPERINKVQFYIPDMNSRMAGQYSCIYRVGELWSEPSNLLDLVVTEMYDTPTLSVHPGPEVISGEKVTFYCRLDTATSMFLLLKEGRSSHVQRGYGKVQAEFPLGPVTTAHRGTYRCFGSYNNHAWSFPSEPVKLLVTGDIENTSLAPEDPTFPADTWGTYLLTTETGLQKDHALWDHTAQNLLRMGLAFLVLVALVWFLVEDWLSRKRTRERASRASTWEGRRRLNTQTLRAKRSGSGATNFSLLKQAGDVEENPGPTSMDWIWRILFLVGAATGAHSFEQVQLQQPGAELVKPGASVKMSCKASGYAFSSYWINWMKQKPGQGLEWIGQIYPGDGDTNYNGKFKGRATLTADTSSSTAYMQLSSLTSEDSAVYFCARSITTVVGCAMDYWGQGTSVTVSSTRASTKGPSVFPLAPSSKSTSGGTAALGCLVKDYFPEPVTVSWNSGALTSGVHTFPAVLQSSGLYSLSSVVTVPSSSLGTQTYICNVNHKPSNTKVDKRVEPKSCGTQQQTLPKPFIWAEPHFMVPKEKQVTICCQGNYGAVEYQLHFEGSLFAVDRPKPPERINKVQFYIPDMNSRMAGQYSCIYRVGELWSEPSNLLDLVVTEMYDTPTLSVHPGPEVISGEKVTFYCRLDTATSMFLLLKEGRSSHVQRGYGKVQAEFPLGPVTTAHRGTYRCFGSYNNHAWSFPSEPVKLLVTGDIENTSLAPEDPTFPADTWGTYLLTTETGLQKDHALWDHTAQNLLRMGLAFLVLVALVWFLVEDWLSRKRTRERASRASTWEGRRRLNTQTLRAKRSGSGVKQTLNFDLLKLAGDVESNPGPSRGGIHTMATYEVLCEVARKLGTDDREVVLFLLNVFIPQPTLAQLIGALRALKEEGRLTFPLLAECLFRAGRRDLLRDLLHLDPRFLERHLAGTMSYFSPYQLTVLHVDGELCARDIRSLIFLSKDTIGSRSTPQTFLHWVYCMENLDLLGPTDVDALMSMLRSLSRVDLQRQVQTLMGLHLSGPSHSQHYRHTP

SEQ ID NO: 4179 - protein, 1361 aa, Artificial Sequence
  Synthetic Polypeptide
MALPVTALLLPLALLLHAARPDIQMTQSPSSLSASVGDRVTITCKASDHINNWLAWYQQKPGQAPKLLIYGATTLETGVPSRFSGSGSGTDYTLTISSLQPEDFATYYCQQSWNTPWTFGQGTKLEIKRLEGQPKANPTVTLFPPSSEELQANKATLVCLISDFYPGAVTVAWKADGSPVKAGVETTKPSKQSNNKYAASSYLSLTPEQWKSHRSYSCQVTHEGSTVEKTVAPTECSGSQQQTLPKPFIWAEPHFMVPKEKQVTICCQGNYGAVEYQLHFEGSLFAVDRPKPPERINKVQFYIPDMNSRMAGQYSCIYRVGELWSEPSNLLDLVVTEMYDTPTLSVHPGPEVISGEKVTFYCRLDTATSMFLLLKEGRSSHVQRGYGKVQAEFPLGPVTTAHRGTYRCFGSYNNHAWSFPSEPVKLLVTGDIENTSLAPEDPTFPADTWGTYLLTTETGLQKDHALWDHTAQNLLRMGLAFLVLVALVWFLVEDWLSRKRTRERASRASTWEGRRRLNTQTLRAKRSGSGATNFSLLKQAGDVEENPGPTSMDWIWRILFLVGAATGAHSFEQVQLQQPGAELVKPGASVKMSCKASGYAFSSYWINWMKQKPGQGLEWIGQIYPGDGDTNYNGKFKGRATLTADTSSSTAYMQLSSLTSEDSAVYFCARSITTVVGCAMDYWGQGTSVTVSSTRASTKGPSVFPLAPSSKSTSGGTAALGCLVKDYFPEPVTVSWNSGALTSGVHTFPAVLQSSGLYSLSSVVTVPSSSLGTQTYICNVNHKPSNTKVDKRVEPKSCGTQQQTLPKPFIWAEPHFMVPKEKQVTICCQGNYGAVEYQLHFEGSLFAVDRPKPPERINKVQFYIPDMNSRMAGQYSCIYRVGELWSEPSNLLDLVVTEMYDTPTLSVHPGPEVISGEKVTFYCRLDTATSMFLLLKEGRSSHVQRGYGKVQAEFPLGPVTTAHRGTYRCFGSYNNHAWSFPSEPVKLLVTGDIENTSLAPEDPTFPADTWGTYLLTTETGLQKDHALWDHTAQNLLRMGLAFLVLVALVWFLVEDWLSRKRTRERASRASTWEGRRRLNTQTLRAKRSGSGVKQTLNFDLLKLAGDVESNPGPSRGGIHTMSDSKEVPSLPFLRHLLEELDSHEDSLLLFLCHDAAPGCTTVTQALCSLSQQRKLTLAALVEMLYVLQRMDLLKSRFGLSKEGAEQLLGTSFLTRYRKLMVCVGEELDSSELRALRLFACNLNPSLSTALSESSRFVELVLALENVGLVSPSSVSVLADMLRTLRRLDLCQQLVEYEQQEQARYRYCYAASPSLPVRTLRRGHGASEHEQLCMPVQESSDSPELLRTPVQESSSDSPEQTT

SEQ ID NO: 4180 - protein, 1316 aa, Artificial Sequence
  Synthetic Polypeptide
MALPVTALLLPLALLLHAARPDIQMTQSPSSLSASVGDRVTITCKASDHINNWLAWYQQKPGQAPKLLIYGATTLETGVPSRFSGSGSGTDYTLTISSLQPEDFATYYCQQSWNTPWTFGQGTKLEIKRLEGQPKANPTVTLFPPSSEELQANKATLVCLISDFYPGAVTVAWKADGSPVKAGVETTKPSKQSNNKYAASSYLSLTPEQWKSHRSYSCQVTHEGSTVEKTVAPTECSGSQQQTLPKPFIWAEPHFMVPKEKQVTICCQGNYGAVEYQLHFEGSLFAVDRPKPPERINKVQFYIPDMNSRMAGQYSCIYRVGELWSEPSNLLDLVVTEMYDTPTLSVHPGPEVISGEKVTFYCRLDTATSMFLLLKEGRSSHVQRGYGKVQAEFPLGPVTTAHRGTYRCFGSYNNHAWSFPSEPVKLLVTGDIENTSLAPEDPTFPADTWGTYLLTTETGLQKDHALWDHTAQNLLRMGLAFLVLVALVWFLVEDWLSRKRTRERASRASTWEGRRRLNTQTLRAKRSGSGATNFSLLKQAGDVEENPGPTSMDWIWRILFLVGAATGAHSFEQVQLQQPGAELVKPGASVKMSCKASGYAFSSYWINWMKQKPGQGLEWIGQIYPGDGDTNYNGKFKGRATLTADTSSSTAYMQLSSLTSEDSAVYFCARSITTVVGCAMDYWGQGTSVTVSSTRASTKGPSVFPLAPSSKSTSGGTAALGCLVKDYFPEPVTVSWNSGALTSGVHTFPAVLQSSGLYSLSSVVTVPSSSLGTQTYICNVNHKPSNTKVDKRVEPKSCGTQQQTLPKPFIWAEPHFMVPKEKQVTICCQGNYGAVEYQLHFEGSLFAVDRPKPPERINKVQFYIPDMNSRMAGQYSCIYRVGELWSEPSNLLDLVVTEMYDTPTLSVHPGPEVISGEKVTFYCRLDTATSMFLLLKEGRSSHVQRGYGKVQAEFPLGPVTTAHRGTYRCFGSYNNHAWSFPSEPVKLLVTGDIENTSLAPEDPTFPADTWGTYLLTTETGLQKDHALWDHTAQNLLRMGLAFLVLVALVWFLVEDWLSRKRTRERASRASTWEGRRRLNTQTLRAKRSGSGVKQTLNFDLLKLAGDVESNPGPSRGHMTEYKPTVRLATRDDVPRAVRTLAAAFADYPATRHTVDPDRHIERVTELQELFLTRVGLDIGKVWVADDGAAVAVWTTPESVEAGAVFAEIGPRMAELSGSRLAAQQQMEGLLAPHRPKEPAWFLATVGVSPDHQGKGLGSAVVLPGVEAAERAGVPAFLETSAPRNLPFYERLGFTVTADVEVPEGPRTWCMTRKPGA

SEQ ID NO: 4181 - protein, 1453 aa, Artificial Sequence
  Synthetic Polypeptide
MALPVTALLLPLALLLHAARPEVQLVESGGGLVQAGGSLRLSCAASGRTFSMGWFRQAPGKEREFVAAITYSGGSPYYADSVKGRFTISRDNAKNTVYLQMNSLKPEDTAVYYCAANPTYGSDWNAENWGQGTQVTVSSGTGGGGSGGGGSGGGGSEFDIQMTQSPSSLSASVGDRVTITCKASDHINNWLAWYQQKPGQAPKLLIYGATTLETGVPSRFSGSGSGTDYTLTISSLQPEDFATYYCQQSWNTPWTFGQGTKLEIKRLEGQPKANPTVTLFPPSSEELQANKATLVCLISDFYPGAVTVAWKADGSPVKAGVETTKPSKQSNNKYAASSYLSLTPEQWKSHRSYSCQVTHEGSTVEKTVAPTECSGSQQQTLPKPFIWAEPHFMVPKEKQVTICCQGNYGAVEYQLHFEGSLFAVDRPKPPERINKVQFYIPDMNSRMAGQYSCIYRVGELWSEPSNLLDLVVTEMYDTPTLSVHPGPEVISGEKVTFYCRLDTATSMFLLLKEGRSSHVQRGYGKVQAEFPLGPVTTAHRGTYRCFGSYNNHAWSFPSEPVKLLVTGDIENTSLAPEDPTFPADTWGTYLLTTETGLQKDHALWDHTAQNLLRMGLAFLVLVALVWFLVEDWLSRKRTRERASRASTWEGRRRLNTQTLRAKRSGSGATNFSLLKQAGDVEENPGPTSMDWIWRILFLVGAATGAHSFEQVQLQQPGAELVKPGASVKMSCKASGYAFSSYWINWMKQKPGQGLEWIGQIYPGDGDTNYNGKFKGRATLTADTSSSTAYMQLSSLTSEDSAVYFCARSITTVVGCAMDYWGQGTSVTVSSTRASTKGPSVFPLAPSSKSTSGGTAALGCLVKDYFPEPVTVSWNSGALTSGVHTFPAVLQSSGLYSLSSVVTVPSSSLGTQTYICNVNHKPSNTKVDKRVEPKSCGTQQQTLPKPFIWAEPHFMVPKEKQVTICCQGNYGAVEYQLHFEGSLFAVDRPKPPERINKVQFYIPDMNSRMAGQYSCIYRVGELWSEPSNLLDLVVTEMYDTPTLSVHPGPEVISGEKVTFYCRLDTATSMFLLLKEGRSSHVQRGYGKVQAEFPLGPVTTAHRGTYRCFGSYNNHAWSFPSEPVKLLVTGDIENTSLAPEDPTFPADTWGTYLLTTETGLQKDHALWDHTAQNLLRMGLAFLVLVALVWFLVEDWLSRKRTRERASRASTWEGRRRLNTQTLRAKRSGSGVKQTLNFDLLKLAGDVESNPGPSRGHMTEYKPTVRLATRDDVPRAVRTLAAAFADYPATRHTVDPDRHIERVTELQELFLTRVGLDIGKVWVADDGAAVAVWTTPESVEAGAVFAEIGPRMAELSGSRLAAQQQMEGLLAPHRPKEPAWFLATVGVSPDHQGKGLGSAVVLPGVEAAERAGVPAFLETSAPRNLPFYERLGFTVTADVEVPEGPRTWCMTRKPGA

SEQ ID NO: 4182 - protein, 1590 aa, Artificial Sequence
  Synthetic Polypeptide
MALPVTALLLPLALLLHAARPEVQLVESGGGLVQAGGSLRLSCAASGRTFSMGWFRQAPGKEREFVAAITYSGGSPYYADSVKGRFTISRDNAKNTVYLQMNSLKPEDTAVYYCAANPTYGSDWNAENWGQGTQVTVSSGTGGGGSGGGGSGGGGSEFDIQMTQSPSSLSASVGDRVTITCKASDHINNWLAWYQQKPGQAPKLLIYGATTLETGVPSRFSGSGSGTDYTLTISSLQPEDFATYYCQQSWNTPWTFGQGTKLEIKRLEGQPKANPTVTLFPPSSEELQANKATLVCLISDFYPGAVTVAWKADGSPVKAGVETTKPSKQSNNKYAASSYLSLTPEQWKSHRSYSCQVTHEGSTVEKTVAPTECSGSQQQTLPKPFIWAEPHFMVPKEKQVTICCQGNYGAVEYQLHFEGSLFAVDRPKPPERINKVQFYIPDMNSRMAGQYSCIYRVGELWSEPSNLLDLVVTEMYDTPTLSVHPGPEVISGEKVTFYCRLDTATSMFLLLKEGRSSHVQRGYGKVQAEFPLGPVTTAHRGTYRCFGSYNNHAWSFPSEPVKLLVTGDIENTSLAPEDPTFPADTWGTYLLTTETGLQKDHALWDHTAQNLLRMGLAFLVLVALVWFLVEDWLSRKRTRERASRASTWEGRRRLNTQTLRAKRSGSGATNFSLLKQAGDVEENPGPTSMDWIWRILFLVGAATGAHSGPEVQLVESGGGLVQAGGSLRLSCAASGRTFTMGWFRQAPGKEREFVAAISLSPTLAYYADSVKGRFTISRDNAKNTVVLQMNSLKPEDTALYYCAADRKSVMSIRPDYWGQGTQVTVSSGSGGGGSGGGGSGGGGSFEQVQLQQPGAELVKPGASVKMSCKASGYAFSSYWINWMKQKPGQGLEWIGQIYPGDGDTNYNGKFKGRATLTADTSSSTAYMQLSSLTSEDSAVYFCARSITTVVGCAMDYWGQGTSVTVSSTRASTKGPSVFPLAPSSKSTSGGTAALGCLVKDYFPEPVTVSWNSGALTSGVHTFPAVLQSSGLYSLSSVVTVPSSSLGTQTYICNVNHKPSNTKVDKRVEPKSCGTQQQTLPKPFIWAEPHFMVPKEKQVTICCQGNYGAVEYQLHFEGSLFAVDRPKPPERINKVQFYIPDMNSRMAGQYSCIYRVGELWSEPSNLLDLVVTEMYDTPTLSVHPGPEVISGEKVTFYCRLDTATSMFLLLKEGRSSHVQRGYGKVQAEFPLGPVTTAHRGTYRCFGSYNNHAWSFPSEPVKLLVTGDIENTSLAPEDPTFPADTWGTYLLTTETGLQKDHALWDHTAQNLLRMGLAFLVLVALVWFLVEDWLSRKRTRERASRASTWEGRRRLNTQTLRAKRSGSGVKQTLNFDLLKLAGDVESNPGPSRGHMTEYKPTVRLATRDDVPRAVRTLAAAFADYPATRHTVDPDRHIERVTELQELFLTRVGLDIGKVWVADDGAAVAVWTTPESVEAGAVFAEIGPRMAELSGSRLAAQQQMEGLLAPHRPKEPAWFLATVGVSPDHQGKGLGSAVVLPGVEAAERAGVPAFLETSAPRNLPFYERLGFTVTADVEVPEGPRTWCMTRKPGA

SEQ ID NO: 4183 - protein, 1323 aa, Artificial Sequence
  Synthetic Polypeptide
MALPVTALLLPLALLLHAARPEVQLVESGGGLVQAGGSLRLSCAASGRTFSMGWFRQAPGKEREFVAAITYSGGSPYYADSVKGRFTISRDNAKNTVYLQMNSLKPEDTAVYYCAANPTYGSDWNAENWGQGTQVTVSSLEGQPKANPTVTLFPPSSEELQANKATLVCLISDFYPGAVTVAWKADGSPVKAGVETTKPSKQSNNKYAASSYLSLTPEQWKSHRSYSCQVTHEGSTVEKTVAPTECSGSQQQTLPKPFIWAEPHFMVPKEKQVTICCQGNYGAVEYQLHFEGSLFAVDRPKPPERINKVQFYIPDMNSRMAGQYSCIYRVGELWSEPSNLLDLVVTEMYDTPTLSVHPGPEVISGEKVTFYCRLDTATSMFLLLKEGRSSHVQRGYGKVQAEFPLGPVTTAHRGTYRCFGSYNNHAWSFPSEPVKLLVTGDIENTSLAPEDPTFPADTWGTYLLTTETGLQKDHALWDHTAQNLLRMGLAFLVLVALVWFLVEDWLSRKRTRERASRASTWEGRRRLNTQTLRAKRSGSGATNFSLLKQAGDVEENPGPTSMDWIWRILFLVGAATGAHSGPEVQLVESGGGLVQAGGSLRLSCAASGRTFTMGWFRQAPGKEREFVAAISLSPTLAYYADSVKGRFTISRDNAKNTVVLQMNSLKPEDTALYYCAADRKSVMSIRPDYWGQGTQVTVSSTRASTKGPSVFPLAPSSKSTSGGTAALGCLVKDYFPEPVTVSWNSGALTSGVHTFPAVLQSSGLYSLSSVVTVPSSSLGTQTYICNVNHKPSNTKVDKRVEPKSCGTQQQTLPKPFIWAEPHFMVPKEKQVTICCQGNYGAVEYQLHFEGSLFAVDRPKPPERINKVQFYIPDMNSRMAGQYSCIYRVGELWSEPSNLLDLVVTEMYDTPTLSVHPGPEVISGEKVTFYCRLDTATSMFLLLKEGRSSHVQRGYGKVQAEFPLGPVTTAHRGTYRCFGSYNNHAWSFPSEPVKLLVTGDIENTSLAPEDPTFPADTWGTYLLTTETGLQKDHALWDHTAQNLLRMGLAFLVLVALVWFLVEDWLSRKRTRERASRASTWEGRRRLNTQTLRAKRSGSGVKQTLNFDLLKLAGDVESNPGPSRGHMTEYKPTVRLATRDDVPRAVRTLAAAFADYPATRHTVDPDRHIERVTELQELFLTRVGLDIGKVWVADDGAAVAVWTTPESVEAGAVFAEIGPRMAELSGSRLAAQQQMEGLLAPHRPKEPAWFLATVGVSPDHQGKGLGSAVVLPGVEAAERAGVPAFLETSAPRNLPFYERLGFTVTADVEVPEGPRTWCMTRKPGA

SEQ ID NO: 4184 - protein, 1331 aa, Artificial Sequence
  Synthetic Polypeptide
MALPVTALLLPLALLLHAARPDIQMTQSPSSLSASVGDRVTITCKASDHINNWLAWYQQKPGQAPKLLIYGATTLETGVPSRFSGSGSGTDYTLTISSLQPEDFATYYCQQSWNTPWTFGQGTKLEIKRLEDLKNVFPPEVAVFEPSEAEISHTQKATLVCLATGFYPDHVELSWWVNGKEVHSGVSTDPQPLKEQPALNDSRYCLSSRLRVSATFWQNPRNHFRCQVQFYGLSENDEWTQDRAKPVTQIVSAEAWGRADCGSQQQTLPKPFIWAEPHFMVPKEKQVTICCQGNYGAVEYQLHFEGSLFAVDRPKPPERINKVQFYIPDMNSRMAGQYSCIYRVGELWSEPSNLLDLVVTEMYDTPTLSVHPGPEVISGEKVTFYCRLDTATSMFLLLKEGRSSHVQRGYGKVQAEFPLGPVTTAHRGTYRCFGSYNNHAWSFPSEPVKLLVTGDIENTSLAPEDPTFPADTWGTYLLTTETGLQKDHALWDHTAQNLLRMGLAFLVLVALVWFLVEDWLSRKRTRERASRASTWEGRRRLNTQTLRAKRSGSGATNFSLLKQAGDVEENPGPTSMDWIWRILFLVGAATGAHSFEQVQLQQPGAELVKPGASVKMSCKASGYAFSSYWINWMKQKPGQGLEWIGQIYPGDGDTNYNGKFKGRATLTADTSSSTAYMQLSSLTSEDSAVYFCARSITTVVGCAMDYWGQGTSVTVSSTRIQNPDPAVYQLRDSKSSDKSVCLFTDFDSQTNVSQSKDSDVYITDKTVLDMRSMDFKSNSAVAWSNKSDFACANAFNNSIIPEDTFFPSPESSCGTQQQTLPKPFIWAEPHFMVPKEKQVTICCQGNYGAVEYQLHFEGSLFAVDRPKPPERINKVQFYIPDMNSRMAGQYSCIYRVGELWSEPSNLLDLVVTEMYDTPTLSVHPGPEVISGEKVTFYCRLDTATSMFLLLKEGRSSHVQRGYGKVQAEFPLGPVTTAHRGTYRCFGSYNNHAWSFPSEPVKLLVTGDIENTSLAPEDPTFPADTWGTYLLTTETGLQKDHALWDHTAQNLLRMGLAFLVLVALVWFLVEDWLSRKRTRERASRASTWEGRRRLNTQTLRAKRSGSGVKQTLNFDLLKLAGDVESNPGPSRGHMTEYKPTVRLATRDDVPRAVRTLAAAFADYPATRHTVDPDRHIERVTELQELFLTRVGLDIGKVWVADDGAAVAVWTTPESVEAGAVFAEIGPRMAELSGSRLAAQQQMEGLLAPHRPKEPAWFLATVGVSPDHQGKGLGSAVVLPGVEAAERAGVPAFLETSAPRNLPFYERLGFTVTADVEVPEGPRTWCMTRKPGA

SEQ ID NO: 4185 - protein, 1468 aa, Artificial Sequence
  Synthetic Polypeptide
MALPVTALLLPLALLLHAARPEVQLVESGGGLVQAGGSLRLSCAASGRTFSMGWFRQAPGKEREFVAAITYSGGSPYYADSVKGRFTISRDNAKNTVYLQMNSLKPEDTAVYYCAANPTYGSDWNAENWGQGTQVTVSSGTGGGGSGGGGSGGGGSEFDIQMTQSPSSLSASVGDRVTITCKASDHINNWLAWYQQKPGQAPKLLIYGATTLETGVPSRFSGSGSGTDYTLTISSLQPEDFATYYCQQSWNTPWTFGQGTKLEIKRLEDLKNVFPPEVAVFEPSEAEISHTQKATLVCLATGFYPDHVELSWWVNGKEVHSGVSTDPQPLKEQPALNDSRYCLSSRLRVSATFWQNPRNHFRCQVQFYGLSENDEWTQDRAKPVTQIVSAEAWGRADCGSQQQTLPKPFIWAEPHFMVPKEKQVTICCQGNYGAVEYQLHFEGSLFAVDRPKPPERINKVQFYIPDMNSRMAGQYSCIYRVGELWSEPSNLLDLVVTEMYDTPTLSVHPGPEVISGEKVTFYCRLDTATSMFLLLKEGRSSHVQRGYGKVQAEFPLGPVTTAHRGTYRCFGSYNNHAWSFPSEPVKLLVTGDIENTSLAPEDPTFPADTWGTYLLTTETGLQKDHALWDHTAQNLLRMGLAFLVLVALVWFLVEDWLSRKRTRERASRASTWEGRRRLNTQTLRAKRSGSGATNFSLLKQAGDVEENPGPTSMDWIWRILFLVGAATGAHSFEQVQLQQPGAELVKPGASVKMSCKASGYAFSSYWINWMKQKPGQGLEWIGQIYPGDGDTNYNGKFKGRATLTADTSSSTAYMQLSSLTSEDSAVYFCARSITTVVGCAMDYWGQGTSVTVSSTRIQNPDPAVYQLRDSKSSDKSVCLFTDFDSQTNVSQSKDSDVYITDKTVLDMRSMDFKSNSAVAWSNKSDFACANAFNNSIIPEDTFFPSPESSCGTQQQTLPKPFIWAEPHFMVPKEKQVTICCQGNYGAVEYQLHFEGSLFAVDRPKPPERINKVQFYIPDMNSRMAGQYSCIYRVGELWSEPSNLLDLVVTEMYDTPTLSVHPGPEVISGEKVTFYCRLDTATSMFLLLKEGRSSHVQRGYGKVQAEFPLGPVTTAHRGTYRCFGSYNNHAWSFPSEPVKLLVTGDIENTSLAPEDPTFPADTWGTYLLTTETGLQKDHALWDHTAQNLLRMGLAFLVLVALVWFLVEDWLSRKRTRERASRASTWEGRRRLNTQTLRAKRSGSGVKQTLNFDLLKLAGDVESNPGPSRGHMTEYKPTVRLATRDDVPRAVRTLAAAFADYPATRHTVDPDRHIERVTELQELFLTRVGLDIGKVWVADDGAAVAVWTTPESVEAGAVFAEIGPRMAELSGSRLAAQQQMEGLLAPHRPKEPAWFLATVGVSPDHQGKGLGSAVVLPGVEAAERAGVPAFLETSAPRNLPFYERLGFTVTADVEVPEGPRTWCMTRKPGA

SEQ ID NO: 4186 - protein, 1605 aa, Artificial Sequence
  Synthetic Polypeptide
MALPVTALLLPLALLLHAARPEVQLVESGGGLVQAGGSLRLSCAASGRTFSMGWFRQAPGKEREFVAAITYSGGSPYYADSVKGRFTISRDNAKNTVYLQMNSLKPEDTAVYYCAANPTYGSDWNAENWGQGTQVTVSSGTGGGGSGGGGSGGGGSEFDIQMTQSPSSLSASVGDRVTITCKASDHINNWLAWYQQKPGQAPKLLIYGATTLETGVPSRFSGSGSGTDYTLTISSLQPEDFATYYCQQSWNTPWTFGQGTKLEIKRLEDLKNVFPPEVAVFEPSEAEISHTQKATLVCLATGFYPDHVELSWWVNGKEVHSGVSTDPQPLKEQPALNDSRYCLSSRLRVSATFWQNPRNHFRCQVQFYGLSENDEWTQDRAKPVTQIVSAEAWGRADCGSQQQTLPKPFIWAEPHFMVPKEKQVTICCQGNYGAVEYQLHFEGSLFAVDRPKPPERINKVQFYIPDMNSRMAGQYSCIYRVGELWSEPSNLLDLVVTEMYDTPTLSVHPGPEVISGEKVTFYCRLDTATSMFLLLKEGRSSHVQRGYGKVQAEFPLGPVTTAHRGTYRCFGSYNNHAWSFPSEPVKLLVTGDIENTSLAPEDPTFPADTWGTYLLTTETGLQKDHALWDHTAQNLLRMGLAFLVLVALVWFLVEDWLSRKRTRERASRASTWEGRRRLNTQTLRAKRSGSGATNFSLLKQAGDVEENPGPTSMDWIWRILFLVGAATGAHSGPEVQLVESGGGLVQAGGSLRLSCAASGRTFTMGWFRQAPGKEREFVAAISLSPTLAYYADSVKGRFTISRDNAKNTVVLQMNSLKPEDTALYYCAADRKSVMSIRPDYWGQGTQVTVSSGSGGGGSGGGGSGGGGSFEQVQLQQPGAELVKPGASVKMSCKASGYAFSSYWINWMKQKPGQGLEWIGQIYPGDGDTNYNGKFKGRATLTADTSSSTAYMQLSSLTSEDSAVYFCARSITTVVGCAMDYWGQGTSVTVSSTRIQNPDPAVYQLRDSKSSDKSVCLFTDFDSQTNVSQSKDSDVYITDKTVLDMRSMDFKSNSAVAWSNKSDFACANAFNNSIIPEDTFFPSPESSCGTQQQTLPKPFIWAEPHFMVPKEKQVTICCQGNYGAVEYQLHFEGSLFAVDRPKPPERINKVQFYIPDMNSRMAGQYSCIYRVGELWSEPSNLLDLVVTEMYDTPTLSVHPGPEVISGEKVTFYCRLDTATSMFLLLKEGRSSHVQRGYGKVQAEFPLGPVTTAHRGTYRCFGSYNNHAWSFPSEPVKLLVTGDIENTSLAPEDPTFPADTWGTYLLTTETGLQKDHALWDHTAQNLLRMGLAFLVLVALVWFLVEDWLSRKRTRERASRASTWEGRRRLNTQTLRAKRSGSGVKQTLNFDLLKLAGDVESNPGPSRGHMTEYKPTVRLATRDDVPRAVRTLAAAFADYPATRHTVDPDRHIERVTELQELFLTRVGLDIGKVWVADDGAAVAVWTTPESVEAGAVFAEIGPRMAELSGSRLAAQQQMEGLLAPHRPKEPAWFLATVGVSPDHQGKGLGSAVVLPGVEAAERAGVPAFLETSAPRNLPFYERLGFTVTADVEVPEGPRTWCMTRKPGA

SEQ ID NO: 4187 - protein, 1338 aa, Artificial Sequence
  Synthetic Polypeptide
MALPVTALLLPLALLLHAARPEVQLVESGGGLVQAGGSLRLSCAASGRTFSMGWFRQAPGKEREFVAAITYSGGSPYYADSVKGRFTISRDNAKNTVYLQMNSLKPEDTAVYYCAANPTYGSDWNAENWGQGTQVTVSSLEDLKNVFPPEVAVFEPSEAEISHTQKATLVCLATGFYPDHVELSWWVNGKEVHSGVSTDPQPLKEQPALNDSRYCLSSRLRVSATFWQNPRNHFRCQVQFYGLSENDEWTQDRAKPVTQIVSAEAWGRADCGSQQQTLPKPFIWAEPHFMVPKEKQVTICCQGNYGAVEYQLHFEGSLFAVDRPKPPERINKVQFYIPDMNSRMAGQYSCIYRVGELWSEPSNLLDLVVTEMYDTPTLSVHPGPEVISGEKVTFYCRLDTATSMFLLLKEGRSSHVQRGYGKVQAEFPLGPVTTAHRGTYRCFGSYNNHAWSFPSEPVKLLVTGDIENTSLAPEDPTFPADTWGTYLLTTETGLQKDHALWDHTAQNLLRMGLAFLVLVALVWFLVEDWLSRKRTRERASRASTWEGRRRLNTQTLRAKRSGSGATNFSLLKQAGDVEENPGPTSMDWIWRILFLVGAATGAHSGPEVQLVESGGGLVQAGGSLRLSCAASGRTFTMGWFRQAPGKEREFVAAISLSPTLAYYADSVKGRFTISRDNAKNTVVLQMNSLKPEDTALYYCAADRKSVMSIRPDYWGQGTQVTVSSTRIQNPDPAVYQLRDSKSSDKSVCLFTDFDSQTNVSQSKDSDVYITDKTVLDMRSMDFKSNSAVAWSNKSDFACANAFNNSIIPEDTFFPSPESSCGTQQQTLPKPFIWAEPHFMVPKEKQVTICCQGNYGAVEYQLHFEGSLFAVDRPKPPERINKVQFYIPDMNSRMAGQYSCIYRVGELWSEPSNLLDLVVTEMYDTPTLSVHPGPEVISGEKVTFYCRLDTATSMFLLLKEGRSSHVQRGYGKVQAEFPLGPVTTAHRGTYRCFGSYNNHAWSFPSEPVKLLVTGDIENTSLAPEDPTFPADTWGTYLLTTETGLQKDHALWDHTAQNLLRMGLAFLVLVALVWFLVEDWLSRKRTRERASRASTWEGRRRLNTQTLRAKRSGSGVKQTLNFDLLKLAGDVESNPGPSRGHMTEYKPTVRLATRDDVPRAVRTLAAAFADYPATRHTVDPDRHIERVTELQELFLTRVGLDIGKVWVADDGAAVAVWTTPESVEAGAVFAEIGPRMAELSGSRLAAQQQMEGLLAPHRPKEPAWFLATVGVSPDHQGKGLGSAVVLPGVEAAERAGVPAFLETSAPRNLPFYERLGFTVTADVEVPEGPRTWCMTRKPGA

SEQ ID NO: 4188 - protein, 678 aa, Artificial Sequence
  Synthetic Polypeptide
MALPVTALLLPLALLLHAARPACEVQLLESGGGLIQPGGSLRLSCAASGFTFSSHAMTWVRQAPGKGLEWVSAISGSGDYTHYADSVKGRFTISRDNSKNTVYLQMNSLRAEDSAVYYCAKDEDGGSLLGHRGQGTLVTVSSGTGGGGSGGGGSGGGGSEFGSLEQQQTLPKPFIWAEPHFMVPKEKQVTICCQGNYGAVEYQLHFEGSLFAVDRPKPPERINKVQFYIPDMNSRMAGQYSCIYRVGELWSEPSNLLDLVVTEMYDTPTLSVHPGPEVISGEKVTFYCRLDTATSMFLLLKEGRSSHVQRGYGKVQAEFPLGPVTTAHRGTYRCFGSYNNHAWSFPSEPVKLLVTGDIENTSLAPEDPTFPADTWGTYLLTTETGLQKDHALWDHTAQNLLRMGLAFLVLVALVWFLVEDWLSRKRTRERASRASTWEGRRRLNTQTLRAKRSGSGATNFSLLKQAGDVEENPGPTRGHMTEYKPTVRLATRDDVPRAVRTLAAAFADYPATRHTVDPDRHIERVTELQELFLTRVGLDIGKVWVADDGAAVAVWTTPESVEAGAVFAEIGPRMAELSGSRLAAQQQMEGLLAPHRPKEPAWFLATVGVSPDHQGKGLGSAVVLPGVEAAERAGVPAFLETSAPRNLPFYERLGFTVTADVEVPEGPRTWCMTRKPGA

SEQ ID NO: 4189 - protein, 872 aa, Artificial Sequence
  Synthetic Polypeptide
MALPVTALLLPLALLLHAARPDIQMTQSPSSLSASVGDRVTITCKASDHINNWLAWYQQKPGQAPKLLIYGATTLETGVPSRFSGSGSGTDYTLTISSLQPEDFATYYCQQSWNTPWTFGQGTKLEIKRLEIGWLLLQAPRWVFKEEDPIHLRCHSWKNTALHKVTYLQNGKGRKYFHHNSDFYIPKATLKDSGSYFCRGLVGSKNVSSETVNITITQGLAVSTISSFFPPGYQVSFCLVMVLLFAVDTGLYFSVKTNIRSSTRDWKDHKFKWRKDPQDKRAKRSGSGATNFSLLKQAGDVEENPGPTSMDWIWRILFLVGAATGAHSFEQVQLQQPGAELVKPGASVKMSCKASGYAFSSYWINWMKQKPGQGLEWIGQIYPGDGDTNYNGKFKGRATLTADTSSSTAYMQLSSLTSEDSAVYFCARSITTVVGCAMDYWGQGTSVTVSSTREMYDTPTLSVHPGPEVISGEKVTFYCRLDTATSMFLLLKEGRSSHVQRGYGKVQAEFPLGPVTTAHRGTYRCFGSYNNHAWSFPSEPVKLLVTGDIENTSLAPEDPTFPADTWGTYLLTTETGLQKDHALWDHTAQNLLRMGLAFLVLVALVWFLVEDWLSRKRTRERASRASTWEGRRRLNTQTLRAKRSGSGVKQTLNFDLLKLAGDVESNPGPSRGHMTEYKPTVRLATRDDVPRAVRTLAAAFADYPATRHTVDPDRHIERVTELQELFLTRVGLDIGKVWVADDGAAVAVWTTPESVEAGAVFAEIGPRMAELSGSRLAAQQQMEGLLAPHRPKEPAWFLATVGVSPDHQGKGLGSAVVLPGVEAAERAGVPAFLETSAPRNLPFYERLGFTVTADVEVPEGPRTWCMTRKPGA

SEQ ID NO: 4190 - protein, 926 aa, Artificial Sequence
  Synthetic Polypeptide
MALPVTALLLPLALLLHAARPACEVQLLESGGGLIQPGGSLRLSCAASGFTFSSHAMTWVRQAPGKGLEWVSAISGSGDYTHYADSVKGRFTISRDNSKNTVYLQMNSLRAEDSAVYYCAKDEDGGSLLGHRGQGTLVTVSSGTGGGGSGGGGSGGGGSEFGSLEIGWLLLQAPRWVFKEEDPIHLRCHSWKNTALHKVTYLQNGKGRKYFHHNSDFYIPKATLKDSGSYFCRGLVGSKNVSSETVNITITQGLAVSTISSFFPPGYQVSFCLVMVLLFAVDTGLYFSVKTNIRSSTRDWKDHKFKWRKDPQDKRAKRSGSGATNFSLLKQAGDVEENPGPTSATMDWIWRILFLVGAATGAHSGPEVQLVESGGGLVQAGGSLRLSCAASGRTFSMGWFRQAPGKEREFVAAITYSGGSPYYADSVKGRFTISRDNAKNTVYLQMNSLKPEDTAVYYCAANPTYGSDWNAENWGQGTQVTVSSGSGGGGSGGGGSGGGGSFEGSTREMYDTPTLSVHPGPEVISGEKVTFYCRLDTATSMFLLLKEGRSSHVQRGYGKVQAEFPLGPVTTAHRGTYRCFGSYNNHAWSFPSEPVKLLVTGDIENTSLAPEDPTFPADTWGTYLLTTETGLQKDHALWDHTAQNLLRMGLAFLVLVALVWFLVEDWLSRKRTRERASRASTWEGRRRLNTQTLRAKRSGSGVKQTLNFDLLKLAGDVESNPGPSRGHMTEYKPTVRLATRDDVPRAVRTLAAAFADYPATRHTVDPDRHIERVTELQELFLTRVGLDIGKVWVADDGAAVAVWTTPESVEAGAVFAEIGPRMAELSGSRLAAQQQMEGLLAPHRPKEPAWFLATVGVSPDHQGKGLGSAVVLPGVEAAERAGVPAFLETSAPRNLPFYERLGFTVTADVEVPEGPRTWCMTRKPGA

SEQ ID NO: 4191 - protein, 1077 aa, Artificial Sequence
  Synthetic Polypeptide
MALPVTALLLPLALLLHAARPDIQMTQSPSSLSASVGDRVTITCKASDHINNWLAWYQQKPGQAPKLLIYGATTLETGVPSRFSGSGSGTDYTLTISSLQPEDFATYYCQQSWNTPWTFGQGTKLEIKRLEGQPKANPTVTLFPPSSEELQANKATLVCLISDFYPGAVTVAWKADGSPVKAGVETTKPSKQSNNKYAASSYLSLTPEQWKSHRSYSCQVTHEGSTVEKTVAPTECSGSIGWLLLQAPRWVFKEEDPIHLRCHSWKNTALHKVTYLQNGKGRKYFHHNSDFYIPKATLKDSGSYFCRGLVGSKNVSSETVNITITQGLAVSTISSFFPPGYQVSFCLVMVLLFAVDTGLYFSVKTNIRSSTRDWKDHKFKWRKDPQDKRAKRSGSGATNFSLLKQAGDVEENPGPTSMDWIWRILFLVGAATGAHSFEQVQLQQPGAELVKPGASVKMSCKASGYAFSSYWINWMKQKPGQGLEWIGQIYPGDGDTNYNGKFKGRATLTADTSSSTAYMQLSSLTSEDSAVYFCARSITTVVGCAMDYWGQGTSVTVSSTRASTKGPSVFPLAPSSKSTSGGTAALGCLVKDYFPEPVTVSWNSGALTSGVHTFPAVLQSSGLYSLSSVVTVPSSSLGTQTYICNVNHKPSNTKVDKRVEPKSCGTEMYDTPTLSVHPGPEVISGEKVTFYCRLDTATSMFLLLKEGRSSHVQRGYGKVQAEFPLGPVTTAHRGTYRCFGSYNNHAWSFPSEPVKLLVTGDIENTSLAPEDPTFPADTWGTYLLTTETGLQKDHALWDHTAQNLLRMGLAFLVLVALVWFLVEDWLSRKRTRERASRASTWEGRRRLNTQTLRAKRSGSGVKQTLNFDLLKLAGDVESNPGPSRGGIHTMATYEVLCEVARKLGTDDREVVLFLLNVFIPQPTLAQLIGALRALKEEGRLTFPLLAECLFRAGRRDLLRDLLHLDPRFLERHLAGTMSYFSPYQLTVLHVDGELCARDIRSLIFLSKDTIGSRSTPQTFLHWVYCMENLDLLGPTDVDALMSMLRSLSRVDLQRQVQTLMGLHLSGPSHSQHYRHTP

SEQ ID NO: 4192 - protein, 1130 aa, Artificial Sequence
  Synthetic Polypeptide
MALPVTALLLPLALLLHAARPDIQMTQSPSSLSASVGDRVTITCKASDHINNWLAWYQQKPGQAPKLLIYGATTLETGVPSRFSGSGSGTDYTLTISSLQPEDFATYYCQQSWNTPWTFGQGTKLEIKRLEGQPKANPTVTLFPPSSEELQANKATLVCLISDFYPGAVTVAWKADGSPVKAGVETTKPSKQSNNKYAASSYLSLTPEQWKSHRSYSCQVTHEGSTVEKTVAPTECSGSIGWLLLQAPRWVFKEEDPIHLRCHSWKNTALHKVTYLQNGKGRKYFHHNSDFYIPKATLKDSGSYFCRGLVGSKNVSSETVNITITQGLAVSTISSFFPPGYQVSFCLVMVLLFAVDTGLYFSVKTNIRSSTRDWKDHKFKWRKDPQDKRAKRSGSGATNFSLLKQAGDVEENPGPTSMDWIWRILFLVGAATGAHSFEQVQLQQPGAELVKPGASVKMSCKASGYAFSSYWINWMKQKPGQGLEWIGQIYPGDGDTNYNGKFKGRATLTADTSSSTAYMQLSSLTSEDSAVYFCARSITTVVGCAMDYWGQGTSVTVSSTRASTKGPSVFPLAPSSKSTSGGTAALGCLVKDYFPEPVTVSWNSGALTSGVHTFPAVLQSSGLYSLSSVVTVPSSSLGTQTYICNVNHKPSNTKVDKRVEPKSCGTEMYDTPTLSVHPGPEVISGEKVTFYCRLDTATSMFLLLKEGRSSHVQRGYGKVQAEFPLGPVTTAHRGTYRCFGSYNNHAWSFPSEPVKLLVTGDIENTSLAPEDPTFPADTWGTYLLTTETGLQKDHALWDHTAQNLLRMGLAFLVLVALVWFLVEDWLSRKRTRERASRASTWEGRRRLNTQTLRAKRSGSGVKQTLNFDLLKLAGDVESNPGPSRGGIHTMSDSKEVPSLPFLRHLLEELDSHEDSLLLFLCHDAAPGCTTVTQALCSLSQQRKLTLAALVEMLYVLQRMDLLKSRFGLSKEGAEQLLGTSFLTRYRKLMVCVGEELDSSELRALRLFACNLNPSLSTALSESSRFVELVLALENVGLVSPSSVSVLADMLRTLRRLDLCQQLVEYEQQEQARYRYCYAASPSLPVRTLRRGHGASEHEQLCMPVQESSDSPELLRTPVQESSSDSPEQTT

SEQ ID NO: 4193 - protein, 1085 aa, Artificial Sequence
  Synthetic Polypeptide
MALPVTALLLPLALLLHAARPDIQMTQSPSSLSASVGDRVTITCKASDHINNWLAWYQQKPGQAPKLLIYGATTLETGVPSRFSGSGSGTDYTLTISSLQPEDFATYYCQQSWNTPWTFGQGTKLEIKRLEGQPKANPTVTLFPPSSEELQANKATLVCLISDFYPGAVTVAWKADGSPVKAGVETTKPSKQSNNKYAASSYLSLTPEQWKSHRSYSCQVTHEGSTVEKTVAPTECSGSIGWLLLQAPRWVFKEEDPIHLRCHSWKNTALHKVTYLQNGKGRKYFHHNSDFYIPKATLKDSGSYFCRGLVGSKNVSSETVNITITQGLAVSTISSFFPPGYQVSFCLVMVLLFAVDTGLYFSVKTNIRSSTRDWKDHKFKWRKDPQDKRAKRSGSGATNFSLLKQAGDVEENPGPTSMDWIWRILFLVGAATGAHSFEQVQLQQPGAELVKPGASVKMSCKASGYAFSSYWINWMKQKPGQGLEWIGQIYPGDGDTNYNGKFKGRATLTADTSSSTAYMQLSSLTSEDSAVYFCARSITTVVGCAMDYWGQGTSVTVSSTRASTKGPSVFPLAPSSKSTSGGTAALGCLVKDYFPEPVTVSWNSGALTSGVHTFPAVLQSSGLYSLSSVVTVPSSSLGTQTYICNVNHKPSNTKVDKRVEPKSCGTEMYDTPTLSVHPGPEVISGEKVTFYCRLDTATSMFLLLKEGRSSHVQRGYGKVQAEFPLGPVTTAHRGTYRCFGSYNNHAWSFPSEPVKLLVTGDIENTSLAPEDPTFPADTWGTYLLTTETGLQKDHALWDHTAQNLLRMGLAFLVLVALVWFLVEDWLSRKRTRERASRASTWEGRRRLNTQTLRAKRSGSGVKQTLNFDLLKLAGDVESNPGPSRGHMTEYKPTVRLATRDDVPRAVRTLAAAFADYPATRHTVDPDRHIERVTELQELFLTRVGLDIGKVWVADDGAAVAVWTTPESVEAGAVFAEIGPRMAELSGSRLAAQQQMEGLLAPHRPKEPAWFLATVGVSPDHQGKGLGSAVVLPGVEAAERAGVPAFLETSAPRNLPFYERLGFTVTADVEVPEGPRTWCMTRKPGA

SEQ ID NO: 4194 - protein, 1222 aa, Artificial Sequence
  Synthetic Polypeptide
MALPVTALLLPLALLLHAARPEVQLVESGGGLVQAGGSLRLSCAASGRTFSMGWFRQAPGKEREFVAAITYSGGSPYYADSVKGRFTISRDNAKNTVYLQMNSLKPEDTAVYYCAANPTYGSDWNAENWGQGTQVTVSSGTGGGGSGGGGSGGGGSEFDIQMTQSPSSLSASVGDRVTITCKASDHINNWLAWYQQKPGQAPKLLIYGATTLETGVPSRFSGSGSGTDYTLTISSLQPEDFATYYCQQSWNTPWTFGQGTKLEIKRLEGQPKANPTVTLFPPSSEELQANKATLVCLISDFYPGAVTVAWKADGSPVKAGVETTKPSKQSNNKYAASSYLSLTPEQWKSHRSYSCQVTHEGSTVEKTVAPTECSGSIGWLLLQAPRWVFKEEDPIHLRCHSWKNTALHKVTYLQNGKGRKYFHHNSDFYIPKATLKDSGSYFCRGLVGSKNVSSETVNITITQGLAVSTISSFFPPGYQVSFCLVMVLLFAVDTGLYFSVKTNIRSSTRDWKDHKFKWRKDPQDKRAKRSGSGATNFSLLKQAGDVEENPGPTSMDWIWRILFLVGAATGAHSFEQVQLQQPGAELVKPGASVKMSCKASGYAFSSYWINWMKQKPGQGLEWIGQIYPGDGDTNYNGKFKGRATLTADTSSSTAYMQLSSLTSEDSAVYFCARSITTVVGCAMDYWGQGTSVTVSSTRASTKGPSVFPLAPSSKSTSGGTAALGCLVKDYFPEPVTVSWNSGALTSGVHTFPAVLQSSGLYSLSSVVTVPSSSLGTQTYICNVNHKPSNTKVDKRVEPKSCGTEMYDTPTLSVHPGPEVISGEKVTFYCRLDTATSMFLLLKEGRSSHVQRGYGKVQAEFPLGPVTTAHRGTYRCFGSYNNHAWSFPSEPVKLLVTGDIENTSLAPEDPTFPADTWGTYLLTTETGLQKDHALWDHTAQNLLRMGLAFLVLVALVWFLVEDWLSRKRTRERASRASTWEGRRRLNTQTLRAKRSGSGVKQTLNFDLLKLAGDVESNPGPSRGHMTEYKPTVRLATRDDVPRAVRTLAAAFADYPATRHTVDPDRHIERVTELQELFLTRVGLDIGKVWVADDGAAVAVWTTPESVEAGAVFAEIGPRMAELSGSRLAAQQQMEGLLAPHRPKEPAWFLATVGVSPDHQGKGLGSAVVLPGVEAAERAGVPAFLETSAPRNLPFYERLGFTVTADVEVPEGPRTWCMTRKPGA

SEQ ID NO: 4195 - protein, 1359 aa, Artificial Sequence
  Synthetic Polypeptide
MALPVTALLLPLALLLHAARPEVQLVESGGGLVQAGGSLRLSCAASGRTFSMGWFRQAPGKEREFVAAITYSGGSPYYADSVKGRFTISRDNAKNTVYLQMNSLKPEDTAVYYCAANPTYGSDWNAENWGQGTQVTVSSGTGGGGSGGGGSGGGGSEFDIQMTQSPSSLSASVGDRVTITCKASDHINNWLAWYQQKPGQAPKLLIYGATTLETGVPSRFSGSGSGTDYTLTISSLQPEDFATYYCQQSWNTPWTFGQGTKLEIKRLEGQPKANPTVTLFPPSSEELQANKATLVCLISDFYPGAVTVAWKADGSPVKAGVETTKPSKQSNNKYAASSYLSLTPEQWKSHRSYSCQVTHEGSTVEKTVAPTECSGSIGWLLLQAPRWVFKEEDPIHLRCHSWKNTALHKVTYLQNGKGRKYFHHNSDFYIPKATLKDSGSYFCRGLVGSKNVSSETVNITITQGLAVSTISSFFPPGYQVSFCLVMVLLFAVDTGLYFSVKTNIRSSTRDWKDHKFKWRKDPQDKRAKRSGSGATNFSLLKQAGDVEENPGPTSMDWIWRILFLVGAATGAHSGPEVQLVESGGGLVQAGGSLRLSCAASGRTFTMGWFRQAPGKEREFVAAISLSPTLAYYADSVKGRFTISRDNAKNTVVLQMNSLKPEDTALYYCAADRKSVMSIRPDYWGQGTQVTVSSGSGGGGSGGGGSGGGGSFEQVQLQQPGAELVKPGASVKMSCKASGYAFSSYWINWMKQKPGQGLEWIGQIYPGDGDTNYNGKFKGRATLTADTSSSTAYMQLSSLTSEDSAVYFCARSITTVVGCAMDYWGQGTSVTVSSTRASTKGPSVFPLAPSSKSTSGGTAALGCLVKDYFPEPVTVSWNSGALTSGVHTFPAVLQSSGLYSLSSVVTVPSSSLGTQTYICNVNHKPSNTKVDKRVEPKSCGTEMYDTPTLSVHPGPEVISGEKVTFYCRLDTATSMFLLLKEGRSSHVQRGYGKVQAEFPLGPVTTAHRGTYRCFGSYNNHAWSFPSEPVKLLVTGDIENTSLAPEDPTFPADTWGTYLLTTETGLQKDHALWDHTAQNLLRMGLAFLVLVALVWFLVEDWLSRKRTRERASRASTWEGRRRLNTQTLRAKRSGSGVKQTLNFDLLKLAGDVESNPGPSRGHMTEYKPTVRLATRDDVPRAVRTLAAAFADYPATRHTVDPDRHIERVTELQELFLTRVGLDIGKVWVADDGAAVAVWTTPESVEAGAVFAEIGPRMAELSGSRLAAQQQMEGLLAPHRPKEPAWFLATVGVSPDHQGKGLGSAVVLPGVEAAERAGVPAFLETSAPRNLPFYERLGFTVTADVEVPEGPRTWCMTRKPGA

SEQ ID NO: 4196 - protein, 1092 aa, Artificial Sequence
  Synthetic Polypeptide
MALPVTALLLPLALLLHAARPEVQLVESGGGLVQAGGSLRLSCAASGRTFSMGWFRQAPGKEREFVAAITYSGGSPYYADSVKGRFTISRDNAKNTVYLQMNSLKPEDTAVYYCAANPTYGSDWNAENWGQGTQVTVSSLEGQPKANPTVTLFPPSSEELQANKATLVCLISDFYPGAVTVAWKADGSPVKAGVETTKPSKQSNNKYAASSYLSLTPEQWKSHRSYSCQVTHEGSTVEKTVAPTECSGSIGWLLLQAPRWVFKEEDPIHLRCHSWKNTALHKVTYLQNGKGRKYFHHNSDFYIPKATLKDSGSYFCRGLVGSKNVSSETVNITITQGLAVSTISSFFPPGYQVSFCLVMVLLFAVDTGLYFSVKTNIRSSTRDWKDHKFKWRKDPQDKRAKRSGSGATNFSLLKQAGDVEENPGPTSMDWIWRILFLVGAATGAHSGPEVQLVESGGGLVQAGGSLRLSCAASGRTFTMGWFRQAPGKEREFVAAISLSPTLAYYADSVKGRFTISRDNAKNTVVLQMNSLKPEDTALYYCAADRKSVMSIRPDYWGQGTQVTVSSTRASTKGPSVFPLAPSSKSTSGGTAALGCLVKDYFPEPVTVSWNSGALTSGVHTFPAVLQSSGLYSLSSVVTVPSSSLGTQTYICNVNHKPSNTKVDKRVEPKSCGTEMYDTPTLSVHPGPEVISGEKVTFYCRLDTATSMFLLLKEGRSSHVQRGYGKVQAEFPLGPVTTAHRGTYRCFGSYNNHAWSFPSEPVKLLVTGDIENTSLAPEDPTFPADTWGTYLLTTETGLQKDHALWDHTAQNLLRMGLAFLVLVALVWFLVEDWLSRKRTRERASRASTWEGRRRLNTQTLRAKRSGSGVKQTLNFDLLKLAGDVESNPGPSRGHMTEYKPTVRLATRDDVPRAVRTLAAAFADYPATRHTVDPDRHIERVTELQELFLTRVGLDIGKVWVADDGAAVAVWTTPESVEAGAVFAEIGPRMAELSGSRLAAQQQMEGLLAPHRPKEPAWFLATVGVSPDHQGKGLGSAVVLPGVEAAERAGVPAFLETSAPRNLPFYERLGFTVTADVEVPEGPRTWCMTRKPGA

SEQ ID NO: 4197 - protein, 1100 aa, Artificial Sequence
  Synthetic Polypeptide
MALPVTALLLPLALLLHAARPDIQMTQSPSSLSASVGDRVTITCKASDHINNWLAWYQQKPGQAPKLLIYGATTLETGVPSRFSGSGSGTDYTLTISSLQPEDFATYYCQQSWNTPWTFGQGTKLEIKRLEDLKNVFPPEVAVFEPSEAEISHTQKATLVCLATGFYPDHVELSWWVNGKEVHSGVSTDPQPLKEQPALNDSRYCLSSRLRVSATFWQNPRNHFRCQVQFYGLSENDEWTQDRAKPVTQIVSAEAWGRADCGSIGWLLLQAPRWVFKEEDPIHLRCHSWKNTALHKVTYLQNGKGRKYFHHNSDFYIPKATLKDSGSYFCRGLVGSKNVSSETVNITITQGLAVSTISSFFPPGYQVSFCLVMVLLFAVDTGLYFSVKTNIRSSTRDWKDHKFKWRKDPQDKRAKRSGSGATNFSLLKQAGDVEENPGPTSMDWIWRILFLVGAATGAHSFEQVQLQQPGAELVKPGASVKMSCKASGYAFSSYWINWMKQKPGQGLEWIGQIYPGDGDTNYNGKFKGRATLTADTSSSTAYMQLSSLTSEDSAVYFCARSITTVVGCAMDYWGQGTSVTVSSTRIQNPDPAVYQLRDSKSSDKSVCLFTDFDSQTNVSQSKDSDVYITDKTVLDMRSMDFKSNSAVAWSNKSDFACANAFNNSIIPEDTFFPSPESSCGTEMYDTPTLSVHPGPEVISGEKVTFYCRLDTATSMFLLLKEGRSSHVQRGYGKVQAEFPLGPVTTAHRGTYRCFGSYNNHAWSFPSEPVKLLVTGDIENTSLAPEDPTFPADTWGTYLLTTETGLQKDHALWDHTAQNLLRMGLAFLVLVALVWFLVEDWLSRKRTRERASRASTWEGRRRLNTQTLRAKRSGSGVKQTLNFDLLKLAGDVESNPGPSRGHMTEYKPTVRLATRDDVPRAVRTLAAAFADYPATRHTVDPDRHIERVTELQELFLTRVGLDIGKVWVADDGAAVAVWTTPESVEAGAVFAEIGPRMAELSGSRLAAQQQMEGLLAPHRPKEPAWFLATVGVSPDHQGKGLGSAVVLPGVEAAERAGVPAFLETSAPRNLPFYERLGFTVTADVEVPEGPRTWCMTRKPGA

SEQ ID NO: 4198 - protein, 1237 aa, Artificial Sequence
  Synthetic Polypeptide
MALPVTALLLPLALLLHAARPEVQLVESGGGLVQAGGSLRLSCAASGRTFSMGWFRQAPGKEREFVAAITYSGGSPYYADSVKGRFTISRDNAKNTVYLQMNSLKPEDTAVYYCAANPTYGSDWNAENWGQGTQVTVSSGTGGGGSGGGGSGGGGSEFDIQMTQSPSSLSASVGDRVTITCKASDHINNWLAWYQQKPGQAPKLLIYGATTLETGVPSRFSGSGSGTDYTLTISSLQPEDFATYYCQQSWNTPWTFGQGTKLEIKRLEDLKNVFPPEVAVFEPSEAEISHTQKATLVCLATGFYPDHVELSWWVNGKEVHSGVSTDPQPLKEQPALNDSRYCLSSRLRVSATFWQNPRNHFRCQVQFYGLSENDEWTQDRAKPVTQIVSAEAWGRADCGSIGWLLLQAPRWVFKEEDPIHLRCHSWKNTALHKVTYLQNGKGRKYFHHNSDFYIPKATLKDSGSYFCRGLVGSKNVSSETVNITITQGLAVSTISSFFPPGYQVSFCLVMVLLFAVDTGLYFSVKTNIRSSTRDWKDHKFKWRKDPQDKRAKRSGSGATNFSLLKQAGDVEENPGPTSMDWIWRILFLVGAATGAHSFEQVQLQQPGAELVKPGASVKMSCKASGYAFSSYWINWMKQKPGQGLEWIGQIYPGDGDTNYNGKFKGRATLTADTSSSTAYMQLSSLTSEDSAVYFCARSITTVVGCAMDYWGQGTSVTVSSTRIQNPDPAVYQLRDSKSSDKSVCLFTDFDSQTNVSQSKDSDVYITDKTVLDMRSMDFKSNSAVAWSNKSDFACANAFNNSIIPEDTFFPSPESSCGTEMYDTPTLSVHPGPEVISGEKVTFYCRLDTATSMFLLLKEGRSSHVQRGYGKVQAEFPLGPVTTAHRGTYRCFGSYNNHAWSFPSEPVKLLVTGDIENTSLAPEDPTFPADTWGTYLLTTETGLQKDHALWDHTAQNLLRMGLAFLVLVALVWFLVEDWLSRKRTRERASRASTWEGRRRLNTQTLRAKRSGSGVKQTLNFDLLKLAGDVESNPGPSRGHMTEYKPTVRLATRDDVPRAVRTLAAAFADYPATRHTVDPDRHIERVTELQELFLTRVGLDIGKVWVADDGAAVAVWTTPESVEAGAVFAEIGPRMAELSGSRLAAQQQMEGLLAPHRPKEPAWFLATVGVSPDHQGKGLGSAVVLPGVEAAERAGVPAFLETSAPRNLPFYERLGFTVTADVEVPEGPRTWCMTRKPGA

SEQ ID NO: 4199 - protein, 1374 aa, Artificial Sequence
  Synthetic Polypeptide
MALPVTALLLPLALLLHAARPEVQLVESGGGLVQAGGSLRLSCAASGRTFSMGWFRQAPGKEREFVAAITYSGGSPYYADSVKGRFTISRDNAKNTVYLQMNSLKPEDTAVYYCAANPTYGSDWNAENWGQGTQVTVSSGTGGGGSGGGGSGGGGSEFDIQMTQSPSSLSASVGDRVTITCKASDHINNWLAWYQQKPGQAPKLLIYGATTLETGVPSRFSGSGSGTDYTLTISSLQPEDFATYYCQQSWNTPWTFGQGTKLEIKRLEDLKNVFPPEVAVFEPSEAEISHTQKATLVCLATGFYPDHVELSWWVNGKEVHSGVSTDPQPLKEQPALNDSRYCLSSRLRVSATFWQNPRNHFRCQVQFYGLSENDEWTQDRAKPVTQIVSAEAWGRADCGSIGWLLLQAPRWVFKEEDPIHLRCHSWKNTALHKVTYLQNGKGRKYFHHNSDFYIPKATLKDSGSYFCRGLVGSKNVSSETVNITITQGLAVSTISSFFPPGYQVSFCLVMVLLFAVDTGLYFSVKTNIRSSTRDWKDHKFKWRKDPQDKRAKRSGSGATNFSLLKQAGDVEENPGPTSMDWIWRILFLVGAATGAHSGPEVQLVESGGGLVQAGGSLRLSCAASGRTFTMGWFRQAPGKEREFVAAISLSPTLAYYADSVKGRFTISRDNAKNTVVLQMNSLKPEDTALYYCAADRKSVMSIRPDYWGQGTQVTVSSGSGGGGSGGGGSGGGGSFEQVQLQQPGAELVKPGASVKMSCKASGYAFSSYWINWMKQKPGQGLEWIGQIYPGDGDTNYNGKFKGRATLTADTSSSTAYMQLSSLTSEDSAVYFCARSITTVVGCAMDYWGQGTSVTVSSTRIQNPDPAVYQLRDSKSSDKSVCLFTDFDSQTNVSQSKDSDVYITDKTVLDMRSMDFKSNSAVAWSNKSDFACANAFNNSIIPEDTFFPSPESSCGTEMYDTPTLSVHPGPEVISGEKVTFYCRLDTATSMFLLLKEGRSSHVQRGYGKVQAEFPLGPVTTAHRGTYRCFGSYNNHAWSFPSEPVKLLVTGDIENTSLAPEDPTFPADTWGTYLLTTETGLQKDHALWDHTAQNLLRMGLAFLVLVALVWFLVEDWLSRKRTRERASRASTWEGRRRLNTQTLRAKRSGSGVKQTLNFDLLKLAGDVESNPGPSRGHMTEYKPTVRLATRDDVPRAVRTLAAAFADYPATRHTVDPDRHIERVTELQELFLTRVGLDIGKVWVADDGAAVAVWTTPESVEAGAVFAEIGPRMAELSGSRLAAQQQMEGLLAPHRPKEPAWFLATVGVSPDHQGKGLGSAVVLPGVEAAERAGVPAFLETSAPRNLPFYERLGFTVTADVEVPEGPRTWCMTRKPGA

SEQ ID NO: 4200 - protein, 1107 aa, Artificial Sequence
  Synthetic Polypeptide
MALPVTALLLPLALLLHAARPEVQLVESGGGLVQAGGSLRLSCAASGRTFSMGWFRQAPGKEREFVAAITYSGGSPYYADSVKGRFTISRDNAKNTVYLQMNSLKPEDTAVYYCAANPTYGSDWNAENWGQGTQVTVSSLEDLKNVFPPEVAVFEPSEAEISHTQKATLVCLATGFYPDHVELSWWVNGKEVHSGVSTDPQPLKEQPALNDSRYCLSSRLRVSATFWQNPRNHFRCQVQFYGLSENDEWTQDRAKPVTQIVSAEAWGRADCGSIGWLLLQAPRWVFKEEDPIHLRCHSWKNTALHKVTYLQNGKGRKYFHHNSDFYIPKATLKDSGSYFCRGLVGSKNVSSETVNITITQGLAVSTISSFFPPGYQVSFCLVMVLLFAVDTGLYFSVKTNIRSSTRDWKDHKFKWRKDPQDKRAKRSGSGATNFSLLKQAGDVEENPGPTSMDWIWRILFLVGAATGAHSGPEVQLVESGGGLVQAGGSLRLSCAASGRTFTMGWFRQAPGKEREFVAAISLSPTLAYYADSVKGRFTISRDNAKNTVVLQMNSLKPEDTALYYCAADRKSVMSIRPDYWGQGTQVTVSSTRIQNPDPAVYQLRDSKSSDKSVCLFTDFDSQTNVSQSKDSDVYITDKTVLDMRSMDFKSNSAVAWSNKSDFACANAFNNSIIPEDTFFPSPESSCGTEMYDTPTLSVHPGPEVISGEKVTFYCRLDTATSMFLLLKEGRSSHVQRGYGKVQAEFPLGPVTTAHRGTYRCFGSYNNHAWSFPSEPVKLLVTGDIENTSLAPEDPTFPADTWGTYLLTTETGLQKDHALWDHTAQNLLRMGLAFLVLVALVWFLVEDWLSRKRTRERASRASTWEGRRRLNTQTLRAKRSGSGVKQTLNFDLLKLAGDVESNPGPSRGHMTEYKPTVRLATRDDVPRAVRTLAAAFADYPATRHTVDPDRHIERVTELQELFLTRVGLDIGKVWVADDGAAVAVWTTPESVEAGAVFAEIGPRMAELSGSRLAAQQQMEGLLAPHRPKEPAWFLATVGVSPDHQGKGLGSAVVLPGVEAAERAGVPAFLETSAPRNLPFYERLGFTVTADVEVPEGPRTWCMTRKPGA

SEQ ID NO: 4201 - protein, 544 aa, Artificial Sequence; identical to SEQ ID NO: 4058
  Synthetic Polypeptide

SEQ ID NO: 4202 - protein, 909 aa, Artificial Sequence
  Synthetic Polypeptide
MALPVTALLLPLALLLHAARPDIQMTQSPSSLSASVGDRVTITCKASDHINNWLAWYQQKPGQAPKLLIYGATTLETGVPSRFSGSGSGTDYTLTISSLQPEDFATYYCQQSWNTPWTFGQGTKLEIKRLEEMYDTPTLSVHPGPEVISGEKVTFYCRLDTATSMFLLLKEGRSSHVQRGYGKVQAEFPLGPVTTAHRGTYRCFGSYNNHAWSFPSEPVKLLVTGDIENTSLAPEDPTFPADTWGTYLLTTETGLQKDHALWDHTAQNLLRMGLAFLVLVALVWFLVEDWLSRKRTRERASRASTWEGRRRLNTQTLRAKRSGSGATNFSLLKQAGDVEENPGPTSMDWIWRILFLVGAATGAHSFEQVQLQQPGAELVKPGASVKMSCKASGYAFSSYWINWMKQKPGQGLEWIGQIYPGDGDTNYNGKFKGRATLTADTSSSTAYMQLSSLTSEDSAVYFCARSITTVVGCAMDYWGQGTSVTVSSTREMYDTPTLSVHPGPEVISGEKVTFYCRLDTATSMFLLLKEGRSSHVQRGYGKVQAEFPLGPVTTAHRGTYRCFGSYNNHAWSFPSEPVKLLVTGDIENTSLAPEDPTFPADTWGTYLLTTETGLQKDHALWDHTAQNLLRMGLAFLVLVALVWFLVEDWLSRKRTRERASRASTWEGRRRLNTQTLRAKRSGSGVKQTLNFDLLKLAGDVESNPGPSRGHMTEYKPTVRLATRDDVPRAVRTLAAAFADYPATRHTVDPDRHIERVTELQELFLTRVGLDIGKVWVADDGAAVAVWTTPESVEAGAVFAEIGPRMAELSGSRLAAQQQMEGLLAPHRPKEPAWFLATVGVSPDHQGKGLGSAVVLPGVEAAERAGVPAFLETSAPRNLPFYERLGFTVTADVEVPEGPRTWCMTRKPGA

SEQ ID NO: 4203 - protein, 963 aa, Artificial Sequence
  Synthetic Polypeptide
MALPVTALLLPLALLLHAARPACEVQLLESGGGLIQPGGSLRLSCAASGFTFSSHAMTWVRQAPGKGLEWVSAISGSGDYTHYADSVKGRFTISRDNSKNTVYLQMNSLRAEDSAVYYCAKDEDGGSLLGHRGQGTLVTVSSGTGGGGSGGGGSGGGGSEFGSLEEMYDTPTLSVHPGPEVISGEKVTFYCRLDTATSMFLLLKEGRSSHVQRGYGKVQAEFPLGPVTTAHRGTYRCFGSYNNHAWSFPSEPVKLLVTGDIENTSLAPEDPTFPADTWGTYLLTTETGLQKDHALWDHTAQNLLRMGLAFLVLVALVWFLVEDWLSRKRTRERASRASTWEGRRRLNTQTLRAKRSGSGATNFSLLKQAGDVEENPGPTSATMDWIWRILFLVGAATGAHSGPEVQLVESGGGLVQAGGSLRLSCAASGRTFSMGWFRQAPGKEREFVAAITYSGGSPYYADSVKGRFTISRDNAKNTVYLQMNSLKPEDTAVYYCAANPTYGSDWNAENWGQGTQVTVSSGSGGGGSGGGGSGGGGSFEGSTREMYDTPTLSVHPGPEVISGEKVTFYCRLDTATSMFLLLKEGRSSHVQRGYGKVQAEFPLGPVTTAHRGTYRCFGSYNNHAWSFPSEPVKLLVTGDIENTSLAPEDPTFPADTWGTYLLTTETGLQKDHALWDHTAQNLLRMGLAFLVLVALVWFLVEDWLSRKRTRERASRASTWEGRRRLNTQTLRAKRSGSGVKQTLNFDLLKLAGDVESNPGPSRGHMTEYKPTVRLATRDDVPRAVRTLAAAFADYPATRHTVDPDRHIERVTELQELFLTRVGLDIGKVWVADDGAAVAVWTTPESVEAGAVFAEIGPRMAELSGSRLAAQQQMEGLLAPHRPKEPAWFLATVGVSPDHQGKGLGSAVVLPGVEAAERAGVPAFLETSAPRNLPFYERLGFTVTADVEVPEGPRTWCMTRKPGA

SEQ ID NO: 4204 - protein, 1114 aa, Artificial Sequence
  Synthetic Polypeptide
MALPVTALLLPLALLLHAARPDIQMTQSPSSLSASVGDRVTITCKASDHINNWLAWYQQKPGQAPKLLIYGATTLETGVPSRFSGSGSGTDYTLTISSLQPEDFATYYCQQSWNTPWTFGQGTKLEIKRLEGQPKANPTVTLFPPSSEELQANKATLVCLISDFYPGAVTVAWKADGSPVKAGVETTKPSKQSNNKYAASSYLSLTPEQWKSHRSYSCQVTHEGSTVEKTVAPTECSGSEMYDTPTLSVHPGPEVISGEKVTFYCRLDTATSMFLLLKEGRSSHVQRGYGKVQAEFPLGPVTTAHRGTYRCFGSYNNHAWSFPSEPVKLLVTGDIENTSLAPEDPTFPADTWGTYLLTTETGLQKDHALWDHTAQNLLRMGLAFLVLVALVWFLVEDWLSRKRTRERASRASTWEGRRRLNTQTLRAKRSGSGATNFSLLKQAGDVEENPGPTSMDWIWRILFLVGAATGAHSFEQVQLQQPGAELVKPGASVKMSCKASGYAFSSYWINWMKQKPGQGLEWIGQIYPGDGDTNYNGKFKGRATLTADTSSSTAYMQLSSLTSEDSAVYFCARSITTVVGCAMDYWGQGTSVTVSSTRASTKGPSVFPLAPSSKSTSGGTAALGCLVKDYFPEPVTVSWNSGALTSGVHTFPAVLQSSGLYSLSSVVTVPSSSLGTQTYICNVNHKPSNTKVDKRVEPKSCGTEMYDTPTLSVHPGPEVISGEKVTFYCRLDTATSMFLLLKEGRSSHVQRGYGKVQAEFPLGPVTTAHRGTYRCFGSYNNHAWSFPSEPVKLLVTGDIENTSLAPEDPTFPADTWGTYLLTTETGLQKDHALWDHTAQNLLRMGLAFLVLVALVWFLVEDWLSRKRTRERASRASTWEGRRRLNTQTLRAKRSGSGVKQTLNFDLLKLAGDVESNPGPSRGGIHTMATYEVLCEVARKLGTDDREVVLFLLNVFIPQPTLAQLIGALRALKEEGRLTFPLLAECLFRAGRRDLLRDLLHLDPRFLERHLAGTMSYFSPYQLTVLHVDGELCARDIRSLIFLSKDTIGSRSTPQTFLHWVYCMENLDLLGPTDVDALMSMLRSLSRVDLQRQVQTLMGLHLSGPSHSQHYRHTP

SEQ ID NO: 4205 - protein, 1167 aa, Artificial Sequence
  Synthetic Polypeptide
MALPVTALLLPLALLLHAARPDIQMTQSPSSLSASVGDRVTITCKASDHINNWLAWYQQKPGQAPKLLIYGATTLETGVPSRFSGSGSGTDYTLTISSLQPEDFATYYCQQSWNTPWTFGQGTKLEIKRLEGQPKANPTVTLFPPSSEELQANKATLVCLISDFYPGAVTVAWKADGSPVKAGVETTKPSKQSNNKYAASSYLSLTPEQWKSHRSYSCQVTHEGSTVEKTVAPTECSGSEMYDTPTLSVHPGPEVISGEKVTFYCRLDTATSMFLLLKEGRSSHVQRGYGKVQAEFPLGPVTTAHRGTYRCFGSYNNHAWSFPSEPVKLLVTGDIENTSLAPEDPTFPADTWGTYLLTTETGLQKDHALWDHTAQNLLRMGLAFLVLVALVWFLVEDWLSRKRTRERASRASTWEGRRRLNTQTLRAKRSGSGATNFSLLKQAGDVEENPGPTSMDWIWRILFLVGAATGAHSFEQVQLQQPGAELVKPGASVKMSCKASGYAFSSYWINWMKQKPGQGLEWIGQIYPGDGDTNYNGKFKGRATLTADTSSSTAYMQLSSLTSEDSAVYFCARSITTVVGCAMDYWGQGTSVTVSSTRASTKGPSVFPLAPSSKSTSGGTAALGCLVKDYFPEPVTVSWNSGALTSGVHTFPAVLQSSGLYSLSSVVTVPSSSLGTQTYICNVNHKPSNTKVDKRVEPKSCGTEMYDTPTLSVHPGPEVISGEKVTFYCRLDTATSMFLLLKEGRSSHVQRGYGKVQAEFPLGPVTTAHRGTYRCFGSYNNHAWSFPSEPVKLLVTGDIENTSLAPEDPTFPADTWGTYLLTTETGLQKDHALWDHTAQNLLRMGLAFLVLVALVWFLVEDWLSRKRTRERASRASTWEGRRRLNTQTLRAKRSGSGVKQTLNFDLLKLAGDVESNPGPSRGGIHTMSDSKEVPSLPFLRHLLEELDSHEDSLLLFLCHDAAPGCTTVTQALCSLSQQRKLTLAALVEMLYVLQRMDLLKSRFGLSKEGAEQLLGTSFLTRYRKLMVCVGEELDSSELRALRLFACNLNPSLSTALSESSRFVELVLALENVGLVSPSSVSVLADMLRTLRRLDLCQQLVEYEQQEQARYRYCYAASPSLPVRTLRRGHGASEHEQLCMPVQESSDSPELLRTPVQESSSDSPEQTT

SEQ ID NO: 4206 - protein, 1122 aa, Artificial Sequence
  Synthetic Polypeptide
MALPVTALLLPLALLLHAARPDIQMTQSPSSLSASVGDRVTITCKASDHINNWLAWYQQKPGQAPKLLIYGATTLETGVPSRFSGSGSGTDYTLTISSLQPEDFATYYCQQSWNTPWTFGQGTKLEIKRLEGQPKANPTVTLFPPSSEELQANKATLVCLISDFYPGAVTVAWKADGSPVKAGVETTKPSKQSNNKYAASSYLSLTPEQWKSHRSYSCQVTHEGSTVEKTVAPTECSGSEMYDTPTLSVHPGPEVISGEKVTFYCRLDTATSMFLLLKEGRSSHVQRGYGKVQAEFPLGPVTTAHRGTYRCFGSYNNHAWSFPSEPVKLLVTGDIENTSLAPEDPTFPADTWGTYLLTTETGLQKDHALWDHTAQNLLRMGLAFLVLVALVWFLVEDWLSRKRTRERASRASTWEGRRRLNTQTLRAKRSGSGATNFSLLKQAGDVEENPGPTSMDWIWRILFLVGAATGAHSFEQVQLQQPGAELVKPGASVKMSCKASGYAFSSYWINWMKQKPGQGLEWIGQIYPGDGDTNYNGKFKGRATLTADTSSSTAYMQLSSLTSEDSAVYFCARSITTVVGCAMDYWGQGTSVTVSSTRASTKGPSVFPLAPSSKSTSGGTAALGCLVKDYFPEPVTVSWNSGALTSGVHTFPAVLQSSGLYSLSSVVTVPSSSLGTQTYICNVNHKPSNTKVDKRVEPKSCGTEMYDTPTLSVHPGPEVISGEKVTFYCRLDTATSMFLLLKEGRSSHVQRGYGKVQAEFPLGPVTTAHRGTYRCFGSYNNHAWSFPSEPVKLLVTGDIENTSLAPEDPTFPADTWGTYLLTTETGLQKDHALWDHTAQNLLRMGLAFLVLVALVWFLVEDWLSRKRTRERASRASTWEGRRRLNTQTLRAKRSGSGVKQTLNFDLLKLAGDVESNPGPSRGHMTEYKPTVRLATRDDVPRAVRTLAAAFADYPATRHTVDPDRHIERVTELQELFLTRVGLDIGKVWVADDGAAVAVWTTPESVEAGAVFAEIGPRMAELSGSRLAAQQQMEGLLAPHRPKEPAWFLATVGVSPDHQGKGLGSAVVLPGVEAAERAGVPAFLETSAPRNLPFYERLGFTVTADVEVPEGPRTWCMTRKPGA

SEQ ID NO: 4207 - protein, 1259 aa, Artificial Sequence
  Synthetic Polypeptide
MALPVTALLLPLALLLHAARPEVQLVESGGGLVQAGGSLRLSCAASGRTFSMGWFRQAPGKEREFVAAITYSGGSPYYADSVKGRFTISRDNAKNTVYLQMNSLKPEDTAVYYCAANPTYGSDWNAENWGQGTQVTVSSGTGGGGSGGGGSGGGGSEFDIQMTQSPSSLSASVGDRVTITCKASDHINNWLAWYQQKPGQAPKLLIYGATTLETGVPSRFSGSGSGTDYTLTISSLQPEDFATYYCQQSWNTPWTFGQGTKLEIKRLEGQPKANPTVTLFPPSSEELQANKATLVCLISDFYPGAVTVAWKADGSPVKAGVETTKPSKQSNNKYAASSYLSLTPEQWKSHRSYSCQVTHEGSTVEKTVAPTECSGSEMYDTPTLSVHPGPEVISGEKVTFYCRLDTATSMFLLLKEGRSSHVQRGYGKVQAEFPLGPVTTAHRGTYRCFGSYNNHAWSFPSEPVKLLVTGDIENTSLAPEDPTFPADTWGTYLLTTETGLQKDHALWDHTAQNLLRMGLAFLVLVALVWFLVEDWLSRKRTRERASRASTWEGRRRLNTQTLRAKRSGSGATNFSLLKQAGDVEENPGPTSMDWIWRILFLVGAATGAHSFEQVQLQQPGAELVKPGASVKMSCKASGYAFSSYWINWMKQKPGQGLEWIGQIYPGDGDTNYNGKFKGRATLTADTSSSTAYMQLSSLTSEDSAVYFCARSITTVVGCAMDYWGQGTSVTVSSTRASTKGPSVFPLAPSSKSTSGGTAALGCLVKDYFPEPVTVSWNSGALTSGVHTFPAVLQSSGLYSLSSVVTVPSSSLGTQTYICNVNHKPSNTKVDKRVEPKSCGTEMYDTPTLSVHPGPEVISGEKVTFYCRLDTATSMFLLLKEGRSSHVQRGYGKVQAEFPLGPVTTAHRGTYRCFGSYNNHAWSFPSEPVKLLVTGDIENTSLAPEDPTFPADTWGTYLLTTETGLQKDHALWDHTAQNLLRMGLAFLVLVALVWFLVEDWLSRKRTRERASRASTWEGRRRLNTQTLRAKRSGSGVKQTLNFDLLKLAGDVESNPGPSRGHMTEYKPTVRLATRDDVPRAVRTLAAAFADYPATRHTVDPDRHIERVTELQELFLTRVGLDIGKVWVADDGAAVAVWTTPESVEAGAVFAEIGPRMAELSGSRLAAQQQMEGLLAPHRPKEPAWFLATVGVSPDHQGKGLGSAVVLPGVEAAERAGVPAFLETSAPRNLPFYERLGFTVTADVEVPEGPRTWCMTRKPGA

SEQ ID NO: 4208 - protein, 1396 aa, Artificial Sequence
  Synthetic Polypeptide
MALPVTALLLPLALLLHAARPEVQLVESGGGLVQAGGSLRLSCAASGRTFSMGWFRQAPGKEREFVAAITYSGGSPYYADSVKGRFTISRDNAKNTVYLQMNSLKPEDTAVYYCAANPTYGSDWNAENWGQGTQVTVSSGTGGGGSGGGGSGGGGSEFDIQMTQSPSSLSASVGDRVTITCKASDHINNWLAWYQQKPGQAPKLLIYGATTLETGVPSRFSGSGSGTDYTLTISSLQPEDFATYYCQQSWNTPWTFGQGTKLEIKRLEGQPKANPTVTLFPPSSEELQANKATLVCLISDFYPGAVTVAWKADGSPVKAGVETTKPSKQSNNKYAASSYLSLTPEQWKSHRSYSCQVTHEGSTVEKTVAPTECSGSEMYDTPTLSVHPGPEVISGEKVTFYCRLDTATSMFLLLKEGRSSHVQRGYGKVQAEFPLGPVTTAHRGTYRCFGSYNNHAWSFPSEPVKLLVTGDIENTSLAPEDPTFPADTWGTYLLTTETGLQKDHALWDHTAQNLLRMGLAFLVLVALVWFLVEDWLSRKRTRERASRASTWEGRRRLNTQTLRAKRSGSGATNFSLLKQAGDVEENPGPTSMDWIWRILFLVGAATGAHSGPEVQLVESGGGLVQAGGSLRLSCAASGRTFTMGWFRQAPGKEREFVAAISLSPTLAYYADSVKGRFTISRDNAKNTVVLQMNSLKPEDTALYYCAADRKSVMSIRPDYWGQGTQVTVSSGSGGGGSGGGGSGGGGSFEQVQLQQPGAELVKPGASVKMSCKASGYAFSSYWINWMKQKPGQGLEWIGQIYPGDGDTNYNGKFKGRATLTADTSSSTAYMQLSSLTSEDSAVYFCARSITTVVGCAMDYWGQGTSVTVSSTRASTKGPSVFPLAPSSKSTSGGTAALGCLVKDYFPEPVTVSWNSGALTSGVHTFPAVLQSSGLYSLSSVVTVPSSSLGTQTYICNVNHKPSNTKVDKRVEPKSCGTEMYDTPTLSVHPGPEVISGEKVTFYCRLDTATSMFLLLKEGRSSHVQRGYGKVQAEFPLGPVTTAHRGTYRCFGSYNNHAWSFPSEPVKLLVTGDIENTSLAPEDPTFPADTWGTYLLTTETGLQKDHALWDHTAQNLLRMGLAFLVLVALVWFLVEDWLSRKRTRERASRASTWEGRRRLNTQTLRAKRSGSGVKQTLNFDLLKLAGDVESNPGPSRGHMTEYKPTVRLATRDDVPRAVRTLAAAFADYPATRHTVDPDRHIERVTELQELFLTRVGLDIGKVWVADDGAAVAVWTTPESVEAGAVFAEIGPRMAELSGSRLAAQQQMEGLLAPHRPKEPAWFLATVGVSPDHQGKGLGSAVVLPGVEAAERAGVPAFLETSAPRNLPFYERLGFTVTADVEVPEGPRTWCMTRKPGA

SEQ ID NO: 4209 - protein, 1129 aa, Artificial Sequence
  Synthetic Polypeptide
MALPVTALLLPLALLLHAARPEVQLVESGGGLVQAGGSLRLSCAASGRTFSMGWFRQAPGKEREFVAAITYSGGSPYYADSVKGRFTISRDNAKNTVYLQMNSLKPEDTAVYYCAANPTYGSDWNAENWGQGTQVTVSSLEGQPKANPTVTLFPPSSEELQANKATLVCLISDFYPGAVTVAWKADGSPVKAGVETTKPSKQSNNKYAASSYLSLTPEQWKSHRSYSCQVTHEGSTVEKTVAPTECSGSEMYDTPTLSVHPGPEVISGEKVTFYCRLDTATSMFLLLKEGRSSHVQRGYGKVQAEFPLGPVTTAHRGTYRCFGSYNNHAWSFPSEPVKLLVTGDIENTSLAPEDPTFPADTWGTYLLTTETGLQKDHALWDHTAQNLLRMGLAFLVLVALVWFLVEDWLSRKRTRERASRASTWEGRRRLNTQTLRAKRSGSGATNFSLLKQAGDVEENPGPTSMDWIWRILFLVGAATGAHSGPEVQLVESGGGLVQAGGSLRLSCAASGRTFTMGWFRQAPGKEREFVAAISLSPTLAYYADSVKGRFTISRDNAKNTVVLQMNSLKPEDTALYYCAADRKSVMSIRPDYWGQGTQVTVSSTRASTKGPSVFPLAPSSKSTSGGTAALGCLVKDYFPEPVTVSWNSGALTSGVHTFPAVLQSSGLYSLSSVVTVPSSSLGTQTYICNVNHKPSNTKVDKRVEPKSCGTEMYDTPTLSVHPGPEVISGEKVTFYCRLDTATSMFLLLKEGRSSHVQRGYGKVQAEFPLGPVTTAHRGTYRCFGSYNNHAWSFPSEPVKLLVTGDIENTSLAPEDPTFPADTWGTYLLTTETGLQKDHALWDHTAQNLLRMGLAFLVLVALVWFLVEDWLSRKRTRERASRASTWEGRRRLNTQTLRAKRSGSGVKQTLNFDLLKLAGDVESNPGPSRGHMTEYKPTVRLATRDDVPRAVRTLAAAFADYPATRHTVDPDRHIERVTELQELFLTRVGLDIGKVWVADDGAAVAVWTTPESVEAGAVFAEIGPRMAELSGSRLAAQQQMEGLLAPHRPKEPAWFLATVGVSPDHQGKGLGSAVVLPGVEAAERAGVPAFLETSAPRNLPFYERLGFTVTADVEVPEGPRTWCMTRKPGA

SEQ ID NO: 4210 - protein, 1137 aa, Artificial Sequence
  Synthetic Polypeptide
MALPVTALLLPLALLLHAARPDIQMTQSPSSLSASVGDRVTITCKASDHINNWLAWYQQKPGQAPKLLIYGATTLETGVPSRFSGSGSGTDYTLTISSLQPEDFATYYCQQSWNTPWTFGQGTKLEIKRLEDLKNVFPPEVAVFEPSEAEISHTQKATLVCLATGFYPDHVELSWWVNGKEVHSGVSTDPQPLKEQPALNDSRYCLSSRLRVSATFWQNPRNHFRCQVQFYGLSENDEWTQDRAKPVTQIVSAEAWGRADCGSEMYDTPTLSVHPGPEVISGEKVTFYCRLDTATSMFLLLKEGRSSHVQRGYGKVQAEFPLGPVTTAHRGTYRCFGSYNNHAWSFPSEPVKLLVTGDIENTSLAPEDPTFPADTWGTYLLTTETGLQKDHALWDHTAQNLLRMGLAFLVLVALVWFLVEDWLSRKRTRERASRASTWEGRRRLNTQTLRAKRSGSGATNFSLLKQAGDVEENPGPTSMDWIWRILFLVGAATGAHSFEQVQLQQPGAELVKPGASVKMSCKASGYAFSSYWINWMKQKPGQGLEWIGQIYPGDGDTNYNGKFKGRATLTADTSSSTAYMQLSSLTSEDSAVYFCARSITTVVGCAMDYWGQGTSVTVSSTRIQNPDPAVYQLRDSKSSDKSVCLFTDFDSQTNVSQSKDSDVYITDKTVLDMRSMDFKSNSAVAWSNKSDFACANAFNNSIIPEDTFFPSPESSCGTEMYDTPTLSVHPGPEVISGEKVTFYCRLDTATSMFLLLKEGRSSHVQRGYGKVQAEFPLGPVTTAHRGTYRCFGSYNNHAWSFPSEPVKLLVTGDIENTSLAPEDPTFPADTWGTYLLTTETGLQKDHALWDHTAQNLLRMGLAFLVLVALVWFLVEDWLSRKRTRERASRASTWEGRRRLNTQTLRAKRSGSGVKQTLNFDLLKLAGDVESNPGPSRGHMTEYKPTVRLATRDDVPRAVRTLAAAFADYPATRHTVDPDRHIERVTELQELFLTRVGLDIGKVWVADDGAAVAVWTTPESVEAGAVFAEIGPRMAELSGSRLAAQQQMEGLLAPHRPKEPAWFLATVGVSPDHQGKGLGSAVVLPGVEAAERAGVPAFLETSAPRNLPFYERLGFTVTADVEVPEGPRTWCMTRKPGA

SEQ ID NO: 4211 - protein, 1274 aa, Artificial Sequence
  Synthetic Polypeptide
MALPVTALLLPLALLLHAARPEVQLVESGGGLVQAGGSLRLSCAASGRTFSMGWFRQAPGKEREFVAAITYSGGSPYYADSVKGRFTISRDNAKNTVYLQMNSLKPEDTAVYYCAANPTYGSDWNAENWGQGTQVTVSSGTGGGGSGGGGSGGGGSEFDIQMTQSPSSLSASVGDRVTITCKASDHINNWLAWYQQKPGQAPKLLIYGATTLETGVPSRFSGSGSGTDYTLTISSLQPEDFATYYCQQSWNTPWTFGQGTKLEIKRLEDLKNVFPPEVAVFEPSEAEISHTQKATLVCLATGFYPDHVELSWWVNGKEVHSGVSTDPQPLKEQPALNDSRYCLSSRLRVSATFWQNPRNHFRCQVQFYGLSENDEWTQDRAKPVTQIVSAEAWGRADCGSEMYDTPTLSVHPGPEVISGEKVTFYCRLDTATSMFLLLKEGRSSHVQRGYGKVQAEFPLGPVTTAHRGTYRCFGSYNNHAWSFPSEPVKLLVTGDIENTSLAPEDPTFPADTWGTYLLTTETGLQKDHALWDHTAQNLLRMGLAFLVLVALVWFLVEDWLSRKRTRERASRASTWEGRRRLNTQTLRAKRSGSGATNFSLLKQAGDVEENPGPTSMDWIWRILFLVGAATGAHSFEQVQLQQPGAELVKPGASVKMSCKASGYAFSSYWINWMKQKPGQGLEWIGQIYPGDGDTNYNGKFKGRATLTADTSSSTAYMQLSSLTSEDSAVYFCARSITTVVGCAMDYWGQGTSVTVSSTRIQNPDPAVYQLRDSKSSDKSVCLFTDFDSQTNVSQSKDSDVYITDKTVLDMRSMDFKSNSAVAWSNKSDFACANAFNNSIIPEDTFFPSPESSCGTEMYDTPTLSVHPGPEVISGEKVTFYCRLDTATSMFLLLKEGRSSHVQRGYGKVQAEFPLGPVTTAHRGTYRCFGSYNNHAWSFPSEPVKLLVTGDIENTSLAPEDPTFPADTWGTYLLTTETGLQKDHALWDHTAQNLLRMGLAFLVLVALVWFLVEDWLSRKRTRERASRASTWEGRRRLNTQTLRAKRSGSGVKQTLNFDLLKLAGDVESNPGPSRGHMTEYKPTVRLATRDDVPRAVRTLAAAFADYPATRHTVDPDRHIERVTELQELFLTRVGLDIGKVWVADDGAAVAVWTTPESVEAGAVFAEIGPRMAELSGSRLAAQQQMEGLLAPHRPKEPAWFLATVGVSPDHQGKGLGSAVVLPGVEAAERAGVPAFLETSAPRNLPFYERLGFTVTADVEVPEGPRTWCMTRKPGA

SEQ ID NO: 4212 - protein, 1411 aa, Artificial Sequence
  Synthetic Polypeptide
MALPVTALLLPLALLLHAARPEVQLVESGGGLVQAGGSLRLSCAASGRTFSMGWFRQAPGKEREFVAAITYSGGSPYYADSVKGRFTISRDNAKNTVYLQMNSLKPEDTAVYYCAANPTYGSDWNAENWGQGTQVTVSSGTGGGGSGGGGSGGGGSEFDIQMTQSPSSLSASVGDRVTITCKASDHINNWLAWYQQKPGQAPKLLIYGATTLETGVPSRFSGSGSGTDYTLTISSLQPEDFATYYCQQSWNTPWTFGQGTKLEIKRLEDLKNVFPPEVAVFEPSEAEISHTQKATLVCLATGFYPDHVELSWWVNGKEVHSGVSTDPQPLKEQPALNDSRYCLSSRLRVSATFWQNPRNHFRCQVQFYGLSENDEWTQDRAKPVTQIVSAEAWGRADCGSEMYDTPTLSVHPGPEVISGEKVTFYCRLDTATSMFLLLKEGRSSHVQRGYGKVQAEFPLGPVTTAHRGTYRCFGSYNNHAWSFPSEPVKLLVTGDIENTSLAPEDPTFPADTWGTYLLTTETGLQKDHALWDHTAQNLLRMGLAFLVLVALVWFLVEDWLSRKRTRERASRASTWEGRRRLNTQTLRAKRSGSGATNFSLLKQAGDVEENPGPTSMDWIWRILFLVGAATGAHSGPEVQLVESGGGLVQAGGSLRLSCAASGRTFTMGWFRQAPGKEREFVAAISLSPTLAYYADSVKGRFTISRDNAKNTVVLQMNSLKPEDTALYYCAADRKSVMSIRPDYWGQGTQVTVSSGSGGGGSGGGGSGGGGSFEQVQLQQPGAELVKPGASVKMSCKASGYAFSSYWINWMKQKPGQGLEWIGQIYPGDGDTNYNGKFKGRATLTADTSSSTAYMQLSSLTSEDSAVYFCARSITTVVGCAMDYWGQGTSVTVSSTRIQNPDPAVYQLRDSKSSDKSVCLFTDFDSQTNVSQSKDSDVYITDKTVLDMRSMDFKSNSAVAWSNKSDFACANAFNNSIIPEDTFFPSPESSCGTEMYDTPTLSVHPGPEVISGEKVTFYCRLDTATSMFLLLKEGRSSHVQRGYGKVQAEFPLGPVTTAHRGTYRCFGSYNNHAWSFPSEPVKLLVTGDIENTSLAPEDPTFPADTWGTYLLTTETGLQKDHALWDHTAQNLLRMGLAFLVLVALVWFLVEDWLSRKRTRERASRASTWEGRRRLNTQTLRAKRSGSGVKQTLNFDLLKLAGDVESNPGPSRGHMTEYKPTVRLATRDDVPRAVRTLAAAFADYPATRHTVDPDRHIERVTELQELFLTRVGLDIGKVWVADDGAAVAVWTTPESVEAGAVFAEIGPRMAELSGSRLAAQQQMEGLLAPHRPKEPAWFLATVGVSPDHQGKGLGSAVVLPGVEAAERAGVPAFLETSAPRNLPFYERLGFTVTADVEVPEGPRTWCMTRKPGA

SEQ ID NO: 4213 - protein, 1144 aa, Artificial Sequence
  Synthetic Polypeptide
MALPVTALLLPLALLLHAARPEVQLVESGGGLVQAGGSLRLSCAASGRTFSMGWFRQAPGKEREFVAAITYSGGSPYYADSVKGRFTISRDNAKNTVYLQMNSLKPEDTAVYYCAANPTYGSDWNAENWGQGTQVTVSSLEDLKNVFPPEVAVFEPSEAEISHTQKATLVCLATGFYPDHVELSWWVNGKEVHSGVSTDPQPLKEQPALNDSRYCLSSRLRVSATFWQNPRNHFRCQVQFYGLSENDEWTQDRAKPVTQIVSAEAWGRADCGSEMYDTPTLSVHPGPEVISGEKVTFYCRLDTATSMFLLLKEGRSSHVQRGYGKVQAEFPLGPVTTAHRGTYRCFGSYNNHAWSFPSEPVKLLVTGDIENTSLAPEDPTFPADTWGTYLLTTETGLQKDHALWDHTAQNLLRMGLAFLVLVALVWFLVEDWLSRKRTRERASRASTWEGRRRLNTQTLRAKRSGSGATNFSLLKQAGDVEENPGPTSMDWIWRILFLVGAATGAHSGPEVQLVESGGGLVQAGGSLRLSCAASGRTFTMGWFRQAPGKEREFVAAISLSPTLAYYADSVKGRFTISRDNAKNTVVLQMNSLKPEDTALYYCAADRKSVMSIRPDYWGQGTQVTVSSTRIQNPDPAVYQLRDSKSSDKSVCLFTDFDSQTNVSQSKDSDVYITDKTVLDMRSMDFKSNSAVAWSNKSDFACANAFNNSIIPEDTFFPSPESSCGTEMYDTPTLSVHPGPEVISGEKVTFYCRLDTATSMFLLLKEGRSSHVQRGYGKVQAEFPLGPVTTAHRGTYRCFGSYNNHAWSFPSEPVKLLVTGDIENTSLAPEDPTFPADTWGTYLLTTETGLQKDHALWDHTAQNLLRMGLAFLVLVALVWFLVEDWLSRKRTRERASRASTWEGRRRLNTQTLRAKRSGSGVKQTLNFDLLKLAGDVESNPGPSRGHMTEYKPTVRLATRDDVPRAVRTLAAAFADYPATRHTVDPDRHIERVTELQELFLTRVGLDIGKVWVADDGAAVAVWTTPESVEAGAVFAEIGPRMAELSGSRLAAQQQMEGLLAPHRPKEPAWFLATVGVSPDHQGKGLGSAVVLPGVEAAERAGVPAFLETSAPRNLPFYERLGFTVTADVEVPEGPRTWCMTRKPGA

SEQ ID NO: 4214 - protein, 581 aa, Artificial Sequence
  Synthetic Polypeptide
MALPVTALLLPLALLLHAARPACEVQLLESGGGLIQPGGSLRLSCAASGFTFSSHAMTWVRQAPGKGLEWVSAISGSGDYTHYADSVKGRFTISRDNSKNTVYLQMNSLRAEDSAVYYCAKDEDGGSLLGHRGQGTLVTVSSGTGGGGSGGGGSGGGGSEFGSLEEMYDTPTLSVHPGPEVISGEKVTFYCRLDTATSMFLLLKEGRSSHVQRGYGKVQAEFPLGPVTTAHRGTYRCFGSYNNHAWSFPSEPVKLLVTGDIENTSLAPEDPTFPADTWGTYLLTTETGLQKDHALWDHTAQNLLRMGLAFLVLVALVWFLVEDWLSRKRTRERASRASTWEGRRRLNTQTLRAKRSGSGATNFSLLKQAGDVEENPGPTRGHMTEYKPTVRLATRDDVPRAVRTLAAAFADYPATRHTVDPDRHIERVTELQELFLTRVGLDIGKVWVADDGAAVAVWTTPESVEAGAVFAEIGPRMAELSGSRLAAQQQMEGLLAPHRPKEPAWFLATVGVSPDHQGKGLGSAVVLPGVEAAERAGVPAFLETSAPRNLPFYERLGFTVTADVEVPEGPRTWCMTRKPGA

SEQ ID NO: 4215 - protein, 863 aa, Artificial Sequence
  Synthetic Polypeptide
MALPVTALLLPLALLLHAARPDIQMTQSPSSLSASVGDRVTITCKASDHINNWLAWYQQKPGQAPKLLIYGATTLETGVPSRFSGSGSGTDYTLTISSLQPEDFATYYCQQSWNTPWTFGQGTKLEIKRLEIGWLLLQAPRWVFKEEDPIHLRCHSWKNTALHKVTYLQNGKGRKYFHHNSDFYIPKATLKDSGSYFCRGLVGSKNVSSETVNITITQGLAVSTISSFFPPGYQVSFCLVMVLLFAVDTGLYFSVKTNIRSSTRDWKDHKFKWRKDPQDKRAKRSGSGATNFSLLKQAGDVEENPGPTSMDWIWRILFLVGAATGAHSFEQVQLQQPGAELVKPGASVKMSCKASGYAFSSYWINWMKQKPGQGLEWIGQIYPGDGDTNYNGKFKGRATLTADTSSSTAYMQLSSLTSEDSAVYFCARSITTVVGCAMDYWGQGTSVTVSSTRVHPGPEVISGEKVTFYCRLDTATSMFLLLKEGRSSHVQRGYGKVQAEFPLGPVTTAHRGTYRCFGSYNNHAWSFPSEPVKLLVTGDIENTSLAPEDPTFPADTWGTYLLTTETGLQKDHALWDHTAQNLLRMGLAFLVLVALVWFLVEDWLSRKRTRERASRASTWEGRRRLNTQTLRAKRSGSGVKQTLNFDLLKLAGDVESNPGPSRGHMTEYKPTVRLATRDDVPRAVRTLAAAFADYPATRHTVDPDRHIERVTELQELFLTRVGLDIGKVWVADDGAAVAVWTTPESVEAGAVFAEIGPRMAELSGSRLAAQQQMEGLLAPHRPKEPAWFLATVGVSPDHQGKGLGSAVVLPGVEAAERAGVPAFLETSAPRNLPFYERLGFTVTADVEVPEGPRTWCMTRKPGA

SEQ ID NO: 4216 - protein, 917 aa, Artificial Sequence
  Synthetic Polypeptide
MALPVTALLLPLALLLHAARPACEVQLLESGGGLIQPGGSLRLSCAASGFTFSSHAMTWVRQAPGKGLEWVSAISGSGDYTHYADSVKGRFTISRDNSKNTVYLQMNSLRAEDSAVYYCAKDEDGGSLLGHRGQGTLVTVSSGTGGGGSGGGGSGGGGSEFGSLEIGWLLLQAPRWVFKEEDPIHLRCHSWKNTALHKVTYLQNGKGRKYFHHNSDFYIPKATLKDSGSYFCRGLVGSKNVSSETVNITITQGLAVSTISSFFPPGYQVSFCLVMVLLFAVDTGLYFSVKTNIRSSTRDWKDHKFKWRKDPQDKRAKRSGSGATNFSLLKQAGDVEENPGPTSATMDWIWRILFLVGAATGAHSGPEVQLVESGGGLVQAGGSLRLSCAASGRTFSMGWFRQAPGKEREFVAAITYSGGSPYYADSVKGRFTISRDNAKNTVYLQMNSLKPEDTAVYYCAANPTYGSDWNAENWGQGTQVTVSSGSGGGGSGGGGSGGGGSFEGSTRVHPGPEVISGEKVTFYCRLDTATSMFLLLKEGRSSHVQRGYGKVQAEFPLGPVTTAHRGTYRCFGSYNNHAWSFPSEPVKLLVTGDIENTSLAPEDPTFPADTWGTYLLTTETGLQKDHALWDHTAQNLLRMGLAFLVLVALVWFLVEDWLSRKRTRERASRASTWEGRRRLNTQTLRAKRSGSGVKQTLNFDLLKLAGDVESNPGPSRGHMTEYKPTVRLATRDDVPRAVRTLAAAFADYPATRHTVDPDRHIERVTELQELFLTRVGLDIGKVWVADDGAAVAVWTTPESVEAGAVFAEIGPRMAELSGSRLAAQQQMEGLLAPHRPKEPAWFLATVGVSPDHQGKGLGSAVVLPGVEAAERAGVPAFLETSAPRNLPFYERLGFTVTADVEVPEGPRTWCMTRKPGA

SEQ ID NO: 4217 - protein, 1068 aa, Artificial Sequence
  Synthetic Polypeptide
MALPVTALLLPLALLLHAARPDIQMTQSPSSLSASVGDRVTITCKASDHINNWLAWYQQKPGQAPKLLIYGATTLETGVPSRFSGSGSGTDYTLTISSLQPEDFATYYCQQSWNTPWTFGQGTKLEIKRLEGQPKANPTVTLFPPSSEELQANKATLVCLISDFYPGAVTVAWKADGSPVKAGVETTKPSKQSNNKYAASSYLSLTPEQWKSHRSYSCQVTHEGSTVEKTVAPTECSGSIGWLLLQAPRWVFKEEDPIHLRCHSWKNTALHKVTYLQNGKGRKYFHHNSDFYIPKATLKDSGSYFCRGLVGSKNVSSETVNITITQGLAVSTISSFFPPGYQVSFCLVMVLLFAVDTGLYFSVKTNIRSSTRDWKDHKFKWRKDPQDKRAKRSGSGATNFSLLKQAGDVEENPGPTSMDWIWRILFLVGAATGAHSFEQVQLQQPGAELVKPGASVKMSCKASGYAFSSYWINWMKQKPGQGLEWIGQIYPGDGDTNYNGKFKGRATLTADTSSSTAYMQLSSLTSEDSAVYFCARSITTVVGCAMDYWGQGTSVTVSSTRASTKGPSVFPLAPSSKSTSGGTAALGCLVKDYFPEPVTVSWNSGALTSGVHTFPAVLQSSGLYSLSSVVTVPSSSLGTQTYICNVNHKPSNTKVDKRVEPKSCGTVHPGPEVISGEKVTFYCRLDTATSMFLLLKEGRSSHVQRGYGKVQAEFPLGPVTTAHRGTYRCFGSYNNHAWSFPSEPVKLLVTGDIENTSLAPEDPTFPADTWGTYLLTTETGLQKDHALWDHTAQNLLRMGLAFLVLVALVWFLVEDWLSRKRTRERASRASTWEGRRRLNTQTLRAKRSGSGVKQTLNFDLLKLAGDVESNPGPSRGGIHTMATYEVLCEVARKLGTDDREVVLFLLNVFIPQPTLAQLIGALRALKEEGRLTFPLLAECLFRAGRRDLLRDLLHLDPRFLERHLAGTMSYFSPYQLTVLHVDGELCARDIRSLIFLSKDTIGSRSTPQTFLHWVYCMENLDLLGPTDVDALMSMLRSLSRVDLQRQVQTLMGLHLSGPSHSQHYRHTP

SEQ ID NO: 4218 - protein, 1121 aa, Artificial Sequence
  Synthetic Polypeptide
MALPVTALLLPLALLLHAARPDIQMTQSPSSLSASVGDRVTITCKASDHINNWLAWYQQKPGQAPKLLIYGATTLETGVPSRFSGSGSGTDYTLTISSLQPEDFATYYCQQSWNTPWTFGQGTKLEIKRLEGQPKANPTVTLFPPSSEELQANKATLVCLISDFYPGAVTVAWKADGSPVKAGVETTKPSKQSNNKYAASSYLSLTPEQWKSHRSYSCQVTHEGSTVEKTVAPTECSGSIGWLLLQAPRWVFKEEDPIHLRCHSWKNTALHKVTYLQNGKGRKYFHHNSDFYIPKATLKDSGSYFCRGLVGSKNVSSETVNITITQGLAVSTISSFFPPGYQVSFCLVMVLLFAVDTGLYFSVKTNIRSSTRDWKDHKFKWRKDPQDKRAKRSGSGATNFSLLKQAGDVEENPGPTSMDWIWRILFLVGAATGAHSFEQVQLQQPGAELVKPGASVKMSCKASGYAFSSYWINWMKQKPGQGLEWIGQIYPGDGDTNYNGKFKGRATLTADTSSSTAYMQLSSLTSEDSAVYFCARSITTVVGCAMDYWGQGTSVTVSSTRASTKGPSVFPLAPSSKSTSGGTAALGCLVKDYFPEPVTVSWNSGALTSGVHTFPAVLQSSGLYSLSSVVTVPSSSLGTQTYICNVNHKPSNTKVDKRVEPKSCGTVHPGPEVISGEKVTFYCRLDTATSMFLLLKEGRSSHVQRGYGKVQAEFPLGPVTTAHRGTYRCFGSYNNHAWSFPSEPVKLLVTGDIENTSLAPEDPTFPADTWGTYLLTTETGLQKDHALWDHTAQNLLRMGLAFLVLVALVWFLVEDWLSRKRTRERASRASTWEGRRRLNTQTLRAKRSGSGVKQTLNFDLLKLAGDVESNPGPSRGGIHTMSDSKEVPSLPFLRHLLEELDSHEDSLLLFLCHDAAPGCTTVTQALCSLSQQRKLTLAALVEMLYVLQRMDLLKSRFGLSKEGAEQLLGTSFLTRYRKLMVCVGEELDSSELRALRLFACNLNPSLSTALSESSRFVELVLALENVGLVSPSSVSVLADMLRTLRRLDLCQQLVEYEQQEQARYRYCYAASPSLPVRTLRRGHGASEHEQLCMPVQESSDSPELLRTPVQESSSDSPEQTT

SEQ ID NO: 4219 - protein, 1076 aa, Artificial Sequence
  Synthetic Polypeptide
MALPVTALLLPLALLLHAARPDIQMTQSPSSLSASVGDRVTITCKASDHINNWLAWYQQKPGQAPKLLIYGATTLETGVPSRFSGSGSGTDYTLTISSLQPEDFATYYCQQSWNTPWTFGQGTKLEIKRLEGQPKANPTVTLFPPSSEELQANKATLVCLISDFYPGAVTVAWKADGSPVKAGVETTKPSKQSNNKYAASSYLSLTPEQWKSHRSYSCQVTHEGSTVEKTVAPTECSGSIGWLLLQAPRWVFKEEDPIHLRCHSWKNTALHKVTYLQNGKGRKYFHHNSDFYIPKATLKDSGSYFCRGLVGSKNVSSETVNITITQGLAVSTISSFFPPGYQVSFCLVMVLLFAVDTGLYFSVKTNIRSSTRDWKDHKFKWRKDPQDKRAKRSGSGATNFSLLKQAGDVEENPGPTSMDWIWRILFLVGAATGAHSFEQVQLQQPGAELVKPGASVKMSCKASGYAFSSYWINWMKQKPGQGLEWIGQIYPGDGDTNYNGKFKGRATLTADTSSSTAYMQLSSLTSEDSAVYFCARSITTVVGCAMDYWGQGTSVTVSSTRASTKGPSVFPLAPSSKSTSGGTAALGCLVKDYFPEPVTVSWNSGALTSGVHTFPAVLQSSGLYSLSSVVTVPSSSLGTQTYICNVNHKPSNTKVDKRVEPKSCGTVHPGPEVISGEKVTFYCRLDTATSMFLLLKEGRSSHVQRGYGKVQAEFPLGPVTTAHRGTYRCFGSYNNHAWSFPSEPVKLLVTGDIENTSLAPEDPTFPADTWGTYLLTTETGLQKDHALWDHTAQNLLRMGLAFLVLVALVWFLVEDWLSRKRTRERASRASTWEGRRRLNTQTLRAKRSGSGVKQTLNFDLLKLAGDVESNPGPSRGHMTEYKPTVRLATRDDVPRAVRTLAAAFADYPATRHTVDPDRHIERVTELQELFLTRVGLDIGKVWVADDGAAVAVWTTPESVEAGAVFAEIGPRMAELSGSRLAAQQQMEGLLAPHRPKEPAWFLATVGVSPDHQGKGLGSAVVLPGVEAAERAGVPAFLETSAPRNLPFYERLGFTVTADVEVPEGPRTWCMTRKPGA

SEQ ID NO: 4220 - protein, 1213 aa, Artificial Sequence
  Synthetic Polypeptide
MALPVTALLLPLALLLHAARPEVQLVESGGGLVQAGGSLRLSCAASGRTFSMGWFRQAPGKEREFVAAITYSGGSPYYADSVKGRFTISRDNAKNTVYLQMNSLKPEDTAVYYCAANPTYGSDWNAENWGQGTQVTVSSGTGGGGSGGGGSGGGGSEFDIQMTQSPSSLSASVGDRVTITCKASDHINNWLAWYQQKPGQAPKLLIYGATTLETGVPSRFSGSGSGTDYTLTISSLQPEDFATYYCQQSWNTPWTFGQGTKLEIKRLEGQPKANPTVTLFPPSSEELQANKATLVCLISDFYPGAVTVAWKADGSPVKAGVETTKPSKQSNNKYAASSYLSLTPEQWKSHRSYSCQVTHEGSTVEKTVAPTECSGSIGWLLLQAPRWVFKEEDPIHLRCHSWKNTALHKVTYLQNGKGRKYFHHNSDFYIPKATLKDSGSYFCRGLVGSKNVSSETVNITITQGLAVSTISSFFPPGYQVSFCLVMVLLFAVDTGLYFSVKTNIRSSTRDWKDHKFKWRKDPQDKRAKRSGSGATNFSLLKQAGDVEENPGPTSMDWIWRILFLVGAATGAHSFEQVQLQQPGAELVKPGASVKMSCKASGYAFSSYWINWMKQKPGQGLEWIGQIYPGDGDTNYNGKFKGRATLTADTSSSTAYMQLSSLTSEDSAVYFCARSITTVVGCAMDYWGQGTSVTVSSTRASTKGPSVFPLAPSSKSTSGGTAALGCLVKDYFPEPVTVSWNSGALTSGVHTFPAVLQSSGLYSLSSVVTVPSSSLGTQTYICNVNHKPSNTKVDKRVEPKSCGTVHPGPEVISGEKVTFYCRLDTATSMFLLLKEGRSSHVQRGYGKVQAEFPLGPVTTAHRGTYRCFGSYNNHAWSFPSEPVKLLVTGDIENTSLAPEDPTFPADTWGTYLLTTETGLQKDHALWDHTAQNLLRMGLAFLVLVALVWFLVEDWLSRKRTRERASRASTWEGRRRLNTQTLRAKRSGSGVKQTLNFDLLKLAGDVESNPGPSRGHMTEYKPTVRLATRDDVPRAVRTLAAAFADYPATRHTVDPDRHIERVTELQELFLTRVGLDIGKVWVADDGAAVAVWTTPESVEAGAVFAEIGPRMAELSGSRLAAQQQMEGLLAPHRPKEPAWFLATVGVSPDHQGKGLGSAVVLPGVEAAERAGVPAFLETSAPRNLPFYERLGFTVTADVEVPEGPRTWCMTRKPGA

SEQ ID NO: 4221 - protein, 1350 aa, Artificial Sequence
  Synthetic Polypeptide
MALPVTALLLPLALLLHAARPEVQLVESGGGLVQAGGSLRLSCAASGRTFSMGWFRQAPGKEREFVAAITYSGGSPYYADSVKGRFTISRDNAKNTVYLQMNSLKPEDTAVYYCAANPTYGSDWNAENWGQGTQVTVSSGTGGGGSGGGGSGGGGSEFDIQMTQSPSSLSASVGDRVTITCKASDHINNWLAWYQQKPGQAPKLLIYGATTLETGVPSRFSGSGSGTDYTLTISSLQPEDFATYYCQQSWNTPWTFGQGTKLEIKRLEGQPKANPTVTLFPPSSEELQANKATLVCLISDFYPGAVTVAWKADGSPVKAGVETTKPSKQSNNKYAASSYLSLTPEQWKSHRSYSCQVTHEGSTVEKTVAPTECSGSIGWLLLQAPRWVFKEEDPIHLRCHSWKNTALHKVTYLQNGKGRKYFHHNSDFYIPKATLKDSGSYFCRGLVGSKNVSSETVNITITQGLAVSTISSFFPPGYQVSFCLVMVLLFAVDTGLYFSVKTNIRSSTRDWKDHKFKWRKDPQDKRAKRSGSGATNFSLLKQAGDVEENPGPTSMDWIWRILFLVGAATGAHSGPEVQLVESGGGLVQAGGSLRLSCAASGRTFTMGWFRQAPGKEREFVAAISLSPTLAYYADSVKGRFTISRDNAKNTVVLQMNSLKPEDTALYYCAADRKSVMSIRPDYWGQGTQVTVSSGSGGGGSGGGGSGGGGSFEQVQLQQPGAELVKPGASVKMSCKASGYAFSSYWINWMKQKPGQGLEWIGQIYPGDGDTNYNGKFKGRATLTADTSSSTAYMQLSSLTSEDSAVYFCARSITTVVGCAMDYWGQGTSVTVSSTRASTKGPSVFPLAPSSKSTSGGTAALGCLVKDYFPEPVTVSWNSGALTSGVHTFPAVLQSSGLYSLSSVVTVPSSSLGTQTYICNVNHKPSNTKVDKRVEPKSCGTVHPGPEVISGEKVTFYCRLDTATSMFLLLKEGRSSHVQRGYGKVQAEFPLGPVTTAHRGTYRCFGSYNNHAWSFPSEPVKLLVTGDIENTSLAPEDPTFPADTWGTYLLTTETGLQKDHALWDHTAQNLLRMGLAFLVLVALVWFLVEDWLSRKRTRERASRASTWEGRRRLNTQTLRAKRSGSGVKQTLNFDLLKLAGDVESNPGPSRGHMTEYKPTVRLATRDDVPRAVRTLAAAFADYPATRHTVDPDRHIERVTELQELFLTRVGLDIGKVWVADDGAAVAVWTTPESVEAGAVFAEIGPRMAELSGSRLAAQQQMEGLLAPHRPKEPAWFLATVGVSPDHQGKGLGSAVVLPGVEAAERAGVPAFLETSAPRNLPFYERLGFTVTADVEVPEGPRTWCMTRKPGA

SEQ ID NO: 4222 - protein, 1083 aa, Artificial Sequence
  Synthetic Polypeptide
MALPVTALLLPLALLLHAARPEVQLVESGGGLVQAGGSLRLSCAASGRTFSMGWFRQAPGKEREFVAAITYSGGSPYYADSVKGRFTISRDNAKNTVYLQMNSLKPEDTAVYYCAANPTYGSDWNAENWGQGTQVTVSSLEGQPKANPTVTLFPPSSEELQANKATLVCLISDFYPGAVTVAWKADGSPVKAGVETTKPSKQSNNKYAASSYLSLTPEQWKSHRSYSCQVTHEGSTVEKTVAPTECSGSIGWLLLQAPRWVFKEEDPIHLRCHSWKNTALHKVTYLQNGKGRKYFHHNSDFYIPKATLKDSGSYFCRGLVGSKNVSSETVNITITQGLAVSTISSFFPPGYQVSFCLVMVLLFAVDTGLYFSVKTNIRSSTRDWKDHKFKWRKDPQDKRAKRSGSGATNFSLLKQAGDVEENPGPTSMDWIWRILFLVGAATGAHSGPEVQLVESGGGLVQAGGSLRLSCAASGRTFTMGWFRQAPGKEREFVAAISLSPTLAYYADSVKGRFTISRDNAKNTVVLQMNSLKPEDTALYYCAADRKSVMSIRPDYWGQGTQVTVSSTRASTKGPSVFPLAPSSKSTSGGTAALGCLVKDYFPEPVTVSWNSGALTSGVHTFPAVLQSSGLYSLSSVVTVPSSSLGTQTYICNVNHKPSNTKVDKRVEPKSCGTVHPGPEVISGEKVTFYCRLDTATSMFLLLKEGRSSHVQRGYGKVQAEFPLGPVTTAHRGTYRCFGSYNNHAWSFPSEPVKLLVTGDIENTSLAPEDPTFPADTWGTYLLTTETGLQKDHALWDHTAQNLLRMGLAFLVLVALVWFLVEDWLSRKRTRERASRASTWEGRRRLNTQTLRAKRSGSGVKQTLNFDLLKLAGDVESNPGPSRGHMTEYKPTVRLATRDDVPRAVRTLAAAFADYPATRHTVDPDRHIERVTELQELFLTRVGLDIGKVWVADDGAAVAVWTTPESVEAGAVFAEIGPRMAELSGSRLAAQQQMEGLLAPHRPKEPAWFLATVGVSPDHQGKGLGSAVVLPGVEAAERAGVPAFLETSAPRNLPFYERLGFTVTADVEVPEGPRTWCMTRKPGA

SEQ ID NO: 4223 - protein, 1091 aa, Artificial Sequence
  Synthetic Polypeptide
MALPVTALLLPLALLLHAARPDIQMTQSPSSLSASVGDRVTITCKASDHINNWLAWYQQKPGQAPKLLIYGATTLETGVPSRFSGSGSGTDYTLTISSLQPEDFATYYCQQSWNTPWTFGQGTKLEIKRLEDLKNVFPPEVAVFEPSEAEISHTQKATLVCLATGFYPDHVELSWWVNGKEVHSGVSTDPQPLKEQPALNDSRYCLSSRLRVSATFWQNPRNHFRCQVQFYGLSENDEWTQDRAKPVTQIVSAEAWGRADCGSIGWLLLQAPRWVFKEEDPIHLRCHSWKNTALHKVTYLQNGKGRKYFHHNSDFYIPKATLKDSGSYFCRGLVGSKNVSSETVNITITQGLAVSTISSFFPPGYQVSFCLVMVLLFAVDTGLYFSVKTNIRSSTRDWKDHKFKWRKDPQDKRAKRSGSGATNFSLLKQAGDVEENPGPTSMDWIWRILFLVGAATGAHSFEQVQLQQPGAELVKPGASVKMSCKASGYAFSSYWINWMKQKPGQGLEWIGQIYPGDGDTNYNGKFKGRATLTADTSSSTAYMQLSSLTSEDSAVYFCARSITTVVGCAMDYWGQGTSVTVSSTRIQNPDPAVYQLRDSKSSDKSVCLFTDFDSQTNVSQSKDSDVYITDKTVLDMRSMDFKSNSAVAWSNKSDFACANAFNNSIIPEDTFFPSPESSCGTVHPGPEVISGEKVTFYCRLDTATSMFLLLKEGRSSHVQRGYGKVQAEFPLGPVTTAHRGTYRCFGSYNNHAWSFPSEPVKLLVTGDIENTSLAPEDPTFPADTWGTYLLTTETGLQKDHALWDHTAQNLLRMGLAFLVLVALVWFLVEDWLSRKRTRERASRASTWEGRRRLNTQTLRAKRSGSGVKQTLNFDLLKLAGDVESNPGPSRGHMTEYKPTVRLATRDDVPRAVRTLAAAFADYPATRHTVDPDRHIERVTELQELFLTRVGLDIGKVWVADDGAAVAVWTTPESVEAGAVFAEIGPRMAELSGSRLAAQQQMEGLLAPHRPKEPAWFLATVGVSPDHQGKGLGSAVVLPGVEAAERAGVPAFLETSAPRNLPFYERLGFTVTADVEVPEGPRTWCMTRKPGA

SEQ ID NO: 4224 - protein, 1228 aa, Artificial Sequence
  Synthetic Polypeptide
MALPVTALLLPLALLLHAARPEVQLVESGGGLVQAGGSLRLSCAASGRTFSMGWFRQAPGKEREFVAAITYSGGSPYYADSVKGRFTISRDNAKNTVYLQMNSLKPEDTAVYYCAANPTYGSDWNAENWGQGTQVTVSSGTGGGGSGGGGSGGGGSEFDIQMTQSPSSLSASVGDRVTITCKASDHINNWLAWYQQKPGQAPKLLIYGATTLETGVPSRFSGSGSGTDYTLTISSLQPEDFATYYCQQSWNTPWTFGQGTKLEIKRLEDLKNVFPPEVAVFEPSEAEISHTQKATLVCLATGFYPDHVELSWWVNGKEVHSGVSTDPQPLKEQPALNDSRYCLSSRLRVSATFWQNPRNHFRCQVQFYGLSENDEWTQDRAKPVTQIVSAEAWGRADCGSIGWLLLQAPRWVFKEEDPIHLRCHSWKNTALHKVTYLQNGKGRKYFHHNSDFYIPKATLKDSGSYFCRGLVGSKNVSSETVNITITQGLAVSTISSFFPPGYQVSFCLVMVLLFAVDTGLYFSVKTNIRSSTRDWKDHKFKWRKDPQDKRAKRSGSGATNFSLLKQAGDVEENPGPTSMDWIWRILFLVGAATGAHSFEQVQLQQPGAELVKPGASVKMSCKASGYAFSSYWINWMKQKPGQGLEWIGQIYPGDGDTNYNGKFKGRATLTADTSSSTAYMQLSSLTSEDSAVYFCARSITTVVGCAMDYWGQGTSVTVSSTRIQNPDPAVYQLRDSKSSDKSVCLFTDFDSQTNVSQSKDSDVYITDKTVLDMRSMDFKSNSAVAWSNKSDFACANAFNNSIIPEDTFFPSPESSCGTVHPGPEVISGEKVTFYCRLDTATSMFLLLKEGRSSHVQRGYGKVQAEFPLGPVTTAHRGTYRCFGSYNNHAWSFPSEPVKLLVTGDIENTSLAPEDPTFPADTWGTYLLTTETGLQKDHALWDHTAQNLLRMGLAFLVLVALVWFLVEDWLSRKRTRERASRASTWEGRRRLNTQTLRAKRSGSGVKQTLNFDLLKLAGDVESNPGPSRGHMTEYKPTVRLATRDDVPRAVRTLAAAFADYPATRHTVDPDRHIERVTELQELFLTRVGLDIGKVWVADDGAAVAVWTTPESVEAGAVFAEIGPRMAELSGSRLAAQQQMEGLLAPHRPKEPAWFLATVGVSPDHQGKGLGSAVVLPGVEAAERAGVPAFLETSAPRNLPFYERLGFTVTADVEVPEGPRTWCMTRKPGA

SEQ ID NO: 4225 - protein, 1365 aa, Artificial Sequence
  Synthetic Polypeptide
MALPVTALLLPLALLLHAARPEVQLVESGGGLVQAGGSLRLSCAASGRTFSMGWFRQAPGKEREFVAAITYSGGSPYYADSVKGRFTISRDNAKNTVYLQMNSLKPEDTAVYYCAANPTYGSDWNAENWGQGTQVTVSSGTGGGGSGGGGSGGGGSEFDIQMTQSPSSLSASVGDRVTITCKASDHINNWLAWYQQKPGQAPKLLIYGATTLETGVPSRFSGSGSGTDYTLTISSLQPEDFATYYCQQSWNTPWTFGQGTKLEIKRLEDLKNVFPPEVAVFEPSEAEISHTQKATLVCLATGFYPDHVELSWWVNGKEVHSGVSTDPQPLKEQPALNDSRYCLSSRLRVSATFWQNPRNHFRCQVQFYGLSENDEWTQDRAKPVTQIVSAEAWGRADCGSIGWLLLQAPRWVFKEEDPIHLRCHSWKNTALHKVTYLQNGKGRKYFHHNSDFYIPKATLKDSGSYFCRGLVGSKNVSSETVNITITQGLAVSTISSFFPPGYQVSFCLVMVLLFAVDTGLYFSVKTNIRSSTRDWKDHKFKWRKDPQDKRAKRSGSGATNFSLLKQAGDVEENPGPTSMDWIWRILFLVGAATGAHSGPEVQLVESGGGLVQAGGSLRLSCAASGRTFTMGWFRQAPGKEREFVAAISLSPTLAYYADSVKGRFTISRDNAKNTVVLQMNSLKPEDTALYYCAADRKSVMSIRPDYWGQGTQVTVSSGSGGGGSGGGGSGGGGSFEQVQLQQPGAELVKPGASVKMSCKASGYAFSSYWINWMKQKPGQGLEWIGQIYPGDGDTNYNGKFKGRATLTADTSSSTAYMQLSSLTSEDSAVYFCARSITTVVGCAMDYWGQGTSVTVSSTRIQNPDPAVYQLRDSKSSDKSVCLFTDFDSQTNVSQSKDSDVYITDKTVLDMRSMDFKSNSAVAWSNKSDFACANAFNNSIIPEDTFFPSPESSCGTVHPGPEVISGEKVTFYCRLDTATSMFLLLKEGRSSHVQRGYGKVQAEFPLGPVTTAHRGTYRCFGSYNNHAWSFPSEPVKLLVTGDIENTSLAPEDPTFPADTWGTYLLTTETGLQKDHALWDHTAQNLLRMGLAFLVLVALVWFLVEDWLSRKRTRERASRASTWEGRRRLNTQTLRAKRSGSGVKQTLNFDLLKLAGDVESNPGPSRGHMTEYKPTVRLATRDDVPRAVRTLAAAFADYPATRHTVDPDRHIERVTELQELFLTRVGLDIGKVWVADDGAAVAVWTTPESVEAGAVFAEIGPRMAELSGSRLAAQQQMEGLLAPHRPKEPAWFLATVGVSPDHQGKGLGSAVVLPGVEAAERAGVPAFLETSAPRNLPFYERLGFTVTADVEVPEGPRTWCMTRKPGA

SEQ ID NO: 4226 - protein, 1098 aa, Artificial Sequence
  Synthetic Polypeptide
MALPVTALLLPLALLLHAARPEVQLVESGGGLVQAGGSLRLSCAASGRTFSMGWFRQAPGKEREFVAAITYSGGSPYYADSVKGRFTISRDNAKNTVYLQMNSLKPEDTAVYYCAANPTYGSDWNAENWGQGTQVTVSSLEDLKNVFPPEVAVFEPSEAEISHTQKATLVCLATGFYPDHVELSWWVNGKEVHSGVSTDPQPLKEQPALNDSRYCLSSRLRVSATFWQNPRNHFRCQVQFYGLSENDEWTQDRAKPVTQIVSAEAWGRADCGSIGWLLLQAPRWVFKEEDPIHLRCHSWKNTALHKVTYLQNGKGRKYFHHNSDFYIPKATLKDSGSYFCRGLVGSKNVSSETVNITITQGLAVSTISSFFPPGYQVSFCLVMVLLFAVDTGLYFSVKTNIRSSTRDWKDHKFKWRKDPQDKRAKRSGSGATNFSLLKQAGDVEENPGPTSMDWIWRILFLVGAATGAHSGPEVQLVESGGGLVQAGGSLRLSCAASGRTFTMGWFRQAPGKEREFVAAISLSPTLAYYADSVKGRFTISRDNAKNTVVLQMNSLKPEDTALYYCAADRKSVMSIRPDYWGQGTQVTVSSTRIQNPDPAVYQLRDSKSSDKSVCLFTDFDSQTNVSQSKDSDVYITDKTVLDMRSMDFKSNSAVAWSNKSDFACANAFNNSIIPEDTFFPSPESSCGTVHPGPEVISGEKVTFYCRLDTATSMFLLLKEGRSSHVQRGYGKVQAEFPLGPVTTAHRGTYRCFGSYNNHAWSFPSEPVKLLVTGDIENTSLAPEDPTFPADTWGTYLLTTETGLQKDHALWDHTAQNLLRMGLAFLVLVALVWFLVEDWLSRKRTRERASRASTWEGRRRLNTQTLRAKRSGSGVKQTLNFDLLKLAGDVESNPGPSRGHMTEYKPTVRLATRDDVPRAVRTLAAAFADYPATRHTVDPDRHIERVTELQELFLTRVGLDIGKVWVADDGAAVAVWTTPESVEAGAVFAEIGPRMAELSGSRLAAQQQMEGLLAPHRPKEPAWFLATVGVSPDHQGKGLGSAVVLPGVEAAERAGVPAFLETSAPRNLPFYERLGFTVTADVEVPEGPRTWCMTRKPGA

SEQ ID NO: 4227 - protein, 544 aa, Artificial Sequence; identical to SEQ ID NO: 4058
  Synthetic Polypeptide

SEQ ID NO: 4228 - protein, 890 aa, Artificial Sequence
  Synthetic Polypeptide
MALPVTALLLPLALLLHAARPDIQMTQSPSSLSASVGDRVTITCKASDHINNWLAWYQQKPGQAPKLLIYGATTLETGVPSRFSGSGSGTDYTLTISSLQPEDFATYYCQQSWNTPWTFGQGTKLEIKRLEHPGPEVISGEKVTFYCRLDTATSMFLLLKEGRSSHVQRGYGKVQAEFPLGPVTTAHRGTYRCFGSYNNHAWSFPSEPVKLLVTGDIENTSLAPEDPTFPADTWGTYLLTTETGLQKDHALWDHTAQNLLRMGLAFLVLVALVWFLVEDWLSRKRTRERASRASTWEGRRRLNTQTLRAKRSGSGATNFSLLKQAGDVEENPGPTSMDWIWRILFLVGAATGAHSFEQVQLQQPGAELVKPGASVKMSCKASGYAFSSYWINWMKQKPGQGLEWIGQIYPGDGDTNYNGKFKGRATLTADTSSSTAYMQLSSLTSEDSAVYFCARSITTVVGCAMDYWGQGTSVTVSSTRVHPGPEVISGEKVTFYCRLDTATSMFLLLKEGRSSHVQRGYGKVQAEFPLGPVTTAHRGTYRCFGSYNNHAWSFPSEPVKLLVTGDIENTSLAPEDPTFPADTWGTYLLTTETGLQKDHALWDHTAQNLLRMGLAFLVLVALVWFLVEDWLSRKRTRERASRASTWEGRRRLNTQTLRAKRSGSGVKQTLNFDLLKLAGDVESNPGPSRGHMTEYKPTVRLATRDDVPRAVRTLAAAFADYPATRHTVDPDRHIERVTELQELFLTRVGLDIGKVWVADDGAAVAVWTTPESVEAGAVFAEIGPRMAELSGSRLAAQQQMEGLLAPHRPKEPAWFLATVGVSPDHQGKGLGSAVVLPGVEAAERAGVPAFLETSAPRNLPFYERLGFTVTADVEVPEGPRTWCMTRKPGA

SEQ ID NO: 4229 - protein, 944 aa, Artificial Sequence
  Synthetic Polypeptide
MALPVTALLLPLALLLHAARPACEVQLLESGGGLIQPGGSLRLSCAASGFTFSSHAMTWVRQAPGKGLEWVSAISGSGDYTHYADSVKGRFTISRDNSKNTVYLQMNSLRAEDSAVYYCAKDEDGGSLLGHRGQGTLVTVSSGTGGGGSGGGGSGGGGSEFGSLEHPGPEVISGEKVTFYCRLDTATSMFLLLKEGRSSHVQRGYGKVQAEFPLGPVTTAHRGTYRCFGSYNNHAWSFPSEPVKLLVTGDIENTSLAPEDPTFPADTWGTYLLTTETGLQKDHALWDHTAQNLLRMGLAFLVLVALVWFLVEDWLSRKRTRERASRASTWEGRRRLNTQTLRAKRSGSGATNFSLLKQAGDVEENPGPTSATMDWIWRILFLVGAATGAHSGPEVQLVESGGGLVQAGGSLRLSCAASGRTFSMGWFRQAPGKEREFVAAITYSGGSPYYADSVKGRFTISRDNAKNTVYLQMNSLKPEDTAVYYCAANPTYGSDWNAENWGQGTQVTVSSGSGGGGSGGGGSGGGGSFEGSTRVHPGPEVISGEKVTFYCRLDTATSMFLLLKEGRSSHVQRGYGKVQAEFPLGPVTTAHRGTYRCFGSYNNHAWSFPSEPVKLLVTGDIENTSLAPEDPTFPADTWGTYLLTTETGLQKDHALWDHTAQNLLRMGLAFLVLVALVWFLVEDWLSRKRTRERASRASTWEGRRRLNTQTLRAKRSGSGVKQTLNFDLLKLAGDVESNPGPSRGHMTEYKPTVRLATRDDVPRAVRTLAAAFADYPATRHTVDPDRHIERVTELQELFLTRVGLDIGKVWVADDGAAVAVWTTPESVEAGAVFAEIGPRMAELSGSRLAAQQQMEGLLAPHRPKEPAWFLATVGVSPDHQGKGLGSAVVLPGVEAAERAGVPAFLETSAPRNLPFYERLGFTVTADVEVPEGPRTWCMTRKPGA

SEQ ID NO: 4230 - protein, 1095 aa, Artificial Sequence
  Synthetic Polypeptide
MALPVTALLLPLALLLHAARPDIQMTQSPSSLSASVGDRVTITCKASDHINNWLAWYQQKPGQAPKLLIYGATTLETGVPSRFSGSGSGTDYTLTISSLQPEDFATYYCQQSWNTPWTFGQGTKLEIKRLEGQPKANPTVTLFPPSSEELQANKATLVCLISDFYPGAVTVAWKADGSPVKAGVETTKPSKQSNNKYAASSYLSLTPEQWKSHRSYSCQVTHEGSTVEKTVAPTECSGSHPGPEVISGEKVTFYCRLDTATSMFLLLKEGRSSHVQRGYGKVQAEFPLGPVTTAHRGTYRCFGSYNNHAWSFPSEPVKLLVTGDIENTSLAPEDPTFPADTWGTYLLTTETGLQKDHALWDHTAQNLLRMGLAFLVLVALVWFLVEDWLSRKRTRERASRASTWEGRRRLNTQTLRAKRSGSGATNFSLLKQAGDVEENPGPTSMDWIWRILFLVGAATGAHSFEQVQLQQPGAELVKPGASVKMSCKASGYAFSSYWINWMKQKPGQGLEWIGQIYPGDGDTNYNGKFKGRATLTADTSSSTAYMQLSSLTSEDSAVYFCARSITTVVGCAMDYWGQGTSVTVSSTRASTKGPSVFPLAPSSKSTSGGTAALGCLVKDYFPEPVTVSWNSGALTSGVHTFPAVLQSSGLYSLSSVVTVPSSSLGTQTYICNVNHKPSNTKVDKRVEPKSCGTVHPGPEVISGEKVTFYCRLDTATSMFLLLKEGRSSHVQRGYGKVQAEFPLGPVTTAHRGTYRCFGSYNNHAWSFPSEPVKLLVTGDIENTSLAPEDPTFPADTWGTYLLTTETGLQKDHALWDHTAQNLLRMGLAFLVLVALVWFLVEDWLSRKRTRERASRASTWEGRRRLNTQTLRAKRSGSGVKQTLNFDLLKLAGDVESNPGPSRGGIHTMATYEVLCEVARKLGTDDREVVLFLLNVFIPQPTLAQLIGALRALKEEGRLTFPLLAECLFRAGRRDLLRDLLHLDPRFLERHLAGTMSYFSPYQLTVLHVDGELCARDIRSLIFLSKDTIGSRSTPQTFLHWVYCMENLDLLGPTDVDALMSMLRSLSRVDLQRQVQTLMGLHLSGPSHSQHYRHTP

SEQ ID NO: 4231 - protein, 1148 aa, Artificial Sequence
  Synthetic Polypeptide
MALPVTALLLPLALLLHAARPDIQMTQSPSSLSASVGDRVTITCKASDHINNWLAWYQQKPGQAPKLLIYGATTLETGVPSRFSGSGSGTDYTLTISSLQPEDFATYYCQQSWNTPWTFGQGTKLEIKRLEGQPKANPTVTLFPPSSEELQANKATLVCLISDFYPGAVTVAWKADGSPVKAGVETTKPSKQSNNKYAASSYLSLTPEQWKSHRSYSCQVTHEGSTVEKTVAPTECSGSHPGPEVISGEKVTFYCRLDTATSMFLLLKEGRSSHVQRGYGKVQAEFPLGPVTTAHRGTYRCFGSYNNHAWSFPSEPVKLLVTGDIENTSLAPEDPTFPADTWGTYLLTTETGLQKDHALWDHTAQNLLRMGLAFLVLVALVWFLVEDWLSRKRTRERASRASTWEGRRRLNTQTLRAKRSGSGATNFSLLKQAGDVEENPGPTSMDWIWRILFLVGAATGAHSFEQVQLQQPGAELVKPGASVKMSCKASGYAFSSYWINWMKQKPGQGLEWIGQIYPGDGDTNYNGKFKGRATLTADTSSSTAYMQLSSLTSEDSAVYFCARSITTVVGCAMDYWGQGTSVTVSSTRASTKGPSVFPLAPSSKSTSGGTAALGCLVKDYFPEPVTVSWNSGALTSGVHTFPAVLQSSGLYSLSSVVTVPSSSLGTQTYICNVNHKPSNTKVDKRVEPKSCGTVHPGPEVISGEKVTFYCRLDTATSMFLLLKEGRSSHVQRGYGKVQAEFPLGPVTTAHRGTYRCFGSYNNHAWSFPSEPVKLLVTGDIENTSLAPEDPTFPADTWGTYLLTTETGLQKDHALWDHTAQNLLRMGLAFLVLVALVWFLVEDWLSRKRTRERASRASTWEGRRRLNTQTLRAKRSGSGVKQTLNFDLLKLAGDVESNPGPSRGGIHTMSDSKEVPSLPFLRHLLEELDSHEDSLLLFLCHDAAPGCTTVTQALCSLSQQRKLTLAALVEMLYVLQRMDLLKSRFGLSKEGAEQLLGTSFLTRYRKLMVCVGEELDSSELRALRLFACNLNPSLSTALSESSRFVELVLALENVGLVSPSSVSVLADMLRTLRRLDLCQQLVEYEQQEQARYRYCYAASPSLPVRTLRRGHGASEHEQLCMPVQESSDSPELLRTPVQESSSDSPEQTT

SEQ ID NO: 4232 - protein, 1103 aa, Artificial Sequence
  Synthetic Polypeptide
MALPVTALLLPLALLLHAARPDIQMTQSPSSLSASVGDRVTITCKASDHINNWLAWYQQKPGQAPKLLIYGATTLETGVPSRFSGSGSGTDYTLTISSLQPEDFATYYCQQSWNTPWTFGQGTKLEIKRLEGQPKANPTVTLFPPSSEELQANKATLVCLISDFYPGAVTVAWKADGSPVKAGVETTKPSKQSNNKYAASSYLSLTPEQWKSHRSYSCQVTHEGSTVEKTVAPTECSGSHPGPEVISGEKVTFYCRLDTATSMFLLLKEGRSSHVQRGYGKVQAEFPLGPVTTAHRGTYRCFGSYNNHAWSFPSEPVKLLVTGDIENTSLAPEDPTFPADTWGTYLLTTETGLQKDHALWDHTAQNLLRMGLAFLVLVALVWFLVEDWLSRKRTRERASRASTWEGRRRLNTQTLRAKRSGSGATNFSLLKQAGDVEENPGPTSMDWIWRILFLVGAATGAHSFEQVQLQQPGAELVKPGASVKMSCKASGYAFSSYWINWMKQKPGQGLEWIGQIYPGDGDTNYNGKFKGRATLTADTSSSTAYMQLSSLTSEDSAVYFCARSITTVVGCAMDYWGQGTSVTVSSTRASTKGPSVFPLAPSSKSTSGGTAALGCLVKDYFPEPVTVSWNSGALTSGVHTFPAVLQSSGLYSLSSVVTVPSSSLGTQTYICNVNHKPSNTKVDKRVEPKSCGTVHPGPEVISGEKVTFYCRLDTATSMFLLLKEGRSSHVQRGYGKVQAEFPLGPVTTAHRGTYRCFGSYNNHAWSFPSEPVKLLVTGDIENTSLAPEDPTFPADTWGTYLLTTETGLQKDHALWDHTAQNLLRMGLAFLVLVALVWFLVEDWLSRKRTRERASRASTWEGRRRLNTQTLRAKRSGSGVKQTLNFDLLKLAGDVESNPGPSRGHMTEYKPTVRLATRDDVPRAVRTLAAAFADYPATRHTVDPDRHIERVTELQELFLTRVGLDIGKVWVADDGAAVAVWTTPESVEAGAVFAEIGPRMAELSGSRLAAQQQMEGLLAPHRPKEPAWFLATVGVSPDHQGKGLGSAVVLPGVEAAERAGVPAFLETSAPRNLPFYERLGFTVTADVEVPEGPRTWCMTRKPGA

SEQ ID NO: 4233 - protein, 1240 aa, Artificial Sequence
  Synthetic Polypeptide
MALPVTALLLPLALLLHAARPEVQLVESGGGLVQAGGSLRLSCAASGRTFSMGWFRQAPGKEREFVAAITYSGGSPYYADSVKGRFTISRDNAKNTVYLQMNSLKPEDTAVYYCAANPTYGSDWNAENWGQGTQVTVSSGTGGGGSGGGGSGGGGSEFDIQMTQSPSSLSASVGDRVTITCKASDHINNWLAWYQQKPGQAPKLLIYGATTLETGVPSRFSGSGSGTDYTLTISSLQPEDFATYYCQQSWNTPWTFGQGTKLEIKRLEGQPKANPTVTLFPPSSEELQANKATLVCLISDFYPGAVTVAWKADGSPVKAGVETTKPSKQSNNKYAASSYLSLTPEQWKSHRSYSCQVTHEGSTVEKTVAPTECSGSHPGPEVISGEKVTFYCRLDTATSMFLLLKEGRSSHVQRGYGKVQAEFPLGPVTTAHRGTYRCFGSYNNHAWSFPSEPVKLLVTGDIENTSLAPEDPTFPADTWGTYLLTTETGLQKDHALWDHTAQNLLRMGLAFLVLVALVWFLVEDWLSRKRTRERASRASTWEGRRRLNTQTLRAKRSGSGATNFSLLKQAGDVEENPGPTSMDWIWRILFLVGAATGAHSFEQVQLQQPGAELVKPGASVKMSCKASGYAFSSYWINWMKQKPGQGLEWIGQIYPGDGDTNYNGKFKGRATLTADTSSSTAYMQLSSLTSEDSAVYFCARSITTVVGCAMDYWGQGTSVTVSSTRASTKGPSVFPLAPSSKSTSGGTAALGCLVKDYFPEPVTVSWNSGALTSGVHTFPAVLQSSGLYSLSSVVTVPSSSLGTQTYICNVNHKPSNTKVDKRVEPKSCGTVHPGPEVISGEKVTFYCRLDTATSMFLLLKEGRSSHVQRGYGKVQAEFPLGPVTTAHRGTYRCFGSYNNHAWSFPSEPVKLLVTGDIENTSLAPEDPTFPADTWGTYLLTTETGLQKDHALWDHTAQNLLRMGLAFLVLVALVWFLVEDWLSRKRTRERASRASTWEGRRRLNTQTLRAKRSGSGVKQTLNFDLLKLAGDVESNPGPSRGHMTEYKPTVRLATRDDVPRAVRTLAAAFADYPATRHTVDPDRHIERVTELQELFLTRVGLDIGKVWVADDGAAVAVWTTPESVEAGAVFAEIGPRMAELSGSRLAAQQQMEGLLAPHRPKEPAWFLATVGVSPDHQGKGLGSAVVLPGVEAAERAGVPAFLETSAPRNLPFYERLGFTVTADVEVPEGPRTWCMTRKPGA

SEQ ID NO: 4234 - protein, 1377 aa, Artificial Sequence
  Synthetic Polypeptide
MALPVTALLLPLALLLHAARPEVQLVESGGGLVQAGGSLRLSCAASGRTFSMGWFRQAPGKEREFVAAITYSGGSPYYADSVKGRFTISRDNAKNTVYLQMNSLKPEDTAVYYCAANPTYGSDWNAENWGQGTQVTVSSGTGGGGSGGGGSGGGGSEFDIQMTQSPSSLSASVGDRVTITCKASDHINNWLAWYQQKPGQAPKLLIYGATTLETGVPSRFSGSGSGTDYTLTISSLQPEDFATYYCQQSWNTPWTFGQGTKLEIKRLEGQPKANPTVTLFPPSSEELQANKATLVCLISDFYPGAVTVAWKADGSPVKAGVETTKPSKQSNNKYAASSYLSLTPEQWKSHRSYSCQVTHEGSTVEKTVAPTECSGSHPGPEVISGEKVTFYCRLDTATSMFLLLKEGRSSHVQRGYGKVQAEFPLGPVTTAHRGTYRCFGSYNNHAWSFPSEPVKLLVTGDIENTSLAPEDPTFPADTWGTYLLTTETGLQKDHALWDHTAQNLLRMGLAFLVLVALVWFLVEDWLSRKRTRERASRASTWEGRRRLNTQTLRAKRSGSGATNFSLLKQAGDVEENPGPTSMDWIWRILFLVGAATGAHSGPEVQLVESGGGLVQAGGSLRLSCAASGRTFTMGWFRQAPGKEREFVAAISLSPTLAYYADSVKGRFTISRDNAKNTVVLQMNSLKPEDTALYYCAADRKSVMSIRPDYWGQGTQVTVSSGSGGGGSGGGGSGGGGSFEQVQLQQPGAELVKPGASVKMSCKASGYAFSSYWINWMKQKPGQGLEWIGQIYPGDGDTNYNGKFKGRATLTADTSSSTAYMQLSSLTSEDSAVYFCARSITTVVGCAMDYWGQGTSVTVSSTRASTKGPSVFPLAPSSKSTSGGTAALGCLVKDYFPEPVTVSWNSGALTSGVHTFPAVLQSSGLYSLSSVVTVPSSSLGTQTYICNVNHKPSNTKVDKRVEPKSCGTVHPGPEVISGEKVTFYCRLDTATSMFLLLKEGRSSHVQRGYGKVQAEFPLGPVTTAHRGTYRCFGSYNNHAWSFPSEPVKLLVTGDIENTSLAPEDPTFPADTWGTYLLTTETGLQKDHALWDHTAQNLLRMGLAFLVLVALVWFLVEDWLSRKRTRERASRASTWEGRRRLNTQTLRAKRSGSGVKQTLNFDLLKLAGDVESNPGPSRGHMTEYKPTVRLATRDDVPRAVRTLAAAFADYPATRHTVDPDRHIERVTELQELFLTRVGLDIGKVWVADDGAAVAVWTTPESVEAGAVFAEIGPRMAELSGSRLAAQQQMEGLLAPHRPKEPAWFLATVGVSPDHQGKGLGSAVVLPGVEAAERAGVPAFLETSAPRNLPFYERLGFTVTADVEVPEGPRTWCMTRKPGA

SEQ ID NO: 4235 - protein, 1110 aa, Artificial Sequence
  Synthetic Polypeptide
MALPVTALLLPLALLLHAARPEVQLVESGGGLVQAGGSLRLSCAASGRTFSMGWFRQAPGKEREFVAAITYSGGSPYYADSVKGRFTISRDNAKNTVYLQMNSLKPEDTAVYYCAANPTYGSDWNAENWGQGTQVTVSSLEGQPKANPTVTLFPPSSEELQANKATLVCLISDFYPGAVTVAWKADGSPVKAGVETTKPSKQSNNKYAASSYLSLTPEQWKSHRSYSCQVTHEGSTVEKTVAPTECSGSHPGPEVISGEKVTFYCRLDTATSMFLLLKEGRSSHVQRGYGKVQAEFPLGPVTTAHRGTYRCFGSYNNHAWSFPSEPVKLLVTGDIENTSLAPEDPTFPADTWGTYLLTTETGLQKDHALWDHTAQNLLRMGLAFLVLVALVWFLVEDWLSRKRTRERASRASTWEGRRRLNTQTLRAKRSGSGATNFSLLKQAGDVEENPGPTSMDWIWRILFLVGAATGAHSGPEVQLVESGGGLVQAGGSLRLSCAASGRTFTMGWFRQAPGKEREFVAAISLSPTLAYYADSVKGRFTISRDNAKNTVVLQMNSLKPEDTALYYCAADRKSVMSIRPDYWGQGTQVTVSSTRASTKGPSVFPLAPSSKSTSGGTAALGCLVKDYFPEPVTVSWNSGALTSGVHTFPAVLQSSGLYSLSSVVTVPSSSLGTQTYICNVNHKPSNTKVDKRVEPKSCGTVHPGPEVISGEKVTFYCRLDTATSMFLLLKEGRSSHVQRGYGKVQAEFPLGPVTTAHRGTYRCFGSYNNHAWSFPSEPVKLLVTGDIENTSLAPEDPTFPADTWGTYLLTTETGLQKDHALWDHTAQNLLRMGLAFLVLVALVWFLVEDWLSRKRTRERASRASTWEGRRRLNTQTLRAKRSGSGVKQTLNFDLLKLAGDVESNPGPSRGHMTEYKPTVRLATRDDVPRAVRTLAAAFADYPATRHTVDPDRHIERVTELQELFLTRVGLDIGKVWVADDGAAVAVWTTPESVEAGAVFAEIGPRMAELSGSRLAAQQQMEGLLAPHRPKEPAWFLATVGVSPDHQGKGLGSAVVLPGVEAAERAGVPAFLETSAPRNLPFYERLGFTVTADVEVPEGPRTWCMTRKPGA

SEQ ID NO: 4236 - protein, 1118 aa, Artificial Sequence
  Synthetic Polypeptide
MALPVTALLLPLALLLHAARPDIQMTQSPSSLSASVGDRVTITCKASDHINNWLAWYQQKPGQAPKLLIYGATTLETGVPSRFSGSGSGTDYTLTISSLQPEDFATYYCQQSWNTPWTFGQGTKLEIKRLEDLKNVFPPEVAVFEPSEAEISHTQKATLVCLATGFYPDHVELSWWVNGKEVHSGVSTDPQPLKEQPALNDSRYCLSSRLRVSATFWQNPRNHFRCQVQFYGLSENDEWTQDRAKPVTQIVSAEAWGRADCGSHPGPEVISGEKVTFYCRLDTATSMFLLLKEGRSSHVQRGYGKVQAEFPLGPVTTAHRGTYRCFGSYNNHAWSFPSEPVKLLVTGDIENTSLAPEDPTFPADTWGTYLLTTETGLQKDHALWDHTAQNLLRMGLAFLVLVALVWFLVEDWLSRKRTRERASRASTWEGRRRLNTQTLRAKRSGSGATNFSLLKQAGDVEENPGPTSMDWIWRILFLVGAATGAHSFEQVQLQQPGAELVKPGASVKMSCKASGYAFSSYWINWMKQKPGQGLEWIGQIYPGDGDTNYNGKFKGRATLTADTSSSTAYMQLSSLTSEDSAVYFCARSITTVVGCAMDYWGQGTSVTVSSTRIQNPDPAVYQLRDSKSSDKSVCLFTDFDSQTNVSQSKDSDVYITDKTVLDMRSMDFKSNSAVAWSNKSDFACANAFNNSIIPEDTFFPSPESSCGTVHPGPEVISGEKVTFYCRLDTATSMFLLLKEGRSSHVQRGYGKVQAEFPLGPVTTAHRGTYRCFGSYNNHAWSFPSEPVKLLVTGDIENTSLAPEDPTFPADTWGTYLLTTETGLQKDHALWDHTAQNLLRMGLAFLVLVALVWFLVEDWLSRKRTRERASRASTWEGRRRLNTQTLRAKRSGSGVKQTLNFDLLKLAGDVESNPGPSRGHMTEYKPTVRLATRDDVPRAVRTLAAAFADYPATRHTVDPDRHIERVTELQELFLTRVGLDIGKVWVADDGAAVAVWTTPESVEAGAVFAEIGPRMAELSGSRLAAQQQMEGLLAPHRPKEPAWFLATVGVSPDHQGKGLGSAVVLPGVEAAERAGVPAFLETSAPRNLPFYERLGFTVTADVEVPEGPRTWCMTRKPGA

SEQ ID NO: 4237 - protein, 1255 aa, Artificial Sequence
  Synthetic Polypeptide
MALPVTALLLPLALLLHAARPEVQLVESGGGLVQAGGSLRLSCAASGRTFSMGWFRQAPGKEREFVAAITYSGGSPYYADSVKGRFTISRDNAKNTVYLQMNSLKPEDTAVYYCAANPTYGSDWNAENWGQGTQVTVSSGTGGGGSGGGGSGGGGSEFDIQMTQSPSSLSASVGDRVTITCKASDHINNWLAWYQQKPGQAPKLLIYGATTLETGVPSRFSGSGSGTDYTLTISSLQPEDFATYYCQQSWNTPWTFGQGTKLEIKRLEDLKNVFPPEVAVFEPSEAEISHTQKATLVCLATGFYPDHVELSWWVNGKEVHSGVSTDPQPLKEQPALNDSRYCLSSRLRVSATFWQNPRNHFRCQVQFYGLSENDEWTQDRAKPVTQIVSAEAWGRADCGSHPGPEVISGEKVTFYCRLDTATSMFLLLKEGRSSHVQRGYGKVQAEFPLGPVTTAHRGTYRCFGSYNNHAWSFPSEPVKLLVTGDIENTSLAPEDPTFPADTWGTYLLTTETGLQKDHALWDHTAQNLLRMGLAFLVLVALVWFLVEDWLSRKRTRERASRASTWEGRRRLNTQTLRAKRSGSGATNFSLLKQAGDVEENPGPTSMDWIWRILFLVGAATGAHSFEQVQLQQPGAELVKPGASVKMSCKASGYAFSSYWINWMKQKPGQGLEWIGQIYPGDGDTNYNGKFKGRATLTADTSSSTAYMQLSSLTSEDSAVYFCARSITTVVGCAMDYWGQGTSVTVSSTRIQNPDPAVYQLRDSKSSDKSVCLFTDFDSQTNVSQSKDSDVYITDKTVLDMRSMDFKSNSAVAWSNKSDFACANAFNNSIIPEDTFFPSPESSCGTVHPGPEVISGEKVTFYCRLDTATSMFLLLKEGRSSHVQRGYGKVQAEFPLGPVTTAHRGTYRCFGSYNNHAWSFPSEPVKLLVTGDIENTSLAPEDPTFPADTWGTYLLTTETGLQKDHALWDHTAQNLLRMGLAFLVLVALVWFLVEDWLSRKRTRERASRASTWEGRRRLNTQTLRAKRSGSGVKQTLNFDLLKLAGDVESNPGPSRGHMTEYKPTVRLATRDDVPRAVRTLAAAFADYPATRHTVDPDRHIERVTELQELFLTRVGLDIGKVWVADDGAAVAVWTTPESVEAGAVFAEIGPRMAELSGSRLAAQQQMEGLLAPHRPKEPAWFLATVGVSPDHQGKGLGSAVVLPGVEAAERAGVPAFLETSAPRNLPFYERLGFTVTADVEVPEGPRTWCMTRKPGA

SEQ ID NO: 4238 - protein, 1392 aa, Artificial Sequence
  Synthetic Polypeptide
MALPVTALLLPLALLLHAARPEVQLVESGGGLVQAGGSLRLSCAASGRTFSMGWFRQAPGKEREFVAAITYSGGSPYYADSVKGRFTISRDNAKNTVYLQMNSLKPEDTAVYYCAANPTYGSDWNAENWGQGTQVTVSSGTGGGGSGGGGSGGGGSEFDIQMTQSPSSLSASVGDRVTITCKASDHINNWLAWYQQKPGQAPKLLIYGATTLETGVPSRFSGSGSGTDYTLTISSLQPEDFATYYCQQSWNTPWTFGQGTKLEIKRLEDLKNVFPPEVAVFEPSEAEISHTQKATLVCLATGFYPDHVELSWWVNGKEVHSGVSTDPQPLKEQPALNDSRYCLSSRLRVSATFWQNPRNHFRCQVQFYGLSENDEWTQDRAKPVTQIVSAEAWGRADCGSHPGPEVISGEKVTFYCRLDTATSMFLLLKEGRSSHVQRGYGKVQAEFPLGPVTTAHRGTYRCFGSYNNHAWSFPSEPVKLLVTGDIENTSLAPEDPTFPADTWGTYLLTTETGLQKDHALWDHTAQNLLRMGLAFLVLVALVWFLVEDWLSRKRTRERASRASTWEGRRRLNTQTLRAKRSGSGATNFSLLKQAGDVEENPGPTSMDWIWRILFLVGAATGAHSGPEVQLVESGGGLVQAGGSLRLSCAASGRTFTMGWFRQAPGKEREFVAAISLSPTLAYYADSVKGRFTISRDNAKNTVVLQMNSLKPEDTALYYCAADRKSVMSIRPDYWGQGTQVTVSSGSGGGGSGGGGSGGGGSFEQVQLQQPGAELVKPGASVKMSCKASGYAFSSYWINWMKQKPGQGLEWIGQIYPGDGDTNYNGKFKGRATLTADTSSSTAYMQLSSLTSEDSAVYFCARSITTVVGCAMDYWGQGTSVTVSSTRIQNPDPAVYQLRDSKSSDKSVCLFTDFDSQTNVSQSKDSDVYITDKTVLDMRSMDFKSNSAVAWSNKSDFACANAFNNSIIPEDTFFPSPESSCGTVHPGPEVISGEKVTFYCRLDTATSMFLLLKEGRSSHVQRGYGKVQAEFPLGPVTTAHRGTYRCFGSYNNHAWSFPSEPVKLLVTGDIENTSLAPEDPTFPADTWGTYLLTTETGLQKDHALWDHTAQNLLRMGLAFLVLVALVWFLVEDWLSRKRTRERASRASTWEGRRRLNTQTLRAKRSGSGVKQTLNFDLLKLAGDVESNPGPSRGHMTEYKPTVRLATRDDVPRAVRTLAAAFADYPATRHTVDPDRHIERVTELQELFLTRVGLDIGKVWVADDGAAVAVWTTPESVEAGAVFAEIGPRMAELSGSRLAAQQQMEGLLAPHRPKEPAWFLATVGVSPDHQGKGLGSAVVLPGVEAAERAGVPAFLETSAPRNLPFYERLGFTVTADVEVPEGPRTWCMTRKPGA

SEQ ID NO: 4239 - protein, 1125 aa, Artificial Sequence
  Synthetic Polypeptide
MALPVTALLLPLALLLHAARPEVQLVESGGGLVQAGGSLRLSCAASGRTFSMGWFRQAPGKEREFVAAITYSGGSPYYADSVKGRFTISRDNAKNTVYLQMNSLKPEDTAVYYCAANPTYGSDWNAENWGQGTQVTVSSLEDLKNVFPPEVAVFEPSEAEISHTQKATLVCLATGFYPDHVELSWWVNGKEVHSGVSTDPQPLKEQPALNDSRYCLSSRLRVSATFWQNPRNHFRCQVQFYGLSENDEWTQDRAKPVTQIVSAEAWGRADCGSHPGPEVISGEKVTFYCRLDTATSMFLLLKEGRSSHVQRGYGKVQAEFPLGPVTTAHRGTYRCFGSYNNHAWSFPSEPVKLLVTGDIENTSLAPEDPTFPADTWGTYLLTTETGLQKDHALWDHTAQNLLRMGLAFLVLVALVWFLVEDWLSRKRTRERASRASTWEGRRRLNTQTLRAKRSGSGATNFSLLKQAGDVEENPGPTSMDWIWRILFLVGAATGAHSGPEVQLVESGGGLVQAGGSLRLSCAASGRTFTMGWFRQAPGKEREFVAAISLSPTLAYYADSVKGRFTISRDNAKNTVVLQMNSLKPEDTALYYCAADRKSVMSIRPDYWGQGTQVTVSSTRIQNPDPAVYQLRDSKSSDKSVCLFTDFDSQTNVSQSKDSDVYITDKTVLDMRSMDFKSNSAVAWSNKSDFACANAFNNSIIPEDTFFPSPESSCGTVHPGPEVISGEKVTFYCRLDTATSMFLLLKEGRSSHVQRGYGKVQAEFPLGPVTTAHRGTYRCFGSYNNHAWSFPSEPVKLLVTGDIENTSLAPEDPTFPADTWGTYLLTTETGLQKDHALWDHTAQNLLRMGLAFLVLVALVWFLVEDWLSRKRTRERASRASTWEGRRRLNTQTLRAKRSGSGVKQTLNFDLLKLAGDVESNPGPSRGHMTEYKPTVRLATRDDVPRAVRTLAAAFADYPATRHTVDPDRHIERVTELQELFLTRVGLDIGKVWVADDGAAVAVWTTPESVEAGAVFAEIGPRMAELSGSRLAAQQQMEGLLAPHRPKEPAWFLATVGVSPDHQGKGLGSAVVLPGVEAAERAGVPAFLETSAPRNLPFYERLGFTVTADVEVPEGPRTWCMTRKPGA

SEQ ID NO: 4240 - protein, 571 aa, Artificial Sequence
  Synthetic Polypeptide
MALPVTALLLPLALLLHAARPACEVQLLESGGGLIQPGGSLRLSCAASGFTFSSHAMTWVRQAPGKGLEWVSAISGSGDYTHYADSVKGRFTISRDNSKNTVYLQMNSLRAEDSAVYYCAKDEDGGSLLGHRGQGTLVTVSSGTGGGGSGGGGSGGGGSEFGSLEHPGPEVISGEKVTFYCRLDTATSMFLLLKEGRSSHVQRGYGKVQAEFPLGPVTTAHRGTYRCFGSYNNHAWSFPSEPVKLLVTGDIENTSLAPEDPTFPADTWGTYLLTTETGLQKDHALWDHTAQNLLRMGLAFLVLVALVWFLVEDWLSRKRTRERASRASTWEGRRRLNTQTLRAKRSGSGATNFSLLKQAGDVEENPGPTRGHMTEYKPTVRLATRDDVPRAVRTLAAAFADYPATRHTVDPDRHIERVTELQELFLTRVGLDIGKVWVADDGAAVAVWTTPESVEAGAVFAEIGPRMAELSGSRLAAQQQMEGLLAPHRPKEPAWFLATVGVSPDHQGKGLGSAVVLPGVEAAERAGVPAFLETSAPRNLPFYERLGFTVTADVEVPEGPRTWCMTRKPGA

SEQ ID NO: 4241 - protein, 779 aa, Artificial Sequence
  Synthetic Polypeptide
MALPVTALLLPLALLLHAARPDIQMTQSPSSLSASVGDRVTITCKASDHINNWLAWYQQKPGQAPKLLIYGATTLETGVPSRFSGSGSGTDYTLTISSLQPEDFATYYCQQSWNTPWTFGQGTKLEIKRLEIGWLLLQAPRWVFKEEDPIHLRCHSWKNTALHKVTYLQNGKGRKYFHHNSDFYIPKATLKDSGSYFCRGLVGSKNVSSETVNITITQGLAVSTISSFFPPGYQVSFCLVMVLLFAVDTGLYFSVKTNIRSSTRDWKDHKFKWRKDPQDKRAKRSGSGATNFSLLKQAGDVEENPGPTSMDWIWRILFLVGAATGAHSFEQVQLQQPGAELVKPGASVKMSCKASGYAFSSYWINWMKQKPGQGLEWIGQIYPGDGDTNYNGKFKGRATLTADTSSSTAYMQLSSLTSEDSAVYFCARSITTVVGCAMDYWGQGTSVTVSSTRGDIENTSLAPEDPTFPADTWGTYLLTTETGLQKDHALWDHTAQNLLRMGLAFLVLVALVWFLVEDWLSRKRTRERASRASTWEGRRRLNTQTLRAKRSGSGVKQTLNFDLLKLAGDVESNPGPSRGHMTEYKPTVRLATRDDVPRAVRTLAAAFADYPATRHTVDPDRHIERVTELQELFLTRVGLDIGKVWVADDGAAVAVWTTPESVEAGAVFAEIGPRMAELSGSRLAAQQQMEGLLAPHRPKEPAWFLATVGVSPDHQGKGLGSAVVLPGVEAAERAGVPAFLETSAPRNLPFYERLGFTVTADVEVPEGPRTWCMTRKPGA

SEQ ID NO: 4242 - protein, 833 aa, Artificial Sequence
  Synthetic Polypeptide
MALPVTALLLPLALLLHAARPACEVQLLESGGGLIQPGGSLRLSCAASGFTFSSHAMTWVRQAPGKGLEWVSAISGSGDYTHYADSVKGRFTISRDNSKNTVYLQMNSLRAEDSAVYYCAKDEDGGSLLGHRGQGTLVTVSSGTGGGGSGGGGSGGGGSEFGSLEIGWLLLQAPRWVFKEEDPIHLRCHSWKNTALHKVTYLQNGKGRKYFHHNSDFYIPKATLKDSGSYFCRGLVGSKNVSSETVNITITQGLAVSTISSFFPPGYQVSFCLVMVLLFAVDTGLYFSVKTNIRSSTRDWKDHKFKWRKDPQDKRAKRSGSGATNFSLLKQAGDVEENPGPTSATMDWIWRILFLVGAATGAHSGPEVQLVESGGGLVQAGGSLRLSCAASGRTFSMGWFRQAPGKEREFVAAITYSGGSPYYADSVKGRFTISRDNAKNTVYLQMNSLKPEDTAVYYCAANPTYGSDWNAENWGQGTQVTVSSGSGGGGSGGGGSGGGGSFEGSTRGDIENTSLAPEDPTFPADTWGTYLLTTETGLQKDHALWDHTAQNLLRMGLAFLVLVALVWFLVEDWLSRKRTRERASRASTWEGRRRLNTQTLRAKRSGSGVKQTLNFDLLKLAGDVESNPGPSRGHMTEYKPTVRLATRDDVPRAVRTLAAAFADYPATRHTVDPDRHIERVTELQELFLTRVGLDIGKVWVADDGAAVAVWTTPESVEAGAVFAEIGPRMAELSGSRLAAQQQMEGLLAPHRPKEPAWFLATVGVSPDHQGKGLGSAVVLPGVEAAERAGVPAFLETSAPRNLPFYERLGFTVTADVEVPEGPRTWCMTRKPGA

SEQ ID NO: 4243 - protein, 984 aa, Artificial Sequence
  Synthetic Polypeptide
MALPVTALLLPLALLLHAARPDIQMTQSPSSLSASVGDRVTITCKASDHINNWLAWYQQKPGQAPKLLIYGATTLETGVPSRFSGSGSGTDYTLTISSLQPEDFATYYCQQSWNTPWTFGQGTKLEIKRLEGQPKANPTVTLFPPSSEELQANKATLVCLISDFYPGAVTVAWKADGSPVKAGVETTKPSKQSNNKYAASSYLSLTPEQWKSHRSYSCQVTHEGSTVEKTVAPTECSGSIGWLLLQAPRWVFKEEDPIHLRCHSWKNTALHKVTYLQNGKGRKYFHHNSDFYIPKATLKDSGSYFCRGLVGSKNVSSETVNITITQGLAVSTISSFFPPGYQVSFCLVMVLLFAVDTGLYFSVKTNIRSSTRDWKDHKFKWRKDPQDKRAKRSGSGATNFSLLKQAGDVEENPGPTSMDWIWRILFLVGAATGAHSFEQVQLQQPGAELVKPGASVKMSCKASGYAFSSYWINWMKQKPGQGLEWIGQIYPGDGDTNYNGKFKGRATLTADTSSSTAYMQLSSLTSEDSAVYFCARSITTVVGCAMDYWGQGTSVTVSSTRASTKGPSVFPLAPSSKSTSGGTAALGCLVKDYFPEPVTVSWNSGALTSGVHTFPAVLQSSGLYSLSSVVTVPSSSLGTQTYICNVNHKPSNTKVDKRVEPKSCGTGDIENTSLAPEDPTFPADTWGTYLLTTETGLQKDHALWDHTAQNLLRMGLAFLVLVALVWFLVEDWLSRKRTRERASRASTWEGRRRLNTQTLRAKRSGSGVKQTLNFDLLKLAGDVESNPGPSRGGIHTMATYEVLCEVARKLGTDDREVVLFLLNVFIPQPTLAQLIGALRALKEEGRLTFPLLAECLFRAGRRDLLRDLLHLDPRFLERHLAGTMSYFSPYQLTVLHVDGELCARDIRSLIFLSKDTIGSRSTPQTFLHWVYCMENLDLLGPTDVDALMSMLRSLSRVDLQRQVQTLMGLHLSGPSHSQHYRHTP

SEQ ID NO: 4244 - protein, 1037 aa, Artificial Sequence
  Synthetic Polypeptide
MALPVTALLLPLALLLHAARPDIQMTQSPSSLSASVGDRVTITCKASDHINNWLAWYQQKPGQAPKLLIYGATTLETGVPSRFSGSGSGTDYTLTISSLQPEDFATYYCQQSWNTPWTFGQGTKLEIKRLEGQPKANPTVTLFPPSSEELQANKATLVCLISDFYPGAVTVAWKADGSPVKAGVETTKPSKQSNNKYAASSYLSLTPEQWKSHRSYSCQVTHEGSTVEKTVAPTECSGSIGWLLLQAPRWVFKEEDPIHLRCHSWKNTALHKVTYLQNGKGRKYFHHNSDFYIPKATLKDSGSYFCRGLVGSKNVSSETVNITITQGLAVSTISSFFPPGYQVSFCLVMVLLFAVDTGLYFSVKTNIRSSTRDWKDHKFKWRKDPQDKRAKRSGSGATNFSLLKQAGDVEENPGPTSMDWIWRILFLVGAATGAHSFEQVQLQQPGAELVKPGASVKMSCKASGYAFSSYWINWMKQKPGQGLEWIGQIYPGDGDTNYNGKFKGRATLTADTSSSTAYMQLSSLTSEDSAVYFCARSITTVVGCAMDYWGQGTSVTVSSTRASTKGPSVFPLAPSSKSTSGGTAALGCLVKDYFPEPVTVSWNSGALTSGVHTFPAVLQSSGLYSLSSVVTVPSSSLGTQTYICNVNHKPSNTKVDKRVEPKSCGTGDIENTSLAPEDPTFPADTWGTYLLTTETGLQKDHALWDHTAQNLLRMGLAFLVLVALVWFLVEDWLSRKRTRERASRASTWEGRRRLNTQTLRAKRSGSGVKQTLNFDLLKLAGDVESNPGPSRGGIHTMSDSKEVPSLPFLRHLLEELDSHEDSLLLFLCHDAAPGCTTVTQALCSLSQQRKLTLAALVEMLYVLQRMDLLKSRFGLSKEGAEQLLGTSFLTRYRKLMVCVGEELDSSELRALRLFACNLNPSLSTALSESSRFVELVLALENVGLVSPSSVSVLADMLRTLRRLDLCQQLVEYEQQEQARYRYCYAASPSLPVRTLRRGHGASEHEQLCMPVQESSDSPELLRTPVQESSSDSPEQTT

SEQ ID NO: 4245 - protein, 992 aa, Artificial Sequence
  Synthetic Polypeptide
MALPVTALLLPLALLLHAARPDIQMTQSPSSLSASVGDRVTITCKASDHINNWLAWYQQKPGQAPKLLIYGATTLETGVPSRFSGSGSGTDYTLTISSLQPEDFATYYCQQSWNTPWTFGQGTKLEIKRLEGQPKANPTVTLFPPSSEELQANKATLVCLISDFYPGAVTVAWKADGSPVKAGVETTKPSKQSNNKYAASSYLSLTPEQWKSHRSYSCQVTHEGSTVEKTVAPTECSGSIGWLLLQAPRWVFKEEDPIHLRCHSWKNTALHKVTYLQNGKGRKYFHHNSDFYIPKATLKDSGSYFCRGLVGSKNVSSETVNITITQGLAVSTISSFFPPGYQVSFCLVMVLLFAVDTGLYFSVKTNIRSSTRDWKDHKFKWRKDPQDKRAKRSGSGATNFSLLKQAGDVEENPGPTSMDWIWRILFLVGAATGAHSFEQVQLQQPGAELVKPGASVKMSCKASGYAFSSYWINWMKQKPGQGLEWIGQIYPGDGDTNYNGKFKGRATLTADTSSSTAYMQLSSLTSEDSAVYFCARSITTVVGCAMDYWGQGTSVTVSSTRASTKGPSVFPLAPSSKSTSGGTAALGCLVKDYFPEPVTVSWNSGALTSGVHTFPAVLQSSGLYSLSSVVTVPSSSLGTQTYICNVNHKPSNTKVDKRVEPKSCGTGDIENTSLAPEDPTFPADTWGTYLLTTETGLQKDHALWDHTAQNLLRMGLAFLVLVALVWFLVEDWLSRKRTRERASRASTWEGRRRLNTQTLRAKRSGSGVKQTLNFDLLKLAGDVESNPGPSRGHMTEYKPTVRLATRDDVPRAVRTLAAAFADYPATRHTVDPDRHIERVTELQELFLTRVGLDIGKVWVADDGAAVAVWTTPESVEAGAVFAEIGPRMAELSGSRLAAQQQMEGLLAPHRPKEPAWFLATVGVSPDHQGKGLGSAVVLPGVEAAERAGVPAFLETSAPRNLPFYERLGFTVTADVEVPEGPRTWCMTRKPGA

SEQ ID NO: 4246 - protein, 1129 aa, Artificial Sequence
  Synthetic Polypeptide
MALPVTALLLPLALLLHAARPEVQLVESGGGLVQAGGSLRLSCAASGRTFSMGWFRQAPGKEREFVAAITYSGGSPYYADSVKGRFTISRDNAKNTVYLQMNSLKPEDTAVYYCAANPTYGSDWNAENWGQGTQVTVSSGTGGGGSGGGGSGGGGSEFDIQMTQSPSSLSASVGDRVTITCKASDHINNWLAWYQQKPGQAPKLLIYGATTLETGVPSRFSGSGSGTDYTLTISSLQPEDFATYYCQQSWNTPWTFGQGTKLEIKRLEGQPKANPTVTLFPPSSEELQANKATLVCLISDFYPGAVTVAWKADGSPVKAGVETTKPSKQSNNKYAASSYLSLTPEQWKSHRSYSCQVTHEGSTVEKTVAPTECSGSIGWLLLQAPRWVFKEEDPIHLRCHSWKNTALHKVTYLQNGKGRKYFHHNSDFYIPKATLKDSGSYFCRGLVGSKNVSSETVNITITQGLAVSTISSFFPPGYQVSFCLVMVLLFAVDTGLYFSVKTNIRSSTRDWKDHKFKWRKDPQDKRAKRSGSGATNFSLLKQAGDVEENPGPTSMDWIWRILFLVGAATGAHSFEQVQLQQPGAELVKPGASVKMSCKASGYAFSSYWINWMKQKPGQGLEWIGQIYPGDGDTNYNGKFKGRATLTADTSSSTAYMQLSSLTSEDSAVYFCARSITTVVGCAMDYWGQGTSVTVSSTRASTKGPSVFPLAPSSKSTSGGTAALGCLVKDYFPEPVTVSWNSGALTSGVHTFPAVLQSSGLYSLSSVVTVPSSSLGTQTYICNVNHKPSNTKVDKRVEPKSCGTGDIENTSLAPEDPTFPADTWGTYLLTTETGLQKDHALWDHTAQNLLRMGLAFLVLVALVWFLVEDWLSRKRTRERASRASTWEGRRRLNTQTLRAKRSGSGVKQTLNFDLLKLAGDVESNPGPSRGHMTEYKPTVRLATRDDVPRAVRTLAAAFADYPATRHTVDPDRHIERVTELQELFLTRVGLDIGKVWVADDGAAVAVWTTPESVEAGAVFAEIGPRMAELSGSRLAAQQQMEGLLAPHRPKEPAWFLATVGVSPDHQGKGLGSAVVLPGVEAAERAGVPAFLETSAPRNLPFYERLGFTVTADVEVPEGPRTWCMTRKPGA

SEQ ID NO: 4247 - protein, 1266 aa, Artificial Sequence
  Synthetic Polypeptide
MALPVTALLLPLALLLHAARPEVQLVESGGGLVQAGGSLRLSCAASGRTFSMGWFRQAPGKEREFVAAITYSGGSPYYADSVKGRFTISRDNAKNTVYLQMNSLKPEDTAVYYCAANPTYGSDWNAENWGQGTQVTVSSGTGGGGSGGGGSGGGGSEFDIQMTQSPSSLSASVGDRVTITCKASDHINNWLAWYQQKPGQAPKLLIYGATTLETGVPSRFSGSGSGTDYTLTISSLQPEDFATYYCQQSWNTPWTFGQGTKLEIKRLEGQPKANPTVTLFPPSSEELQANKATLVCLISDFYPGAVTVAWKADGSPVKAGVETTKPSKQSNNKYAASSYLSLTPEQWKSHRSYSCQVTHEGSTVEKTVAPTECSGSIGWLLLQAPRWVFKEEDPIHLRCHSWKNTALHKVTYLQNGKGRKYFHHNSDFYIPKATLKDSGSYFCRGLVGSKNVSSETVNITITQGLAVSTISSFFPPGYQVSFCLVMVLLFAVDTGLYFSVKTNIRSSTRDWKDHKFKWRKDPQDKRAKRSGSGATNFSLLKQAGDVEENPGPTSMDWIWRILFLVGAATGAHSGPEVQLVESGGGLVQAGGSLRLSCAASGRTFTMGWFRQAPGKEREFVAAISLSPTLAYYADSVKGRFTISRDNAKNTVVLQMNSLKPEDTALYYCAADRKSVMSIRPDYWGQGTQVTVSSGSGGGGSGGGGSGGGGSFEQVQLQQPGAELVKPGASVKMSCKASGYAFSSYWINWMKQKPGQGLEWIGQIYPGDGDTNYNGKFKGRATLTADTSSSTAYMQLSSLTSEDSAVYFCARSITTVVGCAMDYWGQGTSVTVSSTRASTKGPSVFPLAPSSKSTSGGTAALGCLVKDYFPEPVTVSWNSGALTSGVHTFPAVLQSSGLYSLSSVVTVPSSSLGTQTYICNVNHKPSNTKVDKRVEPKSCGTGDIENTSLAPEDPTFPADTWGTYLLTTETGLQKDHALWDHTAQNLLRMGLAFLVLVALVWFLVEDWLSRKRTRERASRASTWEGRRRLNTQTLRAKRSGSGVKQTLNFDLLKLAGDVESNPGPSRGHMTEYKPTVRLATRDDVPRAVRTLAAAFADYPATRHTVDPDRHIERVTELQELFLTRVGLDIGKVWVADDGAAVAVWTTPESVEAGAVFAEIGPRMAELSGSRLAAQQQMEGLLAPHRPKEPAWFLATVGVSPDHQGKGLGSAVVLPGVEAAERAGVPAFLETSAPRNLPFYERLGFTVTADVEVPEGPRTWCMTRKPGA

SEQ ID NO: 4248 - protein, 999 aa, Artificial Sequence
  Synthetic Polypeptide
MALPVTALLLPLALLLHAARPEVQLVESGGGLVQAGGSLRLSCAASGRTFSMGWFRQAPGKEREFVAAITYSGGSPYYADSVKGRFTISRDNAKNTVYLQMNSLKPEDTAVYYCAANPTYGSDWNAENWGQGTQVTVSSLEGQPKANPTVTLFPPSSEELQANKATLVCLISDFYPGAVTVAWKADGSPVKAGVETTKPSKQSNNKYAASSYLSLTPEQWKSHRSYSCQVTHEGSTVEKTVAPTECSGSIGWLLLQAPRWVFKEEDPIHLRCHSWKNTALHKVTYLQNGKGRKYFHHNSDFYIPKATLKDSGSYFCRGLVGSKNVSSETVNITITQGLAVSTISSFFPPGYQVSFCLVMVLLFAVDTGLYFSVKTNIRSSTRDWKDHKFKWRKDPQDKRAKRSGSGATNFSLLKQAGDVEENPGPTSMDWIWRILFLVGAATGAHSGPEVQLVESGGGLVQAGGSLRLSCAASGRTFTMGWFRQAPGKEREFVAAISLSPTLAYYADSVKGRFTISRDNAKNTVVLQMNSLKPEDTALYYCAADRKSVMSIRPDYWGQGTQVTVSSTRASTKGPSVFPLAPSSKSTSGGTAALGCLVKDYFPEPVTVSWNSGALTSGVHTFPAVLQSSGLYSLSSVVTVPSSSLGTQTYICNVNHKPSNTKVDKRVEPKSCGTGDIENTSLAPEDPTFPADTWGTYLLTTETGLQKDHALWDHTAQNLLRMGLAFLVLVALVWFLVEDWLSRKRTRERASRASTWEGRRRLNTQTLRAKRSGSGVKQTLNFDLLKLAGDVESNPGPSRGHMTEYKPTVRLATRDDVPRAVRTLAAAFADYPATRHTVDPDRHIERVTELQELFLTRVGLDIGKVWVADDGAAVAVWTTPESVEAGAVFAEIGPRMAELSGSRLAAQQQMEGLLAPHRPKEPAWFLATVGVSPDHQGKGLGSAVVLPGVEAAERAGVPAFLETSAPRNLPFYERLGFTVTADVEVPEGPRTWCMTRKPGA

SEQ ID NO: 4249 - protein, 1007 aa, Artificial Sequence
  Synthetic Polypeptide
MALPVTALLLPLALLLHAARPDIQMTQSPSSLSASVGDRVTITCKASDHINNWLAWYQQKPGQAPKLLIYGATTLETGVPSRFSGSGSGTDYTLTISSLQPEDFATYYCQQSWNTPWTFGQGTKLEIKRLEDLKNVFPPEVAVFEPSEAEISHTQKATLVCLATGFYPDHVELSWWVNGKEVHSGVSTDPQPLKEQPALNDSRYCLSSRLRVSATFWQNPRNHFRCQVQFYGLSENDEWTQDRAKPVTQIVSAEAWGRADCGSIGWLLLQAPRWVFKEEDPIHLRCHSWKNTALHKVTYLQNGKGRKYFHHNSDFYIPKATLKDSGSYFCRGLVGSKNVSSETVNITITQGLAVSTISSFFPPGYQVSFCLVMVLLFAVDTGLYFSVKTNIRSSTRDWKDHKFKWRKDPQDKRAKRSGSGATNFSLLKQAGDVEENPGPTSMDWIWRILFLVGAATGAHSFEQVQLQQPGAELVKPGASVKMSCKASGYAFSSYWINWMKQKPGQGLEWIGQIYPGDGDTNYNGKFKGRATLTADTSSSTAYMQLSSLTSEDSAVYFCARSITTVVGCAMDYWGQGTSVTVSSTRIQNPDPAVYQLRDSKSSDKSVCLFTDFDSQTNVSQSKDSDVYITDKTVLDMRSMDFKSNSAVAWSNKSDFACANAFNNSIIPEDTFFPSPESSCGTGDIENTSLAPEDPTFPADTWGTYLLTTETGLQKDHALWDHTAQNLLRMGLAFLVLVALVWFLVEDWLSRKRTRERASRASTWEGRRRLNTQTLRAKRSGSGVKQTLNFDLLKLAGDVESNPGPSRGHMTEYKPTVRLATRDDVPRAVRTLAAAFADYPATRHTVDPDRHIERVTELQELFLTRVGLDIGKVWVADDGAAVAVWTTPESVEAGAVFAEIGPRMAELSGSRLAAQQQMEGLLAPHRPKEPAWFLATVGVSPDHQGKGLGSAVVLPGVEAAERAGVPAFLETSAPRNLPFYERLGFTVTADVEVPEGPRTWCMTRKPGA

SEQ ID NO: 4250 - protein, 1144 aa, Artificial Sequence
  Synthetic Polypeptide
MALPVTALLLPLALLLHAARPEVQLVESGGGLVQAGGSLRLSCAASGRTFSMGWFRQAPGKEREFVAAITYSGGSPYYADSVKGRFTISRDNAKNTVYLQMNSLKPEDTAVYYCAANPTYGSDWNAENWGQGTQVTVSSGTGGGGSGGGGSGGGGSEFDIQMTQSPSSLSASVGDRVTITCKASDHINNWLAWYQQKPGQAPKLLIYGATTLETGVPSRFSGSGSGTDYTLTISSLQPEDFATYYCQQSWNTPWTFGQGTKLEIKRLEDLKNVFPPEVAVFEPSEAEISHTQKATLVCLATGFYPDHVELSWWVNGKEVHSGVSTDPQPLKEQPALNDSRYCLSSRLRVSATFWQNPRNHFRCQVQFYGLSENDEWTQDRAKPVTQIVSAEAWGRADCGSIGWLLLQAPRWVFKEEDPIHLRCHSWKNTALHKVTYLQNGKGRKYFHHNSDFYIPKATLKDSGSYFCRGLVGSKNVSSETVNITITQGLAVSTISSFFPPGYQVSFCLVMVLLFAVDTGLYFSVKTNIRSSTRDWKDHKFKWRKDPQDKRAKRSGSGATNFSLLKQAGDVEENPGPTSMDWIWRILFLVGAATGAHSFEQVQLQQPGAELVKPGASVKMSCKASGYAFSSYWINWMKQKPGQGLEWIGQIYPGDGDTNYNGKFKGRATLTADTSSSTAYMQLSSLTSEDSAVYFCARSITTVVGCAMDYWGQGTSVTVSSTRIQNPDPAVYQLRDSKSSDKSVCLFTDFDSQTNVSQSKDSDVYITDKTVLDMRSMDFKSNSAVAWSNKSDFACANAFNNSIIPEDTFFPSPESSCGTGDIENTSLAPEDPTFPADTWGTYLLTTETGLQKDHALWDHTAQNLLRMGLAFLVLVALVWFLVEDWLSRKRTRERASRASTWEGRRRLNTQTLRAKRSGSGVKQTLNFDLLKLAGDVESNPGPSRGHMTEYKPTVRLATRDDVPRAVRTLAAAFADYPATRHTVDPDRHIERVTELQELFLTRVGLDIGKVWVADDGAAVAVWTTPESVEAGAVFAEIGPRMAELSGSRLAAQQQMEGLLAPHRPKEPAWFLATVGVSPDHQGKGLGSAVVLPGVEAAERAGVPAFLETSAPRNLPFYERLGFTVTADVEVPEGPRTWCMTRKPGA

SEQ ID NO: 4251 - protein, 1281 aa, Artificial Sequence
  Synthetic Polypeptide
MALPVTALLLPLALLLHAARPEVQLVESGGGLVQAGGSLRLSCAASGRTFSMGWFRQAPGKEREFVAAITYSGGSPYYADSVKGRFTISRDNAKNTVYLQMNSLKPEDTAVYYCAANPTYGSDWNAENWGQGTQVTVSSGTGGGGSGGGGSGGGGSEFDIQMTQSPSSLSASVGDRVTITCKASDHINNWLAWYQQKPGQAPKLLIYGATTLETGVPSRFSGSGSGTDYTLTISSLQPEDFATYYCQQSWNTPWTFGQGTKLEIKRLEDLKNVFPPEVAVFEPSEAEISHTQKATLVCLATGFYPDHVELSWWVNGKEVHSGVSTDPQPLKEQPALNDSRYCLSSRLRVSATFWQNPRNHFRCQVQFYGLSENDEWTQDRAKPVTQIVSAEAWGRADCGSIGWLLLQAPRWVFKEEDPIHLRCHSWKNTALHKVTYLQNGKGRKYFHHNSDFYIPKATLKDSGSYFCRGLVGSKNVSSETVNITITQGLAVSTISSFFPPGYQVSFCLVMVLLFAVDTGLYFSVKTNIRSSTRDWKDHKFKWRKDPQDKRAKRSGSGATNFSLLKQAGDVEENPGPTSMDWIWRILFLVGAATGAHSGPEVQLVESGGGLVQAGGSLRLSCAASGRTFTMGWFRQAPGKEREFVAAISLSPTLAYYADSVKGRFTISRDNAKNTVVLQMNSLKPEDTALYYCAADRKSVMSIRPDYWGQGTQVTVSSGSGGGGSGGGGSGGGGSFEQVQLQQPGAELVKPGASVKMSCKASGYAFSSYWINWMKQKPGQGLEWIGQIYPGDGDTNYNGKFKGRATLTADTSSSTAYMQLSSLTSEDSAVYFCARSITTVVGCAMDYWGQGTSVTVSSTRIQNPDPAVYQLRDSKSSDKSVCLFTDFDSQTNVSQSKDSDVYITDKTVLDMRSMDFKSNSAVAWSNKSDFACANAFNNSIIPEDTFFPSPESSCGTGDIENTSLAPEDPTFPADTWGTYLLTTETGLQKDHALWDHTAQNLLRMGLAFLVLVALVWFLVEDWLSRKRTRERASRASTWEGRRRLNTQTLRAKRSGSGVKQTLNFDLLKLAGDVESNPGPSRGHMTEYKPTVRLATRDDVPRAVRTLAAAFADYPATRHTVDPDRHIERVTELQELFLTRVGLDIGKVWVADDGAAVAVWTTPESVEAGAVFAEIGPRMAELSGSRLAAQQQMEGLLAPHRPKEPAWFLATVGVSPDHQGKGLGSAVVLPGVEAAERAGVPAFLETSAPRNLPFYERLGFTVTADVEVPEGPRTWCMTRKPGA

SEQ ID NO: 4252 - protein, 1014 aa, Artificial Sequence
  Synthetic Polypeptide
MALPVTALLLPLALLLHAARPEVQLVESGGGLVQAGGSLRLSCAASGRTFSMGWFRQAPGKEREFVAAITYSGGSPYYADSVKGRFTISRDNAKNTVYLQMNSLKPEDTAVYYCAANPTYGSDWNAENWGQGTQVTVSSLEDLKNVFPPEVAVFEPSEAEISHTQKATLVCLATGFYPDHVELSWWVNGKEVHSGVSTDPQPLKEQPALNDSRYCLSSRLRVSATFWQNPRNHFRCQVQFYGLSENDEWTQDRAKPVTQIVSAEAWGRADCGSIGWLLLQAPRWVFKEEDPIHLRCHSWKNTALHKVTYLQNGKGRKYFHHNSDFYIPKATLKDSGSYFCRGLVGSKNVSSETVNITITQGLAVSTISSFFPPGYQVSFCLVMVLLFAVDTGLYFSVKTNIRSSTRDWKDHKFKWRKDPQDKRAKRSGSGATNFSLLKQAGDVEENPGPTSMDWIWRILFLVGAATGAHSGPEVQLVESGGGLVQAGGSLRLSCAASGRTFTMGWFRQAPGKEREFVAAISLSPTLAYYADSVKGRFTISRDNAKNTVVLQMNSLKPEDTALYYCAADRKSVMSIRPDYWGQGTQVTVSSTRIQNPDPAVYQLRDSKSSDKSVCLFTDFDSQTNVSQSKDSDVYITDKTVLDMRSMDFKSNSAVAWSNKSDFACANAFNNSIIPEDTFFPSPESSCGTGDIENTSLAPEDPTFPADTWGTYLLTTETGLQKDHALWDHTAQNLLRMGLAFLVLVALVWFLVEDWLSRKRTRERASRASTWEGRRRLNTQTLRAKRSGSGVKQTLNFDLLKLAGDVESNPGPSRGHMTEYKPTVRLATRDDVPRAVRTLAAAFADYPATRHTVDPDRHIERVTELQELFLTRVGLDIGKVWVADDGAAVAVWTTPESVEAGAVFAEIGPRMAELSGSRLAAQQQMEGLLAPHRPKEPAWFLATVGVSPDHQGKGLGSAVVLPGVEAAERAGVPAFLETSAPRNLPFYERLGFTVTADVEVPEGPRTWCMTRKPGA

SEQ ID NO: 4253 - protein, 544 aa, Artificial Sequence; identical to SEQ ID NO: 4058
  Synthetic Polypeptide

SEQ ID NO: 4254 - protein, 723 aa, Artificial Sequence
  Synthetic Polypeptide
MALPVTALLLPLALLLHAARPDIQMTQSPSSLSASVGDRVTITCKASDHINNWLAWYQQKPGQAPKLLIYGATTLETGVPSRFSGSGSGTDYTLTISSLQPEDFATYYCQQSWNTPWTFGQGTKLEIKRLEGDIENTSLAPEDPTFPADTWGTYLLTTETGLQKDHALWDHTAQNLLRMGLAFLVLVALVWFLVEDWLSRKRTRERASRASTWEGRRRLNTQTLRAKRSGSGATNFSLLKQAGDVEENPGPTSMDWIWRILFLVGAATGAHSFEQVQLQQPGAELVKPGASVKMSCKASGYAFSSYWINWMKQKPGQGLEWIGQIYPGDGDTNYNGKFKGRATLTADTSSSTAYMQLSSLTSEDSAVYFCARSITTVVGCAMDYWGQGTSVTVSSTRGDIENTSLAPEDPTFPADTWGTYLLTTETGLQKDHALWDHTAQNLLRMGLAFLVLVALVWFLVEDWLSRKRTRERASRASTWEGRRRLNTQTLRAKRSGSGVKQTLNFDLLKLAGDVESNPGPSRGHMTEYKPTVRLATRDDVPRAVRTLAAAFADYPATRHTVDPDRHIERVTELQELFLTRVGLDIGKVWVADDGAAVAVWTTPESVEAGAVFAEIGPRMAELSGSRLAAQQQMEGLLAPHRPKEPAWFLATVGVSPDHQGKGLGSAVVLPGVEAAERAGVPAFLETSAPRNLPFYERLGFTVTADVEVPEGPRTWCMTRKPGA

SEQ ID NO: 4255 - protein, 777 aa, Artificial Sequence
  Synthetic Polypeptide
MALPVTALLLPLALLLHAARPACEVQLLESGGGLIQPGGSLRLSCAASGFTFSSHAMTWVRQAPGKGLEWVSAISGSGDYTHYADSVKGRFTISRDNSKNTVYLQMNSLRAEDSAVYYCAKDEDGGSLLGHRGQGTLVTVSSGTGGGGSGGGGSGGGGSEFGSLEGDIENTSLAPEDPTFPADTWGTYLLTTETGLQKDHALWDHTAQNLLRMGLAFLVLVALVWFLVEDWLSRKRTRERASRASTWEGRRRLNTQTLRAKRSGSGATNFSLLKQAGDVEENPGPTSATMDWIWRILFLVGAATGAHSGPEVQLVESGGGLVQAGGSLRLSCAASGRTFSMGWFRQAPGKEREFVAAITYSGGSPYYADSVKGRFTISRDNAKNTVYLQMNSLKPEDTAVYYCAANPTYGSDWNAENWGQGTQVTVSSGSGGGGSGGGGSGGGGSFEGSTRGDIENTSLAPEDPTFPADTWGTYLLTTETGLQKDHALWDHTAQNLLRMGLAFLVLVALVWFLVEDWLSRKRTRERASRASTWEGRRRLNTQTLRAKRSGSGVKQTLNFDLLKLAGDVESNPGPSRGHMTEYKPTVRLATRDDVPRAVRTLAAAFADYPATRHTVDPDRHIERVTELQELFLTRVGLDIGKVWVADDGAAVAVWTTPESVEAGAVFAEIGPRMAELSGSRLAAQQQMEGLLAPHRPKEPAWFLATVGVSPDHQGKGLGSAVVLPGVEAAERAGVPAFLETSAPRNLPFYERLGFTVTADVEVPEGPRTWCMTRKPGA

SEQ ID NO: 4256 - protein, 928 aa, Artificial Sequence
  Synthetic Polypeptide
MALPVTALLLPLALLLHAARPDIQMTQSPSSLSASVGDRVTITCKASDHINNWLAWYQQKPGQAPKLLIYGATTLETGVPSRFSGSGSGTDYTLTISSLQPEDFATYYCQQSWNTPWTFGQGTKLEIKRLEGQPKANPTVTLFPPSSEELQANKATLVCLISDFYPGAVTVAWKADGSPVKAGVETTKPSKQSNNKYAASSYLSLTPEQWKSHRSYSCQVTHEGSTVEKTVAPTECSGSGDIENTSLAPEDPTFPADTWGTYLLTTETGLQKDHALWDHTAQNLLRMGLAFLVLVALVWFLVEDWLSRKRTRERASRASTWEGRRRLNTQTLRAKRSGSGATNFSLLKQAGDVEENPGPTSMDWIWRILFLVGAATGAHSFEQVQLQQPGAELVKPGASVKMSCKASGYAFSSYWINWMKQKPGQGLEWIGQIYPGDGDTNYNGKFKGRATLTADTSSSTAYMQLSSLTSEDSAVYFCARSITTVVGCAMDYWGQGTSVTVSSTRASTKGPSVFPLAPSSKSTSGGTAALGCLVKDYFPEPVTVSWNSGALTSGVHTFPAVLQSSGLYSLSSVVTVPSSSLGTQTYICNVNHKPSNTKVDKRVEPKSCGTGDIENTSLAPEDPTFPADTWGTYLLTTETGLQKDHALWDHTAQNLLRMGLAFLVLVALVWFLVEDWLSRKRTRERASRASTWEGRRRLNTQTLRAKRSGSGVKQTLNFDLLKLAGDVESNPGPSRGGIHTMATYEVLCEVARKLGTDDREVVLFLLNVFIPQPTLAQLIGALRALKEEGRLTFPLLAECLFRAGRRDLLRDLLHLDPRFLERHLAGTMSYFSPYQLTVLHVDGELCARDIRSLIFLSKDTIGSRSTPQTFLHWVYCMENLDLLGPTDVDALMSMLRSLSRVDLQRQVQTLMGLHLSGPSHSQHYRHTP

SEQ ID NO: 4257 - protein, 981 aa, Artificial Sequence
  Synthetic Polypeptide
MALPVTALLLPLALLLHAARPDIQMTQSPSSLSASVGDRVTITCKASDHINNWLAWYQQKPGQAPKLLIYGATTLETGVPSRFSGSGSGTDYTLTISSLQPEDFATYYCQQSWNTPWTFGQGTKLEIKRLEGQPKANPTVTLFPPSSEELQANKATLVCLISDFYPGAVTVAWKADGSPVKAGVETTKPSKQSNNKYAASSYLSLTPEQWKSHRSYSCQVTHEGSTVEKTVAPTECSGSGDIENTSLAPEDPTFPADTWGTYLLTTETGLQKDHALWDHTAQNLLRMGLAFLVLVALVWFLVEDWLSRKRTRERASRASTWEGRRRLNTQTLRAKRSGSGATNFSLLKQAGDVEENPGPTSMDWIWRILFLVGAATGAHSFEQVQLQQPGAELVKPGASVKMSCKASGYAFSSYWINWMKQKPGQGLEWIGQIYPGDGDTNYNGKFKGRATLTADTSSSTAYMQLSSLTSEDSAVYFCARSITTVVGCAMDYWGQGTSVTVSSTRASTKGPSVFPLAPSSKSTSGGTAALGCLVKDYFPEPVTVSWNSGALTSGVHTFPAVLQSSGLYSLSSVVTVPSSSLGTQTYICNVNHKPSNTKVDKRVEPKSCGTGDIENTSLAPEDPTFPADTWGTYLLTTETGLQKDHALWDHTAQNLLRMGLAFLVLVALVWFLVEDWLSRKRTRERASRASTWEGRRRLNTQTLRAKRSGSGVKQTLNFDLLKLAGDVESNPGPSRGGIHTMSDSKEVPSLPFLRHLLEELDSHEDSLLLFLCHDAAPGCTTVTQALCSLSQQRKLTLAALVEMLYVLQRMDLLKSRFGLSKEGAEQLLGTSFLTRYRKLMVCVGEELDSSELRALRLFACNLNPSLSTALSESSRFVELVLALENVGLVSPSSVSVLADMLRTLRRLDLCQQLVEYEQQEQARYRYCYAASPSLPVRTLRRGHGASEHEQLCMPVQESSDSPELLRTPVQESSSDSPEQTT

SEQ ID NO: 4258 - protein, 936 aa, Artificial Sequence
  Synthetic Polypeptide
MALPVTALLLPLALLLHAARPDIQMTQSPSSLSASVGDRVTITCKASDHINNWLAWYQQKPGQAPKLLIYGATTLETGVPSRFSGSGSGTDYTLTISSLQPEDFATYYCQQSWNTPWTFGQGTKLEIKRLEGQPKANPTVTLFPPSSEELQANKATLVCLISDFYPGAVTVAWKADGSPVKAGVETTKPSKQSNNKYAASSYLSLTPEQWKSHRSYSCQVTHEGSTVEKTVAPTECSGSGDIENTSLAPEDPTFPADTWGTYLLTTETGLQKDHALWDHTAQNLLRMGLAFLVLVALVWFLVEDWLSRKRTRERASRASTWEGRRRLNTQTLRAKRSGSGATNFSLLKQAGDVEENPGPTSMDWIWRILFLVGAATGAHSFEQVQLQQPGAELVKPGASVKMSCKASGYAFSSYWINWMKQKPGQGLEWIGQIYPGDGDTNYNGKFKGRATLTADTSSSTAYMQLSSLTSEDSAVYFCARSITTVVGCAMDYWGQGTSVTVSSTRASTKGPSVFPLAPSSKSTSGGTAALGCLVKDYFPEPVTVSWNSGALTSGVHTFPAVLQSSGLYSLSSVVTVPSSSLGTQTYICNVNHKPSNTKVDKRVEPKSCGTGDIENTSLAPEDPTFPADTWGTYLLTTETGLQKDHALWDHTAQNLLRMGLAFLVLVALVWFLVEDWLSRKRTRERASRASTWEGRRRLNTQTLRAKRSGSGVKQTLNFDLLKLAGDVESNPGPSRGHMTEYKPTVRLATRDDVPRAVRTLAAAFADYPATRHTVDPDRHIERVTELQELFLTRVGLDIGKVWVADDGAAVAVWTTPESVEAGAVFAEIGPRMAELSGSRLAAQQQMEGLLAPHRPKEPAWFLATVGVSPDHQGKGLGSAVVLPGVEAAERAGVPAFLETSAPRNLPFYERLGFTVTADVEVPEGPRTWCMTRKPGA

SEQ ID NO: 4259 - protein, 1073 aa, Artificial Sequence
  Synthetic Polypeptide
MALPVTALLLPLALLLHAARPEVQLVESGGGLVQAGGSLRLSCAASGRTFSMGWFRQAPGKEREFVAAITYSGGSPYYADSVKGRFTISRDNAKNTVYLQMNSLKPEDTAVYYCAANPTYGSDWNAENWGQGTQVTVSSGTGGGGSGGGGSGGGGSEFDIQMTQSPSSLSASVGDRVTITCKASDHINNWLAWYQQKPGQAPKLLIYGATTLETGVPSRFSGSGSGTDYTLTISSLQPEDFATYYCQQSWNTPWTFGQGTKLEIKRLEGQPKANPTVTLFPPSSEELQANKATLVCLISDFYPGAVTVAWKADGSPVKAGVETTKPSKQSNNKYAASSYLSLTPEQWKSHRSYSCQVTHEGSTVEKTVAPTECSGSGDIENTSLAPEDPTFPADTWGTYLLTTETGLQKDHALWDHTAQNLLRMGLAFLVLVALVWFLVEDWLSRKRTRERASRASTWEGRRRLNTQTLRAKRSGSGATNFSLLKQAGDVEENPGPTSMDWIWRILFLVGAATGAHSFEQVQLQQPGAELVKPGASVKMSCKASGYAFSSYWINWMKQKPGQGLEWIGQIYPGDGDTNYNGKFKGRATLTADTSSSTAYMQLSSLTSEDSAVYFCARSITTVVGCAMDYWGQGTSVTVSSTRASTKGPSVFPLAPSSKSTSGGTAALGCLVKDYFPEPVTVSWNSGALTSGVHTFPAVLQSSGLYSLSSVVTVPSSSLGTQTYICNVNHKPSNTKVDKRVEPKSCGTGDIENTSLAPEDPTFPADTWGTYLLTTETGLQKDHALWDHTAQNLLRMGLAFLVLVALVWFLVEDWLSRKRTRERASRASTWEGRRRLNTQTLRAKRSGSGVKQTLNFDLLKLAGDVESNPGPSRGHMTEYKPTVRLATRDDVPRAVRTLAAAFADYPATRHTVDPDRHIERVTELQELFLTRVGLDIGKVWVADDGAAVAVWTTPESVEAGAVFAEIGPRMAELSGSRLAAQQQMEGLLAPHRPKEPAWFLATVGVSPDHQGKGLGSAVVLPGVEAAERAGVPAFLETSAPRNLPFYERLGFTVTADVEVPEGPRTWCMTRKPGA

SEQ ID NO: 4260 - protein, 1210 aa, Artificial Sequence
  Synthetic Polypeptide
MALPVTALLLPLALLLHAARPEVQLVESGGGLVQAGGSLRLSCAASGRTFSMGWFRQAPGKEREFVAAITYSGGSPYYADSVKGRFTISRDNAKNTVYLQMNSLKPEDTAVYYCAANPTYGSDWNAENWGQGTQVTVSSGTGGGGSGGGGSGGGGSEFDIQMTQSPSSLSASVGDRVTITCKASDHINNWLAWYQQKPGQAPKLLIYGATTLETGVPSRFSGSGSGTDYTLTISSLQPEDFATYYCQQSWNTPWTFGQGTKLEIKRLEGQPKANPTVTLFPPSSEELQANKATLVCLISDFYPGAVTVAWKADGSPVKAGVETTKPSKQSNNKYAASSYLSLTPEQWKSHRSYSCQVTHEGSTVEKTVAPTECSGSGDIENTSLAPEDPTFPADTWGTYLLTTETGLQKDHALWDHTAQNLLRMGLAFLVLVALVWFLVEDWLSRKRTRERASRASTWEGRRRLNTQTLRAKRSGSGATNFSLLKQAGDVEENPGPTSMDWIWRILFLVGAATGAHSGPEVQLVESGGGLVQAGGSLRLSCAASGRTFTMGWFRQAPGKEREFVAAISLSPTLAYYADSVKGRFTISRDNAKNTVVLQMNSLKPEDTALYYCAADRKSVMSIRPDYWGQGTQVTVSSGSGGGGSGGGGSGGGGSFEQVQLQQPGAELVKPGASVKMSCKASGYAFSSYWINWMKQKPGQGLEWIGQIYPGDGDTNYNGKFKGRATLTADTSSSTAYMQLSSLTSEDSAVYFCARSITTVVGCAMDYWGQGTSVTVSSTRASTKGPSVFPLAPSSKSTSGGTAALGCLVKDYFPEPVTVSWNSGALTSGVHTFPAVLQSSGLYSLSSVVTVPSSSLGTQTYICNVNHKPSNTKVDKRVEPKSCGTGDIENTSLAPEDPTFPADTWGTYLLTTETGLQKDHALWDHTAQNLLRMGLAFLVLVALVWFLVEDWLSRKRTRERASRASTWEGRRRLNTQTLRAKRSGSGVKQTLNFDLLKLAGDVESNPGPSRGHMTEYKPTVRLATRDDVPRAVRTLAAAFADYPATRHTVDPDRHIERVTELQELFLTRVGLDIGKVWVADDGAAVAVWTTPESVEAGAVFAEIGPRMAELSGSRLAAQQQMEGLLAPHRPKEPAWFLATVGVSPDHQGKGLGSAVVLPGVEAAERAGVPAFLETSAPRNLPFYERLGFTVTADVEVPEGPRTWCMTRKPGA

SEQ ID NO: 4261 - protein, 943 aa, Artificial Sequence
  Synthetic Polypeptide
MALPVTALLLPLALLLHAARPEVQLVESGGGLVQAGGSLRLSCAASGRTFSMGWFRQAPGKEREFVAAITYSGGSPYYADSVKGRFTISRDNAKNTVYLQMNSLKPEDTAVYYCAANPTYGSDWNAENWGQGTQVTVSSLEGQPKANPTVTLFPPSSEELQANKATLVCLISDFYPGAVTVAWKADGSPVKAGVETTKPSKQSNNKYAASSYLSLTPEQWKSHRSYSCQVTHEGSTVEKTVAPTECSGSGDIENTSLAPEDPTFPADTWGTYLLTTETGLQKDHALWDHTAQNLLRMGLAFLVLVALVWFLVEDWLSRKRTRERASRASTWEGRRRLNTQTLRAKRSGSGATNFSLLKQAGDVEENPGPTSMDWIWRILFLVGAATGAHSGPEVQLVESGGGLVQAGGSLRLSCAASGRTFTMGWFRQAPGKEREFVAAISLSPTLAYYADSVKGRFTISRDNAKNTVVLQMNSLKPEDTALYYCAADRKSVMSIRPDYWGQGTQVTVSSTRASTKGPSVFPLAPSSKSTSGGTAALGCLVKDYFPEPVTVSWNSGALTSGVHTFPAVLQSSGLYSLSSVVTVPSSSLGTQTYICNVNHKPSNTKVDKRVEPKSCGTGDIENTSLAPEDPTFPADTWGTYLLTTETGLQKDHALWDHTAQNLLRMGLAFLVLVALVWFLVEDWLSRKRTRERASRASTWEGRRRLNTQTLRAKRSGSGVKQTLNFDLLKLAGDVESNPGPSRGHMTEYKPTVRLATRDDVPRAVRTLAAAFADYPATRHTVDPDRHIERVTELQELFLTRVGLDIGKVWVADDGAAVAVWTTPESVEAGAVFAEIGPRMAELSGSRLAAQQQMEGLLAPHRPKEPAWFLATVGVSPDHQGKGLGSAVVLPGVEAAERAGVPAFLETSAPRNLPFYERLGFTVTADVEVPEGPRTWCMTRKPGA

SEQ ID NO: 4262 - protein, 951 aa, Artificial Sequence
  Synthetic Polypeptide
MALPVTALLLPLALLLHAARPDIQMTQSPSSLSASVGDRVTITCKASDHINNWLAWYQQKPGQAPKLLIYGATTLETGVPSRFSGSGSGTDYTLTISSLQPEDFATYYCQQSWNTPWTFGQGTKLEIKRLEDLKNVFPPEVAVFEPSEAEISHTQKATLVCLATGFYPDHVELSWWVNGKEVHSGVSTDPQPLKEQPALNDSRYCLSSRLRVSATFWQNPRNHFRCQVQFYGLSENDEWTQDRAKPVTQIVSAEAWGRADCGSGDIENTSLAPEDPTFPADTWGTYLLTTETGLQKDHALWDHTAQNLLRMGLAFLVLVALVWFLVEDWLSRKRTRERASRASTWEGRRRLNTQTLRAKRSGSGATNFSLLKQAGDVEENPGPTSMDWIWRILFLVGAATGAHSFEQVQLQQPGAELVKPGASVKMSCKASGYAFSSYWINWMKQKPGQGLEWIGQIYPGDGDTNYNGKFKGRATLTADTSSSTAYMQLSSLTSEDSAVYFCARSITTVVGCAMDYWGQGTSVTVSSTRIQNPDPAVYQLRDSKSSDKSVCLFTDFDSQTNVSQSKDSDVYITDKTVLDMRSMDFKSNSAVAWSNKSDFACANAFNNSIIPEDTFFPSPESSCGTGDIENTSLAPEDPTFPADTWGTYLLTTETGLQKDHALWDHTAQNLLRMGLAFLVLVALVWFLVEDWLSRKRTRERASRASTWEGRRRLNTQTLRAKRSGSGVKQTLNFDLLKLAGDVESNPGPSRGHMTEYKPTVRLATRDDVPRAVRTLAAAFADYPATRHTVDPDRHIERVTELQELFLTRVGLDIGKVWVADDGAAVAVWTTPESVEAGAVFAEIGPRMAELSGSRLAAQQQMEGLLAPHRPKEPAWFLATVGVSPDHQGKGLGSAVVLPGVEAAERAGVPAFLETSAPRNLPFYERLGFTVTADVEVPEGPRTWCMTRKPGA

SEQ ID NO: 4263 - protein, 1088 aa, Artificial Sequence
  Synthetic Polypeptide
MALPVTALLLPLALLLHAARPEVQLVESGGGLVQAGGSLRLSCAASGRTFSMGWFRQAPGKEREFVAAITYSGGSPYYADSVKGRFTISRDNAKNTVYLQMNSLKPEDTAVYYCAANPTYGSDWNAENWGQGTQVTVSSGTGGGGSGGGGSGGGGSEFDIQMTQSPSSLSASVGDRVTITCKASDHINNWLAWYQQKPGQAPKLLIYGATTLETGVPSRFSGSGSGTDYTLTISSLQPEDFATYYCQQSWNTPWTFGQGTKLEIKRLEDLKNVFPPEVAVFEPSEAEISHTQKATLVCLATGFYPDHVELSWWVNGKEVHSGVSTDPQPLKEQPALNDSRYCLSSRLRVSATFWQNPRNHFRCQVQFYGLSENDEWTQDRAKPVTQIVSAEAWGRADCGSGDIENTSLAPEDPTFPADTWGTYLLTTETGLQKDHALWDHTAQNLLRMGLAFLVLVALVWFLVEDWLSRKRTRERASRASTWEGRRRLNTQTLRAKRSGSGATNFSLLKQAGDVEENPGPTSMDWIWRILFLVGAATGAHSFEQVQLQQPGAELVKPGASVKMSCKASGYAFSSYWINWMKQKPGQGLEWIGQIYPGDGDTNYNGKFKGRATLTADTSSSTAYMQLSSLTSEDSAVYFCARSITTVVGCAMDYWGQGTSVTVSSTRIQNPDPAVYQLRDSKSSDKSVCLFTDFDSQTNVSQSKDSDVYITDKTVLDMRSMDFKSNSAVAWSNKSDFACANAFNNSIIPEDTFFPSPESSCGTGDIENTSLAPEDPTFPADTWGTYLLTTETGLQKDHALWDHTAQNLLRMGLAFLVLVALVWFLVEDWLSRKRTRERASRASTWEGRRRLNTQTLRAKRSGSGVKQTLNFDLLKLAGDVESNPGPSRGHMTEYKPTVRLATRDDVPRAVRTLAAAFADYPATRHTVDPDRHIERVTELQELFLTRVGLDIGKVWVADDGAAVAVWTTPESVEAGAVFAEIGPRMAELSGSRLAAQQQMEGLLAPHRPKEPAWFLATVGVSPDHQGKGLGSAVVLPGVEAAERAGVPAFLETSAPRNLPFYERLGFTVTADVEVPEGPRTWCMTRKPGA

SEQ ID NO: 4264 - protein, 1225 aa, Artificial Sequence
  Synthetic Polypeptide
MALPVTALLLPLALLLHAARPEVQLVESGGGLVQAGGSLRLSCAASGRTFSMGWFRQAPGKEREFVAAITYSGGSPYYADSVKGRFTISRDNAKNTVYLQMNSLKPEDTAVYYCAANPTYGSDWNAENWGQGTQVTVSSGTGGGGSGGGGSGGGGSEFDIQMTQSPSSLSASVGDRVTITCKASDHINNWLAWYQQKPGQAPKLLIYGATTLETGVPSRFSGSGSGTDYTLTISSLQPEDFATYYCQQSWNTPWTFGQGTKLEIKRLEDLKNVFPPEVAVFEPSEAEISHTQKATLVCLATGFYPDHVELSWWVNGKEVHSGVSTDPQPLKEQPALNDSRYCLSSRLRVSATFWQNPRNHFRCQVQFYGLSENDEWTQDRAKPVTQIVSAEAWGRADCGSGDIENTSLAPEDPTFPADTWGTYLLTTETGLQKDHALWDHTAQNLLRMGLAFLVLVALVWFLVEDWLSRKRTRERASRASTWEGRRRLNTQTLRAKRSGSGATNFSLLKQAGDVEENPGPTSMDWIWRILFLVGAATGAHSGPEVQLVESGGGLVQAGGSLRLSCAASGRTFTMGWFRQAPGKEREFVAAISLSPTLAYYADSVKGRFTISRDNAKNTVVLQMNSLKPEDTALYYCAADRKSVMSIRPDYWGQGTQVTVSSGSGGGGSGGGGSGGGGSFEQVQLQQPGAELVKPGASVKMSCKASGYAFSSYWINWMKQKPGQGLEWIGQIYPGDGDTNYNGKFKGRATLTADTSSSTAYMQLSSLTSEDSAVYFCARSITTVVGCAMDYWGQGTSVTVSSTRIQNPDPAVYQLRDSKSSDKSVCLFTDFDSQTNVSQSKDSDVYITDKTVLDMRSMDFKSNSAVAWSNKSDFACANAFNNSIIPEDTFFPSPESSCGTGDIENTSLAPEDPTFPADTWGTYLLTTETGLQKDHALWDHTAQNLLRMGLAFLVLVALVWFLVEDWLSRKRTRERASRASTWEGRRRLNTQTLRAKRSGSGVKQTLNFDLLKLAGDVESNPGPSRGHMTEYKPTVRLATRDDVPRAVRTLAAAFADYPATRHTVDPDRHIERVTELQELFLTRVGLDIGKVWVADDGAAVAVWTTPESVEAGAVFAEIGPRMAELSGSRLAAQQQMEGLLAPHRPKEPAWFLATVGVSPDHQGKGLGSAVVLPGVEAAERAGVPAFLETSAPRNLPFYERLGFTVTADVEVPEGPRTWCMTRKPGA

SEQ ID NO: 4265 - protein, 958 aa, Artificial Sequence
  Synthetic Polypeptide
MALPVTALLLPLALLLHAARPEVQLVESGGGLVQAGGSLRLSCAASGRTFSMGWFRQAPGKEREFVAAITYSGGSPYYADSVKGRFTISRDNAKNTVYLQMNSLKPEDTAVYYCAANPTYGSDWNAENWGQGTQVTVSSLEDLKNVFPPEVAVFEPSEAEISHTQKATLVCLATGFYPDHVELSWWVNGKEVHSGVSTDPQPLKEQPALNDSRYCLSSRLRVSATFWQNPRNHFRCQVQFYGLSENDEWTQDRAKPVTQIVSAEAWGRADCGSGDIENTSLAPEDPTFPADTWGTYLLTTETGLQKDHALWDHTAQNLLRMGLAFLVLVALVWFLVEDWLSRKRTRERASRASTWEGRRRLNTQTLRAKRSGSGATNFSLLKQAGDVEENPGPTSMDWIWRILFLVGAATGAHSGPEVQLVESGGGLVQAGGSLRLSCAASGRTFTMGWFRQAPGKEREFVAAISLSPTLAYYADSVKGRFTISRDNAKNTVVLQMNSLKPEDTALYYCAADRKSVMSIRPDYWGQGTQVTVSSTRIQNPDPAVYQLRDSKSSDKSVCLFTDFDSQTNVSQSKDSDVYITDKTVLDMRSMDFKSNSAVAWSNKSDFACANAFNNSIIPEDTFFPSPESSCGTGDIENTSLAPEDPTFPADTWGTYLLTTETGLQKDHALWDHTAQNLLRMGLAFLVLVALVWFLVEDWLSRKRTRERASRASTWEGRRRLNTQTLRAKRSGSGVKQTLNFDLLKLAGDVESNPGPSRGHMTEYKPTVRLATRDDVPRAVRTLAAAFADYPATRHTVDPDRHIERVTELQELFLTRVGLDIGKVWVADDGAAVAVWTTPESVEAGAVFAEIGPRMAELSGSRLAAQQQMEGLLAPHRPKEPAWFLATVGVSPDHQGKGLGSAVVLPGVEAAERAGVPAFLETSAPRNLPFYERLGFTVTADVEVPEGPRTWCMTRKPGA

SEQ ID NO: 4266 - protein, 488 aa, Artificial Sequence
  Synthetic Polypeptide
MALPVTALLLPLALLLHAARPACEVQLLESGGGLIQPGGSLRLSCAASGFTFSSHAMTWVRQAPGKGLEWVSAISGSGDYTHYADSVKGRFTISRDNSKNTVYLQMNSLRAEDSAVYYCAKDEDGGSLLGHRGQGTLVTVSSGTGGGGSGGGGSGGGGSEFGSLEGDIENTSLAPEDPTFPADTWGTYLLTTETGLQKDHALWDHTAQNLLRMGLAFLVLVALVWFLVEDWLSRKRTRERASRASTWEGRRRLNTQTLRAKRSGSGATNFSLLKQAGDVEENPGPTRGHMTEYKPTVRLATRDDVPRAVRTLAAAFADYPATRHTVDPDRHIERVTELQELFLTRVGLDIGKVWVADDGAAVAVWTTPESVEAGAVFAEIGPRMAELSGSRLAAQQQMEGLLAPHRPKEPAWFLATVGVSPDHQGKGLGSAVVLPGVEAAERAGVPAFLETSAPRNLPFYERLGFTVTADVEVPEGPRTWCMTRKPGA

SEQ ID NO: 4267 - protein, 783 aa, Artificial Sequence
  Synthetic Polypeptide
MALPVTALLLPLALLLHAARPDIQMTQSPSSLSASVGDRVTITCKASDHINNWLAWYQQKPGQAPKLLIYGATTLETGVPSRFSGSGSGTDYTLTISSLQPEDFATYYCQQSWNTPWTFGQGTKLEIKRLEIGWLLLQAPRWVFKEEDPIHLRCHSWKNTALHKVTYLQNGKGRKYFHHNSDFYIPKATLKDSGSYFCRGLVGSKNVSSETVNITITQGLAVSTISSFFPPGYQVSFCLVMVLLFAVDTGLYFSVKTNIRSSTRDWKDHKFKWRKDPQDKRAKRSGSGATNFSLLKQAGDVEENPGPTSMDWIWRILFLVGAATGAHSFEQVQLQQPGAELVKPGASVKMSCKASGYAFSSYWINWMKQKPGQGLEWIGQIYPGDGDTNYNGKFKGRATLTADTSSSTAYMQLSSLTSEDSAVYFCARSITTVVGCAMDYWGQGTSVTVSSTRVAEGKTDNQYTLFVAGGTVLLLLFVISITTIIVIFLNRRRRRERRDLFTESWDTQKAPNNYRSPISTGQPTNQSMDDTREDIYVNYPTFSRRPKTRVRAKRSGSGVKQTLNFDLLKLAGDVESNPGPSRGHMTEYKPTVRLATRDDVPRAVRTLAAAFADYPATRHTVDPDRHIERVTELQELFLTRVGLDIGKVWVADDGAAVAVWTTPESVEAGAVFAEIGPRMAELSGSRLAAQQQMEGLLAPHRPKEPAWFLATVGVSPDHQGKGLGSAVVLPGVEAAERAGVPAFLETSAPRNLPFYERLGFTVTADVEVPEGPRTWCMTRKPGA

SEQ ID NO: 4268 - protein, 837 aa, Artificial Sequence
  Synthetic Polypeptide
MALPVTALLLPLALLLHAARPACEVQLLESGGGLIQPGGSLRLSCAASGFTFSSHAMTWVRQAPGKGLEWVSAISGSGDYTHYADSVKGRFTISRDNSKNTVYLQMNSLRAEDSAVYYCAKDEDGGSLLGHRGQGTLVTVSSGTGGGGSGGGGSGGGGSEFGSLEIGWLLLQAPRWVFKEEDPIHLRCHSWKNTALHKVTYLQNGKGRKYFHHNSDFYIPKATLKDSGSYFCRGLVGSKNVSSETVNITITQGLAVSTISSFFPPGYQVSFCLVMVLLFAVDTGLYFSVKTNIRSSTRDWKDHKFKWRKDPQDKRAKRSGSGATNFSLLKQAGDVEENPGPTSATMDWIWRILFLVGAATGAHSGPEVQLVESGGGLVQAGGSLRLSCAASGRTFSMGWFRQAPGKEREFVAAITYSGGSPYYADSVKGRFTISRDNAKNTVYLQMNSLKPEDTAVYYCAANPTYGSDWNAENWGQGTQVTVSSGSGGGGSGGGGSGGGGSFEGSTRVAEGKTDNQYTLFVAGGTVLLLLFVISITTIIVIFLNRRRRRERRDLFTESWDTQKAPNNYRSPISTGQPTNQSMDDTREDIYVNYPTFSRRPKTRVRAKRSGSGVKQTLNFDLLKLAGDVESNPGPSRGHMTEYKPTVRLATRDDVPRAVRTLAAAFADYPATRHTVDPDRHIERVTELQELFLTRVGLDIGKVWVADDGAAVAVWTTPESVEAGAVFAEIGPRMAELSGSRLAAQQQMEGLLAPHRPKEPAWFLATVGVSPDHQGKGLGSAVVLPGVEAAERAGVPAFLETSAPRNLPFYERLGFTVTADVEVPEGPRTWCMTRKPGA

SEQ ID NO: 4269 - protein, 988 aa, Artificial Sequence
  Synthetic Polypeptide
MALPVTALLLPLALLLHAARPDIQMTQSPSSLSASVGDRVTITCKASDHINNWLAWYQQKPGQAPKLLIYGATTLETGVPSRFSGSGSGTDYTLTISSLQPEDFATYYCQQSWNTPWTFGQGTKLEIKRLEGQPKANPTVTLFPPSSEELQANKATLVCLISDFYPGAVTVAWKADGSPVKAGVETTKPSKQSNNKYAASSYLSLTPEQWKSHRSYSCQVTHEGSTVEKTVAPTECSGSIGWLLLQAPRWVFKEEDPIHLRCHSWKNTALHKVTYLQNGKGRKYFHHNSDFYIPKATLKDSGSYFCRGLVGSKNVSSETVNITITQGLAVSTISSFFPPGYQVSFCLVMVLLFAVDTGLYFSVKTNIRSSTRDWKDHKFKWRKDPQDKRAKRSGSGATNFSLLKQAGDVEENPGPTSMDWIWRILFLVGAATGAHSFEQVQLQQPGAELVKPGASVKMSCKASGYAFSSYWINWMKQKPGQGLEWIGQIYPGDGDTNYNGKFKGRATLTADTSSSTAYMQLSSLTSEDSAVYFCARSITTVVGCAMDYWGQGTSVTVSSTRASTKGPSVFPLAPSSKSTSGGTAALGCLVKDYFPEPVTVSWNSGALTSGVHTFPAVLQSSGLYSLSSVVTVPSSSLGTQTYICNVNHKPSNTKVDKRVEPKSCGTVAEGKTDNQYTLFVAGGTVLLLLFVISITTIIVIFLNRRRRRERRDLFTESWDTQKAPNNYRSPISTGQPTNQSMDDTREDIYVNYPTFSRRPKTRVRAKRSGSGVKQTLNFDLLKLAGDVESNPGPSRGGIHTMATYEVLCEVARKLGTDDREVVLFLLNVFIPQPTLAQLIGALRALKEEGRLTFPLLAECLFRAGRRDLLRDLLHLDPRFLERHLAGTMSYFSPYQLTVLHVDGELCARDIRSLIFLSKDTIGSRSTPQTFLHWVYCMENLDLLGPTDVDALMSMLRSLSRVDLQRQVQTLMGLHLSGPSHSQHYRHTP

SEQ ID NO: 4270 - protein, 1041 aa, Artificial Sequence
  Synthetic Polypeptide
MALPVTALLLPLALLLHAARPDIQMTQSPSSLSASVGDRVTITCKASDHINNWLAWYQQKPGQAPKLLIYGATTLETGVPSRFSGSGSGTDYTLTISSLQPEDFATYYCQQSWNTPWTFGQGTKLEIKRLEGQPKANPTVTLFPPSSEELQANKATLVCLISDFYPGAVTVAWKADGSPVKAGVETTKPSKQSNNKYAASSYLSLTPEQWKSHRSYSCQVTHEGSTVEKTVAPTECSGSIGWLLLQAPRWVFKEEDPIHLRCHSWKNTALHKVTYLQNGKGRKYFHHNSDFYIPKATLKDSGSYFCRGLVGSKNVSSETVNITITQGLAVSTISSFFPPGYQVSFCLVMVLLFAVDTGLYFSVKTNIRSSTRDWKDHKFKWRKDPQDKRAKRSGSGATNFSLLKQAGDVEENPGPTSMDWIWRILFLVGAATGAHSFEQVQLQQPGAELVKPGASVKMSCKASGYAFSSYWINWMKQKPGQGLEWIGQIYPGDGDTNYNGKFKGRATLTADTSSSTAYMQLSSLTSEDSAVYFCARSITTVVGCAMDYWGQGTSVTVSSTRASTKGPSVFPLAPSSKSTSGGTAALGCLVKDYFPEPVTVSWNSGALTSGVHTFPAVLQSSGLYSLSSVVTVPSSSLGTQTYICNVNHKPSNTKVDKRVEPKSCGTVAEGKTDNQYTLFVAGGTVLLLLFVISITTIIVIFLNRRRRRERRDLFTESWDTQKAPNNYRSPISTGQPTNQSMDDTREDIYVNYPTFSRRPKTRVRAKRSGSGVKQTLNFDLLKLAGDVESNPGPSRGGIHTMSDSKEVPSLPFLRHLLEELDSHEDSLLLFLCHDAAPGCTTVTQALCSLSQQRKLTLAALVEMLYVLQRMDLLKSRFGLSKEGAEQLLGTSFLTRYRKLMVCVGEELDSSELRALRLFACNLNPSLSTALSESSRFVELVLALENVGLVSPSSVSVLADMLRTLRRLDLCQQLVEYEQQEQARYRYCYAASPSLPVRTLRRGHGASEHEQLCMPVQESSDSPELLRTPVQESSSDSPEQTT

SEQ ID NO: 4271 - protein, 996 aa, Artificial Sequence
  Synthetic Polypeptide
MALPVTALLLPLALLLHAARPDIQMTQSPSSLSASVGDRVTITCKASDHINNWLAWYQQKPGQAPKLLIYGATTLETGVPSRFSGSGSGTDYTLTISSLQPEDFATYYCQQSWNTPWTFGQGTKLEIKRLEGQPKANPTVTLFPPSSEELQANKATLVCLISDFYPGAVTVAWKADGSPVKAGVETTKPSKQSNNKYAASSYLSLTPEQWKSHRSYSCQVTHEGSTVEKTVAPTECSGSIGWLLLQAPRWVFKEEDPIHLRCHSWKNTALHKVTYLQNGKGRKYFHHNSDFYIPKATLKDSGSYFCRGLVGSKNVSSETVNITITQGLAVSTISSFFPPGYQVSFCLVMVLLFAVDTGLYFSVKTNIRSSTRDWKDHKFKWRKDPQDKRAKRSGSGATNFSLLKQAGDVEENPGPTSMDWIWRILFLVGAATGAHSFEQVQLQQPGAELVKPGASVKMSCKASGYAFSSYWINWMKQKPGQGLEWIGQIYPGDGDTNYNGKFKGRATLTADTSSSTAYMQLSSLTSEDSAVYFCARSITTVVGCAMDYWGQGTSVTVSSTRASTKGPSVFPLAPSSKSTSGGTAALGCLVKDYFPEPVTVSWNSGALTSGVHTFPAVLQSSGLYSLSSVVTVPSSSLGTQTYICNVNHKPSNTKVDKRVEPKSCGTVAEGKTDNQYTLFVAGGTVLLLLFVISITTIIVIFLNRRRRRERRDLFTESWDTQKAPNNYRSPISTGQPTNQSMDDTREDIYVNYPTFSRRPKTRVRAKRSGSGVKQTLNFDLLKLAGDVESNPGPSRGHMTEYKPTVRLATRDDVPRAVRTLAAAFADYPATRHTVDPDRHIERVTELQELFLTRVGLDIGKVWVADDGAAVAVWTTPESVEAGAVFAEIGPRMAELSGSRLAAQQQMEGLLAPHRPKEPAWFLATVGVSPDHQGKGLGSAVVLPGVEAAERAGVPAFLETSAPRNLPFYERLGFTVTADVEVPEGPRTWCMTRKPGA

SEQ ID NO: 4272 - protein, 1133 aa, Artificial Sequence
  Synthetic Polypeptide
MALPVTALLLPLALLLHAARPEVQLVESGGGLVQAGGSLRLSCAASGRTFSMGWFRQAPGKEREFVAAITYSGGSPYYADSVKGRFTISRDNAKNTVYLQMNSLKPEDTAVYYCAANPTYGSDWNAENWGQGTQVTVSSGTGGGGSGGGGSGGGGSEFDIQMTQSPSSLSASVGDRVTITCKASDHINNWLAWYQQKPGQAPKLLIYGATTLETGVPSRFSGSGSGTDYTLTISSLQPEDFATYYCQQSWNTPWTFGQGTKLEIKRLEGQPKANPTVTLFPPSSEELQANKATLVCLISDFYPGAVTVAWKADGSPVKAGVETTKPSKQSNNKYAASSYLSLTPEQWKSHRSYSCQVTHEGSTVEKTVAPTECSGSIGWLLLQAPRWVFKEEDPIHLRCHSWKNTALHKVTYLQNGKGRKYFHHNSDFYIPKATLKDSGSYFCRGLVGSKNVSSETVNITITQGLAVSTISSFFPPGYQVSFCLVMVLLFAVDTGLYFSVKTNIRSSTRDWKDHKFKWRKDPQDKRAKRSGSGATNFSLLKQAGDVEENPGPTSMDWIWRILFLVGAATGAHSFEQVQLQQPGAELVKPGASVKMSCKASGYAFSSYWINWMKQKPGQGLEWIGQIYPGDGDTNYNGKFKGRATLTADTSSSTAYMQLSSLTSEDSAVYFCARSITTVVGCAMDYWGQGTSVTVSSTRASTKGPSVFPLAPSSKSTSGGTAALGCLVKDYFPEPVTVSWNSGALTSGVHTFPAVLQSSGLYSLSSVVTVPSSSLGTQTYICNVNHKPSNTKVDKRVEPKSCGTVAEGKTDNQYTLFVAGGTVLLLLFVISITTIIVIFLNRRRRRERRDLFTESWDTQKAPNNYRSPISTGQPTNQSMDDTREDIYVNYPTFSRRPKTRVRAKRSGSGVKQTLNFDLLKLAGDVESNPGPSRGHMTEYKPTVRLATRDDVPRAVRTLAAAFADYPATRHTVDPDRHIERVTELQELFLTRVGLDIGKVWVADDGAAVAVWTTPESVEAGAVFAEIGPRMAELSGSRLAAQQQMEGLLAPHRPKEPAWFLATVGVSPDHQGKGLGSAVVLPGVEAAERAGVPAFLETSAPRNLPFYERLGFTVTADVEVPEGPRTWCMTRKPGA

SEQ ID NO: 4273 - protein, 1270 aa, Artificial Sequence
  Synthetic Polypeptide
MALPVTALLLPLALLLHAARPEVQLVESGGGLVQAGGSLRLSCAASGRTFSMGWFRQAPGKEREFVAAITYSGGSPYYADSVKGRFTISRDNAKNTVYLQMNSLKPEDTAVYYCAANPTYGSDWNAENWGQGTQVTVSSGTGGGGSGGGGSGGGGSEFDIQMTQSPSSLSASVGDRVTITCKASDHINNWLAWYQQKPGQAPKLLIYGATTLETGVPSRFSGSGSGTDYTLTISSLQPEDFATYYCQQSWNTPWTFGQGTKLEIKRLEGQPKANPTVTLFPPSSEELQANKATLVCLISDFYPGAVTVAWKADGSPVKAGVETTKPSKQSNNKYAASSYLSLTPEQWKSHRSYSCQVTHEGSTVEKTVAPTECSGSIGWLLLQAPRWVFKEEDPIHLRCHSWKNTALHKVTYLQNGKGRKYFHHNSDFYIPKATLKDSGSYFCRGLVGSKNVSSETVNITITQGLAVSTISSFFPPGYQVSFCLVMVLLFAVDTGLYFSVKTNIRSSTRDWKDHKFKWRKDPQDKRAKRSGSGATNFSLLKQAGDVEENPGPTSMDWIWRILFLVGAATGAHSGPEVQLVESGGGLVQAGGSLRLSCAASGRTFTMGWFRQAPGKEREFVAAISLSPTLAYYADSVKGRFTISRDNAKNTVVLQMNSLKPEDTALYYCAADRKSVMSIRPDYWGQGTQVTVSSGSGGGGSGGGGSGGGGSFEQVQLQQPGAELVKPGASVKMSCKASGYAFSSYWINWMKQKPGQGLEWIGQIYPGDGDTNYNGKFKGRATLTADTSSSTAYMQLSSLTSEDSAVYFCARSITTVVGCAMDYWGQGTSVTVSSTRASTKGPSVFPLAPSSKSTSGGTAALGCLVKDYFPEPVTVSWNSGALTSGVHTFPAVLQSSGLYSLSSVVTVPSSSLGTQTYICNVNHKPSNTKVDKRVEPKSCGTVAEGKTDNQYTLFVAGGTVLLLLFVISITTIIVIFLNRRRRRERRDLFTESWDTQKAPNNYRSPISTGQPTNQSMDDTREDIYVNYPTFSRRPKTRVRAKRSGSGVKQTLNFDLLKLAGDVESNPGPSRGHMTEYKPTVRLATRDDVPRAVRTLAAAFADYPATRHTVDPDRHIERVTELQELFLTRVGLDIGKVWVADDGAAVAVWTTPESVEAGAVFAEIGPRMAELSGSRLAAQQQMEGLLAPHRPKEPAWFLATVGVSPDHQGKGLGSAVVLPGVEAAERAGVPAFLETSAPRNLPFYERLGFTVTADVEVPEGPRTWCMTRKPGA

SEQ ID NO: 4274 - protein, 1003 aa, Artificial Sequence
  Synthetic Polypeptide
MALPVTALLLPLALLLHAARPEVQLVESGGGLVQAGGSLRLSCAASGRTFSMGWFRQAPGKEREFVAAITYSGGSPYYADSVKGRFTISRDNAKNTVYLQMNSLKPEDTAVYYCAANPTYGSDWNAENWGQGTQVTVSSLEGQPKANPTVTLFPPSSEELQANKATLVCLISDFYPGAVTVAWKADGSPVKAGVETTKPSKQSNNKYAASSYLSLTPEQWKSHRSYSCQVTHEGSTVEKTVAPTECSGSIGWLLLQAPRWVFKEEDPIHLRCHSWKNTALHKVTYLQNGKGRKYFHHNSDFYIPKATLKDSGSYFCRGLVGSKNVSSETVNITITQGLAVSTISSFFPPGYQVSFCLVMVLLFAVDTGLYFSVKTNIRSSTRDWKDHKFKWRKDPQDKRAKRSGSGATNFSLLKQAGDVEENPGPTSMDWIWRILFLVGAATGAHSGPEVQLVESGGGLVQAGGSLRLSCAASGRTFTMGWFRQAPGKEREFVAAISLSPTLAYYADSVKGRFTISRDNAKNTVVLQMNSLKPEDTALYYCAADRKSVMSIRPDYWGQGTQVTVSSTRASTKGPSVFPLAPSSKSTSGGTAALGCLVKDYFPEPVTVSWNSGALTSGVHTFPAVLQSSGLYSLSSVVTVPSSSLGTQTYICNVNHKPSNTKVDKRVEPKSCGTVAEGKTDNQYTLFVAGGTVLLLLFVISITTIIVIFLNRRRRRERRDLFTESWDTQKAPNNYRSPISTGQPTNQSMDDTREDIYVNYPTFSRRPKTRVRAKRSGSGVKQTLNFDLLKLAGDVESNPGPSRGHMTEYKPTVRLATRDDVPRAVRTLAAAFADYPATRHTVDPDRHIERVTELQELFLTRVGLDIGKVWVADDGAAVAVWTTPESVEAGAVFAEIGPRMAELSGSRLAAQQQMEGLLAPHRPKEPAWFLATVGVSPDHQGKGLGSAVVLPGVEAAERAGVPAFLETSAPRNLPFYERLGFTVTADVEVPEGPRTWCMTRKPGA

SEQ ID NO: 4275 - protein, 1011 aa, Artificial Sequence
  Synthetic Polypeptide
MALPVTALLLPLALLLHAARPDIQMTQSPSSLSASVGDRVTITCKASDHINNWLAWYQQKPGQAPKLLIYGATTLETGVPSRFSGSGSGTDYTLTISSLQPEDFATYYCQQSWNTPWTFGQGTKLEIKRLEDLKNVFPPEVAVFEPSEAEISHTQKATLVCLATGFYPDHVELSWWVNGKEVHSGVSTDPQPLKEQPALNDSRYCLSSRLRVSATFWQNPRNHFRCQVQFYGLSENDEWTQDRAKPVTQIVSAEAWGRADCGSIGWLLLQAPRWVFKEEDPIHLRCHSWKNTALHKVTYLQNGKGRKYFHHNSDFYIPKATLKDSGSYFCRGLVGSKNVSSETVNITITQGLAVSTISSFFPPGYQVSFCLVMVLLFAVDTGLYFSVKTNIRSSTRDWKDHKFKWRKDPQDKRAKRSGSGATNFSLLKQAGDVEENPGPTSMDWIWRILFLVGAATGAHSFEQVQLQQPGAELVKPGASVKMSCKASGYAFSSYWINWMKQKPGQGLEWIGQIYPGDGDTNYNGKFKGRATLTADTSSSTAYMQLSSLTSEDSAVYFCARSITTVVGCAMDYWGQGTSVTVSSTRIQNPDPAVYQLRDSKSSDKSVCLFTDFDSQTNVSQSKDSDVYITDKTVLDMRSMDFKSNSAVAWSNKSDFACANAFNNSIIPEDTFFPSPESSCGTVAEGKTDNQYTLFVAGGTVLLLLFVISITTIIVIFLNRRRRRERRDLFTESWDTQKAPNNYRSPISTGQPTNQSMDDTREDIYVNYPTFSRRPKTRVRAKRSGSGVKQTLNFDLLKLAGDVESNPGPSRGHMTEYKPTVRLATRDDVPRAVRTLAAAFADYPATRHTVDPDRHIERVTELQELFLTRVGLDIGKVWVADDGAAVAVWTTPESVEAGAVFAEIGPRMAELSGSRLAAQQQMEGLLAPHRPKEPAWFLATVGVSPDHQGKGLGSAVVLPGVEAAERAGVPAFLETSAPRNLPFYERLGFTVTADVEVPEGPRTWCMTRKPGA

SEQ ID NO: 4276 - protein, 1148 aa, Artificial Sequence
  Synthetic Polypeptide
MALPVTALLLPLALLLHAARPEVQLVESGGGLVQAGGSLRLSCAASGRTFSMGWFRQAPGKEREFVAAITYSGGSPYYADSVKGRFTISRDNAKNTVYLQMNSLKPEDTAVYYCAANPTYGSDWNAENWGQGTQVTVSSGTGGGGSGGGGSGGGGSEFDIQMTQSPSSLSASVGDRVTITCKASDHINNWLAWYQQKPGQAPKLLIYGATTLETGVPSRFSGSGSGTDYTLTISSLQPEDFATYYCQQSWNTPWTFGQGTKLEIKRLEDLKNVFPPEVAVFEPSEAEISHTQKATLVCLATGFYPDHVELSWWVNGKEVHSGVSTDPQPLKEQPALNDSRYCLSSRLRVSATFWQNPRNHFRCQVQFYGLSENDEWTQDRAKPVTQIVSAEAWGRADCGSIGWLLLQAPRWVFKEEDPIHLRCHSWKNTALHKVTYLQNGKGRKYFHHNSDFYIPKATLKDSGSYFCRGLVGSKNVSSETVNITITQGLAVSTISSFFPPGYQVSFCLVMVLLFAVDTGLYFSVKTNIRSSTRDWKDHKFKWRKDPQDKRAKRSGSGATNFSLLKQAGDVEENPGPTSMDWIWRILFLVGAATGAHSFEQVQLQQPGAELVKPGASVKMSCKASGYAFSSYWINWMKQKPGQGLEWIGQIYPGDGDTNYNGKFKGRATLTADTSSSTAYMQLSSLTSEDSAVYFCARSITTVVGCAMDYWGQGTSVTVSSTRIQNPDPAVYQLRDSKSSDKSVCLFTDFDSQTNVSQSKDSDVYITDKTVLDMRSMDFKSNSAVAWSNKSDFACANAFNNSIIPEDTFFPSPESSCGTVAEGKTDNQYTLFVAGGTVLLLLFVISITTIIVIFLNRRRRRERRDLFTESWDTQKAPNNYRSPISTGQPTNQSMDDTREDIYVNYPTFSRRPKTRVRAKRSGSGVKQTLNFDLLKLAGDVESNPGPSRGHMTEYKPTVRLATRDDVPRAVRTLAAAFADYPATRHTVDPDRHIERVTELQELFLTRVGLDIGKVWVADDGAAVAVWTTPESVEAGAVFAEIGPRMAELSGSRLAAQQQMEGLLAPHRPKEPAWFLATVGVSPDHQGKGLGSAVVLPGVEAAERAGVPAFLETSAPRNLPFYERLGFTVTADVEVPEGPRTWCMTRKPGA

SEQ ID NO: 4277 - protein, 1285 aa, Artificial Sequence
  Synthetic Polypeptide
MALPVTALLLPLALLLHAARPEVQLVESGGGLVQAGGSLRLSCAASGRTFSMGWFRQAPGKEREFVAAITYSGGSPYYADSVKGRFTISRDNAKNTVYLQMNSLKPEDTAVYYCAANPTYGSDWNAENWGQGTQVTVSSGTGGGGSGGGGSGGGGSEFDIQMTQSPSSLSASVGDRVTITCKASDHINNWLAWYQQKPGQAPKLLIYGATTLETGVPSRFSGSGSGTDYTLTISSLQPEDFATYYCQQSWNTPWTFGQGTKLEIKRLEDLKNVFPPEVAVFEPSEAEISHTQKATLVCLATGFYPDHVELSWWVNGKEVHSGVSTDPQPLKEQPALNDSRYCLSSRLRVSATFWQNPRNHFRCQVQFYGLSENDEWTQDRAKPVTQIVSAEAWGRADCGSIGWLLLQAPRWVFKEEDPIHLRCHSWKNTALHKVTYLQNGKGRKYFHHNSDFYIPKATLKDSGSYFCRGLVGSKNVSSETVNITITQGLAVSTISSFFPPGYQVSFCLVMVLLFAVDTGLYFSVKTNIRSSTRDWKDHKFKWRKDPQDKRAKRSGSGATNFSLLKQAGDVEENPGPTSMDWIWRILFLVGAATGAHSGPEVQLVESGGGLVQAGGSLRLSCAASGRTFTMGWFRQAPGKEREFVAAISLSPTLAYYADSVKGRFTISRDNAKNTVVLQMNSLKPEDTALYYCAADRKSVMSIRPDYWGQGTQVTVSSGSGGGGSGGGGSGGGGSFEQVQLQQPGAELVKPGASVKMSCKASGYAFSSYWINWMKQKPGQGLEWIGQIYPGDGDTNYNGKFKGRATLTADTSSSTAYMQLSSLTSEDSAVYFCARSITTVVGCAMDYWGQGTSVTVSSTRIQNPDPAVYQLRDSKSSDKSVCLFTDFDSQTNVSQSKDSDVYITDKTVLDMRSMDFKSNSAVAWSNKSDFACANAFNNSIIPEDTFFPSPESSCGTVAEGKTDNQYTLFVAGGTVLLLLFVISITTIIVIFLNRRRRRERRDLFTESWDTQKAPNNYRSPISTGQPTNQSMDDTREDIYVNYPTFSRRPKTRVRAKRSGSGVKQTLNFDLLKLAGDVESNPGPSRGHMTEYKPTVRLATRDDVPRAVRTLAAAFADYPATRHTVDPDRHIERVTELQELFLTRVGLDIGKVWVADDGAAVAVWTTPESVEAGAVFAEIGPRMAELSGSRLAAQQQMEGLLAPHRPKEPAWFLATVGVSPDHQGKGLGSAVVLPGVEAAERAGVPAFLETSAPRNLPFYERLGFTVTADVEVPEGPRTWCMTRKPGA

SEQ ID NO: 4278 - protein, 1018 aa, Artificial Sequence
  Synthetic Polypeptide
MALPVTALLLPLALLLHAARPEVQLVESGGGLVQAGGSLRLSCAASGRTFSMGWFRQAPGKEREFVAAITYSGGSPYYADSVKGRFTISRDNAKNTVYLQMNSLKPEDTAVYYCAANPTYGSDWNAENWGQGTQVTVSSLEDLKNVFPPEVAVFEPSEAEISHTQKATLVCLATGFYPDHVELSWWVNGKEVHSGVSTDPQPLKEQPALNDSRYCLSSRLRVSATFWQNPRNHFRCQVQFYGLSENDEWTQDRAKPVTQIVSAEAWGRADCGSIGWLLLQAPRWVFKEEDPIHLRCHSWKNTALHKVTYLQNGKGRKYFHHNSDFYIPKATLKDSGSYFCRGLVGSKNVSSETVNITITQGLAVSTISSFFPPGYQVSFCLVMVLLFAVDTGLYFSVKTNIRSSTRDWKDHKFKWRKDPQDKRAKRSGSGATNFSLLKQAGDVEENPGPTSMDWIWRILFLVGAATGAHSGPEVQLVESGGGLVQAGGSLRLSCAASGRTFTMGWFRQAPGKEREFVAAISLSPTLAYYADSVKGRFTISRDNAKNTVVLQMNSLKPEDTALYYCAADRKSVMSIRPDYWGQGTQVTVSSTRIQNPDPAVYQLRDSKSSDKSVCLFTDFDSQTNVSQSKDSDVYITDKTVLDMRSMDFKSNSAVAWSNKSDFACANAFNNSIIPEDTFFPSPESSCGTVAEGKTDNQYTLFVAGGTVLLLLFVISITTIIVIFLNRRRRRERRDLFTESWDTQKAPNNYRSPISTGQPTNQSMDDTREDIYVNYPTFSRRPKTRVRAKRSGSGVKQTLNFDLLKLAGDVESNPGPSRGHMTEYKPTVRLATRDDVPRAVRTLAAAFADYPATRHTVDPDRHIERVTELQELFLTRVGLDIGKVWVADDGAAVAVWTTPESVEAGAVFAEIGPRMAELSGSRLAAQQQMEGLLAPHRPKEPAWFLATVGVSPDHQGKGLGSAVVLPGVEAAERAGVPAFLETSAPRNLPFYERLGFTVTADVEVPEGPRTWCMTRKPGA

SEQ ID NO: 4279 - protein, 544 aa, Artificial Sequence; identical to SEQ ID NO: 4058
  Synthetic Polypeptide

SEQ ID NO: 4280 - protein, 731 aa, Artificial Sequence
  Synthetic Polypeptide
MALPVTALLLPLALLLHAARPDIQMTQSPSSLSASVGDRVTITCKASDHINNWLAWYQQKPGQAPKLLIYGATTLETGVPSRFSGSGSGTDYTLTISSLQPEDFATYYCQQSWNTPWTFGQGTKLEIKRLEVAEGKTDNQYTLFVAGGTVLLLLFVISITTIIVIFLNRRRRRERRDLFTESWDTQKAPNNYRSPISTGQPTNQSMDDTREDIYVNYPTFSRRPKTRVRAKRSGSGATNFSLLKQAGDVEENPGPTSMDWIWRILFLVGAATGAHSFEQVQLQQPGAELVKPGASVKMSCKASGYAFSSYWINWMKQKPGQGLEWIGQIYPGDGDTNYNGKFKGRATLTADTSSSTAYMQLSSLTSEDSAVYFCARSITTVVGCAMDYWGQGTSVTVSSTRVAEGKTDNQYTLFVAGGTVLLLLFVISITTIIVIFLNRRRRRERRDLFTESWDTQKAPNNYRSPISTGQPTNQSMDDTREDIYVNYPTFSRRPKTRVRAKRSGSGVKQTLNFDLLKLAGDVESNPGPSRGHMTEYKPTVRLATRDDVPRAVRTLAAAFADYPATRHTVDPDRHIERVTELQELFLTRVGLDIGKVWVADDGAAVAVWTTPESVEAGAVFAEIGPRMAELSGSRLAAQQQMEGLLAPHRPKEPAWFLATVGVSPDHQGKGLGSAVVLPGVEAAERAGVPAFLETSAPRNLPFYERLGFTVTADVEVPEGPRTWCMTRKPGA

SEQ ID NO: 4281 - protein, 785 aa, Artificial Sequence
  Synthetic Polypeptide
MALPVTALLLPLALLLHAARPACEVQLLESGGGLIQPGGSLRLSCAASGFTFSSHAMTWVRQAPGKGLEWVSAISGSGDYTHYADSVKGRFTISRDNSKNTVYLQMNSLRAEDSAVYYCAKDEDGGSLLGHRGQGTLVTVSSGTGGGGSGGGGSGGGGSEFGSLEVAEGKTDNQYTLFVAGGTVLLLLFVISITTIIVIFLNRRRRRERRDLFTESWDTQKAPNNYRSPISTGQPTNQSMDDTREDIYVNYPTFSRRPKTRVRAKRSGSGATNFSLLKQAGDVEENPGPTSATMDWIWRILFLVGAATGAHSGPEVQLVESGGGLVQAGGSLRLSCAASGRTFSMGWFRQAPGKEREFVAAITYSGGSPYYADSVKGRFTISRDNAKNTVYLQMNSLKPEDTAVYYCAANPTYGSDWNAENWGQGTQVTVSSGSGGGGSGGGGSGGGGSFEGSTRVAEGKTDNQYTLFVAGGTVLLLLFVISITTIIVIFLNRRRRRERRDLFTESWDTQKAPNNYRSPISTGQPTNQSMDDTREDIYVNYPTFSRRPKTRVRAKRSGSGVKQTLNFDLLKLAGDVESNPGPSRGHMTEYKPTVRLATRDDVPRAVRTLAAAFADYPATRHTVDPDRHIERVTELQELFLTRVGLDIGKVWVADDGAAVAVWTTPESVEAGAVFAEIGPRMAELSGSRLAAQQQMEGLLAPHRPKEPAWFLATVGVSPDHQGKGLGSAVVLPGVEAAERAGVPAFLETSAPRNLPFYERLGFTVTADVEVPEGPRTWCMTRKPGA

SEQ ID NO: 4282 - protein, 936 aa, Artificial Sequence
  Synthetic Polypeptide
MALPVTALLLPLALLLHAARPDIQMTQSPSSLSASVGDRVTITCKASDHINNWLAWYQQKPGQAPKLLIYGATTLETGVPSRFSGSGSGTDYTLTISSLQPEDFATYYCQQSWNTPWTFGQGTKLEIKRLEGQPKANPTVTLFPPSSEELQANKATLVCLISDFYPGAVTVAWKADGSPVKAGVETTKPSKQSNNKYAASSYLSLTPEQWKSHRSYSCQVTHEGSTVEKTVAPTECSGSVAEGKTDNQYTLFVAGGTVLLLLFVISITTIIVIFLNRRRRRERRDLFTESWDTQKAPNNYRSPISTGQPTNQSMDDTREDIYVNYPTFSRRPKTRVRAKRSGSGATNFSLLKQAGDVEENPGPTSMDWIWRILFLVGAATGAHSFEQVQLQQPGAELVKPGASVKMSCKASGYAFSSYWINWMKQKPGQGLEWIGQIYPGDGDTNYNGKFKGRATLTADTSSSTAYMQLSSLTSEDSAVYFCARSITTVVGCAMDYWGQGTSVTVSSTRASTKGPSVFPLAPSSKSTSGGTAALGCLVKDYFPEPVTVSWNSGALTSGVHTFPAVLQSSGLYSLSSVVTVPSSSLGTQTYICNVNHKPSNTKVDKRVEPKSCGTVAEGKTDNQYTLFVAGGTVLLLLFVISITTIIVIFLNRRRRRERRDLFTESWDTQKAPNNYRSPISTGQPTNQSMDDTREDIYVNYPTFSRRPKTRVRAKRSGSGVKQTLNFDLLKLAGDVESNPGPSRGGIHTMATYEVLCEVARKLGTDDREVVLFLLNVFIPQPTLAQLIGALRALKEEGRLTFPLLAECLFRAGRRDLLRDLLHLDPRFLERHLAGTMSYFSPYQLTVLHVDGELCARDIRSLIFLSKDTIGSRSTPQTFLHWVYCMENLDLLGPTDVDALMSMLRSLSRVDLQRQVQTLMGLHLSGPSHSQHYRHTP

SEQ ID NO: 4283 - protein, 989 aa, Artificial Sequence
  Synthetic Polypeptide
MALPVTALLLPLALLLHAARPDIQMTQSPSSLSASVGDRVTITCKASDHINNWLAWYQQKPGQAPKLLIYGATTLETGVPSRFSGSGSGTDYTLTISSLQPEDFATYYCQQSWNTPWTFGQGTKLEIKRLEGQPKANPTVTLFPPSSEELQANKATLVCLISDFYPGAVTVAWKADGSPVKAGVETTKPSKQSNNKYAASSYLSLTPEQWKSHRSYSCQVTHEGSTVEKTVAPTECSGSVAEGKTDNQYTLFVAGGTVLLLLFVISITTIIVIFLNRRRRRERRDLFTESWDTQKAPNNYRSPISTGQPTNQSMDDTREDIYVNYPTFSRRPKTRVRAKRSGSGATNFSLLKQAGDVEENPGPTSMDWIWRILFLVGAATGAHSFEQVQLQQPGAELVKPGASVKMSCKASGYAFSSYWINWMKQKPGQGLEWIGQIYPGDGDTNYNGKFKGRATLTADTSSSTAYMQLSSLTSEDSAVYFCARSITTVVGCAMDYWGQGTSVTVSSTRASTKGPSVFPLAPSSKSTSGGTAALGCLVKDYFPEPVTVSWNSGALTSGVHTFPAVLQSSGLYSLSSVVTVPSSSLGTQTYICNVNHKPSNTKVDKRVEPKSCGTVAEGKTDNQYTLFVAGGTVLLLLFVISITTIIVIFLNRRRRRERRDLFTESWDTQKAPNNYRSPISTGQPTNQSMDDTREDIYVNYPTFSRRPKTRVRAKRSGSGVKQTLNFDLLKLAGDVESNPGPSRGGIHTMSDSKEVPSLPFLRHLLEELDSHEDSLLLFLCHDAAPGCTTVTQALCSLSQQRKLTLAALVEMLYVLQRMDLLKSRFGLSKEGAEQLLGTSFLTRYRKLMVCVGEELDSSELRALRLFACNLNPSLSTALSESSRFVELVLALENVGLVSPSSVSVLADMLRTLRRLDLCQQLVEYEQQEQARYRYCYAASPSLPVRTLRRGHGASEHEQLCMPVQESSDSPELLRTPVQESSSDSPEQTT

SEQ ID NO: 4284 - protein, 944 aa, Artificial Sequence
  Synthetic Polypeptide
MALPVTALLLPLALLLHAARPDIQMTQSPSSLSASVGDRVTITCKASDHINNWLAWYQQKPGQAPKLLIYGATTLETGVPSRFSGSGSGTDYTLTISSLQPEDFATYYCQQSWNTPWTFGQGTKLEIKRLEGQPKANPTVTLFPPSSEELQANKATLVCLISDFYPGAVTVAWKADGSPVKAGVETTKPSKQSNNKYAASSYLSLTPEQWKSHRSYSCQVTHEGSTVEKTVAPTECSGSVAEGKTDNQYTLFVAGGTVLLLLFVISITTIIVIFLNRRRRRERRDLFTESWDTQKAPNNYRSPISTGQPTNQSMDDTREDIYVNYPTFSRRPKTRVRAKRSGSGATNFSLLKQAGDVEENPGPTSMDWIWRILFLVGAATGAHSFEQVQLQQPGAELVKPGASVKMSCKASGYAFSSYWINWMKQKPGQGLEWIGQIYPGDGDTNYNGKFKGRATLTADTSSSTAYMQLSSLTSEDSAVYFCARSITTVVGCAMDYWGQGTSVTVSSTRASTKGPSVFPLAPSSKSTSGGTAALGCLVKDYFPEPVTVSWNSGALTSGVHTFPAVLQSSGLYSLSSVVTVPSSSLGTQTYICNVNHKPSNTKVDKRVEPKSCGTVAEGKTDNQYTLFVAGGTVLLLLFVISITTIIVIFLNRRRRRERRDLFTESWDTQKAPNNYRSPISTGQPTNQSMDDTREDIYVNYPTFSRRPKTRVRAKRSGSGVKQTLNFDLLKLAGDVESNPGPSRGHMTEYKPTVRLATRDDVPRAVRTLAAAFADYPATRHTVDPDRHIERVTELQELFLTRVGLDIGKVWVADDGAAVAVWTTPESVEAGAVFAEIGPRMAELSGSRLAAQQQMEGLLAPHRPKEPAWFLATVGVSPDHQGKGLGSAVVLPGVEAAERAGVPAFLETSAPRNLPFYERLGFTVTADVEVPEGPRTWCMTRKPGA

SEQ ID NO: 4285 - protein, 1081 aa, Artificial Sequence
  Synthetic Polypeptide
MALPVTALLLPLALLLHAARPEVQLVESGGGLVQAGGSLRLSCAASGRTFSMGWFRQAPGKEREFVAAITYSGGSPYYADSVKGRFTISRDNAKNTVYLQMNSLKPEDTAVYYCAANPTYGSDWNAENWGQGTQVTVSSGTGGGGSGGGGSGGGGSEFDIQMTQSPSSLSASVGDRVTITCKASDHINNWLAWYQQKPGQAPKLLIYGATTLETGVPSRFSGSGSGTDYTLTISSLQPEDFATYYCQQSWNTPWTFGQGTKLEIKRLEGQPKANPTVTLFPPSSEELQANKATLVCLISDFYPGAVTVAWKADGSPVKAGVETTKPSKQSNNKYAASSYLSLTPEQWKSHRSYSCQVTHEGSTVEKTVAPTECSGSVAEGKTDNQYTLFVAGGTVLLLLFVISITTIIVIFLNRRRRRERRDLFTESWDTQKAPNNYRSPISTGQPTNQSMDDTREDIYVNYPTFSRRPKTRVRAKRSGSGATNFSLLKQAGDVEENPGPTSMDWIWRILFLVGAATGAHSFEQVQLQQPGAELVKPGASVKMSCKASGYAFSSYWINWMKQKPGQGLEWIGQIYPGDGDTNYNGKFKGRATLTADTSSSTAYMQLSSLTSEDSAVYFCARSITTVVGCAMDYWGQGTSVTVSSTRASTKGPSVFPLAPSSKSTSGGTAALGCLVKDYFPEPVTVSWNSGALTSGVHTFPAVLQSSGLYSLSSVVTVPSSSLGTQTYICNVNHKPSNTKVDKRVEPKSCGTVAEGKTDNQYTLFVAGGTVLLLLFVISITTIIVIFLNRRRRRERRDLFTESWDTQKAPNNYRSPISTGQPTNQSMDDTREDIYVNYPTFSRRPKTRVRAKRSGSGVKQTLNFDLLKLAGDVESNPGPSRGHMTEYKPTVRLATRDDVPRAVRTLAAAFADYPATRHTVDPDRHIERVTELQELFLTRVGLDIGKVWVADDGAAVAVWTTPESVEAGAVFAEIGPRMAELSGSRLAAQQQMEGLLAPHRPKEPAWFLATVGVSPDHQGKGLGSAVVLPGVEAAERAGVPAFLETSAPRNLPFYERLGFTVTADVEVPEGPRTWCMTRKPGA

SEQ ID NO: 4286 - protein, 1218 aa, Artificial Sequence
  Synthetic Polypeptide
MALPVTALLLPLALLLHAARPEVQLVESGGGLVQAGGSLRLSCAASGRTFSMGWFRQAPGKEREFVAAITYSGGSPYYADSVKGRFTISRDNAKNTVYLQMNSLKPEDTAVYYCAANPTYGSDWNAENWGQGTQVTVSSGTGGGGSGGGGSGGGGSEFDIQMTQSPSSLSASVGDRVTITCKASDHINNWLAWYQQKPGQAPKLLIYGATTLETGVPSRFSGSGSGTDYTLTISSLQPEDFATYYCQQSWNTPWTFGQGTKLEIKRLEGQPKANPTVTLFPPSSEELQANKATLVCLISDFYPGAVTVAWKADGSPVKAGVETTKPSKQSNNKYAASSYLSLTPEQWKSHRSYSCQVTHEGSTVEKTVAPTECSGSVAEGKTDNQYTLFVAGGTVLLLLFVISITTIIVIFLNRRRRRERRDLFTESWDTQKAPNNYRSPISTGQPTNQSMDDTREDIYVNYPTFSRRPKTRVRAKRSGSGATNFSLLKQAGDVEENPGPTSMDWIWRILFLVGAATGAHSGPEVQLVESGGGLVQAGGSLRLSCAASGRTFTMGWFRQAPGKEREFVAAISLSPTLAYYADSVKGRFTISRDNAKNTVVLQMNSLKPEDTALYYCAADRKSVMSIRPDYWGQGTQVTVSSGSGGGGSGGGGSGGGGSFEQVQLQQPGAELVKPGASVKMSCKASGYAFSSYWINWMKQKPGQGLEWIGQIYPGDGDTNYNGKFKGRATLTADTSSSTAYMQLSSLTSEDSAVYFCARSITTVVGCAMDYWGQGTSVTVSSTRASTKGPSVFPLAPSSKSTSGGTAALGCLVKDYFPEPVTVSWNSGALTSGVHTFPAVLQSSGLYSLSSVVTVPSSSLGTQTYICNVNHKPSNTKVDKRVEPKSCGTVAEGKTDNQYTLFVAGGTVLLLLFVISITTIIVIFLNRRRRRERRDLFTESWDTQKAPNNYRSPISTGQPTNQSMDDTREDIYVNYPTFSRRPKTRVRAKRSGSGVKQTLNFDLLKLAGDVESNPGPSRGHMTEYKPTVRLATRDDVPRAVRTLAAAFADYPATRHTVDPDRHIERVTELQELFLTRVGLDIGKVWVADDGAAVAVWTTPESVEAGAVFAEIGPRMAELSGSRLAAQQQMEGLLAPHRPKEPAWFLATVGVSPDHQGKGLGSAVVLPGVEAAERAGVPAFLETSAPRNLPFYERLGFTVTADVEVPEGPRTWCMTRKPGA

SEQ ID NO: 4287 - protein, 951 aa, Artificial Sequence
  Synthetic Polypeptide
MALPVTALLLPLALLLHAARPEVQLVESGGGLVQAGGSLRLSCAASGRTFSMGWFRQAPGKEREFVAAITYSGGSPYYADSVKGRFTISRDNAKNTVYLQMNSLKPEDTAVYYCAANPTYGSDWNAENWGQGTQVTVSSLEGQPKANPTVTLFPPSSEELQANKATLVCLISDFYPGAVTVAWKADGSPVKAGVETTKPSKQSNNKYAASSYLSLTPEQWKSHRSYSCQVTHEGSTVEKTVAPTECSGSVAEGKTDNQYTLFVAGGTVLLLLFVISITTIIVIFLNRRRRRERRDLFTESWDTQKAPNNYRSPISTGQPTNQSMDDTREDIYVNYPTFSRRPKTRVRAKRSGSGATNFSLLKQAGDVEENPGPTSMDWIWRILFLVGAATGAHSGPEVQLVESGGGLVQAGGSLRLSCAASGRTFTMGWFRQAPGKEREFVAAISLSPTLAYYADSVKGRFTISRDNAKNTVVLQMNSLKPEDTALYYCAADRKSVMSIRPDYWGQGTQVTVSSTRASTKGPSVFPLAPSSKSTSGGTAALGCLVKDYFPEPVTVSWNSGALTSGVHTFPAVLQSSGLYSLSSVVTVPSSSLGTQTYICNVNHKPSNTKVDKRVEPKSCGTVAEGKTDNQYTLFVAGGTVLLLLFVISITTIIVIFLNRRRRRERRDLFTESWDTQKAPNNYRSPISTGQPTNQSMDDTREDIYVNYPTFSRRPKTRVRAKRSGSGVKQTLNFDLLKLAGDVESNPGPSRGHMTEYKPTVRLATRDDVPRAVRTLAAAFADYPATRHTVDPDRHIERVTELQELFLTRVGLDIGKVWVADDGAAVAVWTTPESVEAGAVFAEIGPRMAELSGSRLAAQQQMEGLLAPHRPKEPAWFLATVGVSPDHQGKGLGSAVVLPGVEAAERAGVPAFLETSAPRNLPFYERLGFTVTADVEVPEGPRTWCMTRKPGA

SEQ ID NO: 4288 - protein, 959 aa, Artificial Sequence
  Synthetic Polypeptide
MALPVTALLLPLALLLHAARPDIQMTQSPSSLSASVGDRVTITCKASDHINNWLAWYQQKPGQAPKLLIYGATTLETGVPSRFSGSGSGTDYTLTISSLQPEDFATYYCQQSWNTPWTFGQGTKLEIKRLEDLKNVFPPEVAVFEPSEAEISHTQKATLVCLATGFYPDHVELSWWVNGKEVHSGVSTDPQPLKEQPALNDSRYCLSSRLRVSATFWQNPRNHFRCQVQFYGLSENDEWTQDRAKPVTQIVSAEAWGRADCGSVAEGKTDNQYTLFVAGGTVLLLLFVISITTIIVIFLNRRRRRERRDLFTESWDTQKAPNNYRSPISTGQPTNQSMDDTREDIYVNYPTFSRRPKTRVRAKRSGSGATNFSLLKQAGDVEENPGPTSMDWIWRILFLVGAATGAHSFEQVQLQQPGAELVKPGASVKMSCKASGYAFSSYWINWMKQKPGQGLEWIGQIYPGDGDTNYNGKFKGRATLTADTSSSTAYMQLSSLTSEDSAVYFCARSITTVVGCAMDYWGQGTSVTVSSTRIQNPDPAVYQLRDSKSSDKSVCLFTDFDSQTNVSQSKDSDVYITDKTVLDMRSMDFKSNSAVAWSNKSDFACANAFNNSIIPEDTFFPSPESSCGTVAEGKTDNQYTLFVAGGTVLLLLFVISITTIIVIFLNRRRRRERRDLFTESWDTQKAPNNYRSPISTGQPTNQSMDDTREDIYVNYPTFSRRPKTRVRAKRSGSGVKQTLNFDLLKLAGDVESNPGPSRGHMTEYKPTVRLATRDDVPRAVRTLAAAFADYPATRHTVDPDRHIERVTELQELFLTRVGLDIGKVWVADDGAAVAVWTTPESVEAGAVFAEIGPRMAELSGSRLAAQQQMEGLLAPHRPKEPAWFLATVGVSPDHQGKGLGSAVVLPGVEAAERAGVPAFLETSAPRNLPFYERLGFTVTADVEVPEGPRTWCMTRKPGA

SEQ ID NO: 4289 - protein, 1096 aa, Artificial Sequence
  Synthetic Polypeptide
MALPVTALLLPLALLLHAARPEVQLVESGGGLVQAGGSLRLSCAASGRTFSMGWFRQAPGKEREFVAAITYSGGSPYYADSVKGRFTISRDNAKNTVYLQMNSLKPEDTAVYYCAANPTYGSDWNAENWGQGTQVTVSSGTGGGGSGGGGSGGGGSEFDIQMTQSPSSLSASVGDRVTITCKASDHINNWLAWYQQKPGQAPKLLIYGATTLETGVPSRFSGSGSGTDYTLTISSLQPEDFATYYCQQSWNTPWTFGQGTKLEIKRLEDLKNVFPPEVAVFEPSEAEISHTQKATLVCLATGFYPDHVELSWWVNGKEVHSGVSTDPQPLKEQPALNDSRYCLSSRLRVSATFWQNPRNHFRCQVQFYGLSENDEWTQDRAKPVTQIVSAEAWGRADCGSVAEGKTDNQYTLFVAGGTVLLLLFVISITTIIVIFLNRRRRRERRDLFTESWDTQKAPNNYRSPISTGQPTNQSMDDTREDIYVNYPTFSRRPKTRVRAKRSGSGATNFSLLKQAGDVEENPGPTSMDWIWRILFLVGAATGAHSFEQVQLQQPGAELVKPGASVKMSCKASGYAFSSYWINWMKQKPGQGLEWIGQIYPGDGDTNYNGKFKGRATLTADTSSSTAYMQLSSLTSEDSAVYFCARSITTVVGCAMDYWGQGTSVTVSSTRIQNPDPAVYQLRDSKSSDKSVCLFTDFDSQTNVSQSKDSDVYITDKTVLDMRSMDFKSNSAVAWSNKSDFACANAFNNSIIPEDTFFPSPESSCGTVAEGKTDNQYTLFVAGGTVLLLLFVISITTIIVIFLNRRRRRERRDLFTESWDTQKAPNNYRSPISTGQPTNQSMDDTREDIYVNYPTFSRRPKTRVRAKRSGSGVKQTLNFDLLKLAGDVESNPGPSRGHMTEYKPTVRLATRDDVPRAVRTLAAAFADYPATRHTVDPDRHIERVTELQELFLTRVGLDIGKVWVADDGAAVAVWTTPESVEAGAVFAEIGPRMAELSGSRLAAQQQMEGLLAPHRPKEPAWFLATVGVSPDHQGKGLGSAVVLPGVEAAERAGVPAFLETSAPRNLPFYERLGFTVTADVEVPEGPRTWCMTRKPGA

SEQ ID NO: 4290 - protein, 1233 aa, Artificial Sequence
  Synthetic Polypeptide
MALPVTALLLPLALLLHAARPEVQLVESGGGLVQAGGSLRLSCAASGRTFSMGWFRQAPGKEREFVAAITYSGGSPYYADSVKGRFTISRDNAKNTVYLQMNSLKPEDTAVYYCAANPTYGSDWNAENWGQGTQVTVSSGTGGGGSGGGGSGGGGSEFDIQMTQSPSSLSASVGDRVTITCKASDHINNWLAWYQQKPGQAPKLLIYGATTLETGVPSRFSGSGSGTDYTLTISSLQPEDFATYYCQQSWNTPWTFGQGTKLEIKRLEDLKNVFPPEVAVFEPSEAEISHTQKATLVCLATGFYPDHVELSWWVNGKEVHSGVSTDPQPLKEQPALNDSRYCLSSRLRVSATFWQNPRNHFRCQVQFYGLSENDEWTQDRAKPVTQIVSAEAWGRADCGSVAEGKTDNQYTLFVAGGTVLLLLFVISITTIIVIFLNRRRRRERRDLFTESWDTQKAPNNYRSPISTGQPTNQSMDDTREDIYVNYPTFSRRPKTRVRAKRSGSGATNFSLLKQAGDVEENPGPTSMDWIWRILFLVGAATGAHSGPEVQLVESGGGLVQAGGSLRLSCAASGRTFTMGWFRQAPGKEREFVAAISLSPTLAYYADSVKGRFTISRDNAKNTVVLQMNSLKPEDTALYYCAADRKSVMSIRPDYWGQGTQVTVSSGSGGGGSGGGGSGGGGSFEQVQLQQPGAELVKPGASVKMSCKASGYAFSSYWINWMKQKPGQGLEWIGQIYPGDGDTNYNGKFKGRATLTADTSSSTAYMQLSSLTSEDSAVYFCARSITTVVGCAMDYWGQGTSVTVSSTRIQNPDPAVYQLRDSKSSDKSVCLFTDFDSQTNVSQSKDSDVYITDKTVLDMRSMDFKSNSAVAWSNKSDFACANAFNNSIIPEDTFFPSPESSCGTVAEGKTDNQYTLFVAGGTVLLLLFVISITTIIVIFLNRRRRRERRDLFTESWDTQKAPNNYRSPISTGQPTNQSMDDTREDIYVNYPTFSRRPKTRVRAKRSGSGVKQTLNFDLLKLAGDVESNPGPSRGHMTEYKPTVRLATRDDVPRAVRTLAAAFADYPATRHTVDPDRHIERVTELQELFLTRVGLDIGKVWVADDGAAVAVWTTPESVEAGAVFAEIGPRMAELSGSRLAAQQQMEGLLAPHRPKEPAWFLATVGVSPDHQGKGLGSAVVLPGVEAAERAGVPAFLETSAPRNLPFYERLGFTVTADVEVPEGPRTWCMTRKPGA

SEQ ID NO: 4291 - protein, 966 aa, Artificial Sequence
  Synthetic Polypeptide
MALPVTALLLPLALLLHAARPEVQLVESGGGLVQAGGSLRLSCAASGRTFSMGWFRQAPGKEREFVAAITYSGGSPYYADSVKGRFTISRDNAKNTVYLQMNSLKPEDTAVYYCAANPTYGSDWNAENWGQGTQVTVSSLEDLKNVFPPEVAVFEPSEAEISHTQKATLVCLATGFYPDHVELSWWVNGKEVHSGVSTDPQPLKEQPALNDSRYCLSSRLRVSATFWQNPRNHFRCQVQFYGLSENDEWTQDRAKPVTQIVSAEAWGRADCGSVAEGKTDNQYTLFVAGGTVLLLLFVISITTIIVIFLNRRRRRERRDLFTESWDTQKAPNNYRSPISTGQPTNQSMDDTREDIYVNYPTFSRRPKTRVRAKRSGSGATNFSLLKQAGDVEENPGPTSMDWIWRILFLVGAATGAHSGPEVQLVESGGGLVQAGGSLRLSCAASGRTFTMGWFRQAPGKEREFVAAISLSPTLAYYADSVKGRFTISRDNAKNTVVLQMNSLKPEDTALYYCAADRKSVMSIRPDYWGQGTQVTVSSTRIQNPDPAVYQLRDSKSSDKSVCLFTDFDSQTNVSQSKDSDVYITDKTVLDMRSMDFKSNSAVAWSNKSDFACANAFNNSIIPEDTFFPSPESSCGTVAEGKTDNQYTLFVAGGTVLLLLFVISITTIIVIFLNRRRRRERRDLFTESWDTQKAPNNYRSPISTGQPTNQSMDDTREDIYVNYPTFSRRPKTRVRAKRSGSGVKQTLNFDLLKLAGDVESNPGPSRGHMTEYKPTVRLATRDDVPRAVRTLAAAFADYPATRHTVDPDRHIERVTELQELFLTRVGLDIGKVWVADDGAAVAVWTTPESVEAGAVFAEIGPRMAELSGSRLAAQQQMEGLLAPHRPKEPAWFLATVGVSPDHQGKGLGSAVVLPGVEAAERAGVPAFLETSAPRNLPFYERLGFTVTADVEVPEGPRTWCMTRKPGA

SEQ ID NO: 4292 - protein, 492 aa, Artificial Sequence
  Synthetic Polypeptide
MALPVTALLLPLALLLHAARPACEVQLLESGGGLIQPGGSLRLSCAASGFTFSSHAMTWVRQAPGKGLEWVSAISGSGDYTHYADSVKGRFTISRDNSKNTVYLQMNSLRAEDSAVYYCAKDEDGGSLLGHRGQGTLVTVSSGTGGGGSGGGGSGGGGSEFGSLEVAEGKTDNQYTLFVAGGTVLLLLFVISITTIIVIFLNRRRRRERRDLFTESWDTQKAPNNYRSPISTGQPTNQSMDDTREDIYVNYPTFSRRPKTRVRAKRSGSGATNFSLLKQAGDVEENPGPTRGHMTEYKPTVRLATRDDVPRAVRTLAAAFADYPATRHTVDPDRHIERVTELQELFLTRVGLDIGKVWVADDGAAVAVWTTPESVEAGAVFAEIGPRMAELSGSRLAAQQQMEGLLAPHRPKEPAWFLATVGVSPDHQGKGLGSAVVLPGVEAAERAGVPAFLETSAPRNLPFYERLGFTVTADVEVPEGPRTWCMTRKPGA

SEQ ID NO: 4293 - protein, 1004 aa, Artificial Sequence
  Synthetic Polypeptide
MALPVTALLLPLALLLHAARPDIQMTQSPSSLSASVGDRVTITCKASDHINNWLAWYQQKPGQAPKLLIYGATTLETGVPSRFSGSGSGTDYTLTISSLQPEDFATYYCQQSWNTPWTFGQGTKLEIKRLEIGWLLLQAPRWVFKEEDPIHLRCHSWKNTALHKVTYLQNGKGRKYFHHNSDFYIPKATLKDSGSYFCRGLVGSKNVSSETVNITITQGLAVSTISSFFPPGYQVSFCLVMVLLFAVDTGLYFSVKTNIRSSTRDWKDHKFKWRKDPQDKRAKRSGSGATNFSLLKQAGDVEENPGPTSMDWIWRILFLVGAATGAHSFEQVQLQQPGAELVKPGASVKMSCKASGYAFSSYWINWMKQKPGQGLEWIGQIYPGDGDTNYNGKFKGRATLTADTSSSTAYMQLSSLTSEDSAVYFCARSITTVVGCAMDYWGQGTSVTVSSTREEVLWHTSVPFAENMSLECVYPSMGILTQVEWFKIGTQQDSIAIFSPTHGMVIRKPYAERVYFLNSTMASNNMTLFFRNASEDDVGYYSCSLYTYPQGTWQKVIQVVQSDSFEAAVPSNSHIVSEPGKNVTLTCQPQMTWPVQAVRWEKIQPRQIDLLTYCNLVHGRNFTSKFPRQIVSNCSHGRWSVIVIPDVTVSDSGLYRCYLQASAGENETFVMRLTVAEGKTDNQYTLFVAGGTVLLLLFVISITTIIVIFLNRRRRRERRDLFTESWDTQKAPNNYRSPISTGQPTNQSMDDTREDIYVNYPTFSRRPKTRVRAKRSGSGVKQTLNFDLLKLAGDVESNPGPSRGHMTEYKPTVRLATRDDVPRAVRTLAAAFADYPATRHTVDPDRHIERVTELQELFLTRVGLDIGKVWVADDGAAVAVWTTPESVEAGAVFAEIGPRMAELSGSRLAAQQQMEGLLAPHRPKEPAWFLATVGVSPDHQGKGLGSAVVLPGVEAAERAGVPAFLETSAPRNLPFYERLGFTVTADVEVPEGPRTWCMTRKPGA

SEQ ID NO: 4294 - protein, 1058 aa, Artificial Sequence
  Synthetic Polypeptide
MALPVTALLLPLALLLHAARPACEVQLLESGGGLIQPGGSLRLSCAASGFTFSSHAMTWVRQAPGKGLEWVSAISGSGDYTHYADSVKGRFTISRDNSKNTVYLQMNSLRAEDSAVYYCAKDEDGGSLLGHRGQGTLVTVSSGTGGGGSGGGGSGGGGSEFGSLEIGWLLLQAPRWVFKEEDPIHLRCHSWKNTALHKVTYLQNGKGRKYFHHNSDFYIPKATLKDSGSYFCRGLVGSKNVSSETVNITITQGLAVSTISSFFPPGYQVSFCLVMVLLFAVDTGLYFSVKTNIRSSTRDWKDHKFKWRKDPQDKRAKRSGSGATNFSLLKQAGDVEENPGPTSATMDWIWRILFLVGAATGAHSGPEVQLVESGGGLVQAGGSLRLSCAASGRTFSMGWFRQAPGKEREFVAAITYSGGSPYYADSVKGRFTISRDNAKNTVYLQMNSLKPEDTAVYYCAANPTYGSDWNAENWGQGTQVTVSSGSGGGGSGGGGSGGGGSFEGSTREEVLWHTSVPFAENMSLECVYPSMGILTQVEWFKIGTQQDSIAIFSPTHGMVIRKPYAERVYFLNSTMASNNMTLFFRNASEDDVGYYSCSLYTYPQGTWQKVIQVVQSDSFEAAVPSNSHIVSEPGKNVTLTCQPQMTWPVQAVRWEKIQPRQIDLLTYCNLVHGRNFTSKFPRQIVSNCSHGRWSVIVIPDVTVSDSGLYRCYLQASAGENETFVMRLTVAEGKTDNQYTLFVAGGTVLLLLFVISITTIIVIFLNRRRRRERRDLFTESWDTQKAPNNYRSPISTGQPTNQSMDDTREDIYVNYPTFSRRPKTRVRAKRSGSGVKQTLNFDLLKLAGDVESNPGPSRGHMTEYKPTVRLATRDDVPRAVRTLAAAFADYPATRHTVDPDRHIERVTELQELFLTRVGLDIGKVWVADDGAAVAVWTTPESVEAGAVFAEIGPRMAELSGSRLAAQQQMEGLLAPHRPKEPAWFLATVGVSPDHQGKGLGSAVVLPGVEAAERAGVPAFLETSAPRNLPFYERLGFTVTADVEVPEGPRTWCMTRKPGA

SEQ ID NO: 4295 - protein, 1209 aa, Artificial Sequence
  Synthetic Polypeptide
MALPVTALLLPLALLLHAARPDIQMTQSPSSLSASVGDRVTITCKASDHINNWLAWYQQKPGQAPKLLIYGATTLETGVPSRFSGSGSGTDYTLTISSLQPEDFATYYCQQSWNTPWTFGQGTKLEIKRLEGQPKANPTVTLFPPSSEELQANKATLVCLISDFYPGAVTVAWKADGSPVKAGVETTKPSKQSNNKYAASSYLSLTPEQWKSHRSYSCQVTHEGSTVEKTVAPTECSGSIGWLLLQAPRWVFKEEDPIHLRCHSWKNTALHKVTYLQNGKGRKYFHHNSDFYIPKATLKDSGSYFCRGLVGSKNVSSETVNITITQGLAVSTISSFFPPGYQVSFCLVMVLLFAVDTGLYFSVKTNIRSSTRDWKDHKFKWRKDPQDKRAKRSGSGATNFSLLKQAGDVEENPGPTSMDWIWRILFLVGAATGAHSFEQVQLQQPGAELVKPGASVKMSCKASGYAFSSYWINWMKQKPGQGLEWIGQIYPGDGDTNYNGKFKGRATLTADTSSSTAYMQLSSLTSEDSAVYFCARSITTVVGCAMDYWGQGTSVTVSSTRASTKGPSVFPLAPSSKSTSGGTAALGCLVKDYFPEPVTVSWNSGALTSGVHTFPAVLQSSGLYSLSSVVTVPSSSLGTQTYICNVNHKPSNTKVDKRVEPKSCGTEEVLWHTSVPFAENMSLECVYPSMGILTQVEWFKIGTQQDSIAIFSPTHGMVIRKPYAERVYFLNSTMASNNMTLFFRNASEDDVGYYSCSLYTYPQGTWQKVIQVVQSDSFEAAVPSNSHIVSEPGKNVTLTCQPQMTWPVQAVRWEKIQPRQIDLLTYCNLVHGRNFTSKFPRQIVSNCSHGRWSVIVIPDVTVSDSGLYRCYLQASAGENETFVMRLTVAEGKTDNQYTLFVAGGTVLLLLFVISITTIIVIFLNRRRRRERRDLFTESWDTQKAPNNYRSPISTGQPTNQSMDDTREDIYVNYPTFSRRPKTRVRAKRSGSGVKQTLNFDLLKLAGDVESNPGPSRGGIHTMATYEVLCEVARKLGTDDREVVLFLLNVFIPQPTLAQLIGALRALKEEGRLTFPLLAECLFRAGRRDLLRDLLHLDPRFLERHLAGTMSYFSPYQLTVLHVDGELCARDIRSLIFLSKDTIGSRSTPQTFLHWVYCMENLDLLGPTDVDALMSMLRSLSRVDLQRQVQTLMGLHLSGPSHSQHYRHTP

SEQ ID NO: 4296 - protein, 1262 aa, Artificial Sequence
  Synthetic Polypeptide
MALPVTALLLPLALLLHAARPDIQMTQSPSSLSASVGDRVTITCKASDHINNWLAWYQQKPGQAPKLLIYGATTLETGVPSRFSGSGSGTDYTLTISSLQPEDFATYYCQQSWNTPWTFGQGTKLEIKRLEGQPKANPTVTLFPPSSEELQANKATLVCLISDFYPGAVTVAWKADGSPVKAGVETTKPSKQSNNKYAASSYLSLTPEQWKSHRSYSCQVTHEGSTVEKTVAPTECSGSIGWLLLQAPRWVFKEEDPIHLRCHSWKNTALHKVTYLQNGKGRKYFHHNSDFYIPKATLKDSGSYFCRGLVGSKNVSSETVNITITQGLAVSTISSFFPPGYQVSFCLVMVLLFAVDTGLYFSVKTNIRSSTRDWKDHKFKWRKDPQDKRAKRSGSGATNFSLLKQAGDVEENPGPTSMDWIWRILFLVGAATGAHSFEQVQLQQPGAELVKPGASVKMSCKASGYAFSSYWINWMKQKPGQGLEWIGQIYPGDGDTNYNGKFKGRATLTADTSSSTAYMQLSSLTSEDSAVYFCARSITTVVGCAMDYWGQGTSVTVSSTRASTKGPSVFPLAPSSKSTSGGTAALGCLVKDYFPEPVTVSWNSGALTSGVHTFPAVLQSSGLYSLSSVVTVPSSSLGTQTYICNVNHKPSNTKVDKRVEPKSCGTEEVLWHTSVPFAENMSLECVYPSMGILTQVEWFKIGTQQDSIAIFSPTHGMVIRKPYAERVYFLNSTMASNNMTLFFRNASEDDVGYYSCSLYTYPQGTWQKVIQVVQSDSFEAAVPSNSHIVSEPGKNVTLTCQPQMTWPVQAVRWEKIQPRQIDLLTYCNLVHGRNFTSKFPRQIVSNCSHGRWSVIVIPDVTVSDSGLYRCYLQASAGENETFVMRLTVAEGKTDNQYTLFVAGGTVLLLLFVISITTIIVIFLNRRRRRERRDLFTESWDTQKAPNNYRSPISTGQPTNQSMDDTREDIYVNYPTFSRRPKTRVRAKRSGSGVKQTLNFDLLKLAGDVESNPGPSRGGIHTMSDSKEVPSLPFLRHLLEELDSHEDSLLLFLCHDAAPGCTTVTQALCSLSQQRKLTLAALVEMLYVLQRMDLLKSRFGLSKEGAEQLLGTSFLTRYRKLMVCVGEELDSSELRALRLFACNLNPSLSTALSESSRFVELVLALENVGLVSPSSVSVLADMLRTLRRLDLCQQLVEYEQQEQARYRYCYAASPSLPVRTLRRGHGASEHEQLCMPVQESSDSPELLRTPVQESSSDSPEQTT

SEQ ID NO: 4297 - protein, 1217 aa, Artificial Sequence
  Synthetic Polypeptide
MALPVTALLLPLALLLHAARPDIQMTQSPSSLSASVGDRVTITCKASDHINNWLAWYQQKPGQAPKLLIYGATTLETGVPSRFSGSGSGTDYTLTISSLQPEDFATYYCQQSWNTPWTFGQGTKLEIKRLEGQPKANPTVTLFPPSSEELQANKATLVCLISDFYPGAVTVAWKADGSPVKAGVETTKPSKQSNNKYAASSYLSLTPEQWKSHRSYSCQVTHEGSTVEKTVAPTECSGSIGWLLLQAPRWVFKEEDPIHLRCHSWKNTALHKVTYLQNGKGRKYFHHNSDFYIPKATLKDSGSYFCRGLVGSKNVSSETVNITITQGLAVSTISSFFPPGYQVSFCLVMVLLFAVDTGLYFSVKTNIRSSTRDWKDHKFKWRKDPQDKRAKRSGSGATNFSLLKQAGDVEENPGPTSMDWIWRILFLVGAATGAHSFEQVQLQQPGAELVKPGASVKMSCKASGYAFSSYWINWMKQKPGQGLEWIGQIYPGDGDTNYNGKFKGRATLTADTSSSTAYMQLSSLTSEDSAVYFCARSITTVVGCAMDYWGQGTSVTVSSTRASTKGPSVFPLAPSSKSTSGGTAALGCLVKDYFPEPVTVSWNSGALTSGVHTFPAVLQSSGLYSLSSVVTVPSSSLGTQTYICNVNHKPSNTKVDKRVEPKSCGTEEVLWHTSVPFAENMSLECVYPSMGILTQVEWFKIGTQQDSIAIFSPTHGMVIRKPYAERVYFLNSTMASNNMTLFFRNASEDDVGYYSCSLYTYPQGTWQKVIQVVQSDSFEAAVPSNSHIVSEPGKNVTLTCQPQMTWPVQAVRWEKIQPRQIDLLTYCNLVHGRNFTSKFPRQIVSNCSHGRWSVIVIPDVTVSDSGLYRCYLQASAGENETFVMRLTVAEGKTDNQYTLFVAGGTVLLLLFVISITTIIVIFLNRRRRRERRDLFTESWDTQKAPNNYRSPISTGQPTNQSMDDTREDIYVNYPTFSRRPKTRVRAKRSGSGVKQTLNFDLLKLAGDVESNPGPSRGHMTEYKPTVRLATRDDVPRAVRTLAAAFADYPATRHTVDPDRHIERVTELQELFLTRVGLDIGKVWVADDGAAVAVWTTPESVEAGAVFAEIGPRMAELSGSRLAAQQQMEGLLAPHRPKEPAWFLATVGVSPDHQGKGLGSAVVLPGVEAAERAGVPAFLETSAPRNLPFYERLGFTVTADVEVPEGPRTWCMTRKPGA

SEQ ID NO: 4298 - protein, 1354 aa, Artificial Sequence
  Synthetic Polypeptide
MALPVTALLLPLALLLHAARPEVQLVESGGGLVQAGGSLRLSCAASGRTFSMGWFRQAPGKEREFVAAITYSGGSPYYADSVKGRFTISRDNAKNTVYLQMNSLKPEDTAVYYCAANPTYGSDWNAENWGQGTQVTVSSGTGGGGSGGGGSGGGGSEFDIQMTQSPSSLSASVGDRVTITCKASDHINNWLAWYQQKPGQAPKLLIYGATTLETGVPSRFSGSGSGTDYTLTISSLQPEDFATYYCQQSWNTPWTFGQGTKLEIKRLEGQPKANPTVTLFPPSSEELQANKATLVCLISDFYPGAVTVAWKADGSPVKAGVETTKPSKQSNNKYAASSYLSLTPEQWKSHRSYSCQVTHEGSTVEKTVAPTECSGSIGWLLLQAPRWVFKEEDPIHLRCHSWKNTALHKVTYLQNGKGRKYFHHNSDFYIPKATLKDSGSYFCRGLVGSKNVSSETVNITITQGLAVSTISSFFPPGYQVSFCLVMVLLFAVDTGLYFSVKTNIRSSTRDWKDHKFKWRKDPQDKRAKRSGSGATNFSLLKQAGDVEENPGPTSMDWIWRILFLVGAATGAHSFEQVQLQQPGAELVKPGASVKMSCKASGYAFSSYWINWMKQKPGQGLEWIGQIYPGDGDTNYNGKFKGRATLTADTSSSTAYMQLSSLTSEDSAVYFCARSITTVVGCAMDYWGQGTSVTVSSTRASTKGPSVFPLAPSSKSTSGGTAALGCLVKDYFPEPVTVSWNSGALTSGVHTFPAVLQSSGLYSLSSVVTVPSSSLGTQTYICNVNHKPSNTKVDKRVEPKSCGTEEVLWHTSVPFAENMSLECVYPSMGILTQVEWFKIGTQQDSIAIFSPTHGMVIRKPYAERVYFLNSTMASNNMTLFFRNASEDDVGYYSCSLYTYPQGTWQKVIQVVQSDSFEAAVPSNSHIVSEPGKNVTLTCQPQMTWPVQAVRWEKIQPRQIDLLTYCNLVHGRNFTSKFPRQIVSNCSHGRWSVIVIPDVTVSDSGLYRCYLQASAGENETFVMRLTVAEGKTDNQYTLFVAGGTVLLLLFVISITTIIVIFLNRRRRRERRDLFTESWDTQKAPNNYRSPISTGQPTNQSMDDTREDIYVNYPTFSRRPKTRVRAKRSGSGVKQTLNFDLLKLAGDVESNPGPSRGHMTEYKPTVRLATRDDVPRAVRTLAAAFADYPATRHTVDPDRHIERVTELQELFLTRVGLDIGKVWVADDGAAVAVWTTPESVEAGAVFAEIGPRMAELSGSRLAAQQQMEGLLAPHRPKEPAWFLATVGVSPDHQGKGLGSAVVLPGVEAAERAGVPAFLETSAPRNLPFYERLGFTVTADVEVPEGPRTWCMTRKPGA

SEQ ID NO: 4299 - protein, 1491 aa, Artificial Sequence
  Synthetic Polypeptide
MALPVTALLLPLALLLHAARPEVQLVESGGGLVQAGGSLRLSCAASGRTFSMGWFRQAPGKEREFVAAITYSGGSPYYADSVKGRFTISRDNAKNTVYLQMNSLKPEDTAVYYCAANPTYGSDWNAENWGQGTQVTVSSGTGGGGSGGGGSGGGGSEFDIQMTQSPSSLSASVGDRVTITCKASDHINNWLAWYQQKPGQAPKLLIYGATTLETGVPSRFSGSGSGTDYTLTISSLQPEDFATYYCQQSWNTPWTFGQGTKLEIKRLEGQPKANPTVTLFPPSSEELQANKATLVCLISDFYPGAVTVAWKADGSPVKAGVETTKPSKQSNNKYAASSYLSLTPEQWKSHRSYSCQVTHEGSTVEKTVAPTECSGSIGWLLLQAPRWVFKEEDPIHLRCHSWKNTALHKVTYLQNGKGRKYFHHNSDFYIPKATLKDSGSYFCRGLVGSKNVSSETVNITITQGLAVSTISSFFPPGYQVSFCLVMVLLFAVDTGLYFSVKTNIRSSTRDWKDHKFKWRKDPQDKRAKRSGSGATNFSLLKQAGDVEENPGPTSMDWIWRILFLVGAATGAHSGPEVQLVESGGGLVQAGGSLRLSCAASGRTFTMGWFRQAPGKEREFVAAISLSPTLAYYADSVKGRFTISRDNAKNTVVLQMNSLKPEDTALYYCAADRKSVMSIRPDYWGQGTQVTVSSGSGGGGSGGGGSGGGGSFEQVQLQQPGAELVKPGASVKMSCKASGYAFSSYWINWMKQKPGQGLEWIGQIYPGDGDTNYNGKFKGRATLTADTSSSTAYMQLSSLTSEDSAVYFCARSITTVVGCAMDYWGQGTSVTVSSTRASTKGPSVFPLAPSSKSTSGGTAALGCLVKDYFPEPVTVSWNSGALTSGVHTFPAVLQSSGLYSLSSVVTVPSSSLGTQTYICNVNHKPSNTKVDKRVEPKSCGTEEVLWHTSVPFAENMSLECVYPSMGILTQVEWFKIGTQQDSIAIFSPTHGMVIRKPYAERVYFLNSTMASNNMTLFFRNASEDDVGYYSCSLYTYPQGTWQKVIQVVQSDSFEAAVPSNSHIVSEPGKNVTLTCQPQMTWPVQAVRWEKIQPRQIDLLTYCNLVHGRNFTSKFPRQIVSNCSHGRWSVIVIPDVTVSDSGLYRCYLQASAGENETFVMRLTVAEGKTDNQYTLFVAGGTVLLLLFVISITTIIVIFLNRRRRRERRDLFTESWDTQKAPNNYRSPISTGQPTNQSMDDTREDIYVNYPTFSRRPKTRVRAKRSGSGVKQTLNFDLLKLAGDVESNPGPSRGHMTEYKPTVRLATRDDVPRAVRTLAAAFADYPATRHTVDPDRHIERVTELQELFLTRVGLDIGKVWVADDGAAVAVWTTPESVEAGAVFAEIGPRMAELSGSRLAAQQQMEGLLAPHRPKEPAWFLATVGVSPDHQGKGLGSAVVLPGVEAAERAGVPAFLETSAPRNLPFYERLGFTVTADVEVPEGPRTWCMTRKPGA

SEQ ID NO: 4300 - protein, 1224 aa, Artificial Sequence
  Synthetic Polypeptide
MALPVTALLLPLALLLHAARPEVQLVESGGGLVQAGGSLRLSCAASGRTFSMGWFRQAPGKEREFVAAITYSGGSPYYADSVKGRFTISRDNAKNTVYLQMNSLKPEDTAVYYCAANPTYGSDWNAENWGQGTQVTVSSLEGQPKANPTVTLFPPSSEELQANKATLVCLISDFYPGAVTVAWKADGSPVKAGVETTKPSKQSNNKYAASSYLSLTPEQWKSHRSYSCQVTHEGSTVEKTVAPTECSGSIGWLLLQAPRWVFKEEDPIHLRCHSWKNTALHKVTYLQNGKGRKYFHHNSDFYIPKATLKDSGSYFCRGLVGSKNVSSETVNITITQGLAVSTISSFFPPGYQVSFCLVMVLLFAVDTGLYFSVKTNIRSSTRDWKDHKFKWRKDPQDKRAKRSGSGATNFSLLKQAGDVEENPGPTSMDWIWRILFLVGAATGAHSGPEVQLVESGGGLVQAGGSLRLSCAASGRTFTMGWFRQAPGKEREFVAAISLSPTLAYYADSVKGRFTISRDNAKNTVVLQMNSLKPEDTALYYCAADRKSVMSIRPDYWGQGTQVTVSSTRASTKGPSVFPLAPSSKSTSGGTAALGCLVKDYFPEPVTVSWNSGALTSGVHTFPAVLQSSGLYSLSSVVTVPSSSLGTQTYICNVNHKPSNTKVDKRVEPKSCGTEEVLWHTSVPFAENMSLECVYPSMGILTQVEWFKIGTQQDSIAIFSPTHGMVIRKPYAERVYFLNSTMASNNMTLFFRNASEDDVGYYSCSLYTYPQGTWQKVIQVVQSDSFEAAVPSNSHIVSEPGKNVTLTCQPQMTWPVQAVRWEKIQPRQIDLLTYCNLVHGRNFTSKFPRQIVSNCSHGRWSVIVIPDVTVSDSGLYRCYLQASAGENETFVMRLTVAEGKTDNQYTLFVAGGTVLLLLFVISITTIIVIFLNRRRRRERRDLFTESWDTQKAPNNYRSPISTGQPTNQSMDDTREDIYVNYPTFSRRPKTRVRAKRSGSGVKQTLNFDLLKLAGDVESNPGPSRGHMTEYKPTVRLATRDDVPRAVRTLAAAFADYPATRHTVDPDRHIERVTELQELFLTRVGLDIGKVWVADDGAAVAVWTTPESVEAGAVFAEIGPRMAELSGSRLAAQQQMEGLLAPHRPKEPAWFLATVGVSPDHQGKGLGSAVVLPGVEAAERAGVPAFLETSAPRNLPFYERLGFTVTADVEVPEGPRTWCMTRKPGA

SEQ ID NO: 4301 - protein, 1232 aa, Artificial Sequence
  Synthetic Polypeptide
MALPVTALLLPLALLLHAARPDIQMTQSPSSLSASVGDRVTITCKASDHINNWLAWYQQKPGQAPKLLIYGATTLETGVPSRFSGSGSGTDYTLTISSLQPEDFATYYCQQSWNTPWTFGQGTKLEIKRLEDLKNVFPPEVAVFEPSEAEISHTQKATLVCLATGFYPDHVELSWWVNGKEVHSGVSTDPQPLKEQPALNDSRYCLSSRLRVSATFWQNPRNHFRCQVQFYGLSENDEWTQDRAKPVTQIVSAEAWGRADCGSIGWLLLQAPRWVFKEEDPIHLRCHSWKNTALHKVTYLQNGKGRKYFHHNSDFYIPKATLKDSGSYFCRGLVGSKNVSSETVNITITQGLAVSTISSFFPPGYQVSFCLVMVLLFAVDTGLYFSVKTNIRSSTRDWKDHKFKWRKDPQDKRAKRSGSGATNFSLLKQAGDVEENPGPTSMDWIWRILFLVGAATGAHSFEQVQLQQPGAELVKPGASVKMSCKASGYAFSSYWINWMKQKPGQGLEWIGQIYPGDGDTNYNGKFKGRATLTADTSSSTAYMQLSSLTSEDSAVYFCARSITTVVGCAMDYWGQGTSVTVSSTRIQNPDPAVYQLRDSKSSDKSVCLFTDFDSQTNVSQSKDSDVYITDKTVLDMRSMDFKSNSAVAWSNKSDFACANAFNNSIIPEDTFFPSPESSCGTEEVLWHTSVPFAENMSLECVYPSMGILTQVEWFKIGTQQDSIAIFSPTHGMVIRKPYAERVYFLNSTMASNNMTLFFRNASEDDVGYYSCSLYTYPQGTWQKVIQVVQSDSFEAAVPSNSHIVSEPGKNVTLTCQPQMTWPVQAVRWEKIQPRQIDLLTYCNLVHGRNFTSKFPRQIVSNCSHGRWSVIVIPDVTVSDSGLYRCYLQASAGENETFVMRLTVAEGKTDNQYTLFVAGGTVLLLLFVISITTIIVIFLNRRRRRERRDLFTESWDTQKAPNNYRSPISTGQPTNQSMDDTREDIYVNYPTFSRRPKTRVRAKRSGSGVKQTLNFDLLKLAGDVESNPGPSRGHMTEYKPTVRLATRDDVPRAVRTLAAAFADYPATRHTVDPDRHIERVTELQELFLTRVGLDIGKVWVADDGAAVAVWTTPESVEAGAVFAEIGPRMAELSGSRLAAQQQMEGLLAPHRPKEPAWFLATVGVSPDHQGKGLGSAVVLPGVEAAERAGVPAFLETSAPRNLPFYERLGFTVTADVEVPEGPRTWCMTRKPGA

SEQ ID NO: 4302 - protein, 1369 aa, Artificial Sequence
  Synthetic Polypeptide
MALPVTALLLPLALLLHAARPEVQLVESGGGLVQAGGSLRLSCAASGRTFSMGWFRQAPGKEREFVAAITYSGGSPYYADSVKGRFTISRDNAKNTVYLQMNSLKPEDTAVYYCAANPTYGSDWNAENWGQGTQVTVSSGTGGGGSGGGGSGGGGSEFDIQMTQSPSSLSASVGDRVTITCKASDHINNWLAWYQQKPGQAPKLLIYGATTLETGVPSRFSGSGSGTDYTLTISSLQPEDFATYYCQQSWNTPWTFGQGTKLEIKRLEDLKNVFPPEVAVFEPSEAEISHTQKATLVCLATGFYPDHVELSWWVNGKEVHSGVSTDPQPLKEQPALNDSRYCLSSRLRVSATFWQNPRNHFRCQVQFYGLSENDEWTQDRAKPVTQIVSAEAWGRADCGSIGWLLLQAPRWVFKEEDPIHLRCHSWKNTALHKVTYLQNGKGRKYFHHNSDFYIPKATLKDSGSYFCRGLVGSKNVSSETVNITITQGLAVSTISSFFPPGYQVSFCLVMVLLFAVDTGLYFSVKTNIRSSTRDWKDHKFKWRKDPQDKRAKRSGSGATNFSLLKQAGDVEENPGPTSMDWIWRILFLVGAATGAHSFEQVQLQQPGAELVKPGASVKMSCKASGYAFSSYWINWMKQKPGQGLEWIGQIYPGDGDTNYNGKFKGRATLTADTSSSTAYMQLSSLTSEDSAVYFCARSITTVVGCAMDYWGQGTSVTVSSTRIQNPDPAVYQLRDSKSSDKSVCLFTDFDSQTNVSQSKDSDVYITDKTVLDMRSMDFKSNSAVAWSNKSDFACANAFNNSIIPEDTFFPSPESSCGTEEVLWHTSVPFAENMSLECVYPSMGILTQVEWFKIGTQQDSIAIFSPTHGMVIRKPYAERVYFLNSTMASNNMTLFFRNASEDDVGYYSCSLYTYPQGTWQKVIQVVQSDSFEAAVPSNSHIVSEPGKNVTLTCQPQMTWPVQAVRWEKIQPRQIDLLTYCNLVHGRNFTSKFPRQIVSNCSHGRWSVIVIPDVTVSDSGLYRCYLQASAGENETFVMRLTVAEGKTDNQYTLFVAGGTVLLLLFVISITTIIVIFLNRRRRRERRDLFTESWDTQKAPNNYRSPISTGQPTNQSMDDTREDIYVNYPTFSRRPKTRVRAKRSGSGVKQTLNFDLLKLAGDVESNPGPSRGHMTEYKPTVRLATRDDVPRAVRTLAAAFADYPATRHTVDPDRHIERVTELQELFLTRVGLDIGKVWVADDGAAVAVWTTPESVEAGAVFAEIGPRMAELSGSRLAAQQQMEGLLAPHRPKEPAWFLATVGVSPDHQGKGLGSAVVLPGVEAAERAGVPAFLETSAPRNLPFYERLGFTVTADVEVPEGPRTWCMTRKPGA

SEQ ID NO: 4303 - protein, 1506 aa, Artificial Sequence
  Synthetic Polypeptide
MALPVTALLLPLALLLHAARPEVQLVESGGGLVQAGGSLRLSCAASGRTFSMGWFRQAPGKEREFVAAITYSGGSPYYADSVKGRFTISRDNAKNTVYLQMNSLKPEDTAVYYCAANPTYGSDWNAENWGQGTQVTVSSGTGGGGSGGGGSGGGGSEFDIQMTQSPSSLSASVGDRVTITCKASDHINNWLAWYQQKPGQAPKLLIYGATTLETGVPSRFSGSGSGTDYTLTISSLQPEDFATYYCQQSWNTPWTFGQGTKLEIKRLEDLKNVFPPEVAVFEPSEAEISHTQKATLVCLATGFYPDHVELSWWVNGKEVHSGVSTDPQPLKEQPALNDSRYCLSSRLRVSATFWQNPRNHFRCQVQFYGLSENDEWTQDRAKPVTQIVSAEAWGRADCGSIGWLLLQAPRWVFKEEDPIHLRCHSWKNTALHKVTYLQNGKGRKYFHHNSDFYIPKATLKDSGSYFCRGLVGSKNVSSETVNITITQGLAVSTISSFFPPGYQVSFCLVMVLLFAVDTGLYFSVKTNIRSSTRDWKDHKFKWRKDPQDKRAKRSGSGATNFSLLKQAGDVEENPGPTSMDWIWRILFLVGAATGAHSGPEVQLVESGGGLVQAGGSLRLSCAASGRTFTMGWFRQAPGKEREFVAAISLSPTLAYYADSVKGRFTISRDNAKNTVVLQMNSLKPEDTALYYCAADRKSVMSIRPDYWGQGTQVTVSSGSGGGGSGGGGSGGGGSFEQVQLQQPGAELVKPGASVKMSCKASGYAFSSYWINWMKQKPGQGLEWIGQIYPGDGDTNYNGKFKGRATLTADTSSSTAYMQLSSLTSEDSAVYFCARSITTVVGCAMDYWGQGTSVTVSSTRIQNPDPAVYQLRDSKSSDKSVCLFTDFDSQTNVSQSKDSDVYITDKTVLDMRSMDFKSNSAVAWSNKSDFACANAFNNSIIPEDTFFPSPESSCGTEEVLWHTSVPFAENMSLECVYPSMGILTQVEWFKIGTQQDSIAIFSPTHGMVIRKPYAERVYFLNSTMASNNMTLFFRNASEDDVGYYSCSLYTYPQGTWQKVIQVVQSDSFEAAVPSNSHIVSEPGKNVTLTCQPQMTWPVQAVRWEKIQPRQIDLLTYCNLVHGRNFTSKFPRQIVSNCSHGRWSVIVIPDVTVSDSGLYRCYLQASAGENETFVMRLTVAEGKTDNQYTLFVAGGTVLLLLFVISITTIIVIFLNRRRRRERRDLFTESWDTQKAPNNYRSPISTGQPTNQSMDDTREDIYVNYPTFSRRPKTRVRAKRSGSGVKQTLNFDLLKLAGDVESNPGPSRGHMTEYKPTVRLATRDDVPRAVRTLAAAFADYPATRHTVDPDRHIERVTELQELFLTRVGLDIGKVWVADDGAAVAVWTTPESVEAGAVFAEIGPRMAELSGSRLAAQQQMEGLLAPHRPKEPAWFLATVGVSPDHQGKGLGSAVVLPGVEAAERAGVPAFLETSAPRNLPFYERLGFTVTADVEVPEGPRTWCMTRKPGA

SEQ ID NO: 4304 - protein, 1239 aa, Artificial Sequence
  Synthetic Polypeptide
MALPVTALLLPLALLLHAARPEVQLVESGGGLVQAGGSLRLSCAASGRTFSMGWFRQAPGKEREFVAAITYSGGSPYYADSVKGRFTISRDNAKNTVYLQMNSLKPEDTAVYYCAANPTYGSDWNAENWGQGTQVTVSSLEDLKNVFPPEVAVFEPSEAEISHTQKATLVCLATGFYPDHVELSWWVNGKEVHSGVSTDPQPLKEQPALNDSRYCLSSRLRVSATFWQNPRNHFRCQVQFYGLSENDEWTQDRAKPVTQIVSAEAWGRADCGSIGWLLLQAPRWVFKEEDPIHLRCHSWKNTALHKVTYLQNGKGRKYFHHNSDFYIPKATLKDSGSYFCRGLVGSKNVSSETVNITITQGLAVSTISSFFPPGYQVSFCLVMVLLFAVDTGLYFSVKTNIRSSTRDWKDHKFKWRKDPQDKRAKRSGSGATNFSLLKQAGDVEENPGPTSMDWIWRILFLVGAATGAHSGPEVQLVESGGGLVQAGGSLRLSCAASGRTFTMGWFRQAPGKEREFVAAISLSPTLAYYADSVKGRFTISRDNAKNTVVLQMNSLKPEDTALYYCAADRKSVMSIRPDYWGQGTQVTVSSTRIQNPDPAVYQLRDSKSSDKSVCLFTDFDSQTNVSQSKDSDVYITDKTVLDMRSMDFKSNSAVAWSNKSDFACANAFNNSIIPEDTFFPSPESSCGTEEVLWHTSVPFAENMSLECVYPSMGILTQVEWFKIGTQQDSIAIFSPTHGMVIRKPYAERVYFLNSTMASNNMTLFFRNASEDDVGYYSCSLYTYPQGTWQKVIQVVQSDSFEAAVPSNSHIVSEPGKNVTLTCQPQMTWPVQAVRWEKIQPRQIDLLTYCNLVHGRNFTSKFPRQIVSNCSHGRWSVIVIPDVTVSDSGLYRCYLQASAGENETFVMRLTVAEGKTDNQYTLFVAGGTVLLLLFVISITTIIVIFLNRRRRRERRDLFTESWDTQKAPNNYRSPISTGQPTNQSMDDTREDIYVNYPTFSRRPKTRVRAKRSGSGVKQTLNFDLLKLAGDVESNPGPSRGHMTEYKPTVRLATRDDVPRAVRTLAAAFADYPATRHTVDPDRHIERVTELQELFLTRVGLDIGKVWVADDGAAVAVWTTPESVEAGAVFAEIGPRMAELSGSRLAAQQQMEGLLAPHRPKEPAWFLATVGVSPDHQGKGLGSAVVLPGVEAAERAGVPAFLETSAPRNLPFYERLGFTVTADVEVPEGPRTWCMTRKPGA

SEQ ID NO: 4305 - protein, 544 aa, Artificial Sequence; identical to SEQ ID NO: 4058
  Synthetic Polypeptide

SEQ ID NO: 4306 - protein, 1175 aa, Artificial Sequence
  Synthetic Polypeptide
MALPVTALLLPLALLLHAARPDIQMTQSPSSLSASVGDRVTITCKASDHINNWLAWYQQKPGQAPKLLIYGATTLETGVPSRFSGSGSGTDYTLTISSLQPEDFATYYCQQSWNTPWTFGQGTKLEIKRLEEEVLWHTSVPFAENMSLECVYPSMGILTQVEWFKIGTQQDSIAIFSPTHGMVIRKPYAERVYFLNSTMASNNMTLFFRNASEDDVGYYSCSLYTYPQGTWQKVIQVVQSDSFEAAVPSNSHIVSEPGKNVTLTCQPQMTWPVQAVRWEKIQPRQIDLLTYCNLVHGRNFTSKFPRQIVSNCSHGRWSVIVIPDVTVSDSGLYRCYLQASAGENETFVMRLTVAEGKTDNQYTLFVAGGTVLLLLFVISITTIIVIFLNRRRRRERRDLFTESWDTQFKKAPNNYRSPISTGQPTNQSMDDTREDIYVNYPTFSRRPKTRVRAKRSGSGATNFSLLKQAGDVEENPGPTSMDWIWRILFLVGAATGAHSFEQVQLQQPGAELVKPGASVKMSCKASGYAFSSYWINWMKQKPGQGLEWIGQIYPGDGDTNYNGKFKGRATLTADTSSSTAYMQLSSLTSEDSAVYFCARSITTVVGCAMDYWGQGTSVTVSSTREEVLWHTSVPFAENMSLECVYPSMGILTQVEWFKIGTQQDSIAIFSPTHGMVIRKPYAERVYFLNSTMASNNMTLFFRNASEDDVGYYSCSLYTYPQGTWQKVIQVVQSDSFEAAVPSNSHIVSEPGKNVTLTCQPQMTWPVQAVRWEKIQPRQIDLLTYCNLVHGRNFTSKFPRQIVSNCSHGRWSVIVIPDVTVSDSGLYRCYLQASAGENETFVMRLTVAEGKTDNQYTLFVAGGTVLLLLFVISITTIIVIFLNRRRRRERRDLFTESWDTQKAPNNYRSPISTGQPTNQSMDDTREDIYVNYPTFSRRPKTRVRAKRSGSGVKQTLNFDLLKLAGDVESNPGPSRGHMTEYKPTVRLATRDDVPRAVRTLAAAFADYPATRHTVDPDRHIERVTELQELFLTRVGLDIGKVWVADDGAAVAVWTTPESVEAGAVFAEIGPRMAELSGSRLAAQQQMEGLLAPHRPKEPAWFLATVGVSPDHQGKGLGSAVVLPGVEAAERAGVPAFLETSAPRNLPFYERLGFTVTADVEVPEGPRTWCMTRKPGA

SEQ ID NO: 4307 - protein, 1229 aa, Artificial Sequence
  Synthetic Polypeptide
MALPVTALLLPLALLLHAARPACEVQLLESGGGLIQPGGSLRLSCAASGFTFSSHAMTWVRQAPGKGLEWVSAISGSGDYTHYADSVKGRFTISRDNSKNTVYLQMNSLRAEDSAVYYCAKDEDGGSLLGHRGQGTLVTVSSGTGGGGSGGGGSGGGGSEFGSLEEEVLWHTSVPFAENMSLECVYPSMGILTQVEWFKIGTQQDSIAIFSPTHGMVIRKPYAERVYFLNSTMASNNMTLFFRNASEDDVGYYSCSLYTYPQGTWQKVIQVVQSDSFEAAVPSNSHIVSEPGKNVTLTCQPQMTWPVQAVRWEKIQPRQIDLLTYCNLVHGRNFTSKFPRQIVSNCSHGRWSVIVIPDVTVSDSGLYRCYLQASAGENETFVMRLTVAEGKTDNQYTLFVAGGTVLLLLFVISITTIIVIFLNRRRRRERRDLFTESWDTQFKKAPNNYRSPISTGQPTNQSMDDTREDIYVNYPTFSRRPKTRVRAKRSGSGATNFSLLKQAGDVEENPGPTSATMDWIWRILFLVGAATGAHSGPEVQLVESGGGLVQAGGSLRLSCAASGRTFSMGWFRQAPGKEREFVAAITYSGGSPYYADSVKGRFTISRDNAKNTVYLQMNSLKPEDTAVYYCAANPTYGSDWNAENWGQGTQVTVSSGSGGGGSGGGGSGGGGSFEGSTREEVLWHTSVPFAENMSLECVYPSMGILTQVEWFKIGTQQDSIAIFSPTHGMVIRKPYAERVYFLNSTMASNNMTLFFRNASEDDVGYYSCSLYTYPQGTWQKVIQVVQSDSFEAAVPSNSHIVSEPGKNVTLTCQPQMTWPVQAVRWEKIQPRQIDLLTYCNLVHGRNFTSKFPRQIVSNCSHGRWSVIVIPDVTVSDSGLYRCYLQASAGENETFVMRLTVAEGKTDNQYTLFVAGGTVLLLLFVISITTIIVIFLNRRRRRERRDLFTESWDTQKAPNNYRSPISTGQPTNQSMDDTREDIYVNYPTFSRRPKTRVRAKRSGSGVKQTLNFDLLKLAGDVESNPGPSRGHMTEYKPTVRLATRDDVPRAVRTLAAAFADYPATRHTVDPDRHIERVTELQELFLTRVGLDIGKVWVADDGAAVAVWTTPESVEAGAVFAEIGPRMAELSGSRLAAQQQMEGLLAPHRPKEPAWFLATVGVSPDHQGKGLGSAVVLPGVEAAERAGVPAFLETSAPRNLPFYERLGFTVTADVEVPEGPRTWCMTRKPGA

SEQ ID NO: 4308 - protein, 1380 aa, Artificial Sequence
  Synthetic Polypeptide
MALPVTALLLPLALLLHAARPDIQMTQSPSSLSASVGDRVTITCKASDHINNWLAWYQQKPGQAPKLLIYGATTLETGVPSRFSGSGSGTDYTLTISSLQPEDFATYYCQQSWNTPWTFGQGTKLEIKRLEGQPKANPTVTLFPPSSEELQANKATLVCLISDFYPGAVTVAWKADGSPVKAGVETTKPSKQSNNKYAASSYLSLTPEQWKSHRSYSCQVTHEGSTVEKTVAPTECSGSEEVLWHTSVPFAENMSLECVYPSMGILTQVEWFKIGTQQDSIAIFSPTHGMVIRKPYAERVYFLNSTMASNNMTLFFRNASEDDVGYYSCSLYTYPQGTWQKVIQVVQSDSFEAAVPSNSHIVSEPGKNVTLTCQPQMTWPVQAVRWEKIQPRQIDLLTYCNLVHGRNFTSKFPRQIVSNCSHGRWSVIVIPDVTVSDSGLYRCYLQASAGENETFVMRLTVAEGKTDNQYTLFVAGGTVLLLLFVISITTIIVIFLNRRRRRERRDLFTESWDTQFKKAPNNYRSPISTGQPTNQSMDDTREDIYVNYPTFSRRPKTRVRAKRSGSGATNFSLLKQAGDVEENPGPTSMDWIWRILFLVGAATGAHSFEQVQLQQPGAELVKPGASVKMSCKASGYAFSSYWINWMKQKPGQGLEWIGQIYPGDGDTNYNGKFKGRATLTADTSSSTAYMQLSSLTSEDSAVYFCARSITTVVGCAMDYWGQGTSVTVSSTRASTKGPSVFPLAPSSKSTSGGTAALGCLVKDYFPEPVTVSWNSGALTSGVHTFPAVLQSSGLYSLSSVVTVPSSSLGTQTYICNVNHKPSNTKVDKRVEPKSCGTEEVLWHTSVPFAENMSLECVYPSMGILTQVEWFKIGTQQDSIAIFSPTHGMVIRKPYAERVYFLNSTMASNNMTLFFRNASEDDVGYYSCSLYTYPQGTWQKVIQVVQSDSFEAAVPSNSHIVSEPGKNVTLTCQPQMTWPVQAVRWEKIQPRQIDLLTYCNLVHGRNFTSKFPRQIVSNCSHGRWSVIVIPDVTVSDSGLYRCYLQASAGENETFVMRLTVAEGKTDNQYTLFVAGGTVLLLLFVISITTIIVIFLNRRRRRERRDLFTESWDTQKAPNNYRSPISTGQPTNQSMDDTREDIYVNYPTFSRRPKTRVRAKRSGSGVKQTLNFDLLKLAGDVESNPGPSRGGIHTMATYEVLCEVARKLGTDDREVVLFLLNVFIPQPTLAQLIGALRALKEEGRLTFPLLAECLFRAGRRDLLRDLLHLDPRFLERHLAGTMSYFSPYQLTVLHVDGELCARDIRSLIFLSKDTIGSRSTPQTFLHWVYCMENLDLLGPTDVDALMSMLRSLSRVDLQRQVQTLMGLHLSGPSHSQHYRHTP

SEQ ID NO: 4309 - protein, 1433 aa, Artificial Sequence
  Synthetic Polypeptide
MALPVTALLLPLALLLHAARPDIQMTQSPSSLSASVGDRVTITCKASDHINNWLAWYQQKPGQAPKLLIYGATTLETGVPSRFSGSGSGTDYTLTISSLQPEDFATYYCQQSWNTPWTFGQGTKLEIKRLEGQPKANPTVTLFPPSSEELQANKATLVCLISDFYPGAVTVAWKADGSPVKAGVETTKPSKQSNNKYAASSYLSLTPEQWKSHRSYSCQVTHEGSTVEKTVAPTECSGSEEVLWHTSVPFAENMSLECVYPSMGILTQVEWFKIGTQQDSIAIFSPTHGMVIRKPYAERVYFLNSTMASNNMTLFFRNASEDDVGYYSCSLYTYPQGTWQKVIQVVQSDSFEAAVPSNSHIVSEPGKNVTLTCQPQMTWPVQAVRWEKIQPRQIDLLTYCNLVHGRNFTSKFPRQIVSNCSHGRWSVIVIPDVTVSDSGLYRCYLQASAGENETFVMRLTVAEGKTDNQYTLFVAGGTVLLLLFVISITTIIVIFLNRRRRRERRDLFTESWDTQFKKAPNNYRSPISTGQPTNQSMDDTREDIYVNYPTFSRRPKTRVRAKRSGSGATNFSLLKQAGDVEENPGPTSMDWIWRILFLVGAATGAHSFEQVQLQQPGAELVKPGASVKMSCKASGYAFSSYWINWMKQKPGQGLEWIGQIYPGDGDTNYNGKFKGRATLTADTSSSTAYMQLSSLTSEDSAVYFCARSITTVVGCAMDYWGQGTSVTVSSTRASTKGPSVFPLAPSSKSTSGGTAALGCLVKDYFPEPVTVSWNSGALTSGVHTFPAVLQSSGLYSLSSVVTVPSSSLGTQTYICNVNHKPSNTKVDKRVEPKSCGTEEVLWHTSVPFAENMSLECVYPSMGILTQVEWFKIGTQQDSIAIFSPTHGMVIRKPYAERVYFLNSTMASNNMTLFFRNASEDDVGYYSCSLYTYPQGTWQKVIQVVQSDSFEAAVPSNSHIVSEPGKNVTLTCQPQMTWPVQAVRWEKIQPRQIDLLTYCNLVHGRNFTSKFPRQIVSNCSHGRWSVIVIPDVTVSDSGLYRCYLQASAGENETFVMRLTVAEGKTDNQYTLFVAGGTVLLLLFVISITTIIVIFLNRRRRRERRDLFTESWDTQKAPNNYRSPISTGQPTNQSMDDTREDIYVNYPTFSRRPKTRVRAKRSGSGVKQTLNFDLLKLAGDVESNPGPSRGGIHTMSDSKEVPSLPFLRHLLEELDSHEDSLLLFLCHDAAPGCTTVTQALCSLSQQRKLTLAALVEMLYVLQRMDLLKSRFGLSKEGAEQLLGTSFLTRYRKLMVCVGEELDSSELRALRLFACNLNPSLSTALSESSRFVELVLALENVGLVSPSSVSVLADMLRTLRRLDLCQQLVEYEQQEQARYRYCYAASPSLPVRTLRRGHGASEHEQLCMPVQESSDSPELLRTPVQESSSDSPEQTT

SEQ ID NO: 4310 - protein, 1388 aa, Artificial Sequence
  Synthetic Polypeptide
MALPVTALLLPLALLLHAARPDIQMTQSPSSLSASVGDRVTITCKASDHINNWLAWYQQKPGQAPKLLIYGATTLETGVPSRFSGSGSGTDYTLTISSLQPEDFATYYCQQSWNTPWTFGQGTKLEIKRLEGQPKANPTVTLFPPSSEELQANKATLVCLISDFYPGAVTVAWKADGSPVKAGVETTKPSKQSNNKYAASSYLSLTPEQWKSHRSYSCQVTHEGSTVEKTVAPTECSGSEEVLWHTSVPFAENMSLECVYPSMGILTQVEWFKIGTQQDSIAIFSPTHGMVIRKPYAERVYFLNSTMASNNMTLFFRNASEDDVGYYSCSLYTYPQGTWQKVIQVVQSDSFEAAVPSNSHIVSEPGKNVTLTCQPQMTWPVQAVRWEKIQPRQIDLLTYCNLVHGRNFTSKFPRQIVSNCSHGRWSVIVIPDVTVSDSGLYRCYLQASAGENETFVMRLTVAEGKTDNQYTLFVAGGTVLLLLFVISITTIIVIFLNRRRRRERRDLFTESWDTQFKKAPNNYRSPISTGQPTNQSMDDTREDIYVNYPTFSRRPKTRVRAKRSGSGATNFSLLKQAGDVEENPGPTSMDWIWRILFLVGAATGAHSFEQVQLQQPGAELVKPGASVKMSCKASGYAFSSYWINWMKQKPGQGLEWIGQIYPGDGDTNYNGKFKGRATLTADTSSSTAYMQLSSLTSEDSAVYFCARSITTVVGCAMDYWGQGTSVTVSSTRASTKGPSVFPLAPSSKSTSGGTAALGCLVKDYFPEPVTVSWNSGALTSGVHTFPAVLQSSGLYSLSSVVTVPSSSLGTQTYICNVNHKPSNTKVDKRVEPKSCGTEEVLWHTSVPFAENMSLECVYPSMGILTQVEWFKIGTQQDSIAIFSPTHGMVIRKPYAERVYFLNSTMASNNMTLFFRNASEDDVGYYSCSLYTYPQGTWQKVIQVVQSDSFEAAVPSNSHIVSEPGKNVTLTCQPQMTWPVQAVRWEKIQPRQIDLLTYCNLVHGRNFTSKFPRQIVSNCSHGRWSVIVIPDVTVSDSGLYRCYLQASAGENETFVMRLTVAEGKTDNQYTLFVAGGTVLLLLFVISITTIIVIFLNRRRRRERRDLFTESWDTQKAPNNYRSPISTGQPTNQSMDDTREDIYVNYPTFSRRPKTRVRAKRSGSGVKQTLNFDLLKLAGDVESNPGPSRGHMTEYKPTVRLATRDDVPRAVRTLAAAFADYPATRHTVDPDRHIERVTELQELFLTRVGLDIGKVWVADDGAAVAVWTTPESVEAGAVFAEIGPRMAELSGSRLAAQQQMEGLLAPHRPKEPAWFLATVGVSPDHQGKGLGSAVVLPGVEAAERAGVPAFLETSAPRNLPFYERLGFTVTADVEVPEGPRTWCMTRKPGA

SEQ ID NO: 4311 - protein, 1525 aa, Artificial Sequence
  Synthetic Polypeptide
MALPVTALLLPLALLLHAARPEVQLVESGGGLVQAGGSLRLSCAASGRTFSMGWFRQAPGKEREFVAAITYSGGSPYYADSVKGRFTISRDNAKNTVYLQMNSLKPEDTAVYYCAANPTYGSDWNAENWGQGTQVTVSSGTGGGGSGGGGSGGGGSEFDIQMTQSPSSLSASVGDRVTITCKASDHINNWLAWYQQKPGQAPKLLIYGATTLETGVPSRFSGSGSGTDYTLTISSLQPEDFATYYCQQSWNTPWTFGQGTKLEIKRLEGQPKANPTVTLFPPSSEELQANKATLVCLISDFYPGAVTVAWKADGSPVKAGVETTKPSKQSNNKYAASSYLSLTPEQWKSHRSYSCQVTHEGSTVEKTVAPTECSGSEEVLWHTSVPFAENMSLECVYPSMGILTQVEWFKIGTQQDSIAIFSPTHGMVIRKPYAERVYFLNSTMASNNMTLFFRNASEDDVGYYSCSLYTYPQGTWQKVIQVVQSDSFEAAVPSNSHIVSEPGKNVTLTCQPQMTWPVQAVRWEKIQPRQIDLLTYCNLVHGRNFTSKFPRQIVSNCSHGRWSVIVIPDVTVSDSGLYRCYLQASAGENETFVMRLTVAEGKTDNQYTLFVAGGTVLLLLFVISITTIIVIFLNRRRRRERRDLFTESWDTQFKKAPNNYRSPISTGQPTNQSMDDTREDIYVNYPTFSRRPKTRVRAKRSGSGATNFSLLKQAGDVEENPGPTSMDWIWRILFLVGAATGAHSFEQVQLQQPGAELVKPGASVKMSCKASGYAFSSYWINWMKQKPGQGLEWIGQIYPGDGDTNYNGKFKGRATLTADTSSSTAYMQLSSLTSEDSAVYFCARSITTVVGCAMDYWGQGTSVTVSSTRASTKGPSVFPLAPSSKSTSGGTAALGCLVKDYFPEPVTVSWNSGALTSGVHTFPAVLQSSGLYSLSSVVTVPSSSLGTQTYICNVNHKPSNTKVDKRVEPKSCGTEEVLWHTSVPFAENMSLECVYPSMGILTQVEWFKIGTQQDSIAIFSPTHGMVIRKPYAERVYFLNSTMASNNMTLFFRNASEDDVGYYSCSLYTYPQGTWQKVIQVVQSDSFEAAVPSNSHIVSEPGKNVTLTCQPQMTWPVQAVRWEKIQPRQIDLLTYCNLVHGRNFTSKFPRQIVSNCSHGRWSVIVIPDVTVSDSGLYRCYLQASAGENETFVMRLTVAEGKTDNQYTLFVAGGTVLLLLFVISITTIIVIFLNRRRRRERRDLFTESWDTQKAPNNYRSPISTGQPTNQSMDDTREDIYVNYPTFSRRPKTRVRAKRSGSGVKQTLNFDLLKLAGDVESNPGPSRGHMTEYKPTVRLATRDDVPRAVRTLAAAFADYPATRHTVDPDRHIERVTELQELFLTRVGLDIGKVWVADDGAAVAVWTTPESVEAGAVFAEIGPRMAELSGSRLAAQQQMEGLLAPHRPKEPAWFLATVGVSPDHQGKGLGSAVVLPGVEAAERAGVPAFLETSAPRNLPFYERLGFTVTADVEVPEGPRTWCMTRKPGA

SEQ ID NO: 4312 - protein, 1662 aa, Artificial Sequence
  Synthetic Polypeptide
MALPVTALLLPLALLLHAARPEVQLVESGGGLVQAGGSLRLSCAASGRTFSMGWFRQAPGKEREFVAAITYSGGSPYYADSVKGRFTISRDNAKNTVYLQMNSLKPEDTAVYYCAANPTYGSDWNAENWGQGTQVTVSSGTGGGGSGGGGSGGGGSEFDIQMTQSPSSLSASVGDRVTITCKASDHINNWLAWYQQKPGQAPKLLIYGATTLETGVPSRFSGSGSGTDYTLTISSLQPEDFATYYCQQSWNTPWTFGQGTKLEIKRLEGQPKANPTVTLFPPSSEELQANKATLVCLISDFYPGAVTVAWKADGSPVKAGVETTKPSKQSNNKYAASSYLSLTPEQWKSHRSYSCQVTHEGSTVEKTVAPTECSGSEEVLWHTSVPFAENMSLECVYPSMGILTQVEWFKIGTQQDSIAIFSPTHGMVIRKPYAERVYFLNSTMASNNMTLFFRNASEDDVGYYSCSLYTYPQGTWQKVIQVVQSDSFEAAVPSNSHIVSEPGKNVTLTCQPQMTWPVQAVRWEKIQPRQIDLLTYCNLVHGRNFTSKFPRQIVSNCSHGRWSVIVIPDVTVSDSGLYRCYLQASAGENETFVMRLTVAEGKTDNQYTLFVAGGTVLLLLFVISITTIIVIFLNRRRRRERRDLFTESWDTQFKKAPNNYRSPISTGQPTNQSMDDTREDIYVNYPTFSRRPKTRVRAKRSGSGATNFSLLKQAGDVEENPGPTSMDWIWRILFLVGAATGAHSGPEVQLVESGGGLVQAGGSLRLSCAASGRTFTMGWFRQAPGKEREFVAAISLSPTLAYYADSVKGRFTISRDNAKNTVVLQMNSLKPEDTALYYCAADRKSVMSIRPDYWGQGTQVTVSSGSGGGGSGGGGSGGGGSFEQVQLQQPGAELVKPGASVKMSCKASGYAFSSYWINWMKQKPGQGLEWIGQIYPGDGDTNYNGKFKGRATLTADTSSSTAYMQLSSLTSEDSAVYFCARSITTVVGCAMDYWGQGTSVTVSSTRASTKGPSVFPLAPSSKSTSGGTAALGCLVKDYFPEPVTVSWNSGALTSGVHTFPAVLQSSGLYSLSSVVTVPSSSLGTQTYICNVNHKPSNTKVDKRVEPKSCGTEEVLWHTSVPFAENMSLECVYPSMGILTQVEWFKIGTQQDSIAIFSPTHGMVIRKPYAERVYFLNSTMASNNMTLFFRNASEDDVGYYSCSLYTYPQGTWQKVIQVVQSDSFEAAVPSNSHIVSEPGKNVTLTCQPQMTWPVQAVRWEKIQPRQIDLLTYCNLVHGRNFTSKFPRQIVSNCSHGRWSVIVIPDVTVSDSGLYRCYLQASAGENETFVMRLTVAEGKTDNQYTLFVAGGTVLLLLFVISITTIIVIFLNRRRRRERRDLFTESWDTQKAPNNYRSPISTGQPTNQSMDDTREDIYVNYPTFSRRPKTRVRAKRSGSGVKQTLNFDLLKLAGDVESNPGPSRGHMTEYKPTVRLATRDDVPRAVRTLAAAFADYPATRHTVDPDRHIERVTELQELFLTRVGLDIGKVWVADDGAAVAVWTTPESVEAGAVFAEIGPRMAELSGSRLAAQQQMEGLLAPHRPKEPAWFLATVGVSPDHQGKGLGSAVVLPGVEAAERAGVPAFLETSAPRNLPFYERLGFTVTADVEVPEGPRTWCMTRKPGA

SEQ ID NO: 4313 - protein, 1395 aa, Artificial Sequence
  Synthetic Polypeptide
MALPVTALLLPLALLLHAARPEVQLVESGGGLVQAGGSLRLSCAASGRTFSMGWFRQAPGKEREFVAAITYSGGSPYYADSVKGRFTISRDNAKNTVYLQMNSLKPEDTAVYYCAANPTYGSDWNAENWGQGTQVTVSSLEGQPKANPTVTLFPPSSEELQANKATLVCLISDFYPGAVTVAWKADGSPVKAGVETTKPSKQSNNKYAASSYLSLTPEQWKSHRSYSCQVTHEGSTVEKTVAPTECSGSEEVLWHTSVPFAENMSLECVYPSMGILTQVEWFKIGTQQDSIAIFSPTHGMVIRKPYAERVYFLNSTMASNNMTLFFRNASEDDVGYYSCSLYTYPQGTWQKVIQVVQSDSFEAAVPSNSHIVSEPGKNVTLTCQPQMTWPVQAVRWEKIQPRQIDLLTYCNLVHGRNFTSKFPRQIVSNCSHGRWSVIVIPDVTVSDSGLYRCYLQASAGENETFVMRLTVAEGKTDNQYTLFVAGGTVLLLLFVISITTIIVIFLNRRRRRERRDLFTESWDTQFKKAPNNYRSPISTGQPTNQSMDDTREDIYVNYPTFSRRPKTRVRAKRSGSGATNFSLLKQAGDVEENPGPTSMDWIWRILFLVGAATGAHSGPEVQLVESGGGLVQAGGSLRLSCAASGRTFTMGWFRQAPGKEREFVAAISLSPTLAYYADSVKGRFTISRDNAKNTVVLQMNSLKPEDTALYYCAADRKSVMSIRPDYWGQGTQVTVSSTRASTKGPSVFPLAPSSKSTSGGTAALGCLVKDYFPEPVTVSWNSGALTSGVHTFPAVLQSSGLYSLSSVVTVPSSSLGTQTYICNVNHKPSNTKVDKRVEPKSCGTEEVLWHTSVPFAENMSLECVYPSMGILTQVEWFKIGTQQDSIAIFSPTHGMVIRKPYAERVYFLNSTMASNNMTLFFRNASEDDVGYYSCSLYTYPQGTWQKVIQVVQSDSFEAAVPSNSHIVSEPGKNVTLTCQPQMTWPVQAVRWEKIQPRQIDLLTYCNLVHGRNFTSKFPRQIVSNCSHGRWSVIVIPDVTVSDSGLYRCYLQASAGENETFVMRLTVAEGKTDNQYTLFVAGGTVLLLLFVISITTIIVIFLNRRRRRERRDLFTESWDTQKAPNNYRSPISTGQPTNQSMDDTREDIYVNYPTFSRRPKTRVRAKRSGSGVKQTLNFDLLKLAGDVESNPGPSRGHMTEYKPTVRLATRDDVPRAVRTLAAAFADYPATRHTVDPDRHIERVTELQELFLTRVGLDIGKVWVADDGAAVAVWTTPESVEAGAVFAEIGPRMAELSGSRLAAQQQMEGLLAPHRPKEPAWFLATVGVSPDHQGKGLGSAVVLPGVEAAERAGVPAFLETSAPRNLPFYERLGFTVTADVEVPEGPRTWCMTRKPGA

SEQ ID NO: 4314 - protein, 1403 aa, Artificial Sequence
  Synthetic Polypeptide
MALPVTALLLPLALLLHAARPDIQMTQSPSSLSASVGDRVTITCKASDHINNWLAWYQQKPGQAPKLLIYGATTLETGVPSRFSGSGSGTDYTLTISSLQPEDFATYYCQQSWNTPWTFGQGTKLEIKRLEDLKNVFPPEVAVFEPSEAEISHTQKATLVCLATGFYPDHVELSWWVNGKEVHSGVSTDPQPLKEQPALNDSRYCLSSRLRVSATFWQNPRNHFRCQVQFYGLSENDEWTQDRAKPVTQIVSAEAWGRADCGSEEVLWHTSVPFAENMSLECVYPSMGILTQVEWFKIGTQQDSIAIFSPTHGMVIRKPYAERVYFLNSTMASNNMTLFFRNASEDDVGYYSCSLYTYPQGTWQKVIQVVQSDSFEAAVPSNSHIVSEPGKNVTLTCQPQMTWPVQAVRWEKIQPRQIDLLTYCNLVHGRNFTSKFPRQIVSNCSHGRWSVIVIPDVTVSDSGLYRCYLQASAGENETFVMRLTVAEGKTDNQYTLFVAGGTVLLLLFVISITTIIVIFLNRRRRRERRDLFTESWDTQFKKAPNNYRSPISTGQPTNQSMDDTREDIYVNYPTFSRRPKTRVRAKRSGSGATNFSLLKQAGDVEENPGPTSMDWIWRILFLVGAATGAHSFEQVQLQQPGAELVKPGASVKMSCKASGYAFSSYWINWMKQKPGQGLEWIGQIYPGDGDTNYNGKFKGRATLTADTSSSTAYMQLSSLTSEDSAVYFCARSITTVVGCAMDYWGQGTSVTVSSTRIQNPDPAVYQLRDSKSSDKSVCLFTDFDSQTNVSQSKDSDVYITDKTVLDMRSMDFKSNSAVAWSNKSDFACANAFNNSIIPEDTFFPSPESSCGTEEVLWHTSVPFAENMSLECVYPSMGILTQVEWFKIGTQQDSIAIFSPTHGMVIRKPYAERVYFLNSTMASNNMTLFFRNASEDDVGYYSCSLYTYPQGTWQKVIQVVQSDSFEAAVPSNSHIVSEPGKNVTLTCQPQMTWPVQAVRWEKIQPRQIDLLTYCNLVHGRNFTSKFPRQIVSNCSHGRWSVIVIPDVTVSDSGLYRCYLQASAGENETFVMRLTVAEGKTDNQYTLFVAGGTVLLLLFVISITTIIVIFLNRRRRRERRDLFTESWDTQKAPNNYRSPISTGQPTNQSMDDTREDIYVNYPTFSRRPKTRVRAKRSGSGVKQTLNFDLLKLAGDVESNPGPSRGHMTEYKPTVRLATRDDVPRAVRTLAAAFADYPATRHTVDPDRHIERVTELQELFLTRVGLDIGKVWVADDGAAVAVWTTPESVEAGAVFAEIGPRMAELSGSRLAAQQQMEGLLAPHRPKEPAWFLATVGVSPDHQGKGLGSAVVLPGVEAAERAGVPAFLETSAPRNLPFYERLGFTVTADVEVPEGPRTWCMTRKPGA

SEQ ID NO: 4315 - protein, 1540 aa, Artificial Sequence
  Synthetic Polypeptide
MALPVTALLLPLALLLHAARPEVQLVESGGGLVQAGGSLRLSCAASGRTFSMGWFRQAPGKEREFVAAITYSGGSPYYADSVKGRFTISRDNAKNTVYLQMNSLKPEDTAVYYCAANPTYGSDWNAENWGQGTQVTVSSGTGGGGSGGGGSGGGGSEFDIQMTQSPSSLSASVGDRVTITCKASDHINNWLAWYQQKPGQAPKLLIYGATTLETGVPSRFSGSGSGTDYTLTISSLQPEDFATYYCQQSWNTPWTFGQGTKLEIKRLEDLKNVFPPEVAVFEPSEAEISHTQKATLVCLATGFYPDHVELSWWVNGKEVHSGVSTDPQPLKEQPALNDSRYCLSSRLRVSATFWQNPRNHFRCQVQFYGLSENDEWTQDRAKPVTQIVSAEAWGRADCGSEEVLWHTSVPFAENMSLECVYPSMGILTQVEWFKIGTQQDSIAIFSPTHGMVIRKPYAERVYFLNSTMASNNMTLFFRNASEDDVGYYSCSLYTYPQGTWQKVIQVVQSDSFEAAVPSNSHIVSEPGKNVTLTCQPQMTWPVQAVRWEKIQPRQIDLLTYCNLVHGRNFTSKFPRQIVSNCSHGRWSVIVIPDVTVSDSGLYRCYLQASAGENETFVMRLTVAEGKTDNQYTLFVAGGTVLLLLFVISITTIIVIFLNRRRRRERRDLFTESWDTQFKKAPNNYRSPISTGQPTNQSMDDTREDIYVNYPTFSRRPKTRVRAKRSGSGATNFSLLKQAGDVEENPGPTSMDWIWRILFLVGAATGAHSFEQVQLQQPGAELVKPGASVKMSCKASGYAFSSYWINWMKQKPGQGLEWIGQIYPGDGDTNYNGKFKGRATLTADTSSSTAYMQLSSLTSEDSAVYFCARSITTVVGCAMDYWGQGTSVTVSSTRIQNPDPAVYQLRDSKSSDKSVCLFTDFDSQTNVSQSKDSDVYITDKTVLDMRSMDFKSNSAVAWSNKSDFACANAFNNSIIPEDTFFPSPESSCGTEEVLWHTSVPFAENMSLECVYPSMGILTQVEWFKIGTQQDSIAIFSPTHGMVIRKPYAERVYFLNSTMASNNMTLFFRNASEDDVGYYSCSLYTYPQGTWQKVIQVVQSDSFEAAVPSNSHIVSEPGKNVTLTCQPQMTWPVQAVRWEKIQPRQIDLLTYCNLVHGRNFTSKFPRQIVSNCSHGRWSVIVIPDVTVSDSGLYRCYLQASAGENETFVMRLTVAEGKTDNQYTLFVAGGTVLLLLFVISITTIIVIFLNRRRRRERRDLFTESWDTQKAPNNYRSPISTGQPTNQSMDDTREDIYVNYPTFSRRPKTRVRAKRSGSGVKQTLNFDLLKLAGDVESNPGPSRGHMTEYKPTVRLATRDDVPRAVRTLAAAFADYPATRHTVDPDRHIERVTELQELFLTRVGLDIGKVWVADDGAAVAVWTTPESVEAGAVFAEIGPRMAELSGSRLAAQQQMEGLLAPHRPKEPAWFLATVGVSPDHQGKGLGSAVVLPGVEAAERAGVPAFLETSAPRNLPFYERLGFTVTADVEVPEGPRTWCMTRKPGA

SEQ ID NO: 4316 - protein, 1677 aa, Artificial Sequence
  Synthetic Polypeptide
MALPVTALLLPLALLLHAARPEVQLVESGGGLVQAGGSLRLSCAASGRTFSMGWFRQAPGKEREFVAAITYSGGSPYYADSVKGRFTISRDNAKNTVYLQMNSLKPEDTAVYYCAANPTYGSDWNAENWGQGTQVTVSSGTGGGGSGGGGSGGGGSEFDIQMTQSPSSLSASVGDRVTITCKASDHINNWLAWYQQKPGQAPKLLIYGATTLETGVPSRFSGSGSGTDYTLTISSLQPEDFATYYCQQSWNTPWTFGQGTKLEIKRLEDLKNVFPPEVAVFEPSEAEISHTQKATLVCLATGFYPDHVELSWWVNGKEVHSGVSTDPQPLKEQPALNDSRYCLSSRLRVSATFWQNPRNHFRCQVQFYGLSENDEWTQDRAKPVTQIVSAEAWGRADCGSEEVLWHTSVPFAENMSLECVYPSMGILTQVEWFKIGTQQDSIAIFSPTHGMVIRKPYAERVYFLNSTMASNNMTLFFRNASEDDVGYYSCSLYTYPQGTWQKVIQVVQSDSFEAAVPSNSHIVSEPGKNVTLTCQPQMTWPVQAVRWEKIQPRQIDLLTYCNLVHGRNFTSKFPRQIVSNCSHGRWSVIVIPDVTVSDSGLYRCYLQASAGENETFVMRLTVAEGKTDNQYTLFVAGGTVLLLLFVISITTIIVIFLNRRRRRERRDLFTESWDTQFKKAPNNYRSPISTGQPTNQSMDDTREDIYVNYPTFSRRPKTRVRAKRSGSGATNFSLLKQAGDVEENPGPTSMDWIWRILFLVGAATGAHSGPEVQLVESGGGLVQAGGSLRLSCAASGRTFTMGWFRQAPGKEREFVAAISLSPTLAYYADSVKGRFTISRDNAKNTVVLQMNSLKPEDTALYYCAADRKSVMSIRPDYWGQGTQVTVSSGSGGGGSGGGGSGGGGSFEQVQLQQPGAELVKPGASVKMSCKASGYAFSSYWINWMKQKPGQGLEWIGQIYPGDGDTNYNGKFKGRATLTADTSSSTAYMQLSSLTSEDSAVYFCARSITTVVGCAMDYWGQGTSVTVSSTRIQNPDPAVYQLRDSKSSDKSVCLFTDFDSQTNVSQSKDSDVYITDKTVLDMRSMDFKSNSAVAWSNKSDFACANAFNNSIIPEDTFFPSPESSCGTEEVLWHTSVPFAENMSLECVYPSMGILTQVEWFKIGTQQDSIAIFSPTHGMVIRKPYAERVYFLNSTMASNNMTLFFRNASEDDVGYYSCSLYTYPQGTWQKVIQVVQSDSFEAAVPSNSHIVSEPGKNVTLTCQPQMTWPVQAVRWEKIQPRQIDLLTYCNLVHGRNFTSKFPRQIVSNCSHGRWSVIVIPDVTVSDSGLYRCYLQASAGENETFVMRLTVAEGKTDNQYTLFVAGGTVLLLLFVISITTIIVIFLNRRRRRERRDLFTESWDTQKAPNNYRSPISTGQPTNQSMDDTREDIYVNYPTFSRRPKTRVRAKRSGSGVKQTLNFDLLKLAGDVESNPGPSRGHMTEYKPTVRLATRDDVPRAVRTLAAAFADYPATRHTVDPDRHIERVTELQELFLTRVGLDIGKVWVADDGAAVAVWTTPESVEAGAVFAEIGPRMAELSGSRLAAQQQMEGLLAPHRPKEPAWFLATVGVSPDHQGKGLGSAVVLPGVEAAERAGVPAFLETSAPRNLPFYERLGFTVTADVEVPEGPRTWCMTRKPGA

SEQ ID NO: 4317 - protein, 1410 aa, Artificial Sequence
  Synthetic Polypeptide
MALPVTALLLPLALLLHAARPEVQLVESGGGLVQAGGSLRLSCAASGRTFSMGWFRQAPGKEREFVAAITYSGGSPYYADSVKGRFTISRDNAKNTVYLQMNSLKPEDTAVYYCAANPTYGSDWNAENWGQGTQVTVSSLEDLKNVFPPEVAVFEPSEAEISHTQKATLVCLATGFYPDHVELSWWVNGKEVHSGVSTDPQPLKEQPALNDSRYCLSSRLRVSATFWQNPRNHFRCQVQFYGLSENDEWTQDRAKPVTQIVSAEAWGRADCGSEEVLWHTSVPFAENMSLECVYPSMGILTQVEWFKIGTQQDSIAIFSPTHGMVIRKPYAERVYFLNSTMASNNMTLFFRNASEDDVGYYSCSLYTYPQGTWQKVIQVVQSDSFEAAVPSNSHIVSEPGKNVTLTCQPQMTWPVQAVRWEKIQPRQIDLLTYCNLVHGRNFTSKFPRQIVSNCSHGRWSVIVIPDVTVSDSGLYRCYLQASAGENETFVMRLTVAEGKTDNQYTLFVAGGTVLLLLFVISITTIIVIFLNRRRRRERRDLFTESWDTQFKKAPNNYRSPISTGQPTNQSMDDTREDIYVNYPTFSRRPKTRVRAKRSGSGATNFSLLKQAGDVEENPGPTSMDWIWRILFLVGAATGAHSGPEVQLVESGGGLVQAGGSLRLSCAASGRTFTMGWFRQAPGKEREFVAAISLSPTLAYYADSVKGRFTISRDNAKNTVVLQMNSLKPEDTALYYCAADRKSVMSIRPDYWGQGTQVTVSSTRIQNPDPAVYQLRDSKSSDKSVCLFTDFDSQTNVSQSKDSDVYITDKTVLDMRSMDFKSNSAVAWSNKSDFACANAFNNSIIPEDTFFPSPESSCGTEEVLWHTSVPFAENMSLECVYPSMGILTQVEWFKIGTQQDSIAIFSPTHGMVIRKPYAERVYFLNSTMASNNMTLFFRNASEDDVGYYSCSLYTYPQGTWQKVIQVVQSDSFEAAVPSNSHIVSEPGKNVTLTCQPQMTWPVQAVRWEKIQPRQIDLLTYCNLVHGRNFTSKFPRQIVSNCSHGRWSVIVIPDVTVSDSGLYRCYLQASAGENETFVMRLTVAEGKTDNQYTLFVAGGTVLLLLFVISITTIIVIFLNRRRRRERRDLFTESWDTQKAPNNYRSPISTGQPTNQSMDDTREDIYVNYPTFSRRPKTRVRAKRSGSGVKQTLNFDLLKLAGDVESNPGPSRGHMTEYKPTVRLATRDDVPRAVRTLAAAFADYPATRHTVDPDRHIERVTELQELFLTRVGLDIGKVWVADDGAAVAVWTTPESVEAGAVFAEIGPRMAELSGSRLAAQQQMEGLLAPHRPKEPAWFLATVGVSPDHQGKGLGSAVVLPGVEAAERAGVPAFLETSAPRNLPFYERLGFTVTADVEVPEGPRTWCMTRKPGA

SEQ ID NO: 4318 - protein, 715 aa, Artificial Sequence
  Synthetic Polypeptide
MALPVTALLLPLALLLHAARPACEVQLLESGGGLIQPGGSLRLSCAASGFTFSSHAMTWVRQAPGKGLEWVSAISGSGDYTHYADSVKGRFTISRDNSKNTVYLQMNSLRAEDSAVYYCAKDEDGGSLLGHRGQGTLVTVSSGTGGGGSGGGGSGGGGSEFGSLEEEVLWHTSVPFAENMSLECVYPSMGILTQVEWFKIGTQQDSIAIFSPTHGMVIRKPYAERVYFLNSTMASNNMTLFFRNASEDDVGYYSCSLYTYPQGTWQKVIQVVQSDSFEAAVPSNSHIVSEPGKNVTLTCQPQMTWPVQAVRWEKIQPRQIDLLTYCNLVHGRNFTSKFPRQIVSNCSHGRWSVIVIPDVTVSDSGLYRCYLQASAGENETFVMRLTVAEGKTDNQYTLFVAGGTVLLLLFVISITTIIVIFLNRRRRRERRDLFTESWDTQFKKAPNNYRSPISTGQPTNQSMDDTREDIYVNYPTFSRRPKTRVRAKRSGSGATNFSLLKQAGDVEENPGPTRGHMTEYKPTVRLATRDDVPRAVRTLAAAFADYPATRHTVDPDRHIERVTELQELFLTRVGLDIGKVWVADDGAAVAVWTTPESVEAGAVFAEIGPRMAELSGSRLAAQQQMEGLLAPHRPKEPAWFLATVGVSPDHQGKGLGSAVVLPGVEAAERAGVPAFLETSAPRNLPFYERLGFTVTADVEVPEGPRTWCMTRKPGA

SEQ ID NO: 4319 - protein, 772 aa, Artificial Sequence
  Synthetic Polypeptide
MALPVTALLLPLALLLHAARPDIQMTQSPSSLSASVGDRVTITCKASDHINNWLAWYQQKPGQAPKLLIYGATTLETGVPSRFSGSGSGTDYTLTISSLQPEDFATYYCQQSWNTPWTFGQGTKLEIKRLEIGWLLLQAPRWVFKEEDPIHLRCHSWKNTALHKVTYLQNGKGRKYFHHNSDFYIPKATLKDSGSYFCRGLVGSKNVSSETVNITITQGLAVSTISSFFPPGYQVSFCLVMVLLFAVDTGLYFSVKTNIRSSTRDWKDHKFKWRKDPQDKRAKRSGSGATNFSLLKQAGDVEENPGPTSMDWIWRILFLVGAATGAHSFEQVQLQQPGAELVKPGASVKMSCKASGYAFSSYWINWMKQKPGQGLEWIGQIYPGDGDTNYNGKFKGRATLTADTSSSTAYMQLSSLTSEDSAVYFCARSITTVVGCAMDYWGQGTSVTVSSTRQAQSDCSCSTVSPGVLAGIVMGDLVLTVLIALAVYFLGRLVPRGRGAAEAATRKQRITETESPYQELQGQRSDVYSDLNTQRPYYKRAKRSGSGVKQTLNFDLLKLAGDVESNPGPSRGHMTEYKPTVRLATRDDVPRAVRTLAAAFADYPATRHTVDPDRHIERVTELQELFLTRVGLDIGKVWVADDGAAVAVWTTPESVEAGAVFAEIGPRMAELSGSRLAAQQQMEGLLAPHRPKEPAWFLATVGVSPDHQGKGLGSAVVLPGVEAAERAGVPAFLETSAPRNLPFYERLGFTVTADVEVPEGPRTWCMTRKPGA

SEQ ID NO: 4320 - protein, 826 aa, Artificial Sequence
  Synthetic Polypeptide
MALPVTALLLPLALLLHAARPACEVQLLESGGGLIQPGGSLRLSCAASGFTFSSHAMTWVRQAPGKGLEWVSAISGSGDYTHYADSVKGRFTISRDNSKNTVYLQMNSLRAEDSAVYYCAKDEDGGSLLGHRGQGTLVTVSSGTGGGGSGGGGSGGGGSEFGSLEIGWLLLQAPRWVFKEEDPIHLRCHSWKNTALHKVTYLQNGKGRKYFHHNSDFYIPKATLKDSGSYFCRGLVGSKNVSSETVNITITQGLAVSTISSFFPPGYQVSFCLVMVLLFAVDTGLYFSVKTNIRSSTRDWKDHKFKWRKDPQDKRAKRSGSGATNFSLLKQAGDVEENPGPTSATMDWIWRILFLVGAATGAHSGPEVQLVESGGGLVQAGGSLRLSCAASGRTFSMGWFRQAPGKEREFVAAITYSGGSPYYADSVKGRFTISRDNAKNTVYLQMNSLKPEDTAVYYCAANPTYGSDWNAENWGQGTQVTVSSGSGGGGSGGGGSGGGGSFEGSTRQAQSDCSCSTVSPGVLAGIVMGDLVLTVLIALAVYFLGRLVPRGRGAAEAATRKQRITETESPYQELQGQRSDVYSDLNTQRPYYKRAKRSGSGVKQTLNFDLLKLAGDVESNPGPSRGHMTEYKPTVRLATRDDVPRAVRTLAAAFADYPATRHTVDPDRHIERVTELQELFLTRVGLDIGKVWVADDGAAVAVWTTPESVEAGAVFAEIGPRMAELSGSRLAAQQQMEGLLAPHRPKEPAWFLATVGVSPDHQGKGLGSAVVLPGVEAAERAGVPAFLETSAPRNLPFYERLGFTVTADVEVPEGPRTWCMTRKPGA

SEQ ID NO: 4321 - protein, 977 aa, Artificial Sequence
  Synthetic Polypeptide
MALPVTALLLPLALLLHAARPDIQMTQSPSSLSASVGDRVTITCKASDHINNWLAWYQQKPGQAPKLLIYGATTLETGVPSRFSGSGSGTDYTLTISSLQPEDFATYYCQQSWNTPWTFGQGTKLEIKRLEGQPKANPTVTLFPPSSEELQANKATLVCLISDFYPGAVTVAWKADGSPVKAGVETTKPSKQSNNKYAASSYLSLTPEQWKSHRSYSCQVTHEGSTVEKTVAPTECSGSIGWLLLQAPRWVFKEEDPIHLRCHSWKNTALHKVTYLQNGKGRKYFHHNSDFYIPKATLKDSGSYFCRGLVGSKNVSSETVNITITQGLAVSTISSFFPPGYQVSFCLVMVLLFAVDTGLYFSVKTNIRSSTRDWKDHKFKWRKDPQDKRAKRSGSGATNFSLLKQAGDVEENPGPTSMDWIWRILFLVGAATGAHSFEQVQLQQPGAELVKPGASVKMSCKASGYAFSSYWINWMKQKPGQGLEWIGQIYPGDGDTNYNGKFKGRATLTADTSSSTAYMQLSSLTSEDSAVYFCARSITTVVGCAMDYWGQGTSVTVSSTRASTKGPSVFPLAPSSKSTSGGTAALGCLVKDYFPEPVTVSWNSGALTSGVHTFPAVLQSSGLYSLSSVVTVPSSSLGTQTYICNVNHKPSNTKVDKRVEPKSCGTQAQSDCSCSTVSPGVLAGIVMGDLVLTVLIALAVYFLGRLVPRGRGAAEAATRKQRITETESPYQELQGQRSDVYSDLNTQRPYYKRAKRSGSGVKQTLNFDLLKLAGDVESNPGPSRGGIHTMATYEVLCEVARKLGTDDREVVLFLLNVFIPQPTLAQLIGALRALKEEGRLTFPLLAECLFRAGRRDLLRDLLHLDPRFLERHLAGTMSYFSPYQLTVLHVDGELCARDIRSLIFLSKDTIGSRSTPQTFLHWVYCMENLDLLGPTDVDALMSMLRSLSRVDLQRQVQTLMGLHLSGPSHSQHYRHTP

SEQ ID NO: 4322 - protein, 1030 aa, Artificial Sequence
  Synthetic Polypeptide
MALPVTALLLPLALLLHAARPDIQMTQSPSSLSASVGDRVTITCKASDHINNWLAWYQQKPGQAPKLLIYGATTLETGVPSRFSGSGSGTDYTLTISSLQPEDFATYYCQQSWNTPWTFGQGTKLEIKRLEGQPKANPTVTLFPPSSEELQANKATLVCLISDFYPGAVTVAWKADGSPVKAGVETTKPSKQSNNKYAASSYLSLTPEQWKSHRSYSCQVTHEGSTVEKTVAPTECSGSIGWLLLQAPRWVFKEEDPIHLRCHSWKNTALHKVTYLQNGKGRKYFHHNSDFYIPKATLKDSGSYFCRGLVGSKNVSSETVNITITQGLAVSTISSFFPPGYQVSFCLVMVLLFAVDTGLYFSVKTNIRSSTRDWKDHKFKWRKDPQDKRAKRSGSGATNFSLLKQAGDVEENPGPTSMDWIWRILFLVGAATGAHSFEQVQLQQPGAELVKPGASVKMSCKASGYAFSSYWINWMKQKPGQGLEWIGQIYPGDGDTNYNGKFKGRATLTADTSSSTAYMQLSSLTSEDSAVYFCARSITTVVGCAMDYWGQGTSVTVSSTRASTKGPSVFPLAPSSKSTSGGTAALGCLVKDYFPEPVTVSWNSGALTSGVHTFPAVLQSSGLYSLSSVVTVPSSSLGTQTYICNVNHKPSNTKVDKRVEPKSCGTQAQSDCSCSTVSPGVLAGIVMGDLVLTVLIALAVYFLGRLVPRGRGAAEAATRKQRITETESPYQELQGQRSDVYSDLNTQRPYYKRAKRSGSGVKQTLNFDLLKLAGDVESNPGPSRGGIHTMSDSKEVPSLPFLRHLLEELDSHEDSLLLFLCHDAAPGCTTVTQALCSLSQQRKLTLAALVEMLYVLQRMDLLKSRFGLSKEGAEQLLGTSFLTRYRKLMVCVGEELDSSELRALRLFACNLNPSLSTALSESSRFVELVLALENVGLVSPSSVSVLADMLRTLRRLDLCQQLVEYEQQEQARYRYCYAASPSLPVRTLRRGHGASEHEQLCMPVQESSDSPELLRTPVQESSSDSPEQTT

SEQ ID NO: 4323 - protein, 985 aa, Artificial Sequence
  Synthetic Polypeptide
MALPVTALLLPLALLLHAARPDIQMTQSPSSLSASVGDRVTITCKASDHINNWLAWYQQKPGQAPKLLIYGATTLETGVPSRFSGSGSGTDYTLTISSLQPEDFATYYCQQSWNTPWTFGQGTKLEIKRLEGQPKANPTVTLFPPSSEELQANKATLVCLISDFYPGAVTVAWKADGSPVKAGVETTKPSKQSNNKYAASSYLSLTPEQWKSHRSYSCQVTHEGSTVEKTVAPTECSGSIGWLLLQAPRWVFKEEDPIHLRCHSWKNTALHKVTYLQNGKGRKYFHHNSDFYIPKATLKDSGSYFCRGLVGSKNVSSETVNITITQGLAVSTISSFFPPGYQVSFCLVMVLLFAVDTGLYFSVKTNIRSSTRDWKDHKFKWRKDPQDKRAKRSGSGATNFSLLKQAGDVEENPGPTSMDWIWRILFLVGAATGAHSFEQVQLQQPGAELVKPGASVKMSCKASGYAFSSYWINWMKQKPGQGLEWIGQIYPGDGDTNYNGKFKGRATLTADTSSSTAYMQLSSLTSEDSAVYFCARSITTVVGCAMDYWGQGTSVTVSSTRASTKGPSVFPLAPSSKSTSGGTAALGCLVKDYFPEPVTVSWNSGALTSGVHTFPAVLQSSGLYSLSSVVTVPSSSLGTQTYICNVNHKPSNTKVDKRVEPKSCGTQAQSDCSCSTVSPGVLAGIVMGDLVLTVLIALAVYFLGRLVPRGRGAAEAATRKQRITETESPYQELQGQRSDVYSDLNTQRPYYKRAKRSGSGVKQTLNFDLLKLAGDVESNPGPSRGHMTEYKPTVRLATRDDVPRAVRTLAAAFADYPATRHTVDPDRHIERVTELQELFLTRVGLDIGKVWVADDGAAVAVWTTPESVEAGAVFAEIGPRMAELSGSRLAAQQQMEGLLAPHRPKEPAWFLATVGVSPDHQGKGLGSAVVLPGVEAAERAGVPAFLETSAPRNLPFYERLGFTVTADVEVPEGPRTWCMTRKPGA

SEQ ID NO: 4324 - protein, 1122 aa, Artificial Sequence
  Synthetic Polypeptide
MALPVTALLLPLALLLHAARPEVQLVESGGGLVQAGGSLRLSCAASGRTFSMGWFRQAPGKEREFVAAITYSGGSPYYADSVKGRFTISRDNAKNTVYLQMNSLKPEDTAVYYCAANPTYGSDWNAENWGQGTQVTVSSGTGGGGSGGGGSGGGGSEFDIQMTQSPSSLSASVGDRVTITCKASDHINNWLAWYQQKPGQAPKLLIYGATTLETGVPSRFSGSGSGTDYTLTISSLQPEDFATYYCQQSWNTPWTFGQGTKLEIKRLEGQPKANPTVTLFPPSSEELQANKATLVCLISDFYPGAVTVAWKADGSPVKAGVETTKPSKQSNNKYAASSYLSLTPEQWKSHRSYSCQVTHEGSTVEKTVAPTECSGSIGWLLLQAPRWVFKEEDPIHLRCHSWKNTALHKVTYLQNGKGRKYFHHNSDFYIPKATLKDSGSYFCRGLVGSKNVSSETVNITITQGLAVSTISSFFPPGYQVSFCLVMVLLFAVDTGLYFSVKTNIRSSTRDWKDHKFKWRKDPQDKRAKRSGSGATNFSLLKQAGDVEENPGPTSMDWIWRILFLVGAATGAHSFEQVQLQQPGAELVKPGASVKMSCKASGYAFSSYWINWMKQKPGQGLEWIGQIYPGDGDTNYNGKFKGRATLTADTSSSTAYMQLSSLTSEDSAVYFCARSITTVVGCAMDYWGQGTSVTVSSTRASTKGPSVFPLAPSSKSTSGGTAALGCLVKDYFPEPVTVSWNSGALTSGVHTFPAVLQSSGLYSLSSVVTVPSSSLGTQTYICNVNHKPSNTKVDKRVEPKSCGTQAQSDCSCSTVSPGVLAGIVMGDLVLTVLIALAVYFLGRLVPRGRGAAEAATRKQRITETESPYQELQGQRSDVYSDLNTQRPYYKRAKRSGSGVKQTLNFDLLKLAGDVESNPGPSRGHMTEYKPTVRLATRDDVPRAVRTLAAAFADYPATRHTVDPDRHIERVTELQELFLTRVGLDIGKVWVADDGAAVAVWTTPESVEAGAVFAEIGPRMAELSGSRLAAQQQMEGLLAPHRPKEPAWFLATVGVSPDHQGKGLGSAVVLPGVEAAERAGVPAFLETSAPRNLPFYERLGFTVTADVEVPEGPRTWCMTRKPGA

SEQ ID NO: 4325 - protein, 1259 aa, Artificial Sequence
  Synthetic Polypeptide
MALPVTALLLPLALLLHAARPEVQLVESGGGLVQAGGSLRLSCAASGRTFSMGWFRQAPGKEREFVAAITYSGGSPYYADSVKGRFTISRDNAKNTVYLQMNSLKPEDTAVYYCAANPTYGSDWNAENWGQGTQVTVSSGTGGGGSGGGGSGGGGSEFDIQMTQSPSSLSASVGDRVTITCKASDHINNWLAWYQQKPGQAPKLLIYGATTLETGVPSRFSGSGSGTDYTLTISSLQPEDFATYYCQQSWNTPWTFGQGTKLEIKRLEGQPKANPTVTLFPPSSEELQANKATLVCLISDFYPGAVTVAWKADGSPVKAGVETTKPSKQSNNKYAASSYLSLTPEQWKSHRSYSCQVTHEGSTVEKTVAPTECSGSIGWLLLQAPRWVFKEEDPIHLRCHSWKNTALHKVTYLQNGKGRKYFHHNSDFYIPKATLKDSGSYFCRGLVGSKNVSSETVNITITQGLAVSTISSFFPPGYQVSFCLVMVLLFAVDTGLYFSVKTNIRSSTRDWKDHKFKWRKDPQDKRAKRSGSGATNFSLLKQAGDVEENPGPTSMDWIWRILFLVGAATGAHSGPEVQLVESGGGLVQAGGSLRLSCAASGRTFTMGWFRQAPGKEREFVAAISLSPTLAYYADSVKGRFTISRDNAKNTVVLQMNSLKPEDTALYYCAADRKSVMSIRPDYWGQGTQVTVSSGSGGGGSGGGGSGGGGSFEQVQLQQPGAELVKPGASVKMSCKASGYAFSSYWINWMKQKPGQGLEWIGQIYPGDGDTNYNGKFKGRATLTADTSSSTAYMQLSSLTSEDSAVYFCARSITTVVGCAMDYWGQGTSVTVSSTRASTKGPSVFPLAPSSKSTSGGTAALGCLVKDYFPEPVTVSWNSGALTSGVHTFPAVLQSSGLYSLSSVVTVPSSSLGTQTYICNVNHKPSNTKVDKRVEPKSCGTQAQSDCSCSTVSPGVLAGIVMGDLVLTVLIALAVYFLGRLVPRGRGAAEAATRKQRITETESPYQELQGQRSDVYSDLNTQRPYYKRAKRSGSGVKQTLNFDLLKLAGDVESNPGPSRGHMTEYKPTVRLATRDDVPRAVRTLAAAFADYPATRHTVDPDRHIERVTELQELFLTRVGLDIGKVWVADDGAAVAVWTTPESVEAGAVFAEIGPRMAELSGSRLAAQQQMEGLLAPHRPKEPAWFLATVGVSPDHQGKGLGSAVVLPGVEAAERAGVPAFLETSAPRNLPFYERLGFTVTADVEVPEGPRTWCMTRKPGA

SEQ ID NO: 4326 - protein, 992 aa, Artificial Sequence
  Synthetic Polypeptide
MALPVTALLLPLALLLHAARPEVQLVESGGGLVQAGGSLRLSCAASGRTFSMGWFRQAPGKEREFVAAITYSGGSPYYADSVKGRFTISRDNAKNTVYLQMNSLKPEDTAVYYCAANPTYGSDWNAENWGQGTQVTVSSLEGQPKANPTVTLFPPSSEELQANKATLVCLISDFYPGAVTVAWKADGSPVKAGVETTKPSKQSNNKYAASSYLSLTPEQWKSHRSYSCQVTHEGSTVEKTVAPTECSGSIGWLLLQAPRWVFKEEDPIHLRCHSWKNTALHKVTYLQNGKGRKYFHHNSDFYIPKATLKDSGSYFCRGLVGSKNVSSETVNITITQGLAVSTISSFFPPGYQVSFCLVMVLLFAVDTGLYFSVKTNIRSSTRDWKDHKFKWRKDPQDKRAKRSGSGATNFSLLKQAGDVEENPGPTSMDWIWRILFLVGAATGAHSGPEVQLVESGGGLVQAGGSLRLSCAASGRTFTMGWFRQAPGKEREFVAAISLSPTLAYYADSVKGRFTISRDNAKNTVVLQMNSLKPEDTALYYCAADRKSVMSIRPDYWGQGTQVTVSSTRASTKGPSVFPLAPSSKSTSGGTAALGCLVKDYFPEPVTVSWNSGALTSGVHTFPAVLQSSGLYSLSSVVTVPSSSLGTQTYICNVNHKPSNTKVDKRVEPKSCGTQAQSDCSCSTVSPGVLAGIVMGDLVLTVLIALAVYFLGRLVPRGRGAAEAATRKQRITETESPYQELQGQRSDVYSDLNTQRPYYKRAKRSGSGVKQTLNFDLLKLAGDVESNPGPSRGHMTEYKPTVRLATRDDVPRAVRTLAAAFADYPATRHTVDPDRHIERVTELQELFLTRVGLDIGKVWVADDGAAVAVWTTPESVEAGAVFAEIGPRMAELSGSRLAAQQQMEGLLAPHRPKEPAWFLATVGVSPDHQGKGLGSAVVLPGVEAAERAGVPAFLETSAPRNLPFYERLGFTVTADVEVPEGPRTWCMTRKPGA

SEQ ID NO: 4327 - protein, 1000 aa, Artificial Sequence
  Synthetic Polypeptide
MALPVTALLLPLALLLHAARPDIQMTQSPSSLSASVGDRVTITCKASDHINNWLAWYQQKPGQAPKLLIYGATTLETGVPSRFSGSGSGTDYTLTISSLQPEDFATYYCQQSWNTPWTFGQGTKLEIKRLEDLKNVFPPEVAVFEPSEAEISHTQKATLVCLATGFYPDHVELSWWVNGKEVHSGVSTDPQPLKEQPALNDSRYCLSSRLRVSATFWQNPRNHFRCQVQFYGLSENDEWTQDRAKPVTQIVSAEAWGRADCGSIGWLLLQAPRWVFKEEDPIHLRCHSWKNTALHKVTYLQNGKGRKYFHHNSDFYIPKATLKDSGSYFCRGLVGSKNVSSETVNITITQGLAVSTISSFFPPGYQVSFCLVMVLLFAVDTGLYFSVKTNIRSSTRDWKDHKFKWRKDPQDKRAKRSGSGATNFSLLKQAGDVEENPGPTSMDWIWRILFLVGAATGAHSFEQVQLQQPGAELVKPGASVKMSCKASGYAFSSYWINWMKQKPGQGLEWIGQIYPGDGDTNYNGKFKGRATLTADTSSSTAYMQLSSLTSEDSAVYFCARSITTVVGCAMDYWGQGTSVTVSSTRIQNPDPAVYQLRDSKSSDKSVCLFTDFDSQTNVSQSKDSDVYITDKTVLDMRSMDFKSNSAVAWSNKSDFACANAFNNSIIPEDTFFPSPESSCGTQAQSDCSCSTVSPGVLAGIVMGDLVLTVLIALAVYFLGRLVPRGRGAAEAATRKQRITETESPYQELQGQRSDVYSDLNTQRPYYKRAKRSGSGVKQTLNFDLLKLAGDVESNPGPSRGHMTEYKPTVRLATRDDVPRAVRTLAAAFADYPATRHTVDPDRHIERVTELQELFLTRVGLDIGKVWVADDGAAVAVWTTPESVEAGAVFAEIGPRMAELSGSRLAAQQQMEGLLAPHRPKEPAWFLATVGVSPDHQGKGLGSAVVLPGVEAAERAGVPAFLETSAPRNLPFYERLGFTVTADVEVPEGPRTWCMTRKPGA

SEQ ID NO: 4328 - protein, 1137 aa, Artificial Sequence
  Synthetic Polypeptide
MALPVTALLLPLALLLHAARPEVQLVESGGGLVQAGGSLRLSCAASGRTFSMGWFRQAPGKEREFVAAITYSGGSPYYADSVKGRFTISRDNAKNTVYLQMNSLKPEDTAVYYCAANPTYGSDWNAENWGQGTQVTVSSGTGGGGSGGGGSGGGGSEFDIQMTQSPSSLSASVGDRVTITCKASDHINNWLAWYQQKPGQAPKLLIYGATTLETGVPSRFSGSGSGTDYTLTISSLQPEDFATYYCQQSWNTPWTFGQGTKLEIKRLEDLKNVFPPEVAVFEPSEAEISHTQKATLVCLATGFYPDHVELSWWVNGKEVHSGVSTDPQPLKEQPALNDSRYCLSSRLRVSATFWQNPRNHFRCQVQFYGLSENDEWTQDRAKPVTQIVSAEAWGRADCGSIGWLLLQAPRWVFKEEDPIHLRCHSWKNTALHKVTYLQNGKGRKYFHHNSDFYIPKATLKDSGSYFCRGLVGSKNVSSETVNITITQGLAVSTISSFFPPGYQVSFCLVMVLLFAVDTGLYFSVKTNIRSSTRDWKDHKFKWRKDPQDKRAKRSGSGATNFSLLKQAGDVEENPGPTSMDWIWRILFLVGAATGAHSFEQVQLQQPGAELVKPGASVKMSCKASGYAFSSYWINWMKQKPGQGLEWIGQIYPGDGDTNYNGKFKGRATLTADTSSSTAYMQLSSLTSEDSAVYFCARSITTVVGCAMDYWGQGTSVTVSSTRIQNPDPAVYQLRDSKSSDKSVCLFTDFDSQTNVSQSKDSDVYITDKTVLDMRSMDFKSNSAVAWSNKSDFACANAFNNSIIPEDTFFPSPESSCGTQAQSDCSCSTVSPGVLAGIVMGDLVLTVLIALAVYFLGRLVPRGRGAAEAATRKQRITETESPYQELQGQRSDVYSDLNTQRPYYKRAKRSGSGVKQTLNFDLLKLAGDVESNPGPSRGHMTEYKPTVRLATRDDVPRAVRTLAAAFADYPATRHTVDPDRHIERVTELQELFLTRVGLDIGKVWVADDGAAVAVWTTPESVEAGAVFAEIGPRMAELSGSRLAAQQQMEGLLAPHRPKEPAWFLATVGVSPDHQGKGLGSAVVLPGVEAAERAGVPAFLETSAPRNLPFYERLGFTVTADVEVPEGPRTWCMTRKPGA

SEQ ID NO: 4329 - protein, 1274 aa, Artificial Sequence
  Synthetic Polypeptide
MALPVTALLLPLALLLHAARPEVQLVESGGGLVQAGGSLRLSCAASGRTFSMGWFRQAPGKEREFVAAITYSGGSPYYADSVKGRFTISRDNAKNTVYLQMNSLKPEDTAVYYCAANPTYGSDWNAENWGQGTQVTVSSGTGGGGSGGGGSGGGGSEFDIQMTQSPSSLSASVGDRVTITCKASDHINNWLAWYQQKPGQAPKLLIYGATTLETGVPSRFSGSGSGTDYTLTISSLQPEDFATYYCQQSWNTPWTFGQGTKLEIKRLEDLKNVFPPEVAVFEPSEAEISHTQKATLVCLATGFYPDHVELSWWVNGKEVHSGVSTDPQPLKEQPALNDSRYCLSSRLRVSATFWQNPRNHFRCQVQFYGLSENDEWTQDRAKPVTQIVSAEAWGRADCGSIGWLLLQAPRWVFKEEDPIHLRCHSWKNTALHKVTYLQNGKGRKYFHHNSDFYIPKATLKDSGSYFCRGLVGSKNVSSETVNITITQGLAVSTISSFFPPGYQVSFCLVMVLLFAVDTGLYFSVKTNIRSSTRDWKDHKFKWRKDPQDKRAKRSGSGATNFSLLKQAGDVEENPGPTSMDWIWRILFLVGAATGAHSGPEVQLVESGGGLVQAGGSLRLSCAASGRTFTMGWFRQAPGKEREFVAAISLSPTLAYYADSVKGRFTISRDNAKNTVVLQMNSLKPEDTALYYCAADRKSVMSIRPDYWGQGTQVTVSSGSGGGGSGGGGSGGGGSFEQVQLQQPGAELVKPGASVKMSCKASGYAFSSYWINWMKQKPGQGLEWIGQIYPGDGDTNYNGKFKGRATLTADTSSSTAYMQLSSLTSEDSAVYFCARSITTVVGCAMDYWGQGTSVTVSSTRIQNPDPAVYQLRDSKSSDKSVCLFTDFDSQTNVSQSKDSDVYITDKTVLDMRSMDFKSNSAVAWSNKSDFACANAFNNSIIPEDTFFPSPESSCGTQAQSDCSCSTVSPGVLAGIVMGDLVLTVLIALAVYFLGRLVPRGRGAAEAATRKQRITETESPYQELQGQRSDVYSDLNTQRPYYKRAKRSGSGVKQTLNFDLLKLAGDVESNPGPSRGHMTEYKPTVRLATRDDVPRAVRTLAAAFADYPATRHTVDPDRHIERVTELQELFLTRVGLDIGKVWVADDGAAVAVWTTPESVEAGAVFAEIGPRMAELSGSRLAAQQQMEGLLAPHRPKEPAWFLATVGVSPDHQGKGLGSAVVLPGVEAAERAGVPAFLETSAPRNLPFYERLGFTVTADVEVPEGPRTWCMTRKPGA

SEQ ID NO: 4330 - protein, 1007 aa, Artificial Sequence
  Synthetic Polypeptide
MALPVTALLLPLALLLHAARPEVQLVESGGGLVQAGGSLRLSCAASGRTFSMGWFRQAPGKEREFVAAITYSGGSPYYADSVKGRFTISRDNAKNTVYLQMNSLKPEDTAVYYCAANPTYGSDWNAENWGQGTQVTVSSLEDLKNVFPPEVAVFEPSEAEISHTQKATLVCLATGFYPDHVELSWWVNGKEVHSGVSTDPQPLKEQPALNDSRYCLSSRLRVSATFWQNPRNHFRCQVQFYGLSENDEWTQDRAKPVTQIVSAEAWGRADCGSIGWLLLQAPRWVFKEEDPIHLRCHSWKNTALHKVTYLQNGKGRKYFHHNSDFYIPKATLKDSGSYFCRGLVGSKNVSSETVNITITQGLAVSTISSFFPPGYQVSFCLVMVLLFAVDTGLYFSVKTNIRSSTRDWKDHKFKWRKDPQDKRAKRSGSGATNFSLLKQAGDVEENPGPTSMDWIWRILFLVGAATGAHSGPEVQLVESGGGLVQAGGSLRLSCAASGRTFTMGWFRQAPGKEREFVAAISLSPTLAYYADSVKGRFTISRDNAKNTVVLQMNSLKPEDTALYYCAADRKSVMSIRPDYWGQGTQVTVSSTRIQNPDPAVYQLRDSKSSDKSVCLFTDFDSQTNVSQSKDSDVYITDKTVLDMRSMDFKSNSAVAWSNKSDFACANAFNNSIIPEDTFFPSPESSCGTQAQSDCSCSTVSPGVLAGIVMGDLVLTVLIALAVYFLGRLVPRGRGAAEAATRKQRITETESPYQELQGQRSDVYSDLNTQRPYYKRAKRSGSGVKQTLNFDLLKLAGDVESNPGPSRGHMTEYKPTVRLATRDDVPRAVRTLAAAFADYPATRHTVDPDRHIERVTELQELFLTRVGLDIGKVWVADDGAAVAVWTTPESVEAGAVFAEIGPRMAELSGSRLAAQQQMEGLLAPHRPKEPAWFLATVGVSPDHQGKGLGSAVVLPGVEAAERAGVPAFLETSAPRNLPFYERLGFTVTADVEVPEGPRTWCMTRKPGA

SEQ ID NO: 4331 - protein, 544 aa, Artificial Sequence; identical to SEQ ID NO: 4058
  Synthetic Polypeptide

SEQ ID NO: 4332 - protein, 709 aa, Artificial Sequence
  Synthetic Polypeptide
MALPVTALLLPLALLLHAARPDIQMTQSPSSLSASVGDRVTITCKASDHINNWLAWYQQKPGQAPKLLIYGATTLETGVPSRFSGSGSGTDYTLTISSLQPEDFATYYCQQSWNTPWTFGQGTKLEIKRLEQAQSDCSCSTVSPGVLAGIVMGDLVLTVLIALAVYFLGRLVPRGRGAAEAATRKQRITETESPYQELQGQRSDVYSDLNTQRPYYKRAKRSGSGATNFSLLKQAGDVEENPGPTSMDWIWRILFLVGAATGAHSFEQVQLQQPGAELVKPGASVKMSCKASGYAFSSYWINWMKQKPGQGLEWIGQIYPGDGDTNYNGKFKGRATLTADTSSSTAYMQLSSLTSEDSAVYFCARSITTVVGCAMDYWGQGTSVTVSSTRQAQSDCSCSTVSPGVLAGIVMGDLVLTVLIALAVYFLGRLVPRGRGAAEAATRKQRITETESPYQELQGQRSDVYSDLNTQRPYYKRAKRSGSGVKQTLNFDLLKLAGDVESNPGPSRGHMTEYKPTVRLATRDDVPRAVRTLAAAFADYPATRHTVDPDRHIERVTELQELFLTRVGLDIGKVWVADDGAAVAVWTTPESVEAGAVFAEIGPRMAELSGSRLAAQQQMEGLLAPHRPKEPAWFLATVGVSPDHQGKGLGSAVVLPGVEAAERAGVPAFLETSAPRNLPFYERLGFTVTADVEVPEGPRTWCMTRKPGA

SEQ ID NO: 4333 - protein, 763 aa, Artificial Sequence
  Synthetic Polypeptide
MALPVTALLLPLALLLHAARPACEVQLLESGGGLIQPGGSLRLSCAASGFTFSSHAMTWVRQAPGKGLEWVSAISGSGDYTHYADSVKGRFTISRDNSKNTVYLQMNSLRAEDSAVYYCAKDEDGGSLLGHRGQGTLVTVSSGTGGGGSGGGGSGGGGSEFGSLEQAQSDCSCSTVSPGVLAGIVMGDLVLTVLIALAVYFLGRLVPRGRGAAEAATRKQRITETESPYQELQGQRSDVYSDLNTQRPYYKRAKRSGSGATNFSLLKQAGDVEENPGPTSATMDWIWRILFLVGAATGAHSGPEVQLVESGGGLVQAGGSLRLSCAASGRTFSMGWFRQAPGKEREFVAAITYSGGSPYYADSVKGRFTISRDNAKNTVYLQMNSLKPEDTAVYYCAANPTYGSDWNAENWGQGTQVTVSSGSGGGGSGGGGSGGGGSFEGSTRQAQSDCSCSTVSPGVLAGIVMGDLVLTVLIALAVYFLGRLVPRGRGAAEAATRKQRITETESPYQELQGQRSDVYSDLNTQRPYYKRAKRSGSGVKQTLNFDLLKLAGDVESNPGPSRGHMTEYKPTVRLATRDDVPRAVRTLAAAFADYPATRHTVDPDRHIERVTELQELFLTRVGLDIGKVWVADDGAAVAVWTTPESVEAGAVFAEIGPRMAELSGSRLAAQQQMEGLLAPHRPKEPAWFLATVGVSPDHQGKGLGSAVVLPGVEAAERAGVPAFLETSAPRNLPFYERLGFTVTADVEVPEGPRTWCMTRKPGA

SEQ ID NO: 4334 - protein, 914 aa, Artificial Sequence
  Synthetic Polypeptide
MALPVTALLLPLALLLHAARPDIQMTQSPSSLSASVGDRVTITCKASDHINNWLAWYQQKPGQAPKLLIYGATTLETGVPSRFSGSGSGTDYTLTISSLQPEDFATYYCQQSWNTPWTFGQGTKLEIKRLEGQPKANPTVTLFPPSSEELQANKATLVCLISDFYPGAVTVAWKADGSPVKAGVETTKPSKQSNNKYAASSYLSLTPEQWKSHRSYSCQVTHEGSTVEKTVAPTECSGSQAQSDCSCSTVSPGVLAGIVMGDLVLTVLIALAVYFLGRLVPRGRGAAEAATRKQRITETESPYQELQGQRSDVYSDLNTQRPYYKRAKRSGSGATNFSLLKQAGDVEENPGPTSMDWIWRILFLVGAATGAHSFEQVQLQQPGAELVKPGASVKMSCKASGYAFSSYWINWMKQKPGQGLEWIGQIYPGDGDTNYNGKFKGRATLTADTSSSTAYMQLSSLTSEDSAVYFCARSITTVVGCAMDYWGQGTSVTVSSTRASTKGPSVFPLAPSSKSTSGGTAALGCLVKDYFPEPVTVSWNSGALTSGVHTFPAVLQSSGLYSLSSVVTVPSSSLGTQTYICNVNHKPSNTKVDKRVEPKSCGTQAQSDCSCSTVSPGVLAGIVMGDLVLTVLIALAVYFLGRLVPRGRGAAEAATRKQRITETESPYQELQGQRSDVYSDLNTQRPYYKRAKRSGSGVKQTLNFDLLKLAGDVESNPGPSRGGIHTMATYEVLCEVARKLGTDDREVVLFLLNVFIPQPTLAQLIGALRALKEEGRLTFPLLAECLFRAGRRDLLRDLLHLDPRFLERHLAGTMSYFSPYQLTVLHVDGELCARDIRSLIFLSKDTIGSRSTPQTFLHWVYCMENLDLLGPTDVDALMSMLRSLSRVDLQRQVQTLMGLHLSGPSHSQHYRHTP

SEQ ID NO: 4335 - protein, 967 aa, Artificial Sequence
  Synthetic Polypeptide
MALPVTALLLPLALLLHAARPDIQMTQSPSSLSASVGDRVTITCKASDHINNWLAWYQQKPGQAPKLLIYGATTLETGVPSRFSGSGSGTDYTLTISSLQPEDFATYYCQQSWNTPWTFGQGTKLEIKRLEGQPKANPTVTLFPPSSEELQANKATLVCLISDFYPGAVTVAWKADGSPVKAGVETTKPSKQSNNKYAASSYLSLTPEQWKSHRSYSCQVTHEGSTVEKTVAPTECSGSQAQSDCSCSTVSPGVLAGIVMGDLVLTVLIALAVYFLGRLVPRGRGAAEAATRKQRITETESPYQELQGQRSDVYSDLNTQRPYYKRAKRSGSGATNFSLLKQAGDVEENPGPTSMDWIWRILFLVGAATGAHSFEQVQLQQPGAELVKPGASVKMSCKASGYAFSSYWINWMKQKPGQGLEWIGQIYPGDGDTNYNGKFKGRATLTADTSSSTAYMQLSSLTSEDSAVYFCARSITTVVGCAMDYWGQGTSVTVSSTRASTKGPSVFPLAPSSKSTSGGTAALGCLVKDYFPEPVTVSWNSGALTSGVHTFPAVLQSSGLYSLSSVVTVPSSSLGTQTYICNVNHKPSNTKVDKRVEPKSCGTQAQSDCSCSTVSPGVLAGIVMGDLVLTVLIALAVYFLGRLVPRGRGAAEAATRKQRITETESPYQELQGQRSDVYSDLNTQRPYYKRAKRSGSGVKQTLNFDLLKLAGDVESNPGPSRGGIHTMSDSKEVPSLPFLRHLLEELDSHEDSLLLFLCHDAAPGCTTVTQALCSLSQQRKLTLAALVEMLYVLQRMDLLKSRFGLSKEGAEQLLGTSFLTRYRKLMVCVGEELDSSELRALRLFACNLNPSLSTALSESSRFVELVLALENVGLVSPSSVSVLADMLRTLRRLDLCQQLVEYEQQEQARYRYCYAASPSLPVRTLRRGHGASEHEQLCMPVQESSDSPELLRTPVQESSSDSPEQTT

SEQ ID NO: 4336 - protein, 922 aa, Artificial Sequence
  Synthetic Polypeptide
MALPVTALLLPLALLLHAARPDIQMTQSPSSLSASVGDRVTITCKASDHINNWLAWYQQKPGQAPKLLIYGATTLETGVPSRFSGSGSGTDYTLTISSLQPEDFATYYCQQSWNTPWTFGQGTKLEIKRLEGQPKANPTVTLFPPSSEELQANKATLVCLISDFYPGAVTVAWKADGSPVKAGVETTKPSKQSNNKYAASSYLSLTPEQWKSHRSYSCQVTHEGSTVEKTVAPTECSGSQAQSDCSCSTVSPGVLAGIVMGDLVLTVLIALAVYFLGRLVPRGRGAAEAATRKQRITETESPYQELQGQRSDVYSDLNTQRPYYKRAKRSGSGATNFSLLKQAGDVEENPGPTSMDWIWRILFLVGAATGAHSFEQVQLQQPGAELVKPGASVKMSCKASGYAFSSYWINWMKQKPGQGLEWIGQIYPGDGDTNYNGKFKGRATLTADTSSSTAYMQLSSLTSEDSAVYFCARSITTVVGCAMDYWGQGTSVTVSSTRASTKGPSVFPLAPSSKSTSGGTAALGCLVKDYFPEPVTVSWNSGALTSGVHTFPAVLQSSGLYSLSSVVTVPSSSLGTQTYICNVNHKPSNTKVDKRVEPKSCGTQAQSDCSCSTVSPGVLAGIVMGDLVLTVLIALAVYFLGRLVPRGRGAAEAATRKQRITETESPYQELQGQRSDVYSDLNTQRPYYKRAKRSGSGVKQTLNFDLLKLAGDVESNPGPSRGHMTEYKPTVRLATRDDVPRAVRTLAAAFADYPATRHTVDPDRHIERVTELQELFLTRVGLDIGKVWVADDGAAVAVWTTPESVEAGAVFAEIGPRMAELSGSRLAAQQQMEGLLAPHRPKEPAWFLATVGVSPDHQGKGLGSAVVLPGVEAAERAGVPAFLETSAPRNLPFYERLGFTVTADVEVPEGPRTWCMTRKPGA

SEQ ID NO: 4337 - protein, 1059 aa, Artificial Sequence
  Synthetic Polypeptide
MALPVTALLLPLALLLHAARPEVQLVESGGGLVQAGGSLRLSCAASGRTFSMGWFRQAPGKEREFVAAITYSGGSPYYADSVKGRFTISRDNAKNTVYLQMNSLKPEDTAVYYCAANPTYGSDWNAENWGQGTQVTVSSGTGGGGSGGGGSGGGGSEFDIQMTQSPSSLSASVGDRVTITCKASDHINNWLAWYQQKPGQAPKLLIYGATTLETGVPSRFSGSGSGTDYTLTISSLQPEDFATYYCQQSWNTPWTFGQGTKLEIKRLEGQPKANPTVTLFPPSSEELQANKATLVCLISDFYPGAVTVAWKADGSPVKAGVETTKPSKQSNNKYAASSYLSLTPEQWKSHRSYSCQVTHEGSTVEKTVAPTECSGSQAQSDCSCSTVSPGVLAGIVMGDLVLTVLIALAVYFLGRLVPRGRGAAEAATRKQRITETESPYQELQGQRSDVYSDLNTQRPYYKRAKRSGSGATNFSLLKQAGDVEENPGPTSMDWIWRILFLVGAATGAHSFEQVQLQQPGAELVKPGASVKMSCKASGYAFSSYWINWMKQKPGQGLEWIGQIYPGDGDTNYNGKFKGRATLTADTSSSTAYMQLSSLTSEDSAVYFCARSITTVVGCAMDYWGQGTSVTVSSTRASTKGPSVFPLAPSSKSTSGGTAALGCLVKDYFPEPVTVSWNSGALTSGVHTFPAVLQSSGLYSLSSVVTVPSSSLGTQTYICNVNHKPSNTKVDKRVEPKSCGTQAQSDCSCSTVSPGVLAGIVMGDLVLTVLIALAVYFLGRLVPRGRGAAEAATRKQRITETESPYQELQGQRSDVYSDLNTQRPYYKRAKRSGSGVKQTLNFDLLKLAGDVESNPGPSRGHMTEYKPTVRLATRDDVPRAVRTLAAAFADYPATRHTVDPDRHIERVTELQELFLTRVGLDIGKVWVADDGAAVAVWTTPESVEAGAVFAEIGPRMAELSGSRLAAQQQMEGLLAPHRPKEPAWFLATVGVSPDHQGKGLGSAVVLPGVEAAERAGVPAFLETSAPRNLPFYERLGFTVTADVEVPEGPRTWCMTRKPGA

SEQ ID NO: 4338 - protein, 1196 aa, Artificial Sequence
  Synthetic Polypeptide
MALPVTALLLPLALLLHAARPEVQLVESGGGLVQAGGSLRLSCAASGRTFSMGWFRQAPGKEREFVAAITYSGGSPYYADSVKGRFTISRDNAKNTVYLQMNSLKPEDTAVYYCAANPTYGSDWNAENWGQGTQVTVSSGTGGGGSGGGGSGGGGSEFDIQMTQSPSSLSASVGDRVTITCKASDHINNWLAWYQQKPGQAPKLLIYGATTLETGVPSRFSGSGSGTDYTLTISSLQPEDFATYYCQQSWNTPWTFGQGTKLEIKRLEGQPKANPTVTLFPPSSEELQANKATLVCLISDFYPGAVTVAWKADGSPVKAGVETTKPSKQSNNKYAASSYLSLTPEQWKSHRSYSCQVTHEGSTVEKTVAPTECSGSQAQSDCSCSTVSPGVLAGIVMGDLVLTVLIALAVYFLGRLVPRGRGAAEAATRKQRITETESPYQELQGQRSDVYSDLNTQRPYYKRAKRSGSGATNFSLLKQAGDVEENPGPTSMDWIWRILFLVGAATGAHSGPEVQLVESGGGLVQAGGSLRLSCAASGRTFTMGWFRQAPGKEREFVAAISLSPTLAYYADSVKGRFTISRDNAKNTVVLQMNSLKPEDTALYYCAADRKSVMSIRPDYWGQGTQVTVSSGSGGGGSGGGGSGGGGSFEQVQLQQPGAELVKPGASVKMSCKASGYAFSSYWINWMKQKPGQGLEWIGQIYPGDGDTNYNGKFKGRATLTADTSSSTAYMQLSSLTSEDSAVYFCARSITTVVGCAMDYWGQGTSVTVSSTRASTKGPSVFPLAPSSKSTSGGTAALGCLVKDYFPEPVTVSWNSGALTSGVHTFPAVLQSSGLYSLSSVVTVPSSSLGTQTYICNVNHKPSNTKVDKRVEPKSCGTQAQSDCSCSTVSPGVLAGIVMGDLVLTVLIALAVYFLGRLVPRGRGAAEAATRKQRITETESPYQELQGQRSDVYSDLNTQRPYYKRAKRSGSGVKQTLNFDLLKLAGDVESNPGPSRGHMTEYKPTVRLATRDDVPRAVRTLAAAFADYPATRHTVDPDRHIERVTELQELFLTRVGLDIGKVWVADDGAAVAVWTTPESVEAGAVFAEIGPRMAELSGSRLAAQQQMEGLLAPHRPKEPAWFLATVGVSPDHQGKGLGSAVVLPGVEAAERAGVPAFLETSAPRNLPFYERLGFTVTADVEVPEGPRTWCMTRKPGA

SEQ ID NO: 4339 - protein, 929 aa, Artificial Sequence
  Synthetic Polypeptide
MALPVTALLLPLALLLHAARPEVQLVESGGGLVQAGGSLRLSCAASGRTFSMGWFRQAPGKEREFVAAITYSGGSPYYADSVKGRFTISRDNAKNTVYLQMNSLKPEDTAVYYCAANPTYGSDWNAENWGQGTQVTVSSLEGQPKANPTVTLFPPSSEELQANKATLVCLISDFYPGAVTVAWKADGSPVKAGVETTKPSKQSNNKYAASSYLSLTPEQWKSHRSYSCQVTHEGSTVEKTVAPTECSGSQAQSDCSCSTVSPGVLAGIVMGDLVLTVLIALAVYFLGRLVPRGRGAAEAATRKQRITETESPYQELQGQRSDVYSDLNTQRPYYKRAKRSGSGATNFSLLKQAGDVEENPGPTSMDWIWRILFLVGAATGAHSGPEVQLVESGGGLVQAGGSLRLSCAASGRTFTMGWFRQAPGKEREFVAAISLSPTLAYYADSVKGRFTISRDNAKNTVVLQMNSLKPEDTALYYCAADRKSVMSIRPDYWGQGTQVTVSSTRASTKGPSVFPLAPSSKSTSGGTAALGCLVKDYFPEPVTVSWNSGALTSGVHTFPAVLQSSGLYSLSSVVTVPSSSLGTQTYICNVNHKPSNTKVDKRVEPKSCGTQAQSDCSCSTVSPGVLAGIVMGDLVLTVLIALAVYFLGRLVPRGRGAAEAATRKQRITETESPYQELQGQRSDVYSDLNTQRPYYKRAKRSGSGVKQTLNFDLLKLAGDVESNPGPSRGHMTEYKPTVRLATRDDVPRAVRTLAAAFADYPATRHTVDPDRHIERVTELQELFLTRVGLDIGKVWVADDGAAVAVWTTPESVEAGAVFAEIGPRMAELSGSRLAAQQQMEGLLAPHRPKEPAWFLATVGVSPDHQGKGLGSAVVLPGVEAAERAGVPAFLETSAPRNLPFYERLGFTVTADVEVPEGPRTWCMTRKPGA

SEQ ID NO: 4340 - protein, 937 aa, Artificial Sequence
  Synthetic Polypeptide
MALPVTALLLPLALLLHAARPDIQMTQSPSSLSASVGDRVTITCKASDHINNWLAWYQQKPGQAPKLLIYGATTLETGVPSRFSGSGSGTDYTLTISSLQPEDFATYYCQQSWNTPWTFGQGTKLEIKRLEDLKNVFPPEVAVFEPSEAEISHTQKATLVCLATGFYPDHVELSWWVNGKEVHSGVSTDPQPLKEQPALNDSRYCLSSRLRVSATFWQNPRNHFRCQVQFYGLSENDEWTQDRAKPVTQIVSAEAWGRADCGSQAQSDCSCSTVSPGVLAGIVMGDLVLTVLIALAVYFLGRLVPRGRGAAEAATRKQRITETESPYQELQGQRSDVYSDLNTQRPYYKRAKRSGSGATNFSLLKQAGDVEENPGPTSMDWIWRILFLVGAATGAHSFEQVQLQQPGAELVKPGASVKMSCKASGYAFSSYWINWMKQKPGQGLEWIGQIYPGDGDTNYNGKFKGRATLTADTSSSTAYMQLSSLTSEDSAVYFCARSITTVVGCAMDYWGQGTSVTVSSTRIQNPDPAVYQLRDSKSSDKSVCLFTDFDSQTNVSQSKDSDVYITDKTVLDMRSMDFKSNSAVAWSNKSDFACANAFNNSIIPEDTFFPSPESSCGTQAQSDCSCSTVSPGVLAGIVMGDLVLTVLIALAVYFLGRLVPRGRGAAEAATRKQRITETESPYQELQGQRSDVYSDLNTQRPYYKRAKRSGSGVKQTLNFDLLKLAGDVESNPGPSRGHMTEYKPTVRLATRDDVPRAVRTLAAAFADYPATRHTVDPDRHIERVTELQELFLTRVGLDIGKVWVADDGAAVAVWTTPESVEAGAVFAEIGPRMAELSGSRLAAQQQMEGLLAPHRPKEPAWFLATVGVSPDHQGKGLGSAVVLPGVEAAERAGVPAFLETSAPRNLPFYERLGFTVTADVEVPEGPRTWCMTRKPGA

SEQ ID NO: 4341 - protein, 1074 aa, Artificial Sequence
  Synthetic Polypeptide
MALPVTALLLPLALLLHAARPEVQLVESGGGLVQAGGSLRLSCAASGRTFSMGWFRQAPGKEREFVAAITYSGGSPYYADSVKGRFTISRDNAKNTVYLQMNSLKPEDTAVYYCAANPTYGSDWNAENWGQGTQVTVSSGTGGGGSGGGGSGGGGSEFDIQMTQSPSSLSASVGDRVTITCKASDHINNWLAWYQQKPGQAPKLLIYGATTLETGVPSRFSGSGSGTDYTLTISSLQPEDFATYYCQQSWNTPWTFGQGTKLEIKRLEDLKNVFPPEVAVFEPSEAEISHTQKATLVCLATGFYPDHVELSWWVNGKEVHSGVSTDPQPLKEQPALNDSRYCLSSRLRVSATFWQNPRNHFRCQVQFYGLSENDEWTQDRAKPVTQIVSAEAWGRADCGSQAQSDCSCSTVSPGVLAGIVMGDLVLTVLIALAVYFLGRLVPRGRGAAEAATRKQRITETESPYQELQGQRSDVYSDLNTQRPYYKRAKRSGSGATNFSLLKQAGDVEENPGPTSMDWIWRILFLVGAATGAHSFEQVQLQQPGAELVKPGASVKMSCKASGYAFSSYWINWMKQKPGQGLEWIGQIYPGDGDTNYNGKFKGRATLTADTSSSTAYMQLSSLTSEDSAVYFCARSITTVVGCAMDYWGQGTSVTVSSTRIQNPDPAVYQLRDSKSSDKSVCLFTDFDSQTNVSQSKDSDVYITDKTVLDMRSMDFKSNSAVAWSNKSDFACANAFNNSIIPEDTFFPSPESSCGTQAQSDCSCSTVSPGVLAGIVMGDLVLTVLIALAVYFLGRLVPRGRGAAEAATRKQRITETESPYQELQGQRSDVYSDLNTQRPYYKRAKRSGSGVKQTLNFDLLKLAGDVESNPGPSRGHMTEYKPTVRLATRDDVPRAVRTLAAAFADYPATRHTVDPDRHIERVTELQELFLTRVGLDIGKVWVADDGAAVAVWTTPESVEAGAVFAEIGPRMAELSGSRLAAQQQMEGLLAPHRPKEPAWFLATVGVSPDHQGKGLGSAVVLPGVEAAERAGVPAFLETSAPRNLPFYERLGFTVTADVEVPEGPRTWCMTRKPGA

SEQ ID NO: 4342 - protein, 1211 aa, Artificial Sequence
  Synthetic Polypeptide
MALPVTALLLPLALLLHAARPEVQLVESGGGLVQAGGSLRLSCAASGRTFSMGWFRQAPGKEREFVAAITYSGGSPYYADSVKGRFTISRDNAKNTVYLQMNSLKPEDTAVYYCAANPTYGSDWNAENWGQGTQVTVSSGTGGGGSGGGGSGGGGSEFDIQMTQSPSSLSASVGDRVTITCKASDHINNWLAWYQQKPGQAPKLLIYGATTLETGVPSRFSGSGSGTDYTLTISSLQPEDFATYYCQQSWNTPWTFGQGTKLEIKRLEDLKNVFPPEVAVFEPSEAEISHTQKATLVCLATGFYPDHVELSWWVNGKEVHSGVSTDPQPLKEQPALNDSRYCLSSRLRVSATFWQNPRNHFRCQVQFYGLSENDEWTQDRAKPVTQIVSAEAWGRADCGSQAQSDCSCSTVSPGVLAGIVMGDLVLTVLIALAVYFLGRLVPRGRGAAEAATRKQRITETESPYQELQGQRSDVYSDLNTQRPYYKRAKRSGSGATNFSLLKQAGDVEENPGPTSMDWIWRILFLVGAATGAHSGPEVQLVESGGGLVQAGGSLRLSCAASGRTFTMGWFRQAPGKEREFVAAISLSPTLAYYADSVKGRFTISRDNAKNTVVLQMNSLKPEDTALYYCAADRKSVMSIRPDYWGQGTQVTVSSGSGGGGSGGGGSGGGGSFEQVQLQQPGAELVKPGASVKMSCKASGYAFSSYWINWMKQKPGQGLEWIGQIYPGDGDTNYNGKFKGRATLTADTSSSTAYMQLSSLTSEDSAVYFCARSITTVVGCAMDYWGQGTSVTVSSTRIQNPDPAVYQLRDSKSSDKSVCLFTDFDSQTNVSQSKDSDVYITDKTVLDMRSMDFKSNSAVAWSNKSDFACANAFNNSIIPEDTFFPSPESSCGTQAQSDCSCSTVSPGVLAGIVMGDLVLTVLIALAVYFLGRLVPRGRGAAEAATRKQRITETESPYQELQGQRSDVYSDLNTQRPYYKRAKRSGSGVKQTLNFDLLKLAGDVESNPGPSRGHMTEYKPTVRLATRDDVPRAVRTLAAAFADYPATRHTVDPDRHIERVTELQELFLTRVGLDIGKVWVADDGAAVAVWTTPESVEAGAVFAEIGPRMAELSGSRLAAQQQMEGLLAPHRPKEPAWFLATVGVSPDHQGKGLGSAVVLPGVEAAERAGVPAFLETSAPRNLPFYERLGFTVTADVEVPEGPRTWCMTRKPGA

SEQ ID NO: 4343 - protein, 944 aa, Artificial Sequence
  Synthetic Polypeptide
MALPVTALLLPLALLLHAARPEVQLVESGGGLVQAGGSLRLSCAASGRTFSMGWFRQAPGKEREFVAAITYSGGSPYYADSVKGRFTISRDNAKNTVYLQMNSLKPEDTAVYYCAANPTYGSDWNAENWGQGTQVTVSSLEDLKNVFPPEVAVFEPSEAEISHTQKATLVCLATGFYPDHVELSWWVNGKEVHSGVSTDPQPLKEQPALNDSRYCLSSRLRVSATFWQNPRNHFRCQVQFYGLSENDEWTQDRAKPVTQIVSAEAWGRADCGSQAQSDCSCSTVSPGVLAGIVMGDLVLTVLIALAVYFLGRLVPRGRGAAEAATRKQRITETESPYQELQGQRSDVYSDLNTQRPYYKRAKRSGSGATNFSLLKQAGDVEENPGPTSMDWIWRILFLVGAATGAHSGPEVQLVESGGGLVQAGGSLRLSCAASGRTFTMGWFRQAPGKEREFVAAISLSPTLAYYADSVKGRFTISRDNAKNTVVLQMNSLKPEDTALYYCAADRKSVMSIRPDYWGQGTQVTVSSTRIQNPDPAVYQLRDSKSSDKSVCLFTDFDSQTNVSQSKDSDVYITDKTVLDMRSMDFKSNSAVAWSNKSDFACANAFNNSIIPEDTFFPSPESSCGTQAQSDCSCSTVSPGVLAGIVMGDLVLTVLIALAVYFLGRLVPRGRGAAEAATRKQRITETESPYQELQGQRSDVYSDLNTQRPYYKRAKRSGSGVKQTLNFDLLKLAGDVESNPGPSRGHMTEYKPTVRLATRDDVPRAVRTLAAAFADYPATRHTVDPDRHIERVTELQELFLTRVGLDIGKVWVADDGAAVAVWTTPESVEAGAVFAEIGPRMAELSGSRLAAQQQMEGLLAPHRPKEPAWFLATVGVSPDHQGKGLGSAVVLPGVEAAERAGVPAFLETSAPRNLPFYERLGFTVTADVEVPEGPRTWCMTRKPGA

SEQ ID NO: 4344 - protein, 481 aa, Artificial Sequence
  Synthetic Polypeptide
MALPVTALLLPLALLLHAARPACEVQLLESGGGLIQPGGSLRLSCAASGFTFSSHAMTWVRQAPGKGLEWVSAISGSGDYTHYADSVKGRFTISRDNSKNTVYLQMNSLRAEDSAVYYCAKDEDGGSLLGHRGQGTLVTVSSGTGGGGSGGGGSGGGGSEFGSLEQAQSDCSCSTVSPGVLAGIVMGDLVLTVLIALAVYFLGRLVPRGRGAAEAATRKQRITETESPYQELQGQRSDVYSDLNTQRPYYKRAKRSGSGATNFSLLKQAGDVEENPGPTRGHMTEYKPTVRLATRDDVPRAVRTLAAAFADYPATRHTVDPDRHIERVTELQELFLTRVGLDIGKVWVADDGAAVAVWTTPESVEAGAVFAEIGPRMAELSGSRLAAQQQMEGLLAPHRPKEPAWFLATVGVSPDHQGKGLGSAVVLPGVEAAERAGVPAFLETSAPRNLPFYERLGFTVTADVEVPEGPRTWCMTRKPGA

SEQ ID NO: 4345 - protein, 772 aa, Artificial Sequence
  Synthetic Polypeptide
MALPVTALLLPLALLLHAARPDIQMTQSPSSLSASVGDRVTITCKASDHINNWLAWYQQKPGQAPKLLIYGATTLETGVPSRFSGSGSGTDYTLTISSLQPEDFATYYCQQSWNTPWTFGQGTKLEIKRLEIGWLLLQAPRWVFKEEDPIHLRCHSWKNTALHKVTYLQNGKGRKYFHHNSDFYIPKATLKDSGSYFCRGLVGSKNVSSETVNITITQGLAVSTISSFFPPGYQVSFCLVMVLLFAVDTGLYFSVKTNIRSSTRDWKDHKFKWRKDPQDKRAKRSGSGATNFSLLKQAGDVEENPGPTSMDWIWRILFLVGAATGAHSFEQVQLQQPGAELVKPGASVKMSCKASGYAFSSYWINWMKQKPGQGLEWIGQIYPGDGDTNYNGKFKGRATLTADTSSSTAYMQLSSLTSEDSAVYFCARSITTVVGCAMDYWGQGTSVTVSSTRQAQSDCSSSTVSPGVLAGIVMGDLVLTVLIALAVYFLGRLVPRGRGAAEAATRKQRITETESPYQELQGQRSDVYSDLNTQRPYYKRAKRSGSGVKQTLNFDLLKLAGDVESNPGPSRGHMTEYKPTVRLATRDDVPRAVRTLAAAFADYPATRHTVDPDRHIERVTELQELFLTRVGLDIGKVWVADDGAAVAVWTTPESVEAGAVFAEIGPRMAELSGSRLAAQQQMEGLLAPHRPKEPAWFLATVGVSPDHQGKGLGSAVVLPGVEAAERAGVPAFLETSAPRNLPFYERLGFTVTADVEVPEGPRTWCMTRKPGA

SEQ ID NO: 4346 - protein, 826 aa, Artificial Sequence
  Synthetic Polypeptide
MALPVTALLLPLALLLHAARPACEVQLLESGGGLIQPGGSLRLSCAASGFTFSSHAMTWVRQAPGKGLEWVSAISGSGDYTHYADSVKGRFTISRDNSKNTVYLQMNSLRAEDSAVYYCAKDEDGGSLLGHRGQGTLVTVSSGTGGGGSGGGGSGGGGSEFGSLEIGWLLLQAPRWVFKEEDPIHLRCHSWKNTALHKVTYLQNGKGRKYFHHNSDFYIPKATLKDSGSYFCRGLVGSKNVSSETVNITITQGLAVSTISSFFPPGYQVSFCLVMVLLFAVDTGLYFSVKTNIRSSTRDWKDHKFKWRKDPQDKRAKRSGSGATNFSLLKQAGDVEENPGPTSATMDWIWRILFLVGAATGAHSGPEVQLVESGGGLVQAGGSLRLSCAASGRTFSMGWFRQAPGKEREFVAAITYSGGSPYYADSVKGRFTISRDNAKNTVYLQMNSLKPEDTAVYYCAANPTYGSDWNAENWGQGTQVTVSSGSGGGGSGGGGSGGGGSFEGSTRQAQSDCSSSTVSPGVLAGIVMGDLVLTVLIALAVYFLGRLVPRGRGAAEAATRKQRITETESPYQELQGQRSDVYSDLNTQRPYYKRAKRSGSGVKQTLNFDLLKLAGDVESNPGPSRGHMTEYKPTVRLATRDDVPRAVRTLAAAFADYPATRHTVDPDRHIERVTELQELFLTRVGLDIGKVWVADDGAAVAVWTTPESVEAGAVFAEIGPRMAELSGSRLAAQQQMEGLLAPHRPKEPAWFLATVGVSPDHQGKGLGSAVVLPGVEAAERAGVPAFLETSAPRNLPFYERLGFTVTADVEVPEGPRTWCMTRKPGA

SEQ ID NO: 4347 - protein, 977 aa, Artificial Sequence
  Synthetic Polypeptide
MALPVTALLLPLALLLHAARPDIQMTQSPSSLSASVGDRVTITCKASDHINNWLAWYQQKPGQAPKLLIYGATTLETGVPSRFSGSGSGTDYTLTISSLQPEDFATYYCQQSWNTPWTFGQGTKLEIKRLEGQPKANPTVTLFPPSSEELQANKATLVCLISDFYPGAVTVAWKADGSPVKAGVETTKPSKQSNNKYAASSYLSLTPEQWKSHRSYSCQVTHEGSTVEKTVAPTECSGSIGWLLLQAPRWVFKEEDPIHLRCHSWKNTALHKVTYLQNGKGRKYFHHNSDFYIPKATLKDSGSYFCRGLVGSKNVSSETVNITITQGLAVSTISSFFPPGYQVSFCLVMVLLFAVDTGLYFSVKTNIRSSTRDWKDHKFKWRKDPQDKRAKRSGSGATNFSLLKQAGDVEENPGPTSMDWIWRILFLVGAATGAHSFEQVQLQQPGAELVKPGASVKMSCKASGYAFSSYWINWMKQKPGQGLEWIGQIYPGDGDTNYNGKFKGRATLTADTSSSTAYMQLSSLTSEDSAVYFCARSITTVVGCAMDYWGQGTSVTVSSTRASTKGPSVFPLAPSSKSTSGGTAALGCLVKDYFPEPVTVSWNSGALTSGVHTFPAVLQSSGLYSLSSVVTVPSSSLGTQTYICNVNHKPSNTKVDKRVEPKSCGTQAQSDCSSSTVSPGVLAGIVMGDLVLTVLIALAVYFLGRLVPRGRGAAEAATRKQRITETESPYQELQGQRSDVYSDLNTQRPYYKRAKRSGSGVKQTLNFDLLKLAGDVESNPGPSRGGIHTMATYEVLCEVARKLGTDDREVVLFLLNVFIPQPTLAQLIGALRALKEEGRLTFPLLAECLFRAGRRDLLRDLLHLDPRFLERHLAGTMSYFSPYQLTVLHVDGELCARDIRSLIFLSKDTIGSRSTPQTFLHWVYCMENLDLLGPTDVDALMSMLRSLSRVDLQRQVQTLMGLHLSGPSHSQHYRHTP

SEQ ID NO: 4348 - protein, 1030 aa, Artificial Sequence
  Synthetic Polypeptide
MALPVTALLLPLALLLHAARPDIQMTQSPSSLSASVGDRVTITCKASDHINNWLAWYQQKPGQAPKLLIYGATTLETGVPSRFSGSGSGTDYTLTISSLQPEDFATYYCQQSWNTPWTFGQGTKLEIKRLEGQPKANPTVTLFPPSSEELQANKATLVCLISDFYPGAVTVAWKADGSPVKAGVETTKPSKQSNNKYAASSYLSLTPEQWKSHRSYSCQVTHEGSTVEKTVAPTECSGSIGWLLLQAPRWVFKEEDPIHLRCHSWKNTALHKVTYLQNGKGRKYFHHNSDFYIPKATLKDSGSYFCRGLVGSKNVSSETVNITITQGLAVSTISSFFPPGYQVSFCLVMVLLFAVDTGLYFSVKTNIRSSTRDWKDHKFKWRKDPQDKRAKRSGSGATNFSLLKQAGDVEENPGPTSMDWIWRILFLVGAATGAHSFEQVQLQQPGAELVKPGASVKMSCKASGYAFSSYWINWMKQKPGQGLEWIGQIYPGDGDTNYNGKFKGRATLTADTSSSTAYMQLSSLTSEDSAVYFCARSITTVVGCAMDYWGQGTSVTVSSTRASTKGPSVFPLAPSSKSTSGGTAALGCLVKDYFPEPVTVSWNSGALTSGVHTFPAVLQSSGLYSLSSVVTVPSSSLGTQTYICNVNHKPSNTKVDKRVEPKSCGTQAQSDCSSSTVSPGVLAGIVMGDLVLTVLIALAVYFLGRLVPRGRGAAEAATRKQRITETESPYQELQGQRSDVYSDLNTQRPYYKRAKRSGSGVKQTLNFDLLKLAGDVESNPGPSRGGIHTMSDSKEVPSLPFLRHLLEELDSHEDSLLLFLCHDAAPGCTTVTQALCSLSQQRKLTLAALVEMLYVLQRMDLLKSRFGLSKEGAEQLLGTSFLTRYRKLMVCVGEELDSSELRALRLFACNLNPSLSTALSESSRFVELVLALENVGLVSPSSVSVLADMLRTLRRLDLCQQLVEYEQQEQARYRYCYAASPSLPVRTLRRGHGASEHEQLCMPVQESSDSPELLRTPVQESSSDSPEQTT

SEQ ID NO: 4349 - protein, 985 aa, Artificial Sequence
  Synthetic Polypeptide
MALPVTALLLPLALLLHAARPDIQMTQSPSSLSASVGDRVTITCKASDHINNWLAWYQQKPGQAPKLLIYGATTLETGVPSRFSGSGSGTDYTLTISSLQPEDFATYYCQQSWNTPWTFGQGTKLEIKRLEGQPKANPTVTLFPPSSEELQANKATLVCLISDFYPGAVTVAWKADGSPVKAGVETTKPSKQSNNKYAASSYLSLTPEQWKSHRSYSCQVTHEGSTVEKTVAPTECSGSIGWLLLQAPRWVFKEEDPIHLRCHSWKNTALHKVTYLQNGKGRKYFHHNSDFYIPKATLKDSGSYFCRGLVGSKNVSSETVNITITQGLAVSTISSFFPPGYQVSFCLVMVLLFAVDTGLYFSVKTNIRSSTRDWKDHKFKWRKDPQDKRAKRSGSGATNFSLLKQAGDVEENPGPTSMDWIWRILFLVGAATGAHSFEQVQLQQPGAELVKPGASVKMSCKASGYAFSSYWINWMKQKPGQGLEWIGQIYPGDGDTNYNGKFKGRATLTADTSSSTAYMQLSSLTSEDSAVYFCARSITTVVGCAMDYWGQGTSVTVSSTRASTKGPSVFPLAPSSKSTSGGTAALGCLVKDYFPEPVTVSWNSGALTSGVHTFPAVLQSSGLYSLSSVVTVPSSSLGTQTYICNVNHKPSNTKVDKRVEPKSCGTQAQSDCSSSTVSPGVLAGIVMGDLVLTVLIALAVYFLGRLVPRGRGAAEAATRKQRITETESPYQELQGQRSDVYSDLNTQRPYYKRAKRSGSGVKQTLNFDLLKLAGDVESNPGPSRGHMTEYKPTVRLATRDDVPRAVRTLAAAFADYPATRHTVDPDRHIERVTELQELFLTRVGLDIGKVWVADDGAAVAVWTTPESVEAGAVFAEIGPRMAELSGSRLAAQQQMEGLLAPHRPKEPAWFLATVGVSPDHQGKGLGSAVVLPGVEAAERAGVPAFLETSAPRNLPFYERLGFTVTADVEVPEGPRTWCMTRKPGA

SEQ ID NO: 4350 - protein, 1122 aa, Artificial Sequence
  Synthetic Polypeptide
MALPVTALLLPLALLLHAARPEVQLVESGGGLVQAGGSLRLSCAASGRTFSMGWFRQAPGKEREFVAAITYSGGSPYYADSVKGRFTISRDNAKNTVYLQMNSLKPEDTAVYYCAANPTYGSDWNAENWGQGTQVTVSSGTGGGGSGGGGSGGGGSEFDIQMTQSPSSLSASVGDRVTITCKASDHINNWLAWYQQKPGQAPKLLIYGATTLETGVPSRFSGSGSGTDYTLTISSLQPEDFATYYCQQSWNTPWTFGQGTKLEIKRLEGQPKANPTVTLFPPSSEELQANKATLVCLISDFYPGAVTVAWKADGSPVKAGVETTKPSKQSNNKYAASSYLSLTPEQWKSHRSYSCQVTHEGSTVEKTVAPTECSGSIGWLLLQAPRWVFKEEDPIHLRCHSWKNTALHKVTYLQNGKGRKYFHHNSDFYIPKATLKDSGSYFCRGLVGSKNVSSETVNITITQGLAVSTISSFFPPGYQVSFCLVMVLLFAVDTGLYFSVKTNIRSSTRDWKDHKFKWRKDPQDKRAKRSGSGATNFSLLKQAGDVEENPGPTSMDWIWRILFLVGAATGAHSFEQVQLQQPGAELVKPGASVKMSCKASGYAFSSYWINWMKQKPGQGLEWIGQIYPGDGDTNYNGKFKGRATLTADTSSSTAYMQLSSLTSEDSAVYFCARSITTVVGCAMDYWGQGTSVTVSSTRASTKGPSVFPLAPSSKSTSGGTAALGCLVKDYFPEPVTVSWNSGALTSGVHTFPAVLQSSGLYSLSSVVTVPSSSLGTQTYICNVNHKPSNTKVDKRVEPKSCGTQAQSDCSSSTVSPGVLAGIVMGDLVLTVLIALAVYFLGRLVPRGRGAAEAATRKQRITETESPYQELQGQRSDVYSDLNTQRPYYKRAKRSGSGVKQTLNFDLLKLAGDVESNPGPSRGHMTEYKPTVRLATRDDVPRAVRTLAAAFADYPATRHTVDPDRHIERVTELQELFLTRVGLDIGKVWVADDGAAVAVWTTPESVEAGAVFAEIGPRMAELSGSRLAAQQQMEGLLAPHRPKEPAWFLATVGVSPDHQGKGLGSAVVLPGVEAAERAGVPAFLETSAPRNLPFYERLGFTVTADVEVPEGPRTWCMTRKPGA

SEQ ID NO: 4351 - protein, 1259 aa, Artificial Sequence
  Synthetic Polypeptide
MALPVTALLLPLALLLHAARPEVQLVESGGGLVQAGGSLRLSCAASGRTFSMGWFRQAPGKEREFVAAITYSGGSPYYADSVKGRFTISRDNAKNTVYLQMNSLKPEDTAVYYCAANPTYGSDWNAENWGQGTQVTVSSGTGGGGSGGGGSGGGGSEFDIQMTQSPSSLSASVGDRVTITCKASDHINNWLAWYQQKPGQAPKLLIYGATTLETGVPSRFSGSGSGTDYTLTISSLQPEDFATYYCQQSWNTPWTFGQGTKLEIKRLEGQPKANPTVTLFPPSSEELQANKATLVCLISDFYPGAVTVAWKADGSPVKAGVETTKPSKQSNNKYAASSYLSLTPEQWKSHRSYSCQVTHEGSTVEKTVAPTECSGSIGWLLLQAPRWVFKEEDPIHLRCHSWKNTALHKVTYLQNGKGRKYFHHNSDFYIPKATLKDSGSYFCRGLVGSKNVSSETVNITITQGLAVSTISSFFPPGYQVSFCLVMVLLFAVDTGLYFSVKTNIRSSTRDWKDHKFKWRKDPQDKRAKRSGSGATNFSLLKQAGDVEENPGPTSMDWIWRILFLVGAATGAHSGPEVQLVESGGGLVQAGGSLRLSCAASGRTFTMGWFRQAPGKEREFVAAISLSPTLAYYADSVKGRFTISRDNAKNTVVLQMNSLKPEDTALYYCAADRKSVMSIRPDYWGQGTQVTVSSGSGGGGSGGGGSGGGGSFEQVQLQQPGAELVKPGASVKMSCKASGYAFSSYWINWMKQKPGQGLEWIGQIYPGDGDTNYNGKFKGRATLTADTSSSTAYMQLSSLTSEDSAVYFCARSITTVVGCAMDYWGQGTSVTVSSTRASTKGPSVFPLAPSSKSTSGGTAALGCLVKDYFPEPVTVSWNSGALTSGVHTFPAVLQSSGLYSLSSVVTVPSSSLGTQTYICNVNHKPSNTKVDKRVEPKSCGTQAQSDCSSSTVSPGVLAGIVMGDLVLTVLIALAVYFLGRLVPRGRGAAEAATRKQRITETESPYQELQGQRSDVYSDLNTQRPYYKRAKRSGSGVKQTLNFDLLKLAGDVESNPGPSRGHMTEYKPTVRLATRDDVPRAVRTLAAAFADYPATRHTVDPDRHIERVTELQELFLTRVGLDIGKVWVADDGAAVAVWTTPESVEAGAVFAEIGPRMAELSGSRLAAQQQMEGLLAPHRPKEPAWFLATVGVSPDHQGKGLGSAVVLPGVEAAERAGVPAFLETSAPRNLPFYERLGFTVTADVEVPEGPRTWCMTRKPGA

SEQ ID NO: 4352 - protein, 992 aa, Artificial Sequence
  Synthetic Polypeptide
MALPVTALLLPLALLLHAARPEVQLVESGGGLVQAGGSLRLSCAASGRTFSMGWFRQAPGKEREFVAAITYSGGSPYYADSVKGRFTISRDNAKNTVYLQMNSLKPEDTAVYYCAANPTYGSDWNAENWGQGTQVTVSSLEGQPKANPTVTLFPPSSEELQANKATLVCLISDFYPGAVTVAWKADGSPVKAGVETTKPSKQSNNKYAASSYLSLTPEQWKSHRSYSCQVTHEGSTVEKTVAPTECSGSIGWLLLQAPRWVFKEEDPIHLRCHSWKNTALHKVTYLQNGKGRKYFHHNSDFYIPKATLKDSGSYFCRGLVGSKNVSSETVNITITQGLAVSTISSFFPPGYQVSFCLVMVLLFAVDTGLYFSVKTNIRSSTRDWKDHKFKWRKDPQDKRAKRSGSGATNFSLLKQAGDVEENPGPTSMDWIWRILFLVGAATGAHSGPEVQLVESGGGLVQAGGSLRLSCAASGRTFTMGWFRQAPGKEREFVAAISLSPTLAYYADSVKGRFTISRDNAKNTVVLQMNSLKPEDTALYYCAADRKSVMSIRPDYWGQGTQVTVSSTRASTKGPSVFPLAPSSKSTSGGTAALGCLVKDYFPEPVTVSWNSGALTSGVHTFPAVLQSSGLYSLSSVVTVPSSSLGTQTYICNVNHKPSNTKVDKRVEPKSCGTQAQSDCSSSTVSPGVLAGIVMGDLVLTVLIALAVYFLGRLVPRGRGAAEAATRKQRITETESPYQELQGQRSDVYSDLNTQRPYYKRAKRSGSGVKQTLNFDLLKLAGDVESNPGPSRGHMTEYKPTVRLATRDDVPRAVRTLAAAFADYPATRHTVDPDRHIERVTELQELFLTRVGLDIGKVWVADDGAAVAVWTTPESVEAGAVFAEIGPRMAELSGSRLAAQQQMEGLLAPHRPKEPAWFLATVGVSPDHQGKGLGSAVVLPGVEAAERAGVPAFLETSAPRNLPFYERLGFTVTADVEVPEGPRTWCMTRKPGA

SEQ ID NO: 4353 - protein, 1000 aa, Artificial Sequence
  Synthetic Polypeptide
MALPVTALLLPLALLLHAARPDIQMTQSPSSLSASVGDRVTITCKASDHINNWLAWYQQKPGQAPKLLIYGATTLETGVPSRFSGSGSGTDYTLTISSLQPEDFATYYCQQSWNTPWTFGQGTKLEIKRLEDLKNVFPPEVAVFEPSEAEISHTQKATLVCLATGFYPDHVELSWWVNGKEVHSGVSTDPQPLKEQPALNDSRYCLSSRLRVSATFWQNPRNHFRCQVQFYGLSENDEWTQDRAKPVTQIVSAEAWGRADCGSIGWLLLQAPRWVFKEEDPIHLRCHSWKNTALHKVTYLQNGKGRKYFHHNSDFYIPKATLKDSGSYFCRGLVGSKNVSSETVNITITQGLAVSTISSFFPPGYQVSFCLVMVLLFAVDTGLYFSVKTNIRSSTRDWKDHKFKWRKDPQDKRAKRSGSGATNFSLLKQAGDVEENPGPTSMDWIWRILFLVGAATGAHSFEQVQLQQPGAELVKPGASVKMSCKASGYAFSSYWINWMKQKPGQGLEWIGQIYPGDGDTNYNGKFKGRATLTADTSSSTAYMQLSSLTSEDSAVYFCARSITTVVGCAMDYWGQGTSVTVSSTRIQNPDPAVYQLRDSKSSDKSVCLFTDFDSQTNVSQSKDSDVYITDKTVLDMRSMDFKSNSAVAWSNKSDFACANAFNNSIIPEDTFFPSPESSCGTQAQSDCSSSTVSPGVLAGIVMGDLVLTVLIALAVYFLGRLVPRGRGAAEAATRKQRITETESPYQELQGQRSDVYSDLNTQRPYYKRAKRSGSGVKQTLNFDLLKLAGDVESNPGPSRGHMTEYKPTVRLATRDDVPRAVRTLAAAFADYPATRHTVDPDRHIERVTELQELFLTRVGLDIGKVWVADDGAAVAVWTTPESVEAGAVFAEIGPRMAELSGSRLAAQQQMEGLLAPHRPKEPAWFLATVGVSPDHQGKGLGSAVVLPGVEAAERAGVPAFLETSAPRNLPFYERLGFTVTADVEVPEGPRTWCMTRKPGA

SEQ ID NO: 4354 - protein, 1137 aa, Artificial Sequence
  Synthetic Polypeptide
MALPVTALLLPLALLLHAARPEVQLVESGGGLVQAGGSLRLSCAASGRTFSMGWFRQAPGKEREFVAAITYSGGSPYYADSVKGRFTISRDNAKNTVYLQMNSLKPEDTAVYYCAANPTYGSDWNAENWGQGTQVTVSSGTGGGGSGGGGSGGGGSEFDIQMTQSPSSLSASVGDRVTITCKASDHINNWLAWYQQKPGQAPKLLIYGATTLETGVPSRFSGSGSGTDYTLTISSLQPEDFATYYCQQSWNTPWTFGQGTKLEIKRLEDLKNVFPPEVAVFEPSEAEISHTQKATLVCLATGFYPDHVELSWWVNGKEVHSGVSTDPQPLKEQPALNDSRYCLSSRLRVSATFWQNPRNHFRCQVQFYGLSENDEWTQDRAKPVTQIVSAEAWGRADCGSIGWLLLQAPRWVFKEEDPIHLRCHSWKNTALHKVTYLQNGKGRKYFHHNSDFYIPKATLKDSGSYFCRGLVGSKNVSSETVNITITQGLAVSTISSFFPPGYQVSFCLVMVLLFAVDTGLYFSVKTNIRSSTRDWKDHKFKWRKDPQDKRAKRSGSGATNFSLLKQAGDVEENPGPTSMDWIWRILFLVGAATGAHSFEQVQLQQPGAELVKPGASVKMSCKASGYAFSSYWINWMKQKPGQGLEWIGQIYPGDGDTNYNGKFKGRATLTADTSSSTAYMQLSSLTSEDSAVYFCARSITTVVGCAMDYWGQGTSVTVSSTRIQNPDPAVYQLRDSKSSDKSVCLFTDFDSQTNVSQSKDSDVYITDKTVLDMRSMDFKSNSAVAWSNKSDFACANAFNNSIIPEDTFFPSPESSCGTQAQSDCSSSTVSPGVLAGIVMGDLVLTVLIALAVYFLGRLVPRGRGAAEAATRKQRITETESPYQELQGQRSDVYSDLNTQRPYYKRAKRSGSGVKQTLNFDLLKLAGDVESNPGPSRGHMTEYKPTVRLATRDDVPRAVRTLAAAFADYPATRHTVDPDRHIERVTELQELFLTRVGLDIGKVWVADDGAAVAVWTTPESVEAGAVFAEIGPRMAELSGSRLAAQQQMEGLLAPHRPKEPAWFLATVGVSPDHQGKGLGSAVVLPGVEAAERAGVPAFLETSAPRNLPFYERLGFTVTADVEVPEGPRTWCMTRKPGA

SEQ ID NO: 4355 - protein, 1274 aa, Artificial Sequence
  Synthetic Polypeptide
MALPVTALLLPLALLLHAARPEVQLVESGGGLVQAGGSLRLSCAASGRTFSMGWFRQAPGKEREFVAAITYSGGSPYYADSVKGRFTISRDNAKNTVYLQMNSLKPEDTAVYYCAANPTYGSDWNAENWGQGTQVTVSSGTGGGGSGGGGSGGGGSEFDIQMTQSPSSLSASVGDRVTITCKASDHINNWLAWYQQKPGQAPKLLIYGATTLETGVPSRFSGSGSGTDYTLTISSLQPEDFATYYCQQSWNTPWTFGQGTKLEIKRLEDLKNVFPPEVAVFEPSEAEISHTQKATLVCLATGFYPDHVELSWWVNGKEVHSGVSTDPQPLKEQPALNDSRYCLSSRLRVSATFWQNPRNHFRCQVQFYGLSENDEWTQDRAKPVTQIVSAEAWGRADCGSIGWLLLQAPRWVFKEEDPIHLRCHSWKNTALHKVTYLQNGKGRKYFHHNSDFYIPKATLKDSGSYFCRGLVGSKNVSSETVNITITQGLAVSTISSFFPPGYQVSFCLVMVLLFAVDTGLYFSVKTNIRSSTRDWKDHKFKWRKDPQDKRAKRSGSGATNFSLLKQAGDVEENPGPTSMDWIWRILFLVGAATGAHSGPEVQLVESGGGLVQAGGSLRLSCAASGRTFTMGWFRQAPGKEREFVAAISLSPTLAYYADSVKGRFTISRDNAKNTVVLQMNSLKPEDTALYYCAADRKSVMSIRPDYWGQGTQVTVSSGSGGGGSGGGGSGGGGSFEQVQLQQPGAELVKPGASVKMSCKASGYAFSSYWINWMKQKPGQGLEWIGQIYPGDGDTNYNGKFKGRATLTADTSSSTAYMQLSSLTSEDSAVYFCARSITTVVGCAMDYWGQGTSVTVSSTRIQNPDPAVYQLRDSKSSDKSVCLFTDFDSQTNVSQSKDSDVYITDKTVLDMRSMDFKSNSAVAWSNKSDFACANAFNNSIIPEDTFFPSPESSCGTQAQSDCSSSTVSPGVLAGIVMGDLVLTVLIALAVYFLGRLVPRGRGAAEAATRKQRITETESPYQELQGQRSDVYSDLNTQRPYYKRAKRSGSGVKQTLNFDLLKLAGDVESNPGPSRGHMTEYKPTVRLATRDDVPRAVRTLAAAFADYPATRHTVDPDRHIERVTELQELFLTRVGLDIGKVWVADDGAAVAVWTTPESVEAGAVFAEIGPRMAELSGSRLAAQQQMEGLLAPHRPKEPAWFLATVGVSPDHQGKGLGSAVVLPGVEAAERAGVPAFLETSAPRNLPFYERLGFTVTADVEVPEGPRTWCMTRKPGA

SEQ ID NO: 4356 - protein, 1007 aa, Artificial Sequence
  Synthetic Polypeptide
MALPVTALLLPLALLLHAARPEVQLVESGGGLVQAGGSLRLSCAASGRTFSMGWFRQAPGKEREFVAAITYSGGSPYYADSVKGRFTISRDNAKNTVYLQMNSLKPEDTAVYYCAANPTYGSDWNAENWGQGTQVTVSSLEDLKNVFPPEVAVFEPSEAEISHTQKATLVCLATGFYPDHVELSWWVNGKEVHSGVSTDPQPLKEQPALNDSRYCLSSRLRVSATFWQNPRNHFRCQVQFYGLSENDEWTQDRAKPVTQIVSAEAWGRADCGSIGWLLLQAPRWVFKEEDPIHLRCHSWKNTALHKVTYLQNGKGRKYFHHNSDFYIPKATLKDSGSYFCRGLVGSKNVSSETVNITITQGLAVSTISSFFPPGYQVSFCLVMVLLFAVDTGLYFSVKTNIRSSTRDWKDHKFKWRKDPQDKRAKRSGSGATNFSLLKQAGDVEENPGPTSMDWIWRILFLVGAATGAHSGPEVQLVESGGGLVQAGGSLRLSCAASGRTFTMGWFRQAPGKEREFVAAISLSPTLAYYADSVKGRFTISRDNAKNTVVLQMNSLKPEDTALYYCAADRKSVMSIRPDYWGQGTQVTVSSTRIQNPDPAVYQLRDSKSSDKSVCLFTDFDSQTNVSQSKDSDVYITDKTVLDMRSMDFKSNSAVAWSNKSDFACANAFNNSIIPEDTFFPSPESSCGTQAQSDCSSSTVSPGVLAGIVMGDLVLTVLIALAVYFLGRLVPRGRGAAEAATRKQRITETESPYQELQGQRSDVYSDLNTQRPYYKRAKRSGSGVKQTLNFDLLKLAGDVESNPGPSRGHMTEYKPTVRLATRDDVPRAVRTLAAAFADYPATRHTVDPDRHIERVTELQELFLTRVGLDIGKVWVADDGAAVAVWTTPESVEAGAVFAEIGPRMAELSGSRLAAQQQMEGLLAPHRPKEPAWFLATVGVSPDHQGKGLGSAVVLPGVEAAERAGVPAFLETSAPRNLPFYERLGFTVTADVEVPEGPRTWCMTRKPGA

SEQ ID NO: 4357 - protein, 544 aa, Artificial Sequence; identical to SEQ ID NO: 4058
  Synthetic Polypeptide

SEQ ID NO: 4358 - protein, 709 aa, Artificial Sequence
  Synthetic Polypeptide
MALPVTALLLPLALLLHAARPDIQMTQSPSSLSASVGDRVTITCKASDHINNWLAWYQQKPGQAPKLLIYGATTLETGVPSRFSGSGSGTDYTLTISSLQPEDFATYYCQQSWNTPWTFGQGTKLEIKRLEQAQSDCSSSTVSPGVLAGIVMGDLVLTVLIALAVYFLGRLVPRGRGAAEAATRKQRITETESPYQELQGQRSDVYSDLNTQRPYYKRAKRSGSGATNFSLLKQAGDVEENPGPTSMDWIWRILFLVGAATGAHSFEQVQLQQPGAELVKPGASVKMSCKASGYAFSSYWINWMKQKPGQGLEWIGQIYPGDGDTNYNGKFKGRATLTADTSSSTAYMQLSSLTSEDSAVYFCARSITTVVGCAMDYWGQGTSVTVSSTRQAQSDCSSSTVSPGVLAGIVMGDLVLTVLIALAVYFLGRLVPRGRGAAEAATRKQRITETESPYQELQGQRSDVYSDLNTQRPYYKRAKRSGSGVKQTLNFDLLKLAGDVESNPGPSRGHMTEYKPTVRLATRDDVPRAVRTLAAAFADYPATRHTVDPDRHIERVTELQELFLTRVGLDIGKVWVADDGAAVAVWTTPESVEAGAVFAEIGPRMAELSGSRLAAQQQMEGLLAPHRPKEPAWFLATVGVSPDHQGKGLGSAVVLPGVEAAERAGVPAFLETSAPRNLPFYERLGFTVTADVEVPEGPRTWCMTRKPGA

SEQ ID NO: 4359 - protein, 763 aa, Artificial Sequence
  Synthetic Polypeptide
MALPVTALLLPLALLLHAARPACEVQLLESGGGLIQPGGSLRLSCAASGFTFSSHAMTWVRQAPGKGLEWVSAISGSGDYTHYADSVKGRFTISRDNSKNTVYLQMNSLRAEDSAVYYCAKDEDGGSLLGHRGQGTLVTVSSGTGGGGSGGGGSGGGGSEFGSLEQAQSDCSSSTVSPGVLAGIVMGDLVLTVLIALAVYFLGRLVPRGRGAAEAATRKQRITETESPYQELQGQRSDVYSDLNTQRPYYKRAKRSGSGATNFSLLKQAGDVEENPGPTSATMDWIWRILFLVGAATGAHSGPEVQLVESGGGLVQAGGSLRLSCAASGRTFSMGWFRQAPGKEREFVAAITYSGGSPYYADSVKGRFTISRDNAKNTVYLQMNSLKPEDTAVYYCAANPTYGSDWNAENWGQGTQVTVSSGSGGGGSGGGGSGGGGSFEGSTRQAQSDCSSSTVSPGVLAGIVMGDLVLTVLIALAVYFLGRLVPRGRGAAEAATRKQRITETESPYQELQGQRSDVYSDLNTQRPYYKRAKRSGSGVKQTLNFDLLKLAGDVESNPGPSRGHMTEYKPTVRLATRDDVPRAVRTLAAAFADYPATRHTVDPDRHIERVTELQELFLTRVGLDIGKVWVADDGAAVAVWTTPESVEAGAVFAEIGPRMAELSGSRLAAQQQMEGLLAPHRPKEPAWFLATVGVSPDHQGKGLGSAVVLPGVEAAERAGVPAFLETSAPRNLPFYERLGFTVTADVEVPEGPRTWCMTRKPGA

SEQ ID NO: 4360 - protein, 914 aa, Artificial Sequence
  Synthetic Polypeptide
MALPVTALLLPLALLLHAARPDIQMTQSPSSLSASVGDRVTITCKASDHINNWLAWYQQKPGQAPKLLIYGATTLETGVPSRFSGSGSGTDYTLTISSLQPEDFATYYCQQSWNTPWTFGQGTKLEIKRLEGQPKANPTVTLFPPSSEELQANKATLVCLISDFYPGAVTVAWKADGSPVKAGVETTKPSKQSNNKYAASSYLSLTPEQWKSHRSYSCQVTHEGSTVEKTVAPTECSGSQAQSDCSSSTVSPGVLAGIVMGDLVLTVLIALAVYFLGRLVPRGRGAAEAATRKQRITETESPYQELQGQRSDVYSDLNTQRPYYKRAKRSGSGATNFSLLKQAGDVEENPGPTSMDWIWRILFLVGAATGAHSFEQVQLQQPGAELVKPGASVKMSCKASGYAFSSYWINWMKQKPGQGLEWIGQIYPGDGDTNYNGKFKGRATLTADTSSSTAYMQLSSLTSEDSAVYFCARSITTVVGCAMDYWGQGTSVTVSSTRASTKGPSVFPLAPSSKSTSGGTAALGCLVKDYFPEPVTVSWNSGALTSGVHTFPAVLQSSGLYSLSSVVTVPSSSLGTQTYICNVNHKPSNTKVDKRVEPKSCGTQAQSDCSSSTVSPGVLAGIVMGDLVLTVLIALAVYFLGRLVPRGRGAAEAATRKQRITETESPYQELQGQRSDVYSDLNTQRPYYKRAKRSGSGVKQTLNFDLLKLAGDVESNPGPSRGGIHTMATYEVLCEVARKLGTDDREVVLFLLNVFIPQPTLAQLIGALRALKEEGRLTFPLLAECLFRAGRRDLLRDLLHLDPRFLERHLAGTMSYFSPYQLTVLHVDGELCARDIRSLIFLSKDTIGSRSTPQTFLHWVYCMENLDLLGPTDVDALMSMLRSLSRVDLQRQVQTLMGLHLSGPSHSQHYRHTP

SEQ ID NO: 4361 - protein, 967 aa, Artificial Sequence
  Synthetic Polypeptide
MALPVTALLLPLALLLHAARPDIQMTQSPSSLSASVGDRVTITCKASDHINNWLAWYQQKPGQAPKLLIYGATTLETGVPSRFSGSGSGTDYTLTISSLQPEDFATYYCQQSWNTPWTFGQGTKLEIKRLEGQPKANPTVTLFPPSSEELQANKATLVCLISDFYPGAVTVAWKADGSPVKAGVETTKPSKQSNNKYAASSYLSLTPEQWKSHRSYSCQVTHEGSTVEKTVAPTECSGSQAQSDCSSSTVSPGVLAGIVMGDLVLTVLIALAVYFLGRLVPRGRGAAEAATRKQRITETESPYQELQGQRSDVYSDLNTQRPYYKRAKRSGSGATNFSLLKQAGDVEENPGPTSMDWIWRILFLVGAATGAHSFEQVQLQQPGAELVKPGASVKMSCKASGYAFSSYWINWMKQKPGQGLEWIGQIYPGDGDTNYNGKFKGRATLTADTSSSTAYMQLSSLTSEDSAVYFCARSITTVVGCAMDYWGQGTSVTVSSTRASTKGPSVFPLAPSSKSTSGGTAALGCLVKDYFPEPVTVSWNSGALTSGVHTFPAVLQSSGLYSLSSVVTVPSSSLGTQTYICNVNHKPSNTKVDKRVEPKSCGTQAQSDCSSSTVSPGVLAGIVMGDLVLTVLIALAVYFLGRLVPRGRGAAEAATRKQRITETESPYQELQGQRSDVYSDLNTQRPYYKRAKRSGSGVKQTLNFDLLKLAGDVESNPGPSRGGIHTMSDSKEVPSLPFLRHLLEELDSHEDSLLLFLCHDAAPGCTTVTQALCSLSQQRKLTLAALVEMLYVLQRMDLLKSRFGLSKEGAEQLLGTSFLTRYRKLMVCVGEELDSSELRALRLFACNLNPSLSTALSESSRFVELVLALENVGLVSPSSVSVLADMLRTLRRLDLCQQLVEYEQQEQARYRYCYAASPSLPVRTLRRGHGASEHEQLCMPVQESSDSPELLRTPVQESSSDSPEQTT

SEQ ID NO: 4362 - protein, 922 aa, Artificial Sequence
  Synthetic Polypeptide
MALPVTALLLPLALLLHAARPDIQMTQSPSSLSASVGDRVTITCKASDHINNWLAWYQQKPGQAPKLLIYGATTLETGVPSRFSGSGSGTDYTLTISSLQPEDFATYYCQQSWNTPWTFGQGTKLEIKRLEGQPKANPTVTLFPPSSEELQANKATLVCLISDFYPGAVTVAWKADGSPVKAGVETTKPSKQSNNKYAASSYLSLTPEQWKSHRSYSCQVTHEGSTVEKTVAPTECSGSQAQSDCSSSTVSPGVLAGIVMGDLVLTVLIALAVYFLGRLVPRGRGAAEAATRKQRITETESPYQELQGQRSDVYSDLNTQRPYYKRAKRSGSGATNFSLLKQAGDVEENPGPTSMDWIWRILFLVGAATGAHSFEQVQLQQPGAELVKPGASVKMSCKASGYAFSSYWINWMKQKPGQGLEWIGQIYPGDGDTNYNGKFKGRATLTADTSSSTAYMQLSSLTSEDSAVYFCARSITTVVGCAMDYWGQGTSVTVSSTRASTKGPSVFPLAPSSKSTSGGTAALGCLVKDYFPEPVTVSWNSGALTSGVHTFPAVLQSSGLYSLSSVVTVPSSSLGTQTYICNVNHKPSNTKVDKRVEPKSCGTQAQSDCSSSTVSPGVLAGIVMGDLVLTVLIALAVYFLGRLVPRGRGAAEAATRKQRITETESPYQELQGQRSDVYSDLNTQRPYYKRAKRSGSGVKQTLNFDLLKLAGDVESNPGPSRGHMTEYKPTVRLATRDDVPRAVRTLAAAFADYPATRHTVDPDRHIERVTELQELFLTRVGLDIGKVWVADDGAAVAVWTTPESVEAGAVFAEIGPRMAELSGSRLAAQQQMEGLLAPHRPKEPAWFLATVGVSPDHQGKGLGSAVVLPGVEAAERAGVPAFLETSAPRNLPFYERLGFTVTADVEVPEGPRTWCMTRKPGA

SEQ ID NO: 4363 - protein, 1059 aa, Artificial Sequence
  Synthetic Polypeptide
MALPVTALLLPLALLLHAARPEVQLVESGGGLVQAGGSLRLSCAASGRTFSMGWFRQAPGKEREFVAAITYSGGSPYYADSVKGRFTISRDNAKNTVYLQMNSLKPEDTAVYYCAANPTYGSDWNAENWGQGTQVTVSSGTGGGGSGGGGSGGGGSEFDIQMTQSPSSLSASVGDRVTITCKASDHINNWLAWYQQKPGQAPKLLIYGATTLETGVPSRFSGSGSGTDYTLTISSLQPEDFATYYCQQSWNTPWTFGQGTKLEIKRLEGQPKANPTVTLFPPSSEELQANKATLVCLISDFYPGAVTVAWKADGSPVKAGVETTKPSKQSNNKYAASSYLSLTPEQWKSHRSYSCQVTHEGSTVEKTVAPTECSGSQAQSDCSSSTVSPGVLAGIVMGDLVLTVLIALAVYFLGRLVPRGRGAAEAATRKQRITETESPYQELQGQRSDVYSDLNTQRPYYKRAKRSGSGATNFSLLKQAGDVEENPGPTSMDWIWRILFLVGAATGAHSFEQVQLQQPGAELVKPGASVKMSCKASGYAFSSYWINWMKQKPGQGLEWIGQIYPGDGDTNYNGKFKGRATLTADTSSSTAYMQLSSLTSEDSAVYFCARSITTVVGCAMDYWGQGTSVTVSSTRASTKGPSVFPLAPSSKSTSGGTAALGCLVKDYFPEPVTVSWNSGALTSGVHTFPAVLQSSGLYSLSSVVTVPSSSLGTQTYICNVNHKPSNTKVDKRVEPKSCGTQAQSDCSSSTVSPGVLAGIVMGDLVLTVLIALAVYFLGRLVPRGRGAAEAATRKQRITETESPYQELQGQRSDVYSDLNTQRPYYKRAKRSGSGVKQTLNFDLLKLAGDVESNPGPSRGHMTEYKPTVRLATRDDVPRAVRTLAAAFADYPATRHTVDPDRHIERVTELQELFLTRVGLDIGKVWVADDGAAVAVWTTPESVEAGAVFAEIGPRMAELSGSRLAAQQQMEGLLAPHRPKEPAWFLATVGVSPDHQGKGLGSAVVLPGVEAAERAGVPAFLETSAPRNLPFYERLGFTVTADVEVPEGPRTWCMTRKPGA

SEQ ID NO: 4364 - protein, 1196 aa, Artificial Sequence
  Synthetic Polypeptide
MALPVTALLLPLALLLHAARPEVQLVESGGGLVQAGGSLRLSCAASGRTFSMGWFRQAPGKEREFVAAITYSGGSPYYADSVKGRFTISRDNAKNTVYLQMNSLKPEDTAVYYCAANPTYGSDWNAENWGQGTQVTVSSGTGGGGSGGGGSGGGGSEFDIQMTQSPSSLSASVGDRVTITCKASDHINNWLAWYQQKPGQAPKLLIYGATTLETGVPSRFSGSGSGTDYTLTISSLQPEDFATYYCQQSWNTPWTFGQGTKLEIKRLEGQPKANPTVTLFPPSSEELQANKATLVCLISDFYPGAVTVAWKADGSPVKAGVETTKPSKQSNNKYAASSYLSLTPEQWKSHRSYSCQVTHEGSTVEKTVAPTECSGSQAQSDCSSSTVSPGVLAGIVMGDLVLTVLIALAVYFLGRLVPRGRGAAEAATRKQRITETESPYQELQGQRSDVYSDLNTQRPYYKRAKRSGSGATNFSLLKQAGDVEENPGPTSMDWIWRILFLVGAATGAHSGPEVQLVESGGGLVQAGGSLRLSCAASGRTFTMGWFRQAPGKEREFVAAISLSPTLAYYADSVKGRFTISRDNAKNTVVLQMNSLKPEDTALYYCAADRKSVMSIRPDYWGQGTQVTVSSGSGGGGSGGGGSGGGGSFEQVQLQQPGAELVKPGASVKMSCKASGYAFSSYWINWMKQKPGQGLEWIGQIYPGDGDTNYNGKFKGRATLTADTSSSTAYMQLSSLTSEDSAVYFCARSITTVVGCAMDYWGQGTSVTVSSTRASTKGPSVFPLAPSSKSTSGGTAALGCLVKDYFPEPVTVSWNSGALTSGVHTFPAVLQSSGLYSLSSVVTVPSSSLGTQTYICNVNHKPSNTKVDKRVEPKSCGTQAQSDCSSSTVSPGVLAGIVMGDLVLTVLIALAVYFLGRLVPRGRGAAEAATRKQRITETESPYQELQGQRSDVYSDLNTQRPYYKRAKRSGSGVKQTLNFDLLKLAGDVESNPGPSRGHMTEYKPTVRLATRDDVPRAVRTLAAAFADYPATRHTVDPDRHIERVTELQELFLTRVGLDIGKVWVADDGAAVAVWTTPESVEAGAVFAEIGPRMAELSGSRLAAQQQMEGLLAPHRPKEPAWFLATVGVSPDHQGKGLGSAVVLPGVEAAERAGVPAFLETSAPRNLPFYERLGFTVTADVEVPEGPRTWCMTRKPGA

SEQ ID NO: 4365 - protein, 929 aa, Artificial Sequence
  Synthetic Polypeptide
MALPVTALLLPLALLLHAARPEVQLVESGGGLVQAGGSLRLSCAASGRTFSMGWFRQAPGKEREFVAAITYSGGSPYYADSVKGRFTISRDNAKNTVYLQMNSLKPEDTAVYYCAANPTYGSDWNAENWGQGTQVTVSSLEGQPKANPTVTLFPPSSEELQANKATLVCLISDFYPGAVTVAWKADGSPVKAGVETTKPSKQSNNKYAASSYLSLTPEQWKSHRSYSCQVTHEGSTVEKTVAPTECSGSQAQSDCSSSTVSPGVLAGIVMGDLVLTVLIALAVYFLGRLVPRGRGAAEAATRKQRITETESPYQELQGQRSDVYSDLNTQRPYYKRAKRSGSGATNFSLLKQAGDVEENPGPTSMDWIWRILFLVGAATGAHSGPEVQLVESGGGLVQAGGSLRLSCAASGRTFTMGWFRQAPGKEREFVAAISLSPTLAYYADSVKGRFTISRDNAKNTVVLQMNSLKPEDTALYYCAADRKSVMSIRPDYWGQGTQVTVSSTRASTKGPSVFPLAPSSKSTSGGTAALGCLVKDYFPEPVTVSWNSGALTSGVHTFPAVLQSSGLYSLSSVVTVPSSSLGTQTYICNVNHKPSNTKVDKRVEPKSCGTQAQSDCSSSTVSPGVLAGIVMGDLVLTVLIALAVYFLGRLVPRGRGAAEAATRKQRITETESPYQELQGQRSDVYSDLNTQRPYYKRAKRSGSGVKQTLNFDLLKLAGDVESNPGPSRGHMTEYKPTVRLATRDDVPRAVRTLAAAFADYPATRHTVDPDRHIERVTELQELFLTRVGLDIGKVWVADDGAAVAVWTTPESVEAGAVFAEIGPRMAELSGSRLAAQQQMEGLLAPHRPKEPAWFLATVGVSPDHQGKGLGSAVVLPGVEAAERAGVPAFLETSAPRNLPFYERLGFTVTADVEVPEGPRTWCMTRKPGA

SEQ ID NO: 4366 - protein, 937 aa, Artificial Sequence
  Synthetic Polypeptide
MALPVTALLLPLALLLHAARPDIQMTQSPSSLSASVGDRVTITCKASDHINNWLAWYQQKPGQAPKLLIYGATTLETGVPSRFSGSGSGTDYTLTISSLQPEDFATYYCQQSWNTPWTFGQGTKLEIKRLEDLKNVFPPEVAVFEPSEAEISHTQKATLVCLATGFYPDHVELSWWVNGKEVHSGVSTDPQPLKEQPALNDSRYCLSSRLRVSATFWQNPRNHFRCQVQFYGLSENDEWTQDRAKPVTQIVSAEAWGRADCGSQAQSDCSSSTVSPGVLAGIVMGDLVLTVLIALAVYFLGRLVPRGRGAAEAATRKQRITETESPYQELQGQRSDVYSDLNTQRPYYKRAKRSGSGATNFSLLKQAGDVEENPGPTSMDWIWRILFLVGAATGAHSFEQVQLQQPGAELVKPGASVKMSCKASGYAFSSYWINWMKQKPGQGLEWIGQIYPGDGDTNYNGKFKGRATLTADTSSSTAYMQLSSLTSEDSAVYFCARSITTVVGCAMDYWGQGTSVTVSSTRIQNPDPAVYQLRDSKSSDKSVCLFTDFDSQTNVSQSKDSDVYITDKTVLDMRSMDFKSNSAVAWSNKSDFACANAFNNSIIPEDTFFPSPESSCGTQAQSDCSSSTVSPGVLAGIVMGDLVLTVLIALAVYFLGRLVPRGRGAAEAATRKQRITETESPYQELQGQRSDVYSDLNTQRPYYKRAKRSGSGVKQTLNFDLLKLAGDVESNPGPSRGHMTEYKPTVRLATRDDVPRAVRTLAAAFADYPATRHTVDPDRHIERVTELQELFLTRVGLDIGKVWVADDGAAVAVWTTPESVEAGAVFAEIGPRMAELSGSRLAAQQQMEGLLAPHRPKEPAWFLATVGVSPDHQGKGLGSAVVLPGVEAAERAGVPAFLETSAPRNLPFYERLGFTVTADVEVPEGPRTWCMTRKPGA

SEQ ID NO: 4367 - protein, 1074 aa, Artificial Sequence
  Synthetic Polypeptide
MALPVTALLLPLALLLHAARPEVQLVESGGGLVQAGGSLRLSCAASGRTFSMGWFRQAPGKEREFVAAITYSGGSPYYADSVKGRFTISRDNAKNTVYLQMNSLKPEDTAVYYCAANPTYGSDWNAENWGQGTQVTVSSGTGGGGSGGGGSGGGGSEFDIQMTQSPSSLSASVGDRVTITCKASDHINNWLAWYQQKPGQAPKLLIYGATTLETGVPSRFSGSGSGTDYTLTISSLQPEDFATYYCQQSWNTPWTFGQGTKLEIKRLEDLKNVFPPEVAVFEPSEAEISHTQKATLVCLATGFYPDHVELSWWVNGKEVHSGVSTDPQPLKEQPALNDSRYCLSSRLRVSATFWQNPRNHFRCQVQFYGLSENDEWTQDRAKPVTQIVSAEAWGRADCGSQAQSDCSSSTVSPGVLAGIVMGDLVLTVLIALAVYFLGRLVPRGRGAAEAATRKQRITETESPYQELQGQRSDVYSDLNTQRPYYKRAKRSGSGATNFSLLKQAGDVEENPGPTSMDWIWRILFLVGAATGAHSFEQVQLQQPGAELVKPGASVKMSCKASGYAFSSYWINWMKQKPGQGLEWIGQIYPGDGDTNYNGKFKGRATLTADTSSSTAYMQLSSLTSEDSAVYFCARSITTVVGCAMDYWGQGTSVTVSSTRIQNPDPAVYQLRDSKSSDKSVCLFTDFDSQTNVSQSKDSDVYITDKTVLDMRSMDFKSNSAVAWSNKSDFACANAFNNSIIPEDTFFPSPESSCGTQAQSDCSSSTVSPGVLAGIVMGDLVLTVLIALAVYFLGRLVPRGRGAAEAATRKQRITETESPYQELQGQRSDVYSDLNTQRPYYKRAKRSGSGVKQTLNFDLLKLAGDVESNPGPSRGHMTEYKPTVRLATRDDVPRAVRTLAAAFADYPATRHTVDPDRHIERVTELQELFLTRVGLDIGKVWVADDGAAVAVWTTPESVEAGAVFAEIGPRMAELSGSRLAAQQQMEGLLAPHRPKEPAWFLATVGVSPDHQGKGLGSAVVLPGVEAAERAGVPAFLETSAPRNLPFYERLGFTVTADVEVPEGPRTWCMTRKPGA

SEQ ID NO: 4368 - protein, 1211 aa, Artificial Sequence
  Synthetic Polypeptide
MALPVTALLLPLALLLHAARPEVQLVESGGGLVQAGGSLRLSCAASGRTFSMGWFRQAPGKEREFVAAITYSGGSPYYADSVKGRFTISRDNAKNTVYLQMNSLKPEDTAVYYCAANPTYGSDWNAENWGQGTQVTVSSGTGGGGSGGGGSGGGGSEFDIQMTQSPSSLSASVGDRVTITCKASDHINNWLAWYQQKPGQAPKLLIYGATTLETGVPSRFSGSGSGTDYTLTISSLQPEDFATYYCQQSWNTPWTFGQGTKLEIKRLEDLKNVFPPEVAVFEPSEAEISHTQKATLVCLATGFYPDHVELSWWVNGKEVHSGVSTDPQPLKEQPALNDSRYCLSSRLRVSATFWQNPRNHFRCQVQFYGLSENDEWTQDRAKPVTQIVSAEAWGRADCGSQAQSDCSSSTVSPGVLAGIVMGDLVLTVLIALAVYFLGRLVPRGRGAAEAATRKQRITETESPYQELQGQRSDVYSDLNTQRPYYKRAKRSGSGATNFSLLKQAGDVEENPGPTSMDWIWRILFLVGAATGAHSGPEVQLVESGGGLVQAGGSLRLSCAASGRTFTMGWFRQAPGKEREFVAAISLSPTLAYYADSVKGRFTISRDNAKNTVVLQMNSLKPEDTALYYCAADRKSVMSIRPDYWGQGTQVTVSSGSGGGGSGGGGSGGGGSFEQVQLQQPGAELVKPGASVKMSCKASGYAFSSYWINWMKQKPGQGLEWIGQIYPGDGDTNYNGKFKGRATLTADTSSSTAYMQLSSLTSEDSAVYFCARSITTVVGCAMDYWGQGTSVTVSSTRIQNPDPAVYQLRDSKSSDKSVCLFTDFDSQTNVSQSKDSDVYITDKTVLDMRSMDFKSNSAVAWSNKSDFACANAFNNSIIPEDTFFPSPESSCGTQAQSDCSSSTVSPGVLAGIVMGDLVLTVLIALAVYFLGRLVPRGRGAAEAATRKQRITETESPYQELQGQRSDVYSDLNTQRPYYKRAKRSGSGVKQTLNFDLLKLAGDVESNPGPSRGHMTEYKPTVRLATRDDVPRAVRTLAAAFADYPATRHTVDPDRHIERVTELQELFLTRVGLDIGKVWVADDGAAVAVWTTPESVEAGAVFAEIGPRMAELSGSRLAAQQQMEGLLAPHRPKEPAWFLATVGVSPDHQGKGLGSAVVLPGVEAAERAGVPAFLETSAPRNLPFYERLGFTVTADVEVPEGPRTWCMTRKPGA

SEQ ID NO: 4369 - protein, 944 aa, Artificial Sequence
  Synthetic Polypeptide
MALPVTALLLPLALLLHAARPEVQLVESGGGLVQAGGSLRLSCAASGRTFSMGWFRQAPGKEREFVAAITYSGGSPYYADSVKGRFTISRDNAKNTVYLQMNSLKPEDTAVYYCAANPTYGSDWNAENWGQGTQVTVSSLEDLKNVFPPEVAVFEPSEAEISHTQKATLVCLATGFYPDHVELSWWVNGKEVHSGVSTDPQPLKEQPALNDSRYCLSSRLRVSATFWQNPRNHFRCQVQFYGLSENDEWTQDRAKPVTQIVSAEAWGRADCGSQAQSDCSSSTVSPGVLAGIVMGDLVLTVLIALAVYFLGRLVPRGRGAAEAATRKQRITETESPYQELQGQRSDVYSDLNTQRPYYKRAKRSGSGATNFSLLKQAGDVEENPGPTSMDWIWRILFLVGAATGAHSGPEVQLVESGGGLVQAGGSLRLSCAASGRTFTMGWFRQAPGKEREFVAAISLSPTLAYYADSVKGRFTISRDNAKNTVVLQMNSLKPEDTALYYCAADRKSVMSIRPDYWGQGTQVTVSSTRIQNPDPAVYQLRDSKSSDKSVCLFTDFDSQTNVSQSKDSDVYITDKTVLDMRSMDFKSNSAVAWSNKSDFACANAFNNSIIPEDTFFPSPESSCGTQAQSDCSSSTVSPGVLAGIVMGDLVLTVLIALAVYFLGRLVPRGRGAAEAATRKQRITETESPYQELQGQRSDVYSDLNTQRPYYKRAKRSGSGVKQTLNFDLLKLAGDVESNPGPSRGHMTEYKPTVRLATRDDVPRAVRTLAAAFADYPATRHTVDPDRHIERVTELQELFLTRVGLDIGKVWVADDGAAVAVWTTPESVEAGAVFAEIGPRMAELSGSRLAAQQQMEGLLAPHRPKEPAWFLATVGVSPDHQGKGLGSAVVLPGVEAAERAGVPAFLETSAPRNLPFYERLGFTVTADVEVPEGPRTWCMTRKPGA

SEQ ID NO: 4370 - protein, 481 aa, Artificial Sequence
  Synthetic Polypeptide
MALPVTALLLPLALLLHAARPACEVQLLESGGGLIQPGGSLRLSCAASGFTFSSHAMTWVRQAPGKGLEWVSAISGSGDYTHYADSVKGRFTISRDNSKNTVYLQMNSLRAEDSAVYYCAKDEDGGSLLGHRGQGTLVTVSSGTGGGGSGGGGSGGGGSEFGSLEQAQSDCSSSTVSPGVLAGIVMGDLVLTVLIALAVYFLGRLVPRGRGAAEAATRKQRITETESPYQELQGQRSDVYSDLNTQRPYYKRAKRSGSGATNFSLLKQAGDVEENPGPTRGHMTEYKPTVRLATRDDVPRAVRTLAAAFADYPATRHTVDPDRHIERVTELQELFLTRVGLDIGKVWVADDGAAVAVWTTPESVEAGAVFAEIGPRMAELSGSRLAAQQQMEGLLAPHRPKEPAWFLATVGVSPDHQGKGLGSAVVLPGVEAAERAGVPAFLETSAPRNLPFYERLGFTVTADVEVPEGPRTWCMTRKPGA

SEQ ID NO: 4371 - protein, 760 aa, Artificial Sequence
  Synthetic Polypeptide
MALPVTALLLPLALLLHAARPDIQMTQSPSSLSASVGDRVTITCKASDHINNWLAWYQQKPGQAPKLLIYGATTLETGVPSRFSGSGSGTDYTLTISSLQPEDFATYYCQQSWNTPWTFGQGTKLEIKRLEIGWLLLQAPRWVFKEEDPIHLRCHSWKNTALHKVTYLQNGKGRKYFHHNSDFYIPKATLKDSGSYFCRGLVGSKNVSSETVNITITQGLAVSTISSFFPPGYQVSFCLVMVLLFAVDTGLYFSVKTNIRSSTRDWKDHKFKWRKDPQDKRAKRSGSGATNFSLLKQAGDVEENPGPTSMDWIWRILFLVGAATGAHSFEQVQLQQPGAELVKPGASVKMSCKASGYAFSSYWINWMKQKPGQGLEWIGQIYPGDGDTNYNGKFKGRATLTADTSSSTAYMQLSSLTSEDSAVYFCARSITTVVGCAMDYWGQGTSVTVSSTRTTPGERSSLPAFYPGTSGSCSGCGSLSLPLLAGLVAADAVASLLIVGAVFLCARPRRSPAQEDGKVYINMPGRGRAKRSGSGVKQTLNFDLLKLAGDVESNPGPSRGHMTEYKPTVRLATRDDVPRAVRTLAAAFADYPATRHTVDPDRHIERVTELQELFLTRVGLDIGKVWVADDGAAVAVWTTPESVEAGAVFAEIGPRMAELSGSRLAAQQQMEGLLAPHRPKEPAWFLATVGVSPDHQGKGLGSAVVLPGVEAAERAGVPAFLETSAPRNLPFYERLGFTVTADVEVPEGPRTWCMTRKPGA

SEQ ID NO: 4372 - protein, 814 aa, Artificial Sequence
  Synthetic Polypeptide
MALPVTALLLPLALLLHAARPACEVQLLESGGGLIQPGGSLRLSCAASGFTFSSHAMTWVRQAPGKGLEWVSAISGSGDYTHYADSVKGRFTISRDNSKNTVYLQMNSLRAEDSAVYYCAKDEDGGSLLGHRGQGTLVTVSSGTGGGGSGGGGSGGGGSEFGSLEIGWLLLQAPRWVFKEEDPIHLRCHSWKNTALHKVTYLQNGKGRKYFHHNSDFYIPKATLKDSGSYFCRGLVGSKNVSSETVNITITQGLAVSTISSFFPPGYQVSFCLVMVLLFAVDTGLYFSVKTNIRSSTRDWKDHKFKWRKDPQDKRAKRSGSGATNFSLLKQAGDVEENPGPTSATMDWIWRILFLVGAATGAHSGPEVQLVESGGGLVQAGGSLRLSCAASGRTFSMGWFRQAPGKEREFVAAITYSGGSPYYADSVKGRFTISRDNAKNTVYLQMNSLKPEDTAVYYCAANPTYGSDWNAENWGQGTQVTVSSGSGGGGSGGGGSGGGGSFEGSTRTTPGERSSLPAFYPGTSGSCSGCGSLSLPLLAGLVAADAVASLLIVGAVFLCARPRRSPAQEDGKVYINMPGRGRAKRSGSGVKQTLNFDLLKLAGDVESNPGPSRGHMTEYKPTVRLATRDDVPRAVRTLAAAFADYPATRHTVDPDRHIERVTELQELFLTRVGLDIGKVWVADDGAAVAVWTTPESVEAGAVFAEIGPRMAELSGSRLAAQQQMEGLLAPHRPKEPAWFLATVGVSPDHQGKGLGSAVVLPGVEAAERAGVPAFLETSAPRNLPFYERLGFTVTADVEVPEGPRTWCMTRKPGA

SEQ ID NO: 4373 - protein, 965 aa, Artificial Sequence
  Synthetic Polypeptide
MALPVTALLLPLALLLHAARPDIQMTQSPSSLSASVGDRVTITCKASDHINNWLAWYQQKPGQAPKLLIYGATTLETGVPSRFSGSGSGTDYTLTISSLQPEDFATYYCQQSWNTPWTFGQGTKLEIKRLEGQPKANPTVTLFPPSSEELQANKATLVCLISDFYPGAVTVAWKADGSPVKAGVETTKPSKQSNNKYAASSYLSLTPEQWKSHRSYSCQVTHEGSTVEKTVAPTECSGSIGWLLLQAPRWVFKEEDPIHLRCHSWKNTALHKVTYLQNGKGRKYFHHNSDFYIPKATLKDSGSYFCRGLVGSKNVSSETVNITITQGLAVSTISSFFPPGYQVSFCLVMVLLFAVDTGLYFSVKTNIRSSTRDWKDHKFKWRKDPQDKRAKRSGSGATNFSLLKQAGDVEENPGPTSMDWIWRILFLVGAATGAHSFEQVQLQQPGAELVKPGASVKMSCKASGYAFSSYWINWMKQKPGQGLEWIGQIYPGDGDTNYNGKFKGRATLTADTSSSTAYMQLSSLTSEDSAVYFCARSITTVVGCAMDYWGQGTSVTVSSTRASTKGPSVFPLAPSSKSTSGGTAALGCLVKDYFPEPVTVSWNSGALTSGVHTFPAVLQSSGLYSLSSVVTVPSSSLGTQTYICNVNHKPSNTKVDKRVEPKSCGTTTPGERSSLPAFYPGTSGSCSGCGSLSLPLLAGLVAADAVASLLIVGAVFLCARPRRSPAQEDGKVYINMPGRGRAKRSGSGVKQTLNFDLLKLAGDVESNPGPSRGGIHTMATYEVLCEVARKLGTDDREVVLFLLNVFIPQPTLAQLIGALRALKEEGRLTFPLLAECLFRAGRRDLLRDLLHLDPRFLERHLAGTMSYFSPYQLTVLHVDGELCARDIRSLIFLSKDTIGSRSTPQTFLHWVYCMENLDLLGPTDVDALMSMLRSLSRVDLQRQVQTLMGLHLSGPSHSQHYRHTP

SEQ ID NO: 4374 - protein, 1018 aa, Artificial Sequence
  Synthetic Polypeptide
MALPVTALLLPLALLLHAARPDIQMTQSPSSLSASVGDRVTITCKASDHINNWLAWYQQKPGQAPKLLIYGATTLETGVPSRFSGSGSGTDYTLTISSLQPEDFATYYCQQSWNTPWTFGQGTKLEIKRLEGQPKANPTVTLFPPSSEELQANKATLVCLISDFYPGAVTVAWKADGSPVKAGVETTKPSKQSNNKYAASSYLSLTPEQWKSHRSYSCQVTHEGSTVEKTVAPTECSGSIGWLLLQAPRWVFKEEDPIHLRCHSWKNTALHKVTYLQNGKGRKYFHHNSDFYIPKATLKDSGSYFCRGLVGSKNVSSETVNITITQGLAVSTISSFFPPGYQVSFCLVMVLLFAVDTGLYFSVKTNIRSSTRDWKDHKFKWRKDPQDKRAKRSGSGATNFSLLKQAGDVEENPGPTSMDWIWRILFLVGAATGAHSFEQVQLQQPGAELVKPGASVKMSCKASGYAFSSYWINWMKQKPGQGLEWIGQIYPGDGDTNYNGKFKGRATLTADTSSSTAYMQLSSLTSEDSAVYFCARSITTVVGCAMDYWGQGTSVTVSSTRASTKGPSVFPLAPSSKSTSGGTAALGCLVKDYFPEPVTVSWNSGALTSGVHTFPAVLQSSGLYSLSSVVTVPSSSLGTQTYICNVNHKPSNTKVDKRVEPKSCGTTTPGERSSLPAFYPGTSGSCSGCGSLSLPLLAGLVAADAVASLLIVGAVFLCARPRRSPAQEDGKVYINMPGRGRAKRSGSGVKQTLNFDLLKLAGDVESNPGPSRGGIHTMSDSKEVPSLPFLRHLLEELDSHEDSLLLFLCHDAAPGCTTVTQALCSLSQQRKLTLAALVEMLYVLQRMDLLKSRFGLSKEGAEQLLGTSFLTRYRKLMVCVGEELDSSELRALRLFACNLNPSLSTALSESSRFVELVLALENVGLVSPSSVSVLADMLRTLRRLDLCQQLVEYEQQEQARYRYCYAASPSLPVRTLRRGHGASEHEQLCMPVQESSDSPELLRTPVQESSSDSPEQTT

SEQ ID NO: 4375 - protein, 973 aa, Artificial Sequence
  Synthetic Polypeptide
MALPVTALLLPLALLLHAARPDIQMTQSPSSLSASVGDRVTITCKASDHINNWLAWYQQKPGQAPKLLIYGATTLETGVPSRFSGSGSGTDYTLTISSLQPEDFATYYCQQSWNTPWTFGQGTKLEIKRLEGQPKANPTVTLFPPSSEELQANKATLVCLISDFYPGAVTVAWKADGSPVKAGVETTKPSKQSNNKYAASSYLSLTPEQWKSHRSYSCQVTHEGSTVEKTVAPTECSGSIGWLLLQAPRWVFKEEDPIHLRCHSWKNTALHKVTYLQNGKGRKYFHHNSDFYIPKATLKDSGSYFCRGLVGSKNVSSETVNITITQGLAVSTISSFFPPGYQVSFCLVMVLLFAVDTGLYFSVKTNIRSSTRDWKDHKFKWRKDPQDKRAKRSGSGATNFSLLKQAGDVEENPGPTSMDWIWRILFLVGAATGAHSFEQVQLQQPGAELVKPGASVKMSCKASGYAFSSYWINWMKQKPGQGLEWIGQIYPGDGDTNYNGKFKGRATLTADTSSSTAYMQLSSLTSEDSAVYFCARSITTVVGCAMDYWGQGTSVTVSSTRASTKGPSVFPLAPSSKSTSGGTAALGCLVKDYFPEPVTVSWNSGALTSGVHTFPAVLQSSGLYSLSSVVTVPSSSLGTQTYICNVNHKPSNTKVDKRVEPKSCGTTTPGERSSLPAFYPGTSGSCSGCGSLSLPLLAGLVAADAVASLLIVGAVFLCARPRRSPAQEDGKVYINMPGRGRAKRSGSGVKQTLNFDLLKLAGDVESNPGPSRGHMTEYKPTVRLATRDDVPRAVRTLAAAFADYPATRHTVDPDRHIERVTELQELFLTRVGLDIGKVWVADDGAAVAVWTTPESVEAGAVFAEIGPRMAELSGSRLAAQQQMEGLLAPHRPKEPAWFLATVGVSPDHQGKGLGSAVVLPGVEAAERAGVPAFLETSAPRNLPFYERLGFTVTADVEVPEGPRTWCMTRKPGA

SEQ ID NO: 4376 - protein, 1110 aa, Artificial Sequence
  Synthetic Polypeptide
MALPVTALLLPLALLLHAARPEVQLVESGGGLVQAGGSLRLSCAASGRTFSMGWFRQAPGKEREFVAAITYSGGSPYYADSVKGRFTISRDNAKNTVYLQMNSLKPEDTAVYYCAANPTYGSDWNAENWGQGTQVTVSSGTGGGGSGGGGSGGGGSEFDIQMTQSPSSLSASVGDRVTITCKASDHINNWLAWYQQKPGQAPKLLIYGATTLETGVPSRFSGSGSGTDYTLTISSLQPEDFATYYCQQSWNTPWTFGQGTKLEIKRLEGQPKANPTVTLFPPSSEELQANKATLVCLISDFYPGAVTVAWKADGSPVKAGVETTKPSKQSNNKYAASSYLSLTPEQWKSHRSYSCQVTHEGSTVEKTVAPTECSGSIGWLLLQAPRWVFKEEDPIHLRCHSWKNTALHKVTYLQNGKGRKYFHHNSDFYIPKATLKDSGSYFCRGLVGSKNVSSETVNITITQGLAVSTISSFFPPGYQVSFCLVMVLLFAVDTGLYFSVKTNIRSSTRDWKDHKFKWRKDPQDKRAKRSGSGATNFSLLKQAGDVEENPGPTSMDWIWRILFLVGAATGAHSFEQVQLQQPGAELVKPGASVKMSCKASGYAFSSYWINWMKQKPGQGLEWIGQIYPGDGDTNYNGKFKGRATLTADTSSSTAYMQLSSLTSEDSAVYFCARSITTVVGCAMDYWGQGTSVTVSSTRASTKGPSVFPLAPSSKSTSGGTAALGCLVKDYFPEPVTVSWNSGALTSGVHTFPAVLQSSGLYSLSSVVTVPSSSLGTQTYICNVNHKPSNTKVDKRVEPKSCGTTTPGERSSLPAFYPGTSGSCSGCGSLSLPLLAGLVAADAVASLLIVGAVFLCARPRRSPAQEDGKVYINMPGRGRAKRSGSGVKQTLNFDLLKLAGDVESNPGPSRGHMTEYKPTVRLATRDDVPRAVRTLAAAFADYPATRHTVDPDRHIERVTELQELFLTRVGLDIGKVWVADDGAAVAVWTTPESVEAGAVFAEIGPRMAELSGSRLAAQQQMEGLLAPHRPKEPAWFLATVGVSPDHQGKGLGSAVVLPGVEAAERAGVPAFLETSAPRNLPFYERLGFTVTADVEVPEGPRTWCMTRKPGA

SEQ ID NO: 4377 - protein, 1247 aa, Artificial Sequence
  Synthetic Polypeptide
MALPVTALLLPLALLLHAARPEVQLVESGGGLVQAGGSLRLSCAASGRTFSMGWFRQAPGKEREFVAAITYSGGSPYYADSVKGRFTISRDNAKNTVYLQMNSLKPEDTAVYYCAANPTYGSDWNAENWGQGTQVTVSSGTGGGGSGGGGSGGGGSEFDIQMTQSPSSLSASVGDRVTITCKASDHINNWLAWYQQKPGQAPKLLIYGATTLETGVPSRFSGSGSGTDYTLTISSLQPEDFATYYCQQSWNTPWTFGQGTKLEIKRLEGQPKANPTVTLFPPSSEELQANKATLVCLISDFYPGAVTVAWKADGSPVKAGVETTKPSKQSNNKYAASSYLSLTPEQWKSHRSYSCQVTHEGSTVEKTVAPTECSGSIGWLLLQAPRWVFKEEDPIHLRCHSWKNTALHKVTYLQNGKGRKYFHHNSDFYIPKATLKDSGSYFCRGLVGSKNVSSETVNITITQGLAVSTISSFFPPGYQVSFCLVMVLLFAVDTGLYFSVKTNIRSSTRDWKDHKFKWRKDPQDKRAKRSGSGATNFSLLKQAGDVEENPGPTSMDWIWRILFLVGAATGAHSGPEVQLVESGGGLVQAGGSLRLSCAASGRTFTMGWFRQAPGKEREFVAAISLSPTLAYYADSVKGRFTISRDNAKNTVVLQMNSLKPEDTALYYCAADRKSVMSIRPDYWGQGTQVTVSSGSGGGGSGGGGSGGGGSFEQVQLQQPGAELVKPGASVKMSCKASGYAFSSYWINWMKQKPGQGLEWIGQIYPGDGDTNYNGKFKGRATLTADTSSSTAYMQLSSLTSEDSAVYFCARSITTVVGCAMDYWGQGTSVTVSSTRASTKGPSVFPLAPSSKSTSGGTAALGCLVKDYFPEPVTVSWNSGALTSGVHTFPAVLQSSGLYSLSSVVTVPSSSLGTQTYICNVNHKPSNTKVDKRVEPKSCGTTTPGERSSLPAFYPGTSGSCSGCGSLSLPLLAGLVAADAVASLLIVGAVFLCARPRRSPAQEDGKVYINMPGRGRAKRSGSGVKQTLNFDLLKLAGDVESNPGPSRGHMTEYKPTVRLATRDDVPRAVRTLAAAFADYPATRHTVDPDRHIERVTELQELFLTRVGLDIGKVWVADDGAAVAVWTTPESVEAGAVFAEIGPRMAELSGSRLAAQQQMEGLLAPHRPKEPAWFLATVGVSPDHQGKGLGSAVVLPGVEAAERAGVPAFLETSAPRNLPFYERLGFTVTADVEVPEGPRTWCMTRKPGA

SEQ ID NO: 4378 - protein, 980 aa, Artificial Sequence
  Synthetic Polypeptide
MALPVTALLLPLALLLHAARPEVQLVESGGGLVQAGGSLRLSCAASGRTFSMGWFRQAPGKEREFVAAITYSGGSPYYADSVKGRFTISRDNAKNTVYLQMNSLKPEDTAVYYCAANPTYGSDWNAENWGQGTQVTVSSLEGQPKANPTVTLFPPSSEELQANKATLVCLISDFYPGAVTVAWKADGSPVKAGVETTKPSKQSNNKYAASSYLSLTPEQWKSHRSYSCQVTHEGSTVEKTVAPTECSGSIGWLLLQAPRWVFKEEDPIHLRCHSWKNTALHKVTYLQNGKGRKYFHHNSDFYIPKATLKDSGSYFCRGLVGSKNVSSETVNITITQGLAVSTISSFFPPGYQVSFCLVMVLLFAVDTGLYFSVKTNIRSSTRDWKDHKFKWRKDPQDKRAKRSGSGATNFSLLKQAGDVEENPGPTSMDWIWRILFLVGAATGAHSGPEVQLVESGGGLVQAGGSLRLSCAASGRTFTMGWFRQAPGKEREFVAAISLSPTLAYYADSVKGRFTISRDNAKNTVVLQMNSLKPEDTALYYCAADRKSVMSIRPDYWGQGTQVTVSSTRASTKGPSVFPLAPSSKSTSGGTAALGCLVKDYFPEPVTVSWNSGALTSGVHTFPAVLQSSGLYSLSSVVTVPSSSLGTQTYICNVNHKPSNTKVDKRVEPKSCGTTTPGERSSLPAFYPGTSGSCSGCGSLSLPLLAGLVAADAVASLLIVGAVFLCARPRRSPAQEDGKVYINMPGRGRAKRSGSGVKQTLNFDLLKLAGDVESNPGPSRGHMTEYKPTVRLATRDDVPRAVRTLAAAFADYPATRHTVDPDRHIERVTELQELFLTRVGLDIGKVWVADDGAAVAVWTTPESVEAGAVFAEIGPRMAELSGSRLAAQQQMEGLLAPHRPKEPAWFLATVGVSPDHQGKGLGSAVVLPGVEAAERAGVPAFLETSAPRNLPFYERLGFTVTADVEVPEGPRTWCMTRKPGA

SEQ ID NO: 4379 - protein, 988 aa, Artificial Sequence
  Synthetic Polypeptide
MALPVTALLLPLALLLHAARPDIQMTQSPSSLSASVGDRVTITCKASDHINNWLAWYQQKPGQAPKLLIYGATTLETGVPSRFSGSGSGTDYTLTISSLQPEDFATYYCQQSWNTPWTFGQGTKLEIKRLEDLKNVFPPEVAVFEPSEAEISHTQKATLVCLATGFYPDHVELSWWVNGKEVHSGVSTDPQPLKEQPALNDSRYCLSSRLRVSATFWQNPRNHFRCQVQFYGLSENDEWTQDRAKPVTQIVSAEAWGRADCGSIGWLLLQAPRWVFKEEDPIHLRCHSWKNTALHKVTYLQNGKGRKYFHHNSDFYIPKATLKDSGSYFCRGLVGSKNVSSETVNITITQGLAVSTISSFFPPGYQVSFCLVMVLLFAVDTGLYFSVKTNIRSSTRDWKDHKFKWRKDPQDKRAKRSGSGATNFSLLKQAGDVEENPGPTSMDWIWRILFLVGAATGAHSFEQVQLQQPGAELVKPGASVKMSCKASGYAFSSYWINWMKQKPGQGLEWIGQIYPGDGDTNYNGKFKGRATLTADTSSSTAYMQLSSLTSEDSAVYFCARSITTVVGCAMDYWGQGTSVTVSSTRIQNPDPAVYQLRDSKSSDKSVCLFTDFDSQTNVSQSKDSDVYITDKTVLDMRSMDFKSNSAVAWSNKSDFACANAFNNSIIPEDTFFPSPESSCGTTTPGERSSLPAFYPGTSGSCSGCGSLSLPLLAGLVAADAVASLLIVGAVFLCARPRRSPAQEDGKVYINMPGRGRAKRSGSGVKQTLNFDLLKLAGDVESNPGPSRGHMTEYKPTVRLATRDDVPRAVRTLAAAFADYPATRHTVDPDRHIERVTELQELFLTRVGLDIGKVWVADDGAAVAVWTTPESVEAGAVFAEIGPRMAELSGSRLAAQQQMEGLLAPHRPKEPAWFLATVGVSPDHQGKGLGSAVVLPGVEAAERAGVPAFLETSAPRNLPFYERLGFTVTADVEVPEGPRTWCMTRKPGA

SEQ ID NO: 4380 - protein, 1125 aa, Artificial Sequence
  Synthetic Polypeptide
MALPVTALLLPLALLLHAARPEVQLVESGGGLVQAGGSLRLSCAASGRTFSMGWFRQAPGKEREFVAAITYSGGSPYYADSVKGRFTISRDNAKNTVYLQMNSLKPEDTAVYYCAANPTYGSDWNAENWGQGTQVTVSSGTGGGGSGGGGSGGGGSEFDIQMTQSPSSLSASVGDRVTITCKASDHINNWLAWYQQKPGQAPKLLIYGATTLETGVPSRFSGSGSGTDYTLTISSLQPEDFATYYCQQSWNTPWTFGQGTKLEIKRLEDLKNVFPPEVAVFEPSEAEISHTQKATLVCLATGFYPDHVELSWWVNGKEVHSGVSTDPQPLKEQPALNDSRYCLSSRLRVSATFWQNPRNHFRCQVQFYGLSENDEWTQDRAKPVTQIVSAEAWGRADCGSIGWLLLQAPRWVFKEEDPIHLRCHSWKNTALHKVTYLQNGKGRKYFHHNSDFYIPKATLKDSGSYFCRGLVGSKNVSSETVNITITQGLAVSTISSFFPPGYQVSFCLVMVLLFAVDTGLYFSVKTNIRSSTRDWKDHKFKWRKDPQDKRAKRSGSGATNFSLLKQAGDVEENPGPTSMDWIWRILFLVGAATGAHSFEQVQLQQPGAELVKPGASVKMSCKASGYAFSSYWINWMKQKPGQGLEWIGQIYPGDGDTNYNGKFKGRATLTADTSSSTAYMQLSSLTSEDSAVYFCARSITTVVGCAMDYWGQGTSVTVSSTRIQNPDPAVYQLRDSKSSDKSVCLFTDFDSQTNVSQSKDSDVYITDKTVLDMRSMDFKSNSAVAWSNKSDFACANAFNNSIIPEDTFFPSPESSCGTTTPGERSSLPAFYPGTSGSCSGCGSLSLPLLAGLVAADAVASLLIVGAVFLCARPRRSPAQEDGKVYINMPGRGRAKRSGSGVKQTLNFDLLKLAGDVESNPGPSRGHMTEYKPTVRLATRDDVPRAVRTLAAAFADYPATRHTVDPDRHIERVTELQELFLTRVGLDIGKVWVADDGAAVAVWTTPESVEAGAVFAEIGPRMAELSGSRLAAQQQMEGLLAPHRPKEPAWFLATVGVSPDHQGKGLGSAVVLPGVEAAERAGVPAFLETSAPRNLPFYERLGFTVTADVEVPEGPRTWCMTRKPGA

SEQ ID NO: 4381 - protein, 1262 aa, Artificial Sequence
  Synthetic Polypeptide
MALPVTALLLPLALLLHAARPEVQLVESGGGLVQAGGSLRLSCAASGRTFSMGWFRQAPGKEREFVAAITYSGGSPYYADSVKGRFTISRDNAKNTVYLQMNSLKPEDTAVYYCAANPTYGSDWNAENWGQGTQVTVSSGTGGGGSGGGGSGGGGSEFDIQMTQSPSSLSASVGDRVTITCKASDHINNWLAWYQQKPGQAPKLLIYGATTLETGVPSRFSGSGSGTDYTLTISSLQPEDFATYYCQQSWNTPWTFGQGTKLEIKRLEDLKNVFPPEVAVFEPSEAEISHTQKATLVCLATGFYPDHVELSWWVNGKEVHSGVSTDPQPLKEQPALNDSRYCLSSRLRVSATFWQNPRNHFRCQVQFYGLSENDEWTQDRAKPVTQIVSAEAWGRADCGSIGWLLLQAPRWVFKEEDPIHLRCHSWKNTALHKVTYLQNGKGRKYFHHNSDFYIPKATLKDSGSYFCRGLVGSKNVSSETVNITITQGLAVSTISSFFPPGYQVSFCLVMVLLFAVDTGLYFSVKTNIRSSTRDWKDHKFKWRKDPQDKRAKRSGSGATNFSLLKQAGDVEENPGPTSMDWIWRILFLVGAATGAHSGPEVQLVESGGGLVQAGGSLRLSCAASGRTFTMGWFRQAPGKEREFVAAISLSPTLAYYADSVKGRFTISRDNAKNTVVLQMNSLKPEDTALYYCAADRKSVMSIRPDYWGQGTQVTVSSGSGGGGSGGGGSGGGGSFEQVQLQQPGAELVKPGASVKMSCKASGYAFSSYWINWMKQKPGQGLEWIGQIYPGDGDTNYNGKFKGRATLTADTSSSTAYMQLSSLTSEDSAVYFCARSITTVVGCAMDYWGQGTSVTVSSTRIQNPDPAVYQLRDSKSSDKSVCLFTDFDSQTNVSQSKDSDVYITDKTVLDMRSMDFKSNSAVAWSNKSDFACANAFNNSIIPEDTFFPSPESSCGTTTPGERSSLPAFYPGTSGSCSGCGSLSLPLLAGLVAADAVASLLIVGAVFLCARPRRSPAQEDGKVYINMPGRGRAKRSGSGVKQTLNFDLLKLAGDVESNPGPSRGHMTEYKPTVRLATRDDVPRAVRTLAAAFADYPATRHTVDPDRHIERVTELQELFLTRVGLDIGKVWVADDGAAVAVWTTPESVEAGAVFAEIGPRMAELSGSRLAAQQQMEGLLAPHRPKEPAWFLATVGVSPDHQGKGLGSAVVLPGVEAAERAGVPAFLETSAPRNLPFYERLGFTVTADVEVPEGPRTWCMTRKPGA

SEQ ID NO: 4382 - protein, 995 aa, Artificial Sequence
  Synthetic Polypeptide
MALPVTALLLPLALLLHAARPEVQLVESGGGLVQAGGSLRLSCAASGRTFSMGWFRQAPGKEREFVAAITYSGGSPYYADSVKGRFTISRDNAKNTVYLQMNSLKPEDTAVYYCAANPTYGSDWNAENWGQGTQVTVSSLEDLKNVFPPEVAVFEPSEAEISHTQKATLVCLATGFYPDHVELSWWVNGKEVHSGVSTDPQPLKEQPALNDSRYCLSSRLRVSATFWQNPRNHFRCQVQFYGLSENDEWTQDRAKPVTQIVSAEAWGRADCGSIGWLLLQAPRWVFKEEDPIHLRCHSWKNTALHKVTYLQNGKGRKYFHHNSDFYIPKATLKDSGSYFCRGLVGSKNVSSETVNITITQGLAVSTISSFFPPGYQVSFCLVMVLLFAVDTGLYFSVKTNIRSSTRDWKDHKFKWRKDPQDKRAKRSGSGATNFSLLKQAGDVEENPGPTSMDWIWRILFLVGAATGAHSGPEVQLVESGGGLVQAGGSLRLSCAASGRTFTMGWFRQAPGKEREFVAAISLSPTLAYYADSVKGRFTISRDNAKNTVVLQMNSLKPEDTALYYCAADRKSVMSIRPDYWGQGTQVTVSSTRIQNPDPAVYQLRDSKSSDKSVCLFTDFDSQTNVSQSKDSDVYITDKTVLDMRSMDFKSNSAVAWSNKSDFACANAFNNSIIPEDTFFPSPESSCGTTTPGERSSLPAFYPGTSGSCSGCGSLSLPLLAGLVAADAVASLLIVGAVFLCARPRRSPAQEDGKVYINMPGRGRAKRSGSGVKQTLNFDLLKLAGDVESNPGPSRGHMTEYKPTVRLATRDDVPRAVRTLAAAFADYPATRHTVDPDRHIERVTELQELFLTRVGLDIGKVWVADDGAAVAVWTTPESVEAGAVFAEIGPRMAELSGSRLAAQQQMEGLLAPHRPKEPAWFLATVGVSPDHQGKGLGSAVVLPGVEAAERAGVPAFLETSAPRNLPFYERLGFTVTADVEVPEGPRTWCMTRKPGA

SEQ ID NO: 4383 - protein, 544 aa, Artificial Sequence; identical to SEQ ID NO: 4058
  Synthetic Polypeptide

SEQ ID NO: 4384 - protein, 685 aa, Artificial Sequence
  Synthetic Polypeptide
MALPVTALLLPLALLLHAARPDIQMTQSPSSLSASVGDRVTITCKASDHINNWLAWYQQKPGQAPKLLIYGATTLETGVPSRFSGSGSGTDYTLTISSLQPEDFATYYCQQSWNTPWTFGQGTKLEIKRLETTPGERSSLPAFYPGTSGSCSGCGSLSLPLLAGLVAADAVASLLIVGAVFLCARPRRSPAQEDGKVYINMPGRGRAKRSGSGATNFSLLKQAGDVEENPGPTSMDWIWRILFLVGAATGAHSFEQVQLQQPGAELVKPGASVKMSCKASGYAFSSYWINWMKQKPGQGLEWIGQIYPGDGDTNYNGKFKGRATLTADTSSSTAYMQLSSLTSEDSAVYFCARSITTVVGCAMDYWGQGTSVTVSSTRTTPGERSSLPAFYPGTSGSCSGCGSLSLPLLAGLVAADAVASLLIVGAVFLCARPRRSPAQEDGKVYINMPGRGRAKRSGSGVKQTLNFDLLKLAGDVESNPGPSRGHMTEYKPTVRLATRDDVPRAVRTLAAAFADYPATRHTVDPDRHIERVTELQELFLTRVGLDIGKVWVADDGAAVAVWTTPESVEAGAVFAEIGPRMAELSGSRLAAQQQMEGLLAPHRPKEPAWFLATVGVSPDHQGKGLGSAVVLPGVEAAERAGVPAFLETSAPRNLPFYERLGFTVTADVEVPEGPRTWCMTRKPGA

SEQ ID NO: 4385 - protein, 739 aa, Artificial Sequence
  Synthetic Polypeptide
MALPVTALLLPLALLLHAARPACEVQLLESGGGLIQPGGSLRLSCAASGFTFSSHAMTWVRQAPGKGLEWVSAISGSGDYTHYADSVKGRFTISRDNSKNTVYLQMNSLRAEDSAVYYCAKDEDGGSLLGHRGQGTLVTVSSGTGGGGSGGGGSGGGGSEFGSLETTPGERSSLPAFYPGTSGSCSGCGSLSLPLLAGLVAADAVASLLIVGAVFLCARPRRSPAQEDGKVYINMPGRGRAKRSGSGATNFSLLKQAGDVEENPGPTSATMDWIWRILFLVGAATGAHSGPEVQLVESGGGLVQAGGSLRLSCAASGRTFSMGWFRQAPGKEREFVAAITYSGGSPYYADSVKGRFTISRDNAKNTVYLQMNSLKPEDTAVYYCAANPTYGSDWNAENWGQGTQVTVSSGSGGGGSGGGGSGGGGSFEGSTRTTPGERSSLPAFYPGTSGSCSGCGSLSLPLLAGLVAADAVASLLIVGAVFLCARPRRSPAQEDGKVYINMPGRGRAKRSGSGVKQTLNFDLLKLAGDVESNPGPSRGHMTEYKPTVRLATRDDVPRAVRTLAAAFADYPATRHTVDPDRHIERVTELQELFLTRVGLDIGKVWVADDGAAVAVWTTPESVEAGAVFAEIGPRMAELSGSRLAAQQQMEGLLAPHRPKEPAWFLATVGVSPDHQGKGLGSAVVLPGVEAAERAGVPAFLETSAPRNLPFYERLGFTVTADVEVPEGPRTWCMTRKPGA

SEQ ID NO: 4386 - protein, 890 aa, Artificial Sequence
  Synthetic Polypeptide
MALPVTALLLPLALLLHAARPDIQMTQSPSSLSASVGDRVTITCKASDHINNWLAWYQQKPGQAPKLLIYGATTLETGVPSRFSGSGSGTDYTLTISSLQPEDFATYYCQQSWNTPWTFGQGTKLEIKRLEGQPKANPTVTLFPPSSEELQANKATLVCLISDFYPGAVTVAWKADGSPVKAGVETTKPSKQSNNKYAASSYLSLTPEQWKSHRSYSCQVTHEGSTVEKTVAPTECSGSTTPGERSSLPAFYPGTSGSCSGCGSLSLPLLAGLVAADAVASLLIVGAVFLCARPRRSPAQEDGKVYINMPGRGRAKRSGSGATNFSLLKQAGDVEENPGPTSMDWIWRILFLVGAATGAHSFEQVQLQQPGAELVKPGASVKMSCKASGYAFSSYWINWMKQKPGQGLEWIGQIYPGDGDTNYNGKFKGRATLTADTSSSTAYMQLSSLTSEDSAVYFCARSITTVVGCAMDYWGQGTSVTVSSTRASTKGPSVFPLAPSSKSTSGGTAALGCLVKDYFPEPVTVSWNSGALTSGVHTFPAVLQSSGLYSLSSVVTVPSSSLGTQTYICNVNHKPSNTKVDKRVEPKSCGTTTPGERSSLPAFYPGTSGSCSGCGSLSLPLLAGLVAADAVASLLIVGAVFLCARPRRSPAQEDGKVYINMPGRGRAKRSGSGVKQTLNFDLLKLAGDVESNPGPSRGGIHTMATYEVLCEVARKLGTDDREVVLFLLNVFIPQPTLAQLIGALRALKEEGRLTFPLLAECLFRAGRRDLLRDLLHLDPRFLERHLAGTMSYFSPYQLTVLHVDGELCARDIRSLIFLSKDTIGSRSTPQTFLHWVYCMENLDLLGPTDVDALMSMLRSLSRVDLQRQVQTLMGLHLSGPSHSQHYRHTP

SEQ ID NO: 4387 - protein, 943 aa, Artificial Sequence
  Synthetic Polypeptide
MALPVTALLLPLALLLHAARPDIQMTQSPSSLSASVGDRVTITCKASDHINNWLAWYQQKPGQAPKLLIYGATTLETGVPSRFSGSGSGTDYTLTISSLQPEDFATYYCQQSWNTPWTFGQGTKLEIKRLEGQPKANPTVTLFPPSSEELQANKATLVCLISDFYPGAVTVAWKADGSPVKAGVETTKPSKQSNNKYAASSYLSLTPEQWKSHRSYSCQVTHEGSTVEKTVAPTECSGSTTPGERSSLPAFYPGTSGSCSGCGSLSLPLLAGLVAADAVASLLIVGAVFLCARPRRSPAQEDGKVYINMPGRGRAKRSGSGATNFSLLKQAGDVEENPGPTSMDWIWRILFLVGAATGAHSFEQVQLQQPGAELVKPGASVKMSCKASGYAFSSYWINWMKQKPGQGLEWIGQIYPGDGDTNYNGKFKGRATLTADTSSSTAYMQLSSLTSEDSAVYFCARSITTVVGCAMDYWGQGTSVTVSSTRASTKGPSVFPLAPSSKSTSGGTAALGCLVKDYFPEPVTVSWNSGALTSGVHTFPAVLQSSGLYSLSSVVTVPSSSLGTQTYICNVNHKPSNTKVDKRVEPKSCGTTTPGERSSLPAFYPGTSGSCSGCGSLSLPLLAGLVAADAVASLLIVGAVFLCARPRRSPAQEDGKVYINMPGRGRAKRSGSGVKQTLNFDLLKLAGDVESNPGPSRGGIHTMSDSKEVPSLPFLRHLLEELDSHEDSLLLFLCHDAAPGCTTVTQALCSLSQQRKLTLAALVEMLYVLQRMDLLKSRFGLSKEGAEQLLGTSFLTRYRKLMVCVGEELDSSELRALRLFACNLNPSLSTALSESSRFVELVLALENVGLVSPSSVSVLADMLRTLRRLDLCQQLVEYEQQEQARYRYCYAASPSLPVRTLRRGHGASEHEQLCMPVQESSDSPELLRTPVQESSSDSPEQTT

SEQ ID NO: 4388 - protein, 898 aa, Artificial Sequence
  Synthetic Polypeptide
MALPVTALLLPLALLLHAARPDIQMTQSPSSLSASVGDRVTITCKASDHINNWLAWYQQKPGQAPKLLIYGATTLETGVPSRFSGSGSGTDYTLTISSLQPEDFATYYCQQSWNTPWTFGQGTKLEIKRLEGQPKANPTVTLFPPSSEELQANKATLVCLISDFYPGAVTVAWKADGSPVKAGVETTKPSKQSNNKYAASSYLSLTPEQWKSHRSYSCQVTHEGSTVEKTVAPTECSGSTTPGERSSLPAFYPGTSGSCSGCGSLSLPLLAGLVAADAVASLLIVGAVFLCARPRRSPAQEDGKVYINMPGRGRAKRSGSGATNFSLLKQAGDVEENPGPTSMDWIWRILFLVGAATGAHSFEQVQLQQPGAELVKPGASVKMSCKASGYAFSSYWINWMKQKPGQGLEWIGQIYPGDGDTNYNGKFKGRATLTADTSSSTAYMQLSSLTSEDSAVYFCARSITTVVGCAMDYWGQGTSVTVSSTRASTKGPSVFPLAPSSKSTSGGTAALGCLVKDYFPEPVTVSWNSGALTSGVHTFPAVLQSSGLYSLSSVVTVPSSSLGTQTYICNVNHKPSNTKVDKRVEPKSCGTTTPGERSSLPAFYPGTSGSCSGCGSLSLPLLAGLVAADAVASLLIVGAVFLCARPRRSPAQEDGKVYINMPGRGRAKRSGSGVKQTLNFDLLKLAGDVESNPGPSRGHMTEYKPTVRLATRDDVPRAVRTLAAAFADYPATRHTVDPDRHIERVTELQELFLTRVGLDIGKVWVADDGAAVAVWTTPESVEAGAVFAEIGPRMAELSGSRLAAQQQMEGLLAPHRPKEPAWFLATVGVSPDHQGKGLGSAVVLPGVEAAERAGVPAFLETSAPRNLPFYERLGFTVTADVEVPEGPRTWCMTRKPGA

SEQ ID NO: 4389 - protein, 1035 aa, Artificial Sequence
  Synthetic Polypeptide
MALPVTALLLPLALLLHAARPEVQLVESGGGLVQAGGSLRLSCAASGRTFSMGWFRQAPGKEREFVAAITYSGGSPYYADSVKGRFTISRDNAKNTVYLQMNSLKPEDTAVYYCAANPTYGSDWNAENWGQGTQVTVSSGTGGGGSGGGGSGGGGSEFDIQMTQSPSSLSASVGDRVTITCKASDHINNWLAWYQQKPGQAPKLLIYGATTLETGVPSRFSGSGSGTDYTLTISSLQPEDFATYYCQQSWNTPWTFGQGTKLEIKRLEGQPKANPTVTLFPPSSEELQANKATLVCLISDFYPGAVTVAWKADGSPVKAGVETTKPSKQSNNKYAASSYLSLTPEQWKSHRSYSCQVTHEGSTVEKTVAPTECSGSTTPGERSSLPAFYPGTSGSCSGCGSLSLPLLAGLVAADAVASLLIVGAVFLCARPRRSPAQEDGKVYINMPGRGRAKRSGSGATNFSLLKQAGDVEENPGPTSMDWIWRILFLVGAATGAHSFEQVQLQQPGAELVKPGASVKMSCKASGYAFSSYWINWMKQKPGQGLEWIGQIYPGDGDTNYNGKFKGRATLTADTSSSTAYMQLSSLTSEDSAVYFCARSITTVVGCAMDYWGQGTSVTVSSTRASTKGPSVFPLAPSSKSTSGGTAALGCLVKDYFPEPVTVSWNSGALTSGVHTFPAVLQSSGLYSLSSVVTVPSSSLGTQTYICNVNHKPSNTKVDKRVEPKSCGTTTPGERSSLPAFYPGTSGSCSGCGSLSLPLLAGLVAADAVASLLIVGAVFLCARPRRSPAQEDGKVYINMPGRGRAKRSGSGVKQTLNFDLLKLAGDVESNPGPSRGHMTEYKPTVRLATRDDVPRAVRTLAAAFADYPATRHTVDPDRHIERVTELQELFLTRVGLDIGKVWVADDGAAVAVWTTPESVEAGAVFAEIGPRMAELSGSRLAAQQQMEGLLAPHRPKEPAWFLATVGVSPDHQGKGLGSAVVLPGVEAAERAGVPAFLETSAPRNLPFYERLGFTVTADVEVPEGPRTWCMTRKPGA

SEQ ID NO: 4390 - protein, 1172 aa, Artificial Sequence
  Synthetic Polypeptide
MALPVTALLLPLALLLHAARPEVQLVESGGGLVQAGGSLRLSCAASGRTFSMGWFRQAPGKEREFVAAITYSGGSPYYADSVKGRFTISRDNAKNTVYLQMNSLKPEDTAVYYCAANPTYGSDWNAENWGQGTQVTVSSGTGGGGSGGGGSGGGGSEFDIQMTQSPSSLSASVGDRVTITCKASDHINNWLAWYQQKPGQAPKLLIYGATTLETGVPSRFSGSGSGTDYTLTISSLQPEDFATYYCQQSWNTPWTFGQGTKLEIKRLEGQPKANPTVTLFPPSSEELQANKATLVCLISDFYPGAVTVAWKADGSPVKAGVETTKPSKQSNNKYAASSYLSLTPEQWKSHRSYSCQVTHEGSTVEKTVAPTECSGSTTPGERSSLPAFYPGTSGSCSGCGSLSLPLLAGLVAADAVASLLIVGAVFLCARPRRSPAQEDGKVYINMPGRGRAKRSGSGATNFSLLKQAGDVEENPGPTSMDWIWRILFLVGAATGAHSGPEVQLVESGGGLVQAGGSLRLSCAASGRTFTMGWFRQAPGKEREFVAAISLSPTLAYYADSVKGRFTISRDNAKNTVVLQMNSLKPEDTALYYCAADRKSVMSIRPDYWGQGTQVTVSSGSGGGGSGGGGSGGGGSFEQVQLQQPGAELVKPGASVKMSCKASGYAFSSYWINWMKQKPGQGLEWIGQIYPGDGDTNYNGKFKGRATLTADTSSSTAYMQLSSLTSEDSAVYFCARSITTVVGCAMDYWGQGTSVTVSSTRASTKGPSVFPLAPSSKSTSGGTAALGCLVKDYFPEPVTVSWNSGALTSGVHTFPAVLQSSGLYSLSSVVTVPSSSLGTQTYICNVNHKPSNTKVDKRVEPKSCGTTTPGERSSLPAFYPGTSGSCSGCGSLSLPLLAGLVAADAVASLLIVGAVFLCARPRRSPAQEDGKVYINMPGRGRAKRSGSGVKQTLNFDLLKLAGDVESNPGPSRGHMTEYKPTVRLATRDDVPRAVRTLAAAFADYPATRHTVDPDRHIERVTELQELFLTRVGLDIGKVWVADDGAAVAVWTTPESVEAGAVFAEIGPRMAELSGSRLAAQQQMEGLLAPHRPKEPAWFLATVGVSPDHQGKGLGSAVVLPGVEAAERAGVPAFLETSAPRNLPFYERLGFTVTADVEVPEGPRTWCMTRKPGA

SEQ ID NO: 4391 - protein, 905 aa, Artificial Sequence
  Synthetic Polypeptide
MALPVTALLLPLALLLHAARPEVQLVESGGGLVQAGGSLRLSCAASGRTFSMGWFRQAPGKEREFVAAITYSGGSPYYADSVKGRFTISRDNAKNTVYLQMNSLKPEDTAVYYCAANPTYGSDWNAENWGQGTQVTVSSLEGQPKANPTVTLFPPSSEELQANKATLVCLISDFYPGAVTVAWKADGSPVKAGVETTKPSKQSNNKYAASSYLSLTPEQWKSHRSYSCQVTHEGSTVEKTVAPTECSGSTTPGERSSLPAFYPGTSGSCSGCGSLSLPLLAGLVAADAVASLLIVGAVFLCARPRRSPAQEDGKVYINMPGRGRAKRSGSGATNFSLLKQAGDVEENPGPTSMDWIWRILFLVGAATGAHSGPEVQLVESGGGLVQAGGSLRLSCAASGRTFTMGWFRQAPGKEREFVAAISLSPTLAYYADSVKGRFTISRDNAKNTVVLQMNSLKPEDTALYYCAADRKSVMSIRPDYWGQGTQVTVSSTRASTKGPSVFPLAPSSKSTSGGTAALGCLVKDYFPEPVTVSWNSGALTSGVHTFPAVLQSSGLYSLSSVVTVPSSSLGTQTYICNVNHKPSNTKVDKRVEPKSCGTTTPGERSSLPAFYPGTSGSCSGCGSLSLPLLAGLVAADAVASLLIVGAVFLCARPRRSPAQEDGKVYINMPGRGRAKRSGSGVKQTLNFDLLKLAGDVESNPGPSRGHMTEYKPTVRLATRDDVPRAVRTLAAAFADYPATRHTVDPDRHIERVTELQELFLTRVGLDIGKVWVADDGAAVAVWTTPESVEAGAVFAEIGPRMAELSGSRLAAQQQMEGLLAPHRPKEPAWFLATVGVSPDHQGKGLGSAVVLPGVEAAERAGVPAFLETSAPRNLPFYERLGFTVTADVEVPEGPRTWCMTRKPGA

SEQ ID NO: 4392 - protein, 913 aa, Artificial Sequence
  Synthetic Polypeptide
MALPVTALLLPLALLLHAARPDIQMTQSPSSLSASVGDRVTITCKASDHINNWLAWYQQKPGQAPKLLIYGATTLETGVPSRFSGSGSGTDYTLTISSLQPEDFATYYCQQSWNTPWTFGQGTKLEIKRLEDLKNVFPPEVAVFEPSEAEISHTQKATLVCLATGFYPDHVELSWWVNGKEVHSGVSTDPQPLKEQPALNDSRYCLSSRLRVSATFWQNPRNHFRCQVQFYGLSENDEWTQDRAKPVTQIVSAEAWGRADCGSTTPGERSSLPAFYPGTSGSCSGCGSLSLPLLAGLVAADAVASLLIVGAVFLCARPRRSPAQEDGKVYINMPGRGRAKRSGSGATNFSLLKQAGDVEENPGPTSMDWIWRILFLVGAATGAHSFEQVQLQQPGAELVKPGASVKMSCKASGYAFSSYWINWMKQKPGQGLEWIGQIYPGDGDTNYNGKFKGRATLTADTSSSTAYMQLSSLTSEDSAVYFCARSITTVVGCAMDYWGQGTSVTVSSTRIQNPDPAVYQLRDSKSSDKSVCLFTDFDSQTNVSQSKDSDVYITDKTVLDMRSMDFKSNSAVAWSNKSDFACANAFNNSIIPEDTFFPSPESSCGTTTPGERSSLPAFYPGTSGSCSGCGSLSLPLLAGLVAADAVASLLIVGAVFLCARPRRSPAQEDGKVYINMPGRGRAKRSGSGVKQTLNFDLLKLAGDVESNPGPSRGHMTEYKPTVRLATRDDVPRAVRTLAAAFADYPATRHTVDPDRHIERVTELQELFLTRVGLDIGKVWVADDGAAVAVWTTPESVEAGAVFAEIGPRMAELSGSRLAAQQQMEGLLAPHRPKEPAWFLATVGVSPDHQGKGLGSAVVLPGVEAAERAGVPAFLETSAPRNLPFYERLGFTVTADVEVPEGPRTWCMTRKPGA

SEQ ID NO: 4393 - protein, 1050 aa, Artificial Sequence
  Synthetic Polypeptide
MALPVTALLLPLALLLHAARPEVQLVESGGGLVQAGGSLRLSCAASGRTFSMGWFRQAPGKEREFVAAITYSGGSPYYADSVKGRFTISRDNAKNTVYLQMNSLKPEDTAVYYCAANPTYGSDWNAENWGQGTQVTVSSGTGGGGSGGGGSGGGGSEFDIQMTQSPSSLSASVGDRVTITCKASDHINNWLAWYQQKPGQAPKLLIYGATTLETGVPSRFSGSGSGTDYTLTISSLQPEDFATYYCQQSWNTPWTFGQGTKLEIKRLEDLKNVFPPEVAVFEPSEAEISHTQKATLVCLATGFYPDHVELSWWVNGKEVHSGVSTDPQPLKEQPALNDSRYCLSSRLRVSATFWQNPRNHFRCQVQFYGLSENDEWTQDRAKPVTQIVSAEAWGRADCGSTTPGERSSLPAFYPGTSGSCSGCGSLSLPLLAGLVAADAVASLLIVGAVFLCARPRRSPAQEDGKVYINMPGRGRAKRSGSGATNFSLLKQAGDVEENPGPTSMDWIWRILFLVGAATGAHSFEQVQLQQPGAELVKPGASVKMSCKASGYAFSSYWINWMKQKPGQGLEWIGQIYPGDGDTNYNGKFKGRATLTADTSSSTAYMQLSSLTSEDSAVYFCARSITTVVGCAMDYWGQGTSVTVSSTRIQNPDPAVYQLRDSKSSDKSVCLFTDFDSQTNVSQSKDSDVYITDKTVLDMRSMDFKSNSAVAWSNKSDFACANAFNNSIIPEDTFFPSPESSCGTTTPGERSSLPAFYPGTSGSCSGCGSLSLPLLAGLVAADAVASLLIVGAVFLCARPRRSPAQEDGKVYINMPGRGRAKRSGSGVKQTLNFDLLKLAGDVESNPGPSRGHMTEYKPTVRLATRDDVPRAVRTLAAAFADYPATRHTVDPDRHIERVTELQELFLTRVGLDIGKVWVADDGAAVAVWTTPESVEAGAVFAEIGPRMAELSGSRLAAQQQMEGLLAPHRPKEPAWFLATVGVSPDHQGKGLGSAVVLPGVEAAERAGVPAFLETSAPRNLPFYERLGFTVTADVEVPEGPRTWCMTRKPGA

SEQ ID NO: 4394 - protein, 1187 aa, Artificial Sequence
  Synthetic Polypeptide
MALPVTALLLPLALLLHAARPEVQLVESGGGLVQAGGSLRLSCAASGRTFSMGWFRQAPGKEREFVAAITYSGGSPYYADSVKGRFTISRDNAKNTVYLQMNSLKPEDTAVYYCAANPTYGSDWNAENWGQGTQVTVSSGTGGGGSGGGGSGGGGSEFDIQMTQSPSSLSASVGDRVTITCKASDHINNWLAWYQQKPGQAPKLLIYGATTLETGVPSRFSGSGSGTDYTLTISSLQPEDFATYYCQQSWNTPWTFGQGTKLEIKRLEDLKNVFPPEVAVFEPSEAEISHTQKATLVCLATGFYPDHVELSWWVNGKEVHSGVSTDPQPLKEQPALNDSRYCLSSRLRVSATFWQNPRNHFRCQVQFYGLSENDEWTQDRAKPVTQIVSAEAWGRADCGSTTPGERSSLPAFYPGTSGSCSGCGSLSLPLLAGLVAADAVASLLIVGAVFLCARPRRSPAQEDGKVYINMPGRGRAKRSGSGATNFSLLKQAGDVEENPGPTSMDWIWRILFLVGAATGAHSGPEVQLVESGGGLVQAGGSLRLSCAASGRTFTMGWFRQAPGKEREFVAAISLSPTLAYYADSVKGRFTISRDNAKNTVVLQMNSLKPEDTALYYCAADRKSVMSIRPDYWGQGTQVTVSSGSGGGGSGGGGSGGGGSFEQVQLQQPGAELVKPGASVKMSCKASGYAFSSYWINWMKQKPGQGLEWIGQIYPGDGDTNYNGKFKGRATLTADTSSSTAYMQLSSLTSEDSAVYFCARSITTVVGCAMDYWGQGTSVTVSSTRIQNPDPAVYQLRDSKSSDKSVCLFTDFDSQTNVSQSKDSDVYITDKTVLDMRSMDFKSNSAVAWSNKSDFACANAFNNSIIPEDTFFPSPESSCGTTTPGERSSLPAFYPGTSGSCSGCGSLSLPLLAGLVAADAVASLLIVGAVFLCARPRRSPAQEDGKVYINMPGRGRAKRSGSGVKQTLNFDLLKLAGDVESNPGPSRGHMTEYKPTVRLATRDDVPRAVRTLAAAFADYPATRHTVDPDRHIERVTELQELFLTRVGLDIGKVWVADDGAAVAVWTTPESVEAGAVFAEIGPRMAELSGSRLAAQQQMEGLLAPHRPKEPAWFLATVGVSPDHQGKGLGSAVVLPGVEAAERAGVPAFLETSAPRNLPFYERLGFTVTADVEVPEGPRTWCMTRKPGA

SEQ ID NO: 4395 - protein, 920 aa, Artificial Sequence
  Synthetic Polypeptide
MALPVTALLLPLALLLHAARPEVQLVESGGGLVQAGGSLRLSCAASGRTFSMGWFRQAPGKEREFVAAITYSGGSPYYADSVKGRFTISRDNAKNTVYLQMNSLKPEDTAVYYCAANPTYGSDWNAENWGQGTQVTVSSLEDLKNVFPPEVAVFEPSEAEISHTQKATLVCLATGFYPDHVELSWWVNGKEVHSGVSTDPQPLKEQPALNDSRYCLSSRLRVSATFWQNPRNHFRCQVQFYGLSENDEWTQDRAKPVTQIVSAEAWGRADCGSTTPGERSSLPAFYPGTSGSCSGCGSLSLPLLAGLVAADAVASLLIVGAVFLCARPRRSPAQEDGKVYINMPGRGRAKRSGSGATNFSLLKQAGDVEENPGPTSMDWIWRILFLVGAATGAHSGPEVQLVESGGGLVQAGGSLRLSCAASGRTFTMGWFRQAPGKEREFVAAISLSPTLAYYADSVKGRFTISRDNAKNTVVLQMNSLKPEDTALYYCAADRKSVMSIRPDYWGQGTQVTVSSTRIQNPDPAVYQLRDSKSSDKSVCLFTDFDSQTNVSQSKDSDVYITDKTVLDMRSMDFKSNSAVAWSNKSDFACANAFNNSIIPEDTFFPSPESSCGTTTPGERSSLPAFYPGTSGSCSGCGSLSLPLLAGLVAADAVASLLIVGAVFLCARPRRSPAQEDGKVYINMPGRGRAKRSGSGVKQTLNFDLLKLAGDVESNPGPSRGHMTEYKPTVRLATRDDVPRAVRTLAAAFADYPATRHTVDPDRHIERVTELQELFLTRVGLDIGKVWVADDGAAVAVWTTPESVEAGAVFAEIGPRMAELSGSRLAAQQQMEGLLAPHRPKEPAWFLATVGVSPDHQGKGLGSAVVLPGVEAAERAGVPAFLETSAPRNLPFYERLGFTVTADVEVPEGPRTWCMTRKPGA

SEQ ID NO: 4396 - protein, 469 aa, Artificial Sequence
  Synthetic Polypeptide
MALPVTALLLPLALLLHAARPACEVQLLESGGGLIQPGGSLRLSCAASGFTFSSHAMTWVRQAPGKGLEWVSAISGSGDYTHYADSVKGRFTISRDNSKNTVYLQMNSLRAEDSAVYYCAKDEDGGSLLGHRGQGTLVTVSSGTGGGGSGGGGSGGGGSEFGSLETTPGERSSLPAFYPGTSGSCSGCGSLSLPLLAGLVAADAVASLLIVGAVFLCARPRRSPAQEDGKVYINMPGRGRAKRSGSGATNFSLLKQAGDVEENPGPTRGHMTEYKPTVRLATRDDVPRAVRTLAAAFADYPATRHTVDPDRHIERVTELQELFLTRVGLDIGKVWVADDGAAVAVWTTPESVEAGAVFAEIGPRMAELSGSRLAAQQQMEGLLAPHRPKEPAWFLATVGVSPDHQGKGLGSAVVLPGVEAAERAGVPAFLETSAPRNLPFYERLGFTVTADVEVPEGPRTWCMTRKPGA

SEQ ID NO: 4397 - protein, 17 aa, Artificial Sequence
  Synthetic Polypeptide
GGGGGGGGGGGGGGGGG

SEQ ID NO: 4398 - protein, 17 aa, Artificial Sequence
  Synthetic Polypeptide
GGGGGGGGGGGGGGGGG

SEQ ID NO: 4399 - protein, 17 aa, Artificial Sequence
  Synthetic Polypeptide
GGGGGGGGGGGGGGGGG

SEQ ID NO: 4400 - protein, 17 aa, Artificial Sequence
  Synthetic Polypeptide
GGGGGGGGGGGGGGGGG

SEQ ID NO: 4401 - protein, 17 aa, Artificial Sequence
  Synthetic Polypeptide
GGGGGGGGGGGGGGGGG

SEQ ID NO: 4402 - protein, 17 aa, Artificial Sequence
  Synthetic Polypeptide
GGGGGGGGGGGGGGGGG

SEQ ID NO: 4403 - protein, 17 aa, Artificial Sequence
  Synthetic Polypeptide
GGGGGGGGGGGGGGGGG

SEQ ID NO: 4404 - protein, 17 aa, Artificial Sequence
  Synthetic Polypeptide
GGGGGGGGGGGGGGGGG

SEQ ID NO: 4405 - protein, 17 aa, Artificial Sequence
  Synthetic Polypeptide
GGGGGGGGGGGGGGGGG

SEQ ID NO: 4406 - protein, 17 aa, Artificial Sequence
  Synthetic Polypeptide
GGGGGGGGGGGGGGGGG

SEQ ID NO: 4407 - protein, 17 aa, Artificial Sequence
  Synthetic Polypeptide
GGGGGGGGGGGGGGGGG

SEQ ID NO: 4408 - protein, 17 aa, Artificial Sequence
  Synthetic Polypeptide
GGGGGGGGGGGGGGGGG

SEQ ID NO: 4409 - protein, 17 aa, Artificial Sequence
  Synthetic Polypeptide
GGGGGGGGGGGGGGGGG

SEQ ID NO: 4410 - protein, 17 aa, Artificial Sequence
  Synthetic Polypeptide
GGGGGGGGGGGGGGGGG

SEQ ID NO: 4411 - protein, 17 aa, Artificial Sequence
  Synthetic Polypeptide
GGGGGGGGGGGGGGGGG

SEQ ID NO: 4412 - protein, 17 aa, Artificial Sequence
  Synthetic Polypeptide
GGGGGGGGGGGGGGGGG

SEQ ID NO: 4413 - protein, 17 aa, Artificial Sequence
  Synthetic Polypeptide
GGGGGGGGGGGGGGGGG

SEQ ID NO: 4414 - protein, 17 aa, Artificial Sequence
  Synthetic Polypeptide
GGGGGGGGGGGGGGGGG

SEQ ID NO: 4415 - protein, 17 aa, Artificial Sequence
  Synthetic Polypeptide
GGGGGGGGGGGGGGGGG

SEQ ID NO: 4416 - protein, 17 aa, Artificial Sequence
  Synthetic Polypeptide
GGGGGGGGGGGGGGGGG

SEQ ID NO: 4417 - protein, 17 aa, Artificial Sequence
  Synthetic Polypeptide
GGGGGGGGGGGGGGGGG

SEQ ID NO: 4418 - protein, 17 aa, Artificial Sequence
  Synthetic Polypeptide
GGGGGGGGGGGGGGGGG

SEQ ID NO: 4419 - protein, 913 aa, Artificial Sequence
  Synthetic Polypeptide
MALPVTALLLPLALLLHAARPDIQMTQSPSSLSASVGDRVTITCKASDHINNWLAWYQQKPGQAPKLLIYGATTLETGVPSRFSGSGSGTDYTLTISSLQPEDFATYYCQQSWNTPWTFGQGTKLEIKRLETTPGERSSLPAFYPGTSGSCSGCGSLSLPLLAGLVAADAVASLLIVGAVFLCARPRRSPAQEDGKVYINMPGRGSTSRVKFSRSADAPAYQQGQNQLYNELNLGRREEYDVLDKRRGRDPEMGGKPQRRKNPQEGLYNELQKDKMAEAYSEIGMKGERRRGKGHDGLYQGLSTATKDTYDALHMQALPPRRAKRSGSGATNFSLLKQAGDVEENPGPMDWIWRILFLVGAATGAHSFEQVQLQQPGAELVKPGASVKMSCKASGYAFSSYWINWMKQKPGQGLEWIGQIYPGDGDTNYNGKFKGRATLTADTSSSTAYMQLSSLTSEDSAVYFCARSITTVVGCAMDYWGQGTSVTVSSTRTTPGERSSLPAFYPGTSGSCSGCGSLSLPLLAGLVAADAVASLLIVGAVFLCARPRRSPAQEDGKVYINMPGRGSSRRVKFSRSADAPAYQQGQNQLYNELNLGRREEYDVLDKRRGRDPEMGGKPQRRKNPQEGLYNELQKDKMAEAYSEIGMKGERRRGKGHDGLYQGLSTATKDTYDALHMQALPPRRAKRSGSGVKQTLNFDLLKLAGDVESNPGPGHMTEYKPTVRLATRDDVPRAVRTLAAAFADYPATRHTVDPDRHIERVTELQELFLTRVGLDIGKVWVADDGAAVAVWTTPESVEAGAVFAEIGPRMAELSGSRLAAQQQMEGLLAPHRPKEPAWFLATVGVSPDHQGKGLGSAVVLPGVEAAERAGVPAFLETSAPRNLPFYERLGFTVTADVEVPEGPRTWCMTRKPGA

SEQ ID NO: 4420 - protein, 965 aa, Artificial Sequence
  Synthetic Polypeptide
MALPVTALLLPLALLLHAARPACEVQLLESGGGLIQPGGSLRLSCAASGFTFSSHAMTWVRQAPGKGLEWVSAISGSGDYTHYADSVKGRFTISRDNSKNTVYLQMNSLRAEDSAVYYCAKDEDGGSLLGHRGQGTLVTVSSGTGGGGSGGGGSGGGGSEFGSLETTPGERSSLPAFYPGTSGSCSGCGSLSLPLLAGLVAADAVASLLIVGAVFLCARPRRSPAQEDGKVYINMPGRGSTSRVKFSRSADAPAYQQGQNQLYNELNLGRREEYDVLDKRRGRDPEMGGKPQRRKNPQEGLYNELQKDKMAEAYSEIGMKGERRRGKGHDGLYQGLSTATKDTYDALHMQALPPRRAKRSGSGATNFSLLKQAGDVEENPGPMDWIWRILFLVGAATGAHSGPEVQLVESGGGLVQAGGSLRLSCAASGRTFSMGWFRQAPGKEREFVAAITYSGGSPYYADSVKGRFTISRDNAKNTVYLQMNSLKPEDTAVYYCAANPTYGSDWNAENWGQGTQVTVSSGSGGGGSGGGGSGGGGSFEGSTRTTPGERSSLPAFYPGTSGSCSGCGSLSLPLLAGLVAADAVASLLIVGAVFLCARPRRSPAQEDGKVYINMPGRGSSRRVKFSRSADAPAYQQGQNQLYNELNLGRREEYDVLDKRRGRDPEMGGKPQRRKNPQEGLYNELQKDKMAEAYSEIGMKGERRRGKGHDGLYQGLSTATKDTYDALHMQALPPRRAKRSGSGVKQTLNFDLLKLAGDVESNPGPGHMTEYKPTVRLATRDDVPRAVRTLAAAFADYPATRHTVDPDRHIERVTELQELFLTRVGLDIGKVWVADDGAAVAVWTTPESVEAGAVFAEIGPRMAELSGSRLAAQQQMEGLLAPHRPKEPAWFLATVGVSPDHQGKGLGSAVVLPGVEAAERAGVPAFLETSAPRNLPFYERLGFTVTADVEVPEGPRTWCMTRKPGA

SEQ ID NO: 4421 - protein, 1115 aa, Artificial Sequence
  Synthetic Polypeptide
MALPVTALLLPLALLLHAARPDIQMTQSPSSLSASVGDRVTITCKASDHINNWLAWYQQKPGQAPKLLIYGATTLETGVPSRFSGSGSGTDYTLTISSLQPEDFATYYCQQSWNTPWTFGQGTKLEIKRLEGQPKANPTVTLFPPSSEELQANKATLVCLISDFYPGAVTVAWKADGSPVKAGVETTKPSKQSNNKYAASSYLSLTPEQWKSHRSYSCQVTHEGSTVEKTVAPTECSGSTTPGERSSLPAFYPGTSGSCSGCGSLSLPLLAGLVAADAVASLLIVGAVFLCARPRRSPAQEDGKVYINMPGRGSTSRVKFSRSADAPAYQQGQNQLYNELNLGRREEYDVLDKRRGRDPEMGGKPQRRKNPQEGLYNELQKDKMAEAYSEIGMKGERRRGKGHDGLYQGLSTATKDTYDALHMQALPPRRAKRSGSGATNFSLLKQAGDVEENPGPMDWIWRILFLVGAATGAHSFEQVQLQQPGAELVKPGASVKMSCKASGYAFSSYWINWMKQKPGQGLEWIGQIYPGDGDTNYNGKFKGRATLTADTSSSTAYMQLSSLTSEDSAVYFCARSITTVVGCAMDYWGQGTSVTVSSTRASTKGPSVFPLAPSSKSTSGGTAALGCLVKDYFPEPVTVSWNSGALTSGVHTFPAVLQSSGLYSLSSVVTVPSSSLGTQTYICNVNHKPSNTKVDKRVEPKSCGTTTPGERSSLPAFYPGTSGSCSGCGSLSLPLLAGLVAADAVASLLIVGAVFLCARPRRSPAQEDGKVYINMPGRGSSRRVKFSRSADAPAYQQGQNQLYNELNLGRREEYDVLDKRRGRDPEMGGKPQRRKNPQEGLYNELQKDKMAEAYSEIGMKGERRRGKGHDGLYQGLSTATKDTYDALHMQALPPRRAKRSGSGVKQTLNFDLLKLAGDVESNPGPGHMATYEVLCEVARKLGTDDREVVLFLLNVFIPQPTLAQLIGALRALKEEGRLTFPLLAECLFRAGRRDLLRDLLHLDPRFLERHLAGTMSYFSPYQLTVLHVDGELCARDIRSLIFLSKDTIGSRSTPQTFLHWVYCMENLDLLGPTDVDALMSMLRSLSRVDLQRQVQTLMGLHLSGPSHSQHYRHTP

SEQ ID NO: 4422 - protein, 1168 aa, Artificial Sequence
  Synthetic Polypeptide
MALPVTALLLPLALLLHAARPDIQMTQSPSSLSASVGDRVTITCKASDHINNWLAWYQQKPGQAPKLLIYGATTLETGVPSRFSGSGSGTDYTLTISSLQPEDFATYYCQQSWNTPWTFGQGTKLEIKRLEGQPKANPTVTLFPPSSEELQANKATLVCLISDFYPGAVTVAWKADGSPVKAGVETTKPSKQSNNKYAASSYLSLTPEQWKSHRSYSCQVTHEGSTVEKTVAPTECSGSTTPGERSSLPAFYPGTSGSCSGCGSLSLPLLAGLVAADAVASLLIVGAVFLCARPRRSPAQEDGKVYINMPGRGSTSRVKFSRSADAPAYQQGQNQLYNELNLGRREEYDVLDKRRGRDPEMGGKPQRRKNPQEGLYNELQKDKMAEAYSEIGMKGERRRGKGHDGLYQGLSTATKDTYDALHMQALPPRRAKRSGSGATNFSLLKQAGDVEENPGPMDWIWRILFLVGAATGAHSFEQVQLQQPGAELVKPGASVKMSCKASGYAFSSYWINWMKQKPGQGLEWIGQIYPGDGDTNYNGKFKGRATLTADTSSSTAYMQLSSLTSEDSAVYFCARSITTVVGCAMDYWGQGTSVTVSSTRASTKGPSVFPLAPSSKSTSGGTAALGCLVKDYFPEPVTVSWNSGALTSGVHTFPAVLQSSGLYSLSSVVTVPSSSLGTQTYICNVNHKPSNTKVDKRVEPKSCGTTTPGERSSLPAFYPGTSGSCSGCGSLSLPLLAGLVAADAVASLLIVGAVFLCARPRRSPAQEDGKVYINMPGRGSSRRVKFSRSADAPAYQQGQNQLYNELNLGRREEYDVLDKRRGRDPEMGGKPQRRKNPQEGLYNELQKDKMAEAYSEIGMKGERRRGKGHDGLYQGLSTATKDTYDALHMQALPPRRAKRSGSGVKQTLNFDLLKLAGDVESNPGPGHMSDSKEVPSLPFLRHLLEELDSHEDSLLLFLCHDAAPGCTTVTQALCSLSQQRKLTLAALVEMLYVLQRMDLLKSRFGLSKEGAEQLLGTSFLTRYRKLMVCVGEELDSSELRALRLFACNLNPSLSTALSESSRFVELVLALENVGLVSPSSVSVLADMLRTLRRLDLCQQLVEYEQQEQARYRYCYAASPSLPVRTLRRGHGASEHEQLCMPVQESSDSPELLRTPVQESSSDSPEQTT

SEQ ID NO: 4423 - protein, 1126 aa, Artificial Sequence
  Synthetic Polypeptide
MALPVTALLLPLALLLHAARPDIQMTQSPSSLSASVGDRVTITCKASDHINNWLAWYQQKPGQAPKLLIYGATTLETGVPSRFSGSGSGTDYTLTISSLQPEDFATYYCQQSWNTPWTFGQGTKLEIKRLEGQPKANPTVTLFPPSSEELQANKATLVCLISDFYPGAVTVAWKADGSPVKAGVETTKPSKQSNNKYAASSYLSLTPEQWKSHRSYSCQVTHEGSTVEKTVAPTECSGSTTPGERSSLPAFYPGTSGSCSGCGSLSLPLLAGLVAADAVASLLIVGAVFLCARPRRSPAQEDGKVYINMPGRGSTSRVKFSRSADAPAYQQGQNQLYNELNLGRREEYDVLDKRRGRDPEMGGKPQRRKNPQEGLYNELQKDKMAEAYSEIGMKGERRRGKGHDGLYQGLSTATKDTYDALHMQALPPRRAKRSGSGATNFSLLKQAGDVEENPGPMDWIWRILFLVGAATGAHSFEQVQLQQPGAELVKPGASVKMSCKASGYAFSSYWINWMKQKPGQGLEWIGQIYPGDGDTNYNGKFKGRATLTADTSSSTAYMQLSSLTSEDSAVYFCARSITTVVGCAMDYWGQGTSVTVSSTRASTKGPSVFPLAPSSKSTSGGTAALGCLVKDYFPEPVTVSWNSGALTSGVHTFPAVLQSSGLYSLSSVVTVPSSSLGTQTYICNVNHKPSNTKVDKRVEPKSCGTTTPGERSSLPAFYPGTSGSCSGCGSLSLPLLAGLVAADAVASLLIVGAVFLCARPRRSPAQEDGKVYINMPGRGSSRRVKFSRSADAPAYQQGQNQLYNELNLGRREEYDVLDKRRGRDPEMGGKPQRRKNPQEGLYNELQKDKMAEAYSEIGMKGERRRGKGHDGLYQGLSTATKDTYDALHMQALPPRRAKRSGSGVKQTLNFDLLKLAGDVESNPGPGHMTEYKPTVRLATRDDVPRAVRTLAAAFADYPATRHTVDPDRHIERVTELQELFLTRVGLDIGKVWVADDGAAVAVWTTPESVEAGAVFAEIGPRMAELSGSRLAAQQQMEGLLAPHRPKEPAWFLATVGVSPDHQGKGLGSAVVLPGVEAAERAGVPAFLETSAPRNLPFYERLGFTVTADVEVPEGPRTWCMTRKPGA

SEQ ID NO: 4424 - protein, 1263 aa, Artificial Sequence
  Synthetic Polypeptide
MALPVTALLLPLALLLHAARPEVQLVESGGGLVQAGGSLRLSCAASGRTFSMGWFRQAPGKEREFVAAITYSGGSPYYADSVKGRFTISRDNAKNTVYLQMNSLKPEDTAVYYCAANPTYGSDWNAENWGQGTQVTVSSGTGGGGSGGGGSGGGGSEFDIQMTQSPSSLSASVGDRVTITCKASDHINNWLAWYQQKPGQAPKLLIYGATTLETGVPSRFSGSGSGTDYTLTISSLQPEDFATYYCQQSWNTPWTFGQGTKLEIKRLEGQPKANPTVTLFPPSSEELQANKATLVCLISDFYPGAVTVAWKADGSPVKAGVETTKPSKQSNNKYAASSYLSLTPEQWKSHRSYSCQVTHEGSTVEKTVAPTECSGSTTPGERSSLPAFYPGTSGSCSGCGSLSLPLLAGLVAADAVASLLIVGAVFLCARPRRSPAQEDGKVYINMPGRGSTSRVKFSRSADAPAYQQGQNQLYNELNLGRREEYDVLDKRRGRDPEMGGKPQRRKNPQEGLYNELQKDKMAEAYSEIGMKGERRRGKGHDGLYQGLSTATKDTYDALHMQALPPRRAKRSGSGATNFSLLKQAGDVEENPGPMDWIWRILFLVGAATGAHSFEQVQLQQPGAELVKPGASVKMSCKASGYAFSSYWINWMKQKPGQGLEWIGQIYPGDGDTNYNGKFKGRATLTADTSSSTAYMQLSSLTSEDSAVYFCARSITTVVGCAMDYWGQGTSVTVSSTRASTKGPSVFPLAPSSKSTSGGTAALGCLVKDYFPEPVTVSWNSGALTSGVHTFPAVLQSSGLYSLSSVVTVPSSSLGTQTYICNVNHKPSNTKVDKRVEPKSCGTTTPGERSSLPAFYPGTSGSCSGCGSLSLPLLAGLVAADAVASLLIVGAVFLCARPRRSPAQEDGKVYINMPGRGSSRRVKFSRSADAPAYQQGQNQLYNELNLGRREEYDVLDKRRGRDPEMGGKPQRRKNPQEGLYNELQKDKMAEAYSEIGMKGERRRGKGHDGLYQGLSTATKDTYDALHMQALPPRRAKRSGSGVKQTLNFDLLKLAGDVESNPGPGHMTEYKPTVRLATRDDVPRAVRTLAAAFADYPATRHTVDPDRHIERVTELQELFLTRVGLDIGKVWVADDGAAVAVWTTPESVEAGAVFAEIGPRMAELSGSRLAAQQQMEGLLAPHRPKEPAWFLATVGVSPDHQGKGLGSAVVLPGVEAAERAGVPAFLETSAPRNLPFYERLGFTVTADVEVPEGPRTWCMTRKPGA

SEQ ID NO: 4425 - protein, 1400 aa, Artificial Sequence
  Synthetic Polypeptide
MALPVTALLLPLALLLHAARPEVQLVESGGGLVQAGGSLRLSCAASGRTFSMGWFRQAPGKEREFVAAITYSGGSPYYADSVKGRFTISRDNAKNTVYLQMNSLKPEDTAVYYCAANPTYGSDWNAENWGQGTQVTVSSGTGGGGSGGGGSGGGGSEFDIQMTQSPSSLSASVGDRVTITCKASDHINNWLAWYQQKPGQAPKLLIYGATTLETGVPSRFSGSGSGTDYTLTISSLQPEDFATYYCQQSWNTPWTFGQGTKLEIKRLEGQPKANPTVTLFPPSSEELQANKATLVCLISDFYPGAVTVAWKADGSPVKAGVETTKPSKQSNNKYAASSYLSLTPEQWKSHRSYSCQVTHEGSTVEKTVAPTECSGSTTPGERSSLPAFYPGTSGSCSGCGSLSLPLLAGLVAADAVASLLIVGAVFLCARPRRSPAQEDGKVYINMPGRGSTSRVKFSRSADAPAYQQGQNQLYNELNLGRREEYDVLDKRRGRDPEMGGKPQRRKNPQEGLYNELQKDKMAEAYSEIGMKGERRRGKGHDGLYQGLSTATKDTYDALHMQALPPRRAKRSGSGATNFSLLKQAGDVEENPGPMDWIWRILFLVGAATGAHSGPEVQLVESGGGLVQAGGSLRLSCAASGRTFTMGWFRQAPGKEREFVAAISLSPTLAYYADSVKGRFTISRDNAKNTVVLQMNSLKPEDTALYYCAADRKSVMSIRPDYWGQGTQVTVSSGSGGGGSGGGGSGGGGSFEQVQLQQPGAELVKPGASVKMSCKASGYAFSSYWINWMKQKPGQGLEWIGQIYPGDGDTNYNGKFKGRATLTADTSSSTAYMQLSSLTSEDSAVYFCARSITTVVGCAMDYWGQGTSVTVSSTRASTKGPSVFPLAPSSKSTSGGTAALGCLVKDYFPEPVTVSWNSGALTSGVHTFPAVLQSSGLYSLSSVVTVPSSSLGTQTYICNVNHKPSNTKVDKRVEPKSCGTTTPGERSSLPAFYPGTSGSCSGCGSLSLPLLAGLVAADAVASLLIVGAVFLCARPRRSPAQEDGKVYINMPGRGSSRRVKFSRSADAPAYQQGQNQLYNELNLGRREEYDVLDKRRGRDPEMGGKPQRRKNPQEGLYNELQKDKMAEAYSEIGMKGERRRGKGHDGLYQGLSTATKDTYDALHMQALPPRRAKRSGSGVKQTLNFDLLKLAGDVESNPGPGHMTEYKPTVRLATRDDVPRAVRTLAAAFADYPATRHTVDPDRHIERVTELQELFLTRVGLDIGKVWVADDGAAVAVWTTPESVEAGAVFAEIGPRMAELSGSRLAAQQQMEGLLAPHRPKEPAWFLATVGVSPDHQGKGLGSAVVLPGVEAAERAGVPAFLETSAPRNLPFYERLGFTVTADVEVPEGPRTWCMTRKPGA

SEQ ID NO: 4426 - protein, 1133 aa, Artificial Sequence
  Synthetic Polypeptide
MALPVTALLLPLALLLHAARPEVQLVESGGGLVQAGGSLRLSCAASGRTFSMGWFRQAPGKEREFVAAITYSGGSPYYADSVKGRFTISRDNAKNTVYLQMNSLKPEDTAVYYCAANPTYGSDWNAENWGQGTQVTVSSLEGQPKANPTVTLFPPSSEELQANKATLVCLISDFYPGAVTVAWKADGSPVKAGVETTKPSKQSNNKYAASSYLSLTPEQWKSHRSYSCQVTHEGSTVEKTVAPTECSGSTTPGERSSLPAFYPGTSGSCSGCGSLSLPLLAGLVAADAVASLLIVGAVFLCARPRRSPAQEDGKVYINMPGRGSTSRVKFSRSADAPAYQQGQNQLYNELNLGRREEYDVLDKRRGRDPEMGGKPQRRKNPQEGLYNELQKDKMAEAYSEIGMKGERRRGKGHDGLYQGLSTATKDTYDALHMQALPPRRAKRSGSGATNFSLLKQAGDVEENPGPMDWIWRILFLVGAATGAHSGPEVQLVESGGGLVQAGGSLRLSCAASGRTFTMGWFRQAPGKEREFVAAISLSPTLAYYADSVKGRFTISRDNAKNTVVLQMNSLKPEDTALYYCAADRKSVMSIRPDYWGQGTQVTVSSTRASTKGPSVFPLAPSSKSTSGGTAALGCLVKDYFPEPVTVSWNSGALTSGVHTFPAVLQSSGLYSLSSVVTVPSSSLGTQTYICNVNHKPSNTKVDKRVEPKSCGTTTPGERSSLPAFYPGTSGSCSGCGSLSLPLLAGLVAADAVASLLIVGAVFLCARPRRSPAQEDGKVYINMPGRGSSRRVKFSRSADAPAYQQGQNQLYNELNLGRREEYDVLDKRRGRDPEMGGKPQRRKNPQEGLYNELQKDKMAEAYSEIGMKGERRRGKGHDGLYQGLSTATKDTYDALHMQALPPRRAKRSGSGVKQTLNFDLLKLAGDVESNPGPGHMTEYKPTVRLATRDDVPRAVRTLAAAFADYPATRHTVDPDRHIERVTELQELFLTRVGLDIGKVWVADDGAAVAVWTTPESVEAGAVFAEIGPRMAELSGSRLAAQQQMEGLLAPHRPKEPAWFLATVGVSPDHQGKGLGSAVVLPGVEAAERAGVPAFLETSAPRNLPFYERLGFTVTADVEVPEGPRTWCMTRKPGA

SEQ ID NO: 4427 - protein, 1141 aa, Artificial Sequence
  Synthetic Polypeptide
MALPVTALLLPLALLLHAARPDIQMTQSPSSLSASVGDRVTITCKASDHINNWLAWYQQKPGQAPKLLIYGATTLETGVPSRFSGSGSGTDYTLTISSLQPEDFATYYCQQSWNTPWTFGQGTKLEIKRLEDLKNVFPPEVAVFEPSEAEISHTQKATLVCLATGFYPDHVELSWWVNGKEVHSGVSTDPQPLKEQPALNDSRYCLSSRLRVSATFWQNPRNHFRCQVQFYGLSENDEWTQDRAKPVTQIVSAEAWGRADCGSTTPGERSSLPAFYPGTSGSCSGCGSLSLPLLAGLVAADAVASLLIVGAVFLCARPRRSPAQEDGKVYINMPGRGSTSRVKFSRSADAPAYQQGQNQLYNELNLGRREEYDVLDKRRGRDPEMGGKPQRRKNPQEGLYNELQKDKMAEAYSEIGMKGERRRGKGHDGLYQGLSTATKDTYDALHMQALPPRRAKRSGSGATNFSLLKQAGDVEENPGPMDWIWRILFLVGAATGAHSFEQVQLQQPGAELVKPGASVKMSCKASGYAFSSYWINWMKQKPGQGLEWIGQIYPGDGDTNYNGKFKGRATLTADTSSSTAYMQLSSLTSEDSAVYFCARSITTVVGCAMDYWGQGTSVTVSSTRIQNPDPAVYQLRDSKSSDKSVCLFTDFDSQTNVSQSKDSDVYITDKTVLDMRSMDFKSNSAVAWSNKSDFACANAFNNSIIPEDTFFPSPESSCGTTTPGERSSLPAFYPGTSGSCSGCGSLSLPLLAGLVAADAVASLLIVGAVFLCARPRRSPAQEDGKVYINMPGRGSSRRVKFSRSADAPAYQQGQNQLYNELNLGRREEYDVLDKRRGRDPEMGGKPQRRKNPQEGLYNELQKDKMAEAYSEIGMKGERRRGKGHDGLYQGLSTATKDTYDALHMQALPPRRAKRSGSGVKQTLNFDLLKLAGDVESNPGPGHMTEYKPTVRLATRDDVPRAVRTLAAAFADYPATRHTVDPDRHIERVTELQELFLTRVGLDIGKVWVADDGAAVAVWTTPESVEAGAVFAEIGPRMAELSGSRLAAQQQMEGLLAPHRPKEPAWFLATVGVSPDHQGKGLGSAVVLPGVEAAERAGVPAFLETSAPRNLPFYERLGFTVTADVEVPEGPRTWCMTRKPGA

SEQ ID NO: 4428 - protein, 1278 aa, Artificial Sequence
  Synthetic Polypeptide
MALPVTALLLPLALLLHAARPEVQLVESGGGLVQAGGSLRLSCAASGRTFSMGWFRQAPGKEREFVAAITYSGGSPYYADSVKGRFTISRDNAKNTVYLQMNSLKPEDTAVYYCAANPTYGSDWNAENWGQGTQVTVSSGTGGGGSGGGGSGGGGSEFDIQMTQSPSSLSASVGDRVTITCKASDHINNWLAWYQQKPGQAPKLLIYGATTLETGVPSRFSGSGSGTDYTLTISSLQPEDFATYYCQQSWNTPWTFGQGTKLEIKRLEDLKNVFPPEVAVFEPSEAEISHTQKATLVCLATGFYPDHVELSWWVNGKEVHSGVSTDPQPLKEQPALNDSRYCLSSRLRVSATFWQNPRNHFRCQVQFYGLSENDEWTQDRAKPVTQIVSAEAWGRADCGSTTPGERSSLPAFYPGTSGSCSGCGSLSLPLLAGLVAADAVASLLIVGAVFLCARPRRSPAQEDGKVYINMPGRGSTSRVKFSRSADAPAYQQGQNQLYNELNLGRREEYDVLDKRRGRDPEMGGKPQRRKNPQEGLYNELQKDKMAEAYSEIGMKGERRRGKGHDGLYQGLSTATKDTYDALHMQALPPRRAKRSGSGATNFSLLKQAGDVEENPGPMDWIWRILFLVGAATGAHSFEQVQLQQPGAELVKPGASVKMSCKASGYAFSSYWINWMKQKPGQGLEWIGQIYPGDGDTNYNGKFKGRATLTADTSSSTAYMQLSSLTSEDSAVYFCARSITTVVGCAMDYWGQGTSVTVSSTRIQNPDPAVYQLRDSKSSDKSVCLFTDFDSQTNVSQSKDSDVYITDKTVLDMRSMDFKSNSAVAWSNKSDFACANAFNNSIIPEDTFFPSPESSCGTTTPGERSSLPAFYPGTSGSCSGCGSLSLPLLAGLVAADAVASLLIVGAVFLCARPRRSPAQEDGKVYINMPGRGSSRRVKFSRSADAPAYQQGQNQLYNELNLGRREEYDVLDKRRGRDPEMGGKPQRRKNPQEGLYNELQKDKMAEAYSEIGMKGERRRGKGHDGLYQGLSTATKDTYDALHMQALPPRRAKRSGSGVKQTLNFDLLKLAGDVESNPGPGHMTEYKPTVRLATRDDVPRAVRTLAAAFADYPATRHTVDPDRHIERVTELQELFLTRVGLDIGKVWVADDGAAVAVWTTPESVEAGAVFAEIGPRMAELSGSRLAAQQQMEGLLAPHRPKEPAWFLATVGVSPDHQGKGLGSAVVLPGVEAAERAGVPAFLETSAPRNLPFYERLGFTVTADVEVPEGPRTWCMTRKPGA

SEQ ID NO: 4429 - protein, 1415 aa, Artificial Sequence
  Synthetic Polypeptide
MALPVTALLLPLALLLHAARPEVQLVESGGGLVQAGGSLRLSCAASGRTFSMGWFRQAPGKEREFVAAITYSGGSPYYADSVKGRFTISRDNAKNTVYLQMNSLKPEDTAVYYCAANPTYGSDWNAENWGQGTQVTVSSGTGGGGSGGGGSGGGGSEFDIQMTQSPSSLSASVGDRVTITCKASDHINNWLAWYQQKPGQAPKLLIYGATTLETGVPSRFSGSGSGTDYTLTISSLQPEDFATYYCQQSWNTPWTFGQGTKLEIKRLEDLKNVFPPEVAVFEPSEAEISHTQKATLVCLATGFYPDHVELSWWVNGKEVHSGVSTDPQPLKEQPALNDSRYCLSSRLRVSATFWQNPRNHFRCQVQFYGLSENDEWTQDRAKPVTQIVSAEAWGRADCGSTTPGERSSLPAFYPGTSGSCSGCGSLSLPLLAGLVAADAVASLLIVGAVFLCARPRRSPAQEDGKVYINMPGRGSTSRVKFSRSADAPAYQQGQNQLYNELNLGRREEYDVLDKRRGRDPEMGGKPQRRKNPQEGLYNELQKDKMAEAYSEIGMKGERRRGKGHDGLYQGLSTATKDTYDALHMQALPPRRAKRSGSGATNFSLLKQAGDVEENPGPMDWIWRILFLVGAATGAHSGPEVQLVESGGGLVQAGGSLRLSCAASGRTFTMGWFRQAPGKEREFVAAISLSPTLAYYADSVKGRFTISRDNAKNTVVLQMNSLKPEDTALYYCAADRKSVMSIRPDYWGQGTQVTVSSGSGGGGSGGGGSGGGGSFEQVQLQQPGAELVKPGASVKMSCKASGYAFSSYWINWMKQKPGQGLEWIGQIYPGDGDTNYNGKFKGRATLTADTSSSTAYMQLSSLTSEDSAVYFCARSITTVVGCAMDYWGQGTSVTVSSTRIQNPDPAVYQLRDSKSSDKSVCLFTDFDSQTNVSQSKDSDVYITDKTVLDMRSMDFKSNSAVAWSNKSDFACANAFNNSIIPEDTFFPSPESSCGTTTPGERSSLPAFYPGTSGSCSGCGSLSLPLLAGLVAADAVASLLIVGAVFLCARPRRSPAQEDGKVYINMPGRGSSRRVKFSRSADAPAYQQGQNQLYNELNLGRREEYDVLDKRRGRDPEMGGKPQRRKNPQEGLYNELQKDKMAEAYSEIGMKGERRRGKGHDGLYQGLSTATKDTYDALHMQALPPRRAKRSGSGVKQTLNFDLLKLAGDVESNPGPGHMTEYKPTVRLATRDDVPRAVRTLAAAFADYPATRHTVDPDRHIERVTELQELFLTRVGLDIGKVWVADDGAAVAVWTTPESVEAGAVFAEIGPRMAELSGSRLAAQQQMEGLLAPHRPKEPAWFLATVGVSPDHQGKGLGSAVVLPGVEAAERAGVPAFLETSAPRNLPFYERLGFTVTADVEVPEGPRTWCMTRKPGA

SEQ ID NO: 4430 - protein, 1148 aa, Artificial Sequence
  Synthetic Polypeptide
MALPVTALLLPLALLLHAARPEVQLVESGGGLVQAGGSLRLSCAASGRTFSMGWFRQAPGKEREFVAAITYSGGSPYYADSVKGRFTISRDNAKNTVYLQMNSLKPEDTAVYYCAANPTYGSDWNAENWGQGTQVTVSSLEDLKNVFPPEVAVFEPSEAEISHTQKATLVCLATGFYPDHVELSWWVNGKEVHSGVSTDPQPLKEQPALNDSRYCLSSRLRVSATFWQNPRNHFRCQVQFYGLSENDEWTQDRAKPVTQIVSAEAWGRADCGSTTPGERSSLPAFYPGTSGSCSGCGSLSLPLLAGLVAADAVASLLIVGAVFLCARPRRSPAQEDGKVYINMPGRGSTSRVKFSRSADAPAYQQGQNQLYNELNLGRREEYDVLDKRRGRDPEMGGKPQRRKNPQEGLYNELQKDKMAEAYSEIGMKGERRRGKGHDGLYQGLSTATKDTYDALHMQALPPRRAKRSGSGATNFSLLKQAGDVEENPGPMDWIWRILFLVGAATGAHSGPEVQLVESGGGLVQAGGSLRLSCAASGRTFTMGWFRQAPGKEREFVAAISLSPTLAYYADSVKGRFTISRDNAKNTVVLQMNSLKPEDTALYYCAADRKSVMSIRPDYWGQGTQVTVSSTRIQNPDPAVYQLRDSKSSDKSVCLFTDFDSQTNVSQSKDSDVYITDKTVLDMRSMDFKSNSAVAWSNKSDFACANAFNNSIIPEDTFFPSPESSCGTTTPGERSSLPAFYPGTSGSCSGCGSLSLPLLAGLVAADAVASLLIVGAVFLCARPRRSPAQEDGKVYINMPGRGSSRRVKFSRSADAPAYQQGQNQLYNELNLGRREEYDVLDKRRGRDPEMGGKPQRRKNPQEGLYNELQKDKMAEAYSEIGMKGERRRGKGHDGLYQGLSTATKDTYDALHMQALPPRRAKRSGSGVKQTLNFDLLKLAGDVESNPGPGHMTEYKPTVRLATRDDVPRAVRTLAAAFADYPATRHTVDPDRHIERVTELQELFLTRVGLDIGKVWVADDGAAVAVWTTPESVEAGAVFAEIGPRMAELSGSRLAAQQQMEGLLAPHRPKEPAWFLATVGVSPDHQGKGLGSAVVLPGVEAAERAGVPAFLETSAPRNLPFYERLGFTVTADVEVPEGPRTWCMTRKPGA

SEQ ID NO: 4431 - protein, 585 aa, Artificial Sequence
  Synthetic Polypeptide
MALPVTALLLPLALLLHAARPACEVQLLESGGGLIQPGGSLRLSCAASGFTFSSHAMTWVRQAPGKGLEWVSAISGSGDYTHYADSVKGRFTISRDNSKNTVYLQMNSLRAEDSAVYYCAKDEDGGSLLGHRGQGTLVTVSSGTGGGGSGGGGSGGGGSEFGSLETTPGERSSLPAFYPGTSGSCSGCGSLSLPLLAGLVAADAVASLLIVGAVFLCARPRRSPAQEDGKVYINMPGRGSTSRVKFSRSADAPAYQQGQNQLYNELNLGRREEYDVLDKRRGRDPEMGGKPQRRKNPQEGLYNELQKDKMAEAYSEIGMKGERRRGKGHDGLYQGLSTATKDTYDALHMQALPPRRAKRSGSGATNFSLLKQAGDVEENPGPTRGHMTEYKPTVRLATRDDVPRAVRTLAAAFADYPATRHTVDPDRHIERVTELQELFLTRVGLDIGKVWVADDGAAVAVWTTPESVEAGAVFAEIGPRMAELSGSRLAAQQQMEGLLAPHRPKEPAWFLATVGVSPDHQGKGLGSAVVLPGVEAAERAGVPAFLETSAPRNLPFYERLGFTVTADVEVPEGPRTWCMTRKPGA

SEQ ID NO: 4432 - protein, 869 aa, Artificial Sequence
  Synthetic Polypeptide
MALPVTALLLPLALLLHAARPDIQMTQSPSSLSASVGDRVTITCKASDHINNWLAWYQQKPGQAPKLLIYGATTLETGVPSRFSGSGSGTDYTLTISSLQPEDFATYYCQQSWNTPWTFGQGTKLEIKRLETTPGERSSLPAFYPGTSGSCSGCGSLSLPLLAGLVAADAVASLLIVGAVFLCARPRRSPAQEDGKVYINMPGRGSTSRVKFSRSADAPAYQQGQNQLYNELNLGRREEYDVLDKRRGRDPEMGGKPQRRKNPQEGLYNELQKDKMAEAYSEIGMKGERRRGKGHDGLYQGLSTATKDTYDALHMQALPPRRAKRSGSGATNFSLLKQAGDVEENPGPMDWIWRILFLVGAATGAHSFEQVQLQQPGAELVKPGASVKMSCKASGYAFSSYWINWMKQKPGQGLEWIGQIYPGDGDTNYNGKFKGRATLTADTSSSTAYMQLSSLTSEDSAVYFCARSITTVVGCAMDYWGQGTSVTVSSTRQSFGLLDPKLSYLLDGILFIYGVILTALFLSSRRVKFSRSADAPAYQQGQNQLYNELNLGRREEYDVLDKRRGRDPEMGGKPQRRKNPQEGLYNELQKDKMAEAYSEIGMKGERRRGKGHDGLYQGLSTATKDTYDALHMQALPPRRAKRSGSGVKQTLNFDLLKLAGDVESNPGPGHMTEYKPTVRLATRDDVPRAVRTLAAAFADYPATRHTVDPDRHIERVTELQELFLTRVGLDIGKVWVADDGAAVAVWTTPESVEAGAVFAEIGPRMAELSGSRLAAQQQMEGLLAPHRPKEPAWFLATVGVSPDHQGKGLGSAVVLPGVEAAERAGVPAFLETSAPRNLPFYERLGFTVTADVEVPEGPRTWCMTRKPGA

SEQ ID NO: 4433 - protein, 921 aa, Artificial Sequence
  Synthetic Polypeptide
MALPVTALLLPLALLLHAARPACEVQLLESGGGLIQPGGSLRLSCAASGFTFSSHAMTWVRQAPGKGLEWVSAISGSGDYTHYADSVKGRFTISRDNSKNTVYLQMNSLRAEDSAVYYCAKDEDGGSLLGHRGQGTLVTVSSGTGGGGSGGGGSGGGGSEFGSLETTPGERSSLPAFYPGTSGSCSGCGSLSLPLLAGLVAADAVASLLIVGAVFLCARPRRSPAQEDGKVYINMPGRGSTSRVKFSRSADAPAYQQGQNQLYNELNLGRREEYDVLDKRRGRDPEMGGKPQRRKNPQEGLYNELQKDKMAEAYSEIGMKGERRRGKGHDGLYQGLSTATKDTYDALHMQALPPRRAKRSGSGATNFSLLKQAGDVEENPGPMDWIWRILFLVGAATGAHSGPEVQLVESGGGLVQAGGSLRLSCAASGRTFSMGWFRQAPGKEREFVAAITYSGGSPYYADSVKGRFTISRDNAKNTVYLQMNSLKPEDTAVYYCAANPTYGSDWNAENWGQGTQVTVSSGSGGGGSGGGGSGGGGSFEGSTRQSFGLLDPKLSYLLDGILFIYGVILTALFLSSRRVKFSRSADAPAYQQGQNQLYNELNLGRREEYDVLDKRRGRDPEMGGKPQRRKNPQEGLYNELQKDKMAEAYSEIGMKGERRRGKGHDGLYQGLSTATKDTYDALHMQALPPRRAKRSGSGVKQTLNFDLLKLAGDVESNPGPGHMTEYKPTVRLATRDDVPRAVRTLAAAFADYPATRHTVDPDRHIERVTELQELFLTRVGLDIGKVWVADDGAAVAVWTTPESVEAGAVFAEIGPRMAELSGSRLAAQQQMEGLLAPHRPKEPAWFLATVGVSPDHQGKGLGSAVVLPGVEAAERAGVPAFLETSAPRNLPFYERLGFTVTADVEVPEGPRTWCMTRKPGA

SEQ ID NO: 4434 - protein, 1071 aa, Artificial Sequence
  Synthetic Polypeptide
MALPVTALLLPLALLLHAARPDIQMTQSPSSLSASVGDRVTITCKASDHINNWLAWYQQKPGQAPKLLIYGATTLETGVPSRFSGSGSGTDYTLTISSLQPEDFATYYCQQSWNTPWTFGQGTKLEIKRLEGQPKANPTVTLFPPSSEELQANKATLVCLISDFYPGAVTVAWKADGSPVKAGVETTKPSKQSNNKYAASSYLSLTPEQWKSHRSYSCQVTHEGSTVEKTVAPTECSGSTTPGERSSLPAFYPGTSGSCSGCGSLSLPLLAGLVAADAVASLLIVGAVFLCARPRRSPAQEDGKVYINMPGRGSTSRVKFSRSADAPAYQQGQNQLYNELNLGRREEYDVLDKRRGRDPEMGGKPQRRKNPQEGLYNELQKDKMAEAYSEIGMKGERRRGKGHDGLYQGLSTATKDTYDALHMQALPPRRAKRSGSGATNFSLLKQAGDVEENPGPMDWIWRILFLVGAATGAHSFEQVQLQQPGAELVKPGASVKMSCKASGYAFSSYWINWMKQKPGQGLEWIGQIYPGDGDTNYNGKFKGRATLTADTSSSTAYMQLSSLTSEDSAVYFCARSITTVVGCAMDYWGQGTSVTVSSTRASTKGPSVFPLAPSSKSTSGGTAALGCLVKDYFPEPVTVSWNSGALTSGVHTFPAVLQSSGLYSLSSVVTVPSSSLGTQTYICNVNHKPSNTKVDKRVEPKSCGTQSFGLLDPKLSYLLDGILFIYGVILTALFLSSRRVKFSRSADAPAYQQGQNQLYNELNLGRREEYDVLDKRRGRDPEMGGKPQRRKNPQEGLYNELQKDKMAEAYSEIGMKGERRRGKGHDGLYQGLSTATKDTYDALHMQALPPRRAKRSGSGVKQTLNFDLLKLAGDVESNPGPGHMATYEVLCEVARKLGTDDREVVLFLLNVFIPQPTLAQLIGALRALKEEGRLTFPLLAECLFRAGRRDLLRDLLHLDPRFLERHLAGTMSYFSPYQLTVLHVDGELCARDIRSLIFLSKDTIGSRSTPQTFLHWVYCMENLDLLGPTDVDALMSMLRSLSRVDLQRQVQTLMGLHLSGPSHSQHYRHTP

SEQ ID NO: 4435 - protein, 1124 aa, Artificial Sequence
  Synthetic Polypeptide
MALPVTALLLPLALLLHAARPDIQMTQSPSSLSASVGDRVTITCKASDHINNWLAWYQQKPGQAPKLLIYGATTLETGVPSRFSGSGSGTDYTLTISSLQPEDFATYYCQQSWNTPWTFGQGTKLEIKRLEGQPKANPTVTLFPPSSEELQANKATLVCLISDFYPGAVTVAWKADGSPVKAGVETTKPSKQSNNKYAASSYLSLTPEQWKSHRSYSCQVTHEGSTVEKTVAPTECSGSTTPGERSSLPAFYPGTSGSCSGCGSLSLPLLAGLVAADAVASLLIVGAVFLCARPRRSPAQEDGKVYINMPGRGSTSRVKFSRSADAPAYQQGQNQLYNELNLGRREEYDVLDKRRGRDPEMGGKPQRRKNPQEGLYNELQKDKMAEAYSEIGMKGERRRGKGHDGLYQGLSTATKDTYDALHMQALPPRRAKRSGSGATNFSLLKQAGDVEENPGPMDWIWRILFLVGAATGAHSFEQVQLQQPGAELVKPGASVKMSCKASGYAFSSYWINWMKQKPGQGLEWIGQIYPGDGDTNYNGKFKGRATLTADTSSSTAYMQLSSLTSEDSAVYFCARSITTVVGCAMDYWGQGTSVTVSSTRASTKGPSVFPLAPSSKSTSGGTAALGCLVKDYFPEPVTVSWNSGALTSGVHTFPAVLQSSGLYSLSSVVTVPSSSLGTQTYICNVNHKPSNTKVDKRVEPKSCGTQSFGLLDPKLSYLLDGILFIYGVILTALFLSSRRVKFSRSADAPAYQQGQNQLYNELNLGRREEYDVLDKRRGRDPEMGGKPQRRKNPQEGLYNELQKDKMAEAYSEIGMKGERRRGKGHDGLYQGLSTATKDTYDALHMQALPPRRAKRSGSGVKQTLNFDLLKLAGDVESNPGPGHMSDSKEVPSLPFLRHLLEELDSHEDSLLLFLCHDAAPGCTTVTQALCSLSQQRKLTLAALVEMLYVLQRMDLLKSRFGLSKEGAEQLLGTSFLTRYRKLMVCVGEELDSSELRALRLFACNLNPSLSTALSESSRFVELVLALENVGLVSPSSVSVLADMLRTLRRLDLCQQLVEYEQQEQARYRYCYAASPSLPVRTLRRGHGASEHEQLCMPVQESSDSPELLRTPVQESSSDSPEQTT

SEQ ID NO: 4436 - protein, 1082 aa, Artificial Sequence
  Synthetic Polypeptide
MALPVTALLLPLALLLHAARPDIQMTQSPSSLSASVGDRVTITCKASDHINNWLAWYQQKPGQAPKLLIYGATTLETGVPSRFSGSGSGTDYTLTISSLQPEDFATYYCQQSWNTPWTFGQGTKLEIKRLEGQPKANPTVTLFPPSSEELQANKATLVCLISDFYPGAVTVAWKADGSPVKAGVETTKPSKQSNNKYAASSYLSLTPEQWKSHRSYSCQVTHEGSTVEKTVAPTECSGSTTPGERSSLPAFYPGTSGSCSGCGSLSLPLLAGLVAADAVASLLIVGAVFLCARPRRSPAQEDGKVYINMPGRGSTSRVKFSRSADAPAYQQGQNQLYNELNLGRREEYDVLDKRRGRDPEMGGKPQRRKNPQEGLYNELQKDKMAEAYSEIGMKGERRRGKGHDGLYQGLSTATKDTYDALHMQALPPRRAKRSGSGATNFSLLKQAGDVEENPGPMDWIWRILFLVGAATGAHSFEQVQLQQPGAELVKPGASVKMSCKASGYAFSSYWINWMKQKPGQGLEWIGQIYPGDGDTNYNGKFKGRATLTADTSSSTAYMQLSSLTSEDSAVYFCARSITTVVGCAMDYWGQGTSVTVSSTRASTKGPSVFPLAPSSKSTSGGTAALGCLVKDYFPEPVTVSWNSGALTSGVHTFPAVLQSSGLYSLSSVVTVPSSSLGTQTYICNVNHKPSNTKVDKRVEPKSCGTQSFGLLDPKLSYLLDGILFIYGVILTALFLSSRRVKFSRSADAPAYQQGQNQLYNELNLGRREEYDVLDKRRGRDPEMGGKPQRRKNPQEGLYNELQKDKMAEAYSEIGMKGERRRGKGHDGLYQGLSTATKDTYDALHMQALPPRRAKRSGSGVKQTLNFDLLKLAGDVESNPGPGHMTEYKPTVRLATRDDVPRAVRTLAAAFADYPATRHTVDPDRHIERVTELQELFLTRVGLDIGKVWVADDGAAVAVWTTPESVEAGAVFAEIGPRMAELSGSRLAAQQQMEGLLAPHRPKEPAWFLATVGVSPDHQGKGLGSAVVLPGVEAAERAGVPAFLETSAPRNLPFYERLGFTVTADVEVPEGPRTWCMTRKPGA

SEQ ID NO: 4437 - protein, 1219 aa, Artificial Sequence
  Synthetic Polypeptide
MALPVTALLLPLALLLHAARPEVQLVESGGGLVQAGGSLRLSCAASGRTFSMGWFRQAPGKEREFVAAITYSGGSPYYADSVKGRFTISRDNAKNTVYLQMNSLKPEDTAVYYCAANPTYGSDWNAENWGQGTQVTVSSGTGGGGSGGGGSGGGGSEFDIQMTQSPSSLSASVGDRVTITCKASDHINNWLAWYQQKPGQAPKLLIYGATTLETGVPSRFSGSGSGTDYTLTISSLQPEDFATYYCQQSWNTPWTFGQGTKLEIKRLEGQPKANPTVTLFPPSSEELQANKATLVCLISDFYPGAVTVAWKADGSPVKAGVETTKPSKQSNNKYAASSYLSLTPEQWKSHRSYSCQVTHEGSTVEKTVAPTECSGSTTPGERSSLPAFYPGTSGSCSGCGSLSLPLLAGLVAADAVASLLIVGAVFLCARPRRSPAQEDGKVYINMPGRGSTSRVKFSRSADAPAYQQGQNQLYNELNLGRREEYDVLDKRRGRDPEMGGKPQRRKNPQEGLYNELQKDKMAEAYSEIGMKGERRRGKGHDGLYQGLSTATKDTYDALHMQALPPRRAKRSGSGATNFSLLKQAGDVEENPGPMDWIWRILFLVGAATGAHSFEQVQLQQPGAELVKPGASVKMSCKASGYAFSSYWINWMKQKPGQGLEWIGQIYPGDGDTNYNGKFKGRATLTADTSSSTAYMQLSSLTSEDSAVYFCARSITTVVGCAMDYWGQGTSVTVSSTRASTKGPSVFPLAPSSKSTSGGTAALGCLVKDYFPEPVTVSWNSGALTSGVHTFPAVLQSSGLYSLSSVVTVPSSSLGTQTYICNVNHKPSNTKVDKRVEPKSCGTQSFGLLDPKLSYLLDGILFIYGVILTALFLSSRRVKFSRSADAPAYQQGQNQLYNELNLGRREEYDVLDKRRGRDPEMGGKPQRRKNPQEGLYNELQKDKMAEAYSEIGMKGERRRGKGHDGLYQGLSTATKDTYDALHMQALPPRRAKRSGSGVKQTLNFDLLKLAGDVESNPGPGHMTEYKPTVRLATRDDVPRAVRTLAAAFADYPATRHTVDPDRHIERVTELQELFLTRVGLDIGKVWVADDGAAVAVWTTPESVEAGAVFAEIGPRMAELSGSRLAAQQQMEGLLAPHRPKEPAWFLATVGVSPDHQGKGLGSAVVLPGVEAAERAGVPAFLETSAPRNLPFYERLGFTVTADVEVPEGPRTWCMTRKPGA

SEQ ID NO: 4438 - protein, 1356 aa, Artificial Sequence
  Synthetic Polypeptide
MALPVTALLLPLALLLHAARPEVQLVESGGGLVQAGGSLRLSCAASGRTFSMGWFRQAPGKEREFVAAITYSGGSPYYADSVKGRFTISRDNAKNTVYLQMNSLKPEDTAVYYCAANPTYGSDWNAENWGQGTQVTVSSGTGGGGSGGGGSGGGGSEFDIQMTQSPSSLSASVGDRVTITCKASDHINNWLAWYQQKPGQAPKLLIYGATTLETGVPSRFSGSGSGTDYTLTISSLQPEDFATYYCQQSWNTPWTFGQGTKLEIKRLEGQPKANPTVTLFPPSSEELQANKATLVCLISDFYPGAVTVAWKADGSPVKAGVETTKPSKQSNNKYAASSYLSLTPEQWKSHRSYSCQVTHEGSTVEKTVAPTECSGSTTPGERSSLPAFYPGTSGSCSGCGSLSLPLLAGLVAADAVASLLIVGAVFLCARPRRSPAQEDGKVYINMPGRGSTSRVKFSRSADAPAYQQGQNQLYNELNLGRREEYDVLDKRRGRDPEMGGKPQRRKNPQEGLYNELQKDKMAEAYSEIGMKGERRRGKGHDGLYQGLSTATKDTYDALHMQALPPRRAKRSGSGATNFSLLKQAGDVEENPGPMDWIWRILFLVGAATGAHSGPEVQLVESGGGLVQAGGSLRLSCAASGRTFTMGWFRQAPGKEREFVAAISLSPTLAYYADSVKGRFTISRDNAKNTVVLQMNSLKPEDTALYYCAADRKSVMSIRPDYWGQGTQVTVSSGSGGGGSGGGGSGGGGSFEQVQLQQPGAELVKPGASVKMSCKASGYAFSSYWINWMKQKPGQGLEWIGQIYPGDGDTNYNGKFKGRATLTADTSSSTAYMQLSSLTSEDSAVYFCARSITTVVGCAMDYWGQGTSVTVSSTRASTKGPSVFPLAPSSKSTSGGTAALGCLVKDYFPEPVTVSWNSGALTSGVHTFPAVLQSSGLYSLSSVVTVPSSSLGTQTYICNVNHKPSNTKVDKRVEPKSCGTQSFGLLDPKLSYLLDGILFIYGVILTALFLSSRRVKFSRSADAPAYQQGQNQLYNELNLGRREEYDVLDKRRGRDPEMGGKPQRRKNPQEGLYNELQKDKMAEAYSEIGMKGERRRGKGHDGLYQGLSTATKDTYDALHMQALPPRRAKRSGSGVKQTLNFDLLKLAGDVESNPGPGHMTEYKPTVRLATRDDVPRAVRTLAAAFADYPATRHTVDPDRHIERVTELQELFLTRVGLDIGKVWVADDGAAVAVWTTPESVEAGAVFAEIGPRMAELSGSRLAAQQQMEGLLAPHRPKEPAWFLATVGVSPDHQGKGLGSAVVLPGVEAAERAGVPAFLETSAPRNLPFYERLGFTVTADVEVPEGPRTWCMTRKPGA

SEQ ID NO: 4439 - protein, 1089 aa, Artificial Sequence
  Synthetic Polypeptide
MALPVTALLLPLALLLHAARPEVQLVESGGGLVQAGGSLRLSCAASGRTFSMGWFRQAPGKEREFVAAITYSGGSPYYADSVKGRFTISRDNAKNTVYLQMNSLKPEDTAVYYCAANPTYGSDWNAENWGQGTQVTVSSLEGQPKANPTVTLFPPSSEELQANKATLVCLISDFYPGAVTVAWKADGSPVKAGVETTKPSKQSNNKYAASSYLSLTPEQWKSHRSYSCQVTHEGSTVEKTVAPTECSGSTTPGERSSLPAFYPGTSGSCSGCGSLSLPLLAGLVAADAVASLLIVGAVFLCARPRRSPAQEDGKVYINMPGRGSTSRVKFSRSADAPAYQQGQNQLYNELNLGRREEYDVLDKRRGRDPEMGGKPQRRKNPQEGLYNELQKDKMAEAYSEIGMKGERRRGKGHDGLYQGLSTATKDTYDALHMQALPPRRAKRSGSGATNFSLLKQAGDVEENPGPMDWIWRILFLVGAATGAHSGPEVQLVESGGGLVQAGGSLRLSCAASGRTFTMGWFRQAPGKEREFVAAISLSPTLAYYADSVKGRFTISRDNAKNTVVLQMNSLKPEDTALYYCAADRKSVMSIRPDYWGQGTQVTVSSTRASTKGPSVFPLAPSSKSTSGGTAALGCLVKDYFPEPVTVSWNSGALTSGVHTFPAVLQSSGLYSLSSVVTVPSSSLGTQTYICNVNHKPSNTKVDKRVEPKSCGTQSFGLLDPKLSYLLDGILFIYGVILTALFLSSRRVKFSRSADAPAYQQGQNQLYNELNLGRREEYDVLDKRRGRDPEMGGKPQRRKNPQEGLYNELQKDKMAEAYSEIGMKGERRRGKGHDGLYQGLSTATKDTYDALHMQALPPRRAKRSGSGVKQTLNFDLLKLAGDVESNPGPGHMTEYKPTVRLATRDDVPRAVRTLAAAFADYPATRHTVDPDRHIERVTELQELFLTRVGLDIGKVWVADDGAAVAVWTTPESVEAGAVFAEIGPRMAELSGSRLAAQQQMEGLLAPHRPKEPAWFLATVGVSPDHQGKGLGSAVVLPGVEAAERAGVPAFLETSAPRNLPFYERLGFTVTADVEVPEGPRTWCMTRKPGA

SEQ ID NO: 4440 - protein, 1097 aa, Artificial Sequence
  Synthetic Polypeptide
MALPVTALLLPLALLLHAARPDIQMTQSPSSLSASVGDRVTITCKASDHINNWLAWYQQKPGQAPKLLIYGATTLETGVPSRFSGSGSGTDYTLTISSLQPEDFATYYCQQSWNTPWTFGQGTKLEIKRLEDLKNVFPPEVAVFEPSEAEISHTQKATLVCLATGFYPDHVELSWWVNGKEVHSGVSTDPQPLKEQPALNDSRYCLSSRLRVSATFWQNPRNHFRCQVQFYGLSENDEWTQDRAKPVTQIVSAEAWGRADCGSTTPGERSSLPAFYPGTSGSCSGCGSLSLPLLAGLVAADAVASLLIVGAVFLCARPRRSPAQEDGKVYINMPGRGSTSRVKFSRSADAPAYQQGQNQLYNELNLGRREEYDVLDKRRGRDPEMGGKPQRRKNPQEGLYNELQKDKMAEAYSEIGMKGERRRGKGHDGLYQGLSTATKDTYDALHMQALPPRRAKRSGSGATNFSLLKQAGDVEENPGPMDWIWRILFLVGAATGAHSFEQVQLQQPGAELVKPGASVKMSCKASGYAFSSYWINWMKQKPGQGLEWIGQIYPGDGDTNYNGKFKGRATLTADTSSSTAYMQLSSLTSEDSAVYFCARSITTVVGCAMDYWGQGTSVTVSSTRIQNPDPAVYQLRDSKSSDKSVCLFTDFDSQTNVSQSKDSDVYITDKTVLDMRSMDFKSNSAVAWSNKSDFACANAFNNSIIPEDTFFPSPESSCGTQSFGLLDPKLSYLLDGILFIYGVILTALFLSSRRVKFSRSADAPAYQQGQNQLYNELNLGRREEYDVLDKRRGRDPEMGGKPQRRKNPQEGLYNELQKDKMAEAYSEIGMKGERRRGKGHDGLYQGLSTATKDTYDALHMQALPPRRAKRSGSGVKQTLNFDLLKLAGDVESNPGPGHMTEYKPTVRLATRDDVPRAVRTLAAAFADYPATRHTVDPDRHIERVTELQELFLTRVGLDIGKVWVADDGAAVAVWTTPESVEAGAVFAEIGPRMAELSGSRLAAQQQMEGLLAPHRPKEPAWFLATVGVSPDHQGKGLGSAVVLPGVEAAERAGVPAFLETSAPRNLPFYERLGFTVTADVEVPEGPRTWCMTRKPGA

SEQ ID NO: 4441 - protein, 1234 aa, Artificial Sequence
  Synthetic Polypeptide
MALPVTALLLPLALLLHAARPEVQLVESGGGLVQAGGSLRLSCAASGRTFSMGWFRQAPGKEREFVAAITYSGGSPYYADSVKGRFTISRDNAKNTVYLQMNSLKPEDTAVYYCAANPTYGSDWNAENWGQGTQVTVSSGTGGGGSGGGGSGGGGSEFDIQMTQSPSSLSASVGDRVTITCKASDHINNWLAWYQQKPGQAPKLLIYGATTLETGVPSRFSGSGSGTDYTLTISSLQPEDFATYYCQQSWNTPWTFGQGTKLEIKRLEDLKNVFPPEVAVFEPSEAEISHTQKATLVCLATGFYPDHVELSWWVNGKEVHSGVSTDPQPLKEQPALNDSRYCLSSRLRVSATFWQNPRNHFRCQVQFYGLSENDEWTQDRAKPVTQIVSAEAWGRADCGSTTPGERSSLPAFYPGTSGSCSGCGSLSLPLLAGLVAADAVASLLIVGAVFLCARPRRSPAQEDGKVYINMPGRGSTSRVKFSRSADAPAYQQGQNQLYNELNLGRREEYDVLDKRRGRDPEMGGKPQRRKNPQEGLYNELQKDKMAEAYSEIGMKGERRRGKGHDGLYQGLSTATKDTYDALHMQALPPRRAKRSGSGATNFSLLKQAGDVEENPGPMDWIWRILFLVGAATGAHSFEQVQLQQPGAELVKPGASVKMSCKASGYAFSSYWINWMKQKPGQGLEWIGQIYPGDGDTNYNGKFKGRATLTADTSSSTAYMQLSSLTSEDSAVYFCARSITTVVGCAMDYWGQGTSVTVSSTRIQNPDPAVYQLRDSKSSDKSVCLFTDFDSQTNVSQSKDSDVYITDKTVLDMRSMDFKSNSAVAWSNKSDFACANAFNNSIIPEDTFFPSPESSCGTQSFGLLDPKLSYLLDGILFIYGVILTALFLSSRRVKFSRSADAPAYQQGQNQLYNELNLGRREEYDVLDKRRGRDPEMGGKPQRRKNPQEGLYNELQKDKMAEAYSEIGMKGERRRGKGHDGLYQGLSTATKDTYDALHMQALPPRRAKRSGSGVKQTLNFDLLKLAGDVESNPGPGHMTEYKPTVRLATRDDVPRAVRTLAAAFADYPATRHTVDPDRHIERVTELQELFLTRVGLDIGKVWVADDGAAVAVWTTPESVEAGAVFAEIGPRMAELSGSRLAAQQQMEGLLAPHRPKEPAWFLATVGVSPDHQGKGLGSAVVLPGVEAAERAGVPAFLETSAPRNLPFYERLGFTVTADVEVPEGPRTWCMTRKPGA

SEQ ID NO: 4442 - protein, 1371 aa, Artificial Sequence
  Synthetic Polypeptide
MALPVTALLLPLALLLHAARPEVQLVESGGGLVQAGGSLRLSCAASGRTFSMGWFRQAPGKEREFVAAITYSGGSPYYADSVKGRFTISRDNAKNTVYLQMNSLKPEDTAVYYCAANPTYGSDWNAENWGQGTQVTVSSGTGGGGSGGGGSGGGGSEFDIQMTQSPSSLSASVGDRVTITCKASDHINNWLAWYQQKPGQAPKLLIYGATTLETGVPSRFSGSGSGTDYTLTISSLQPEDFATYYCQQSWNTPWTFGQGTKLEIKRLEDLKNVFPPEVAVFEPSEAEISHTQKATLVCLATGFYPDHVELSWWVNGKEVHSGVSTDPQPLKEQPALNDSRYCLSSRLRVSATFWQNPRNHFRCQVQFYGLSENDEWTQDRAKPVTQIVSAEAWGRADCGSTTPGERSSLPAFYPGTSGSCSGCGSLSLPLLAGLVAADAVASLLIVGAVFLCARPRRSPAQEDGKVYINMPGRGSTSRVKFSRSADAPAYQQGQNQLYNELNLGRREEYDVLDKRRGRDPEMGGKPQRRKNPQEGLYNELQKDKMAEAYSEIGMKGERRRGKGHDGLYQGLSTATKDTYDALHMQALPPRRAKRSGSGATNFSLLKQAGDVEENPGPMDWIWRILFLVGAATGAHSGPEVQLVESGGGLVQAGGSLRLSCAASGRTFTMGWFRQAPGKEREFVAAISLSPTLAYYADSVKGRFTISRDNAKNTVVLQMNSLKPEDTALYYCAADRKSVMSIRPDYWGQGTQVTVSSGSGGGGSGGGGSGGGGSFEQVQLQQPGAELVKPGASVKMSCKASGYAFSSYWINWMKQKPGQGLEWIGQIYPGDGDTNYNGKFKGRATLTADTSSSTAYMQLSSLTSEDSAVYFCARSITTVVGCAMDYWGQGTSVTVSSTRIQNPDPAVYQLRDSKSSDKSVCLFTDFDSQTNVSQSKDSDVYITDKTVLDMRSMDFKSNSAVAWSNKSDFACANAFNNSIIPEDTFFPSPESSCGTQSFGLLDPKLSYLLDGILFIYGVILTALFLSSRRVKFSRSADAPAYQQGQNQLYNELNLGRREEYDVLDKRRGRDPEMGGKPQRRKNPQEGLYNELQKDKMAEAYSEIGMKGERRRGKGHDGLYQGLSTATKDTYDALHMQALPPRRAKRSGSGVKQTLNFDLLKLAGDVESNPGPGHMTEYKPTVRLATRDDVPRAVRTLAAAFADYPATRHTVDPDRHIERVTELQELFLTRVGLDIGKVWVADDGAAVAVWTTPESVEAGAVFAEIGPRMAELSGSRLAAQQQMEGLLAPHRPKEPAWFLATVGVSPDHQGKGLGSAVVLPGVEAAERAGVPAFLETSAPRNLPFYERLGFTVTADVEVPEGPRTWCMTRKPGA

SEQ ID NO: 4443 - protein, 1104 aa, Artificial Sequence
  Synthetic Polypeptide
MALPVTALLLPLALLLHAARPEVQLVESGGGLVQAGGSLRLSCAASGRTFSMGWFRQAPGKEREFVAAITYSGGSPYYADSVKGRFTISRDNAKNTVYLQMNSLKPEDTAVYYCAANPTYGSDWNAENWGQGTQVTVSSLEDLKNVFPPEVAVFEPSEAEISHTQKATLVCLATGFYPDHVELSWWVNGKEVHSGVSTDPQPLKEQPALNDSRYCLSSRLRVSATFWQNPRNHFRCQVQFYGLSENDEWTQDRAKPVTQIVSAEAWGRADCGSTTPGERSSLPAFYPGTSGSCSGCGSLSLPLLAGLVAADAVASLLIVGAVFLCARPRRSPAQEDGKVYINMPGRGSTSRVKFSRSADAPAYQQGQNQLYNELNLGRREEYDVLDKRRGRDPEMGGKPQRRKNPQEGLYNELQKDKMAEAYSEIGMKGERRRGKGHDGLYQGLSTATKDTYDALHMQALPPRRAKRSGSGATNFSLLKQAGDVEENPGPMDWIWRILFLVGAATGAHSGPEVQLVESGGGLVQAGGSLRLSCAASGRTFTMGWFRQAPGKEREFVAAISLSPTLAYYADSVKGRFTISRDNAKNTVVLQMNSLKPEDTALYYCAADRKSVMSIRPDYWGQGTQVTVSSTRIQNPDPAVYQLRDSKSSDKSVCLFTDFDSQTNVSQSKDSDVYITDKTVLDMRSMDFKSNSAVAWSNKSDFACANAFNNSIIPEDTFFPSPESSCGTQSFGLLDPKLSYLLDGILFIYGVILTALFLSSRRVKFSRSADAPAYQQGQNQLYNELNLGRREEYDVLDKRRGRDPEMGGKPQRRKNPQEGLYNELQKDKMAEAYSEIGMKGERRRGKGHDGLYQGLSTATKDTYDALHMQALPPRRAKRSGSGVKQTLNFDLLKLAGDVESNPGPGHMTEYKPTVRLATRDDVPRAVRTLAAAFADYPATRHTVDPDRHIERVTELQELFLTRVGLDIGKVWVADDGAAVAVWTTPESVEAGAVFAEIGPRMAELSGSRLAAQQQMEGLLAPHRPKEPAWFLATVGVSPDHQGKGLGSAVVLPGVEAAERAGVPAFLETSAPRNLPFYERLGFTVTADVEVPEGPRTWCMTRKPGA

SEQ ID NO: 4444 - protein, 585 aa, Artificial Sequence; identical to SEQ ID NO: 4431
  Synthetic Polypeptide

SEQ ID NO: 4445 - protein, 825 aa, Artificial Sequence
  Synthetic Polypeptide
MALPVTALLLPLALLLHAARPDIQMTQSPSSLSASVGDRVTITCKASDHINNWLAWYQQKPGQAPKLLIYGATTLETGVPSRFSGSGSGTDYTLTISSLQPEDFATYYCQQSWNTPWTFGQGTKLEIKRLEQSFGLLDPKLSYLLDGILFIYGVILTALFLSTSRVKFSRSADAPAYQQGQNQLYNELNLGRREEYDVLDKRRGRDPEMGGKPQRRKNPQEGLYNELQKDKMAEAYSEIGMKGERRRGKGHDGLYQGLSTATKDTYDALHMQALPPRRAKRSGSGATNFSLLKQAGDVEENPGPMDWIWRILFLVGAATGAHSFEQVQLQQPGAELVKPGASVKMSCKASGYAFSSYWINWMKQKPGQGLEWIGQIYPGDGDTNYNGKFKGRATLTADTSSSTAYMQLSSLTSEDSAVYFCARSITTVVGCAMDYWGQGTSVTVSSTRQSFGLLDPKLSYLLDGILFIYGVILTALFLSSRRVKFSRSADAPAYQQGQNQLYNELNLGRREEYDVLDKRRGRDPEMGGKPQRRKNPQEGLYNELQKDKMAEAYSEIGMKGERRRGKGHDGLYQGLSTATKDTYDALHMQALPPRRAKRSGSGVKQTLNFDLLKLAGDVESNPGPGHMTEYKPTVRLATRDDVPRAVRTLAAAFADYPATRHTVDPDRHIERVTELQELFLTRVGLDIGKVWVADDGAAVAVWTTPESVEAGAVFAEIGPRMAELSGSRLAAQQQMEGLLAPHRPKEPAWFLATVGVSPDHQGKGLGSAVVLPGVEAAERAGVPAFLETSAPRNLPFYERLGFTVTADVEVPEGPRTWCMTRKPGA

SEQ ID NO: 4446 - protein, 877 aa, Artificial Sequence
  Synthetic Polypeptide
MALPVTALLLPLALLLHAARPACEVQLLESGGGLIQPGGSLRLSCAASGFTFSSHAMTWVRQAPGKGLEWVSAISGSGDYTHYADSVKGRFTISRDNSKNTVYLQMNSLRAEDSAVYYCAKDEDGGSLLGHRGQGTLVTVSSGTGGGGSGGGGSGGGGSEFGSLEQSFGLLDPKLSYLLDGILFIYGVILTALFLSTSRVKFSRSADAPAYQQGQNQLYNELNLGRREEYDVLDKRRGRDPEMGGKPQRRKNPQEGLYNELQKDKMAEAYSEIGMKGERRRGKGHDGLYQGLSTATKDTYDALHMQALPPRRAKRSGSGATNFSLLKQAGDVEENPGPMDWIWRILFLVGAATGAHSGPEVQLVESGGGLVQAGGSLRLSCAASGRTFSMGWFRQAPGKEREFVAAITYSGGSPYYADSVKGRFTISRDNAKNTVYLQMNSLKPEDTAVYYCAANPTYGSDWNAENWGQGTQVTVSSGSGGGGSGGGGSGGGGSFEGSTRQSFGLLDPKLSYLLDGILFIYGVILTALFLSSRRVKFSRSADAPAYQQGQNQLYNELNLGRREEYDVLDKRRGRDPEMGGKPQRRKNPQEGLYNELQKDKMAEAYSEIGMKGERRRGKGHDGLYQGLSTATKDTYDALHMQALPPRRAKRSGSGVKQTLNFDLLKLAGDVESNPGPGHMTEYKPTVRLATRDDVPRAVRTLAAAFADYPATRHTVDPDRHIERVTELQELFLTRVGLDIGKVWVADDGAAVAVWTTPESVEAGAVFAEIGPRMAELSGSRLAAQQQMEGLLAPHRPKEPAWFLATVGVSPDHQGKGLGSAVVLPGVEAAERAGVPAFLETSAPRNLPFYERLGFTVTADVEVPEGPRTWCMTRKPGA

SEQ ID NO: 4447 - protein, 1027 aa, Artificial Sequence
  Synthetic Polypeptide
MALPVTALLLPLALLLHAARPDIQMTQSPSSLSASVGDRVTITCKASDHINNWLAWYQQKPGQAPKLLIYGATTLETGVPSRFSGSGSGTDYTLTISSLQPEDFATYYCQQSWNTPWTFGQGTKLEIKRLEGQPKANPTVTLFPPSSEELQANKATLVCLISDFYPGAVTVAWKADGSPVKAGVETTKPSKQSNNKYAASSYLSLTPEQWKSHRSYSCQVTHEGSTVEKTVAPTECSGSQSFGLLDPKLSYLLDGILFIYGVILTALFLSTSRVKFSRSADAPAYQQGQNQLYNELNLGRREEYDVLDKRRGRDPEMGGKPQRRKNPQEGLYNELQKDKMAEAYSEIGMKGERRRGKGHDGLYQGLSTATKDTYDALHMQALPPRRAKRSGSGATNFSLLKQAGDVEENPGPMDWIWRILFLVGAATGAHSFEQVQLQQPGAELVKPGASVKMSCKASGYAFSSYWINWMKQKPGQGLEWIGQIYPGDGDTNYNGKFKGRATLTADTSSSTAYMQLSSLTSEDSAVYFCARSITTVVGCAMDYWGQGTSVTVSSTRASTKGPSVFPLAPSSKSTSGGTAALGCLVKDYFPEPVTVSWNSGALTSGVHTFPAVLQSSGLYSLSSVVTVPSSSLGTQTYICNVNHKPSNTKVDKRVEPKSCGTQSFGLLDPKLSYLLDGILFIYGVILTALFLSSRRVKFSRSADAPAYQQGQNQLYNELNLGRREEYDVLDKRRGRDPEMGGKPQRRKNPQEGLYNELQKDKMAEAYSEIGMKGERRRGKGHDGLYQGLSTATKDTYDALHMQALPPRRAKRSGSGVKQTLNFDLLKLAGDVESNPGPGHMATYEVLCEVARKLGTDDREVVLFLLNVFIPQPTLAQLIGALRALKEEGRLTFPLLAECLFRAGRRDLLRDLLHLDPRFLERHLAGTMSYFSPYQLTVLHVDGELCARDIRSLIFLSKDTIGSRSTPQTFLHWVYCMENLDLLGPTDVDALMSMLRSLSRVDLQRQVQTLMGLHLSGPSHSQHYRHTP

SEQ ID NO: 4448 - protein, 1080 aa, Artificial Sequence
  Synthetic Polypeptide
MALPVTALLLPLALLLHAARPDIQMTQSPSSLSASVGDRVTITCKASDHINNWLAWYQQKPGQAPKLLIYGATTLETGVPSRFSGSGSGTDYTLTISSLQPEDFATYYCQQSWNTPWTFGQGTKLEIKRLEGQPKANPTVTLFPPSSEELQANKATLVCLISDFYPGAVTVAWKADGSPVKAGVETTKPSKQSNNKYAASSYLSLTPEQWKSHRSYSCQVTHEGSTVEKTVAPTECSGSQSFGLLDPKLSYLLDGILFIYGVILTALFLSTSRVKFSRSADAPAYQQGQNQLYNELNLGRREEYDVLDKRRGRDPEMGGKPQRRKNPQEGLYNELQKDKMAEAYSEIGMKGERRRGKGHDGLYQGLSTATKDTYDALHMQALPPRRAKRSGSGATNFSLLKQAGDVEENPGPMDWIWRILFLVGAATGAHSFEQVQLQQPGAELVKPGASVKMSCKASGYAFSSYWINWMKQKPGQGLEWIGQIYPGDGDTNYNGKFKGRATLTADTSSSTAYMQLSSLTSEDSAVYFCARSITTVVGCAMDYWGQGTSVTVSSTRASTKGPSVFPLAPSSKSTSGGTAALGCLVKDYFPEPVTVSWNSGALTSGVHTFPAVLQSSGLYSLSSVVTVPSSSLGTQTYICNVNHKPSNTKVDKRVEPKSCGTQSFGLLDPKLSYLLDGILFIYGVILTALFLSSRRVKFSRSADAPAYQQGQNQLYNELNLGRREEYDVLDKRRGRDPEMGGKPQRRKNPQEGLYNELQKDKMAEAYSEIGMKGERRRGKGHDGLYQGLSTATKDTYDALHMQALPPRRAKRSGSGVKQTLNFDLLKLAGDVESNPGPGHMSDSKEVPSLPFLRHLLEELDSHEDSLLLFLCHDAAPGCTTVTQALCSLSQQRKLTLAALVEMLYVLQRMDLLKSRFGLSKEGAEQLLGTSFLTRYRKLMVCVGEELDSSELRALRLFACNLNPSLSTALSESSRFVELVLALENVGLVSPSSVSVLADMLRTLRRLDLCQQLVEYEQQEQARYRYCYAASPSLPVRTLRRGHGASEHEQLCMPVQESSDSPELLRTPVQESSSDSPEQTT

SEQ ID NO: 4449 - protein, 1038 aa, Artificial Sequence
  Synthetic Polypeptide
MALPVTALLLPLALLLHAARPDIQMTQSPSSLSASVGDRVTITCKASDHINNWLAWYQQKPGQAPKLLIYGATTLETGVPSRFSGSGSGTDYTLTISSLQPEDFATYYCQQSWNTPWTFGQGTKLEIKRLEGQPKANPTVTLFPPSSEELQANKATLVCLISDFYPGAVTVAWKADGSPVKAGVETTKPSKQSNNKYAASSYLSLTPEQWKSHRSYSCQVTHEGSTVEKTVAPTECSGSQSFGLLDPKLSYLLDGILFIYGVILTALFLSTSRVKFSRSADAPAYQQGQNQLYNELNLGRREEYDVLDKRRGRDPEMGGKPQRRKNPQEGLYNELQKDKMAEAYSEIGMKGERRRGKGHDGLYQGLSTATKDTYDALHMQALPPRRAKRSGSGATNFSLLKQAGDVEENPGPMDWIWRILFLVGAATGAHSFEQVQLQQPGAELVKPGASVKMSCKASGYAFSSYWINWMKQKPGQGLEWIGQIYPGDGDTNYNGKFKGRATLTADTSSSTAYMQLSSLTSEDSAVYFCARSITTVVGCAMDYWGQGTSVTVSSTRASTKGPSVFPLAPSSKSTSGGTAALGCLVKDYFPEPVTVSWNSGALTSGVHTFPAVLQSSGLYSLSSVVTVPSSSLGTQTYICNVNHKPSNTKVDKRVEPKSCGTQSFGLLDPKLSYLLDGILFIYGVILTALFLSSRRVKFSRSADAPAYQQGQNQLYNELNLGRREEYDVLDKRRGRDPEMGGKPQRRKNPQEGLYNELQKDKMAEAYSEIGMKGERRRGKGHDGLYQGLSTATKDTYDALHMQALPPRRAKRSGSGVKQTLNFDLLKLAGDVESNPGPGHMTEYKPTVRLATRDDVPRAVRTLAAAFADYPATRHTVDPDRHIERVTELQELFLTRVGLDIGKVWVADDGAAVAVWTTPESVEAGAVFAEIGPRMAELSGSRLAAQQQMEGLLAPHRPKEPAWFLATVGVSPDHQGKGLGSAVVLPGVEAAERAGVPAFLETSAPRNLPFYERLGFTVTADVEVPEGPRTWCMTRKPGA

SEQ ID NO: 4450 - protein, 1175 aa, Artificial Sequence
  Synthetic Polypeptide
MALPVTALLLPLALLLHAARPEVQLVESGGGLVQAGGSLRLSCAASGRTFSMGWFRQAPGKEREFVAAITYSGGSPYYADSVKGRFTISRDNAKNTVYLQMNSLKPEDTAVYYCAANPTYGSDWNAENWGQGTQVTVSSGTGGGGSGGGGSGGGGSEFDIQMTQSPSSLSASVGDRVTITCKASDHINNWLAWYQQKPGQAPKLLIYGATTLETGVPSRFSGSGSGTDYTLTISSLQPEDFATYYCQQSWNTPWTFGQGTKLEIKRLEGQPKANPTVTLFPPSSEELQANKATLVCLISDFYPGAVTVAWKADGSPVKAGVETTKPSKQSNNKYAASSYLSLTPEQWKSHRSYSCQVTHEGSTVEKTVAPTECSGSQSFGLLDPKLSYLLDGILFIYGVILTALFLSTSRVKFSRSADAPAYQQGQNQLYNELNLGRREEYDVLDKRRGRDPEMGGKPQRRKNPQEGLYNELQKDKMAEAYSEIGMKGERRRGKGHDGLYQGLSTATKDTYDALHMQALPPRRAKRSGSGATNFSLLKQAGDVEENPGPMDWIWRILFLVGAATGAHSFEQVQLQQPGAELVKPGASVKMSCKASGYAFSSYWINWMKQKPGQGLEWIGQIYPGDGDTNYNGKFKGRATLTADTSSSTAYMQLSSLTSEDSAVYFCARSITTVVGCAMDYWGQGTSVTVSSTRASTKGPSVFPLAPSSKSTSGGTAALGCLVKDYFPEPVTVSWNSGALTSGVHTFPAVLQSSGLYSLSSVVTVPSSSLGTQTYICNVNHKPSNTKVDKRVEPKSCGTQSFGLLDPKLSYLLDGILFIYGVILTALFLSSRRVKFSRSADAPAYQQGQNQLYNELNLGRREEYDVLDKRRGRDPEMGGKPQRRKNPQEGLYNELQKDKMAEAYSEIGMKGERRRGKGHDGLYQGLSTATKDTYDALHMQALPPRRAKRSGSGVKQTLNFDLLKLAGDVESNPGPGHMTEYKPTVRLATRDDVPRAVRTLAAAFADYPATRHTVDPDRHIERVTELQELFLTRVGLDIGKVWVADDGAAVAVWTTPESVEAGAVFAEIGPRMAELSGSRLAAQQQMEGLLAPHRPKEPAWFLATVGVSPDHQGKGLGSAVVLPGVEAAERAGVPAFLETSAPRNLPFYERLGFTVTADVEVPEGPRTWCMTRKPGA

SEQ ID NO: 4451 - protein, 1312 aa, Artificial Sequence
  Synthetic Polypeptide
MALPVTALLLPLALLLHAARPEVQLVESGGGLVQAGGSLRLSCAASGRTFSMGWFRQAPGKEREFVAAITYSGGSPYYADSVKGRFTISRDNAKNTVYLQMNSLKPEDTAVYYCAANPTYGSDWNAENWGQGTQVTVSSGTGGGGSGGGGSGGGGSEFDIQMTQSPSSLSASVGDRVTITCKASDHINNWLAWYQQKPGQAPKLLIYGATTLETGVPSRFSGSGSGTDYTLTISSLQPEDFATYYCQQSWNTPWTFGQGTKLEIKRLEGQPKANPTVTLFPPSSEELQANKATLVCLISDFYPGAVTVAWKADGSPVKAGVETTKPSKQSNNKYAASSYLSLTPEQWKSHRSYSCQVTHEGSTVEKTVAPTECSGSQSFGLLDPKLSYLLDGILFIYGVILTALFLSTSRVKFSRSADAPAYQQGQNQLYNELNLGRREEYDVLDKRRGRDPEMGGKPQRRKNPQEGLYNELQKDKMAEAYSEIGMKGERRRGKGHDGLYQGLSTATKDTYDALHMQALPPRRAKRSGSGATNFSLLKQAGDVEENPGPMDWIWRILFLVGAATGAHSGPEVQLVESGGGLVQAGGSLRLSCAASGRTFTMGWFRQAPGKEREFVAAISLSPTLAYYADSVKGRFTISRDNAKNTVVLQMNSLKPEDTALYYCAADRKSVMSIRPDYWGQGTQVTVSSGSGGGGSGGGGSGGGGSFEQVQLQQPGAELVKPGASVKMSCKASGYAFSSYWINWMKQKPGQGLEWIGQIYPGDGDTNYNGKFKGRATLTADTSSSTAYMQLSSLTSEDSAVYFCARSITTVVGCAMDYWGQGTSVTVSSTRASTKGPSVFPLAPSSKSTSGGTAALGCLVKDYFPEPVTVSWNSGALTSGVHTFPAVLQSSGLYSLSSVVTVPSSSLGTQTYICNVNHKPSNTKVDKRVEPKSCGTQSFGLLDPKLSYLLDGILFIYGVILTALFLSSRRVKFSRSADAPAYQQGQNQLYNELNLGRREEYDVLDKRRGRDPEMGGKPQRRKNPQEGLYNELQKDKMAEAYSEIGMKGERRRGKGHDGLYQGLSTATKDTYDALHMQALPPRRAKRSGSGVKQTLNFDLLKLAGDVESNPGPGHMTEYKPTVRLATRDDVPRAVRTLAAAFADYPATRHTVDPDRHIERVTELQELFLTRVGLDIGKVWVADDGAAVAVWTTPESVEAGAVFAEIGPRMAELSGSRLAAQQQMEGLLAPHRPKEPAWFLATVGVSPDHQGKGLGSAVVLPGVEAAERAGVPAFLETSAPRNLPFYERLGFTVTADVEVPEGPRTWCMTRKPGA

SEQ ID NO: 4452 - protein, 1045 aa, Artificial Sequence
  Synthetic Polypeptide
MALPVTALLLPLALLLHAARPEVQLVESGGGLVQAGGSLRLSCAASGRTFSMGWFRQAPGKEREFVAAITYSGGSPYYADSVKGRFTISRDNAKNTVYLQMNSLKPEDTAVYYCAANPTYGSDWNAENWGQGTQVTVSSLEGQPKANPTVTLFPPSSEELQANKATLVCLISDFYPGAVTVAWKADGSPVKAGVETTKPSKQSNNKYAASSYLSLTPEQWKSHRSYSCQVTHEGSTVEKTVAPTECSGSQSFGLLDPKLSYLLDGILFIYGVILTALFLSTSRVKFSRSADAPAYQQGQNQLYNELNLGRREEYDVLDKRRGRDPEMGGKPQRRKNPQEGLYNELQKDKMAEAYSEIGMKGERRRGKGHDGLYQGLSTATKDTYDALHMQALPPRRAKRSGSGATNFSLLKQAGDVEENPGPMDWIWRILFLVGAATGAHSGPEVQLVESGGGLVQAGGSLRLSCAASGRTFTMGWFRQAPGKEREFVAAISLSPTLAYYADSVKGRFTISRDNAKNTVVLQMNSLKPEDTALYYCAADRKSVMSIRPDYWGQGTQVTVSSTRASTKGPSVFPLAPSSKSTSGGTAALGCLVKDYFPEPVTVSWNSGALTSGVHTFPAVLQSSGLYSLSSVVTVPSSSLGTQTYICNVNHKPSNTKVDKRVEPKSCGTQSFGLLDPKLSYLLDGILFIYGVILTALFLSSRRVKFSRSADAPAYQQGQNQLYNELNLGRREEYDVLDKRRGRDPEMGGKPQRRKNPQEGLYNELQKDKMAEAYSEIGMKGERRRGKGHDGLYQGLSTATKDTYDALHMQALPPRRAKRSGSGVKQTLNFDLLKLAGDVESNPGPGHMTEYKPTVRLATRDDVPRAVRTLAAAFADYPATRHTVDPDRHIERVTELQELFLTRVGLDIGKVWVADDGAAVAVWTTPESVEAGAVFAEIGPRMAELSGSRLAAQQQMEGLLAPHRPKEPAWFLATVGVSPDHQGKGLGSAVVLPGVEAAERAGVPAFLETSAPRNLPFYERLGFTVTADVEVPEGPRTWCMTRKPGA

SEQ ID NO: 4453 - protein, 1053 aa, Artificial Sequence
  Synthetic Polypeptide
MALPVTALLLPLALLLHAARPDIQMTQSPSSLSASVGDRVTITCKASDHINNWLAWYQQKPGQAPKLLIYGATTLETGVPSRFSGSGSGTDYTLTISSLQPEDFATYYCQQSWNTPWTFGQGTKLEIKRLEDLKNVFPPEVAVFEPSEAEISHTQKATLVCLATGFYPDHVELSWWVNGKEVHSGVSTDPQPLKEQPALNDSRYCLSSRLRVSATFWQNPRNHFRCQVQFYGLSENDEWTQDRAKPVTQIVSAEAWGRADCGSQSFGLLDPKLSYLLDGILFIYGVILTALFLSTSRVKFSRSADAPAYQQGQNQLYNELNLGRREEYDVLDKRRGRDPEMGGKPQRRKNPQEGLYNELQKDKMAEAYSEIGMKGERRRGKGHDGLYQGLSTATKDTYDALHMQALPPRRAKRSGSGATNFSLLKQAGDVEENPGPMDWIWRILFLVGAATGAHSFEQVQLQQPGAELVKPGASVKMSCKASGYAFSSYWINWMKQKPGQGLEWIGQIYPGDGDTNYNGKFKGRATLTADTSSSTAYMQLSSLTSEDSAVYFCARSITTVVGCAMDYWGQGTSVTVSSTRIQNPDPAVYQLRDSKSSDKSVCLFTDFDSQTNVSQSKDSDVYITDKTVLDMRSMDFKSNSAVAWSNKSDFACANAFNNSIIPEDTFFPSPESSCGTQSFGLLDPKLSYLLDGILFIYGVILTALFLSSRRVKFSRSADAPAYQQGQNQLYNELNLGRREEYDVLDKRRGRDPEMGGKPQRRKNPQEGLYNELQKDKMAEAYSEIGMKGERRRGKGHDGLYQGLSTATKDTYDALHMQALPPRRAKRSGSGVKQTLNFDLLKLAGDVESNPGPGHMTEYKPTVRLATRDDVPRAVRTLAAAFADYPATRHTVDPDRHIERVTELQELFLTRVGLDIGKVWVADDGAAVAVWTTPESVEAGAVFAEIGPRMAELSGSRLAAQQQMEGLLAPHRPKEPAWFLATVGVSPDHQGKGLGSAVVLPGVEAAERAGVPAFLETSAPRNLPFYERLGFTVTADVEVPEGPRTWCMTRKPGA

SEQ ID NO: 4454 - protein, 1190 aa, Artificial Sequence
  Synthetic Polypeptide
MALPVTALLLPLALLLHAARPEVQLVESGGGLVQAGGSLRLSCAASGRTFSMGWFRQAPGKEREFVAAITYSGGSPYYADSVKGRFTISRDNAKNTVYLQMNSLKPEDTAVYYCAANPTYGSDWNAENWGQGTQVTVSSGTGGGGSGGGGSGGGGSEFDIQMTQSPSSLSASVGDRVTITCKASDHINNWLAWYQQKPGQAPKLLIYGATTLETGVPSRFSGSGSGTDYTLTISSLQPEDFATYYCQQSWNTPWTFGQGTKLEIKRLEDLKNVFPPEVAVFEPSEAEISHTQKATLVCLATGFYPDHVELSWWVNGKEVHSGVSTDPQPLKEQPALNDSRYCLSSRLRVSATFWQNPRNHFRCQVQFYGLSENDEWTQDRAKPVTQIVSAEAWGRADCGSQSFGLLDPKLSYLLDGILFIYGVILTALFLSTSRVKFSRSADAPAYQQGQNQLYNELNLGRREEYDVLDKRRGRDPEMGGKPQRRKNPQEGLYNELQKDKMAEAYSEIGMKGERRRGKGHDGLYQGLSTATKDTYDALHMQALPPRRAKRSGSGATNFSLLKQAGDVEENPGPMDWIWRILFLVGAATGAHSFEQVQLQQPGAELVKPGASVKMSCKASGYAFSSYWINWMKQKPGQGLEWIGQIYPGDGDTNYNGKFKGRATLTADTSSSTAYMQLSSLTSEDSAVYFCARSITTVVGCAMDYWGQGTSVTVSSTRIQNPDPAVYQLRDSKSSDKSVCLFTDFDSQTNVSQSKDSDVYITDKTVLDMRSMDFKSNSAVAWSNKSDFACANAFNNSIIPEDTFFPSPESSCGTQSFGLLDPKLSYLLDGILFIYGVILTALFLSSRRVKFSRSADAPAYQQGQNQLYNELNLGRREEYDVLDKRRGRDPEMGGKPQRRKNPQEGLYNELQKDKMAEAYSEIGMKGERRRGKGHDGLYQGLSTATKDTYDALHMQALPPRRAKRSGSGVKQTLNFDLLKLAGDVESNPGPGHMTEYKPTVRLATRDDVPRAVRTLAAAFADYPATRHTVDPDRHIERVTELQELFLTRVGLDIGKVWVADDGAAVAVWTTPESVEAGAVFAEIGPRMAELSGSRLAAQQQMEGLLAPHRPKEPAWFLATVGVSPDHQGKGLGSAVVLPGVEAAERAGVPAFLETSAPRNLPFYERLGFTVTADVEVPEGPRTWCMTRKPGA

SEQ ID NO: 4455 - protein, 1327 aa, Artificial Sequence
  Synthetic Polypeptide
MALPVTALLLPLALLLHAARPEVQLVESGGGLVQAGGSLRLSCAASGRTFSMGWFRQAPGKEREFVAAITYSGGSPYYADSVKGRFTISRDNAKNTVYLQMNSLKPEDTAVYYCAANPTYGSDWNAENWGQGTQVTVSSGTGGGGSGGGGSGGGGSEFDIQMTQSPSSLSASVGDRVTITCKASDHINNWLAWYQQKPGQAPKLLIYGATTLETGVPSRFSGSGSGTDYTLTISSLQPEDFATYYCQQSWNTPWTFGQGTKLEIKRLEDLKNVFPPEVAVFEPSEAEISHTQKATLVCLATGFYPDHVELSWWVNGKEVHSGVSTDPQPLKEQPALNDSRYCLSSRLRVSATFWQNPRNHFRCQVQFYGLSENDEWTQDRAKPVTQIVSAEAWGRADCGSQSFGLLDPKLSYLLDGILFIYGVILTALFLSTSRVKFSRSADAPAYQQGQNQLYNELNLGRREEYDVLDKRRGRDPEMGGKPQRRKNPQEGLYNELQKDKMAEAYSEIGMKGERRRGKGHDGLYQGLSTATKDTYDALHMQALPPRRAKRSGSGATNFSLLKQAGDVEENPGPMDWIWRILFLVGAATGAHSGPEVQLVESGGGLVQAGGSLRLSCAASGRTFTMGWFRQAPGKEREFVAAISLSPTLAYYADSVKGRFTISRDNAKNTVVLQMNSLKPEDTALYYCAADRKSVMSIRPDYWGQGTQVTVSSGSGGGGSGGGGSGGGGSFEQVQLQQPGAELVKPGASVKMSCKASGYAFSSYWINWMKQKPGQGLEWIGQIYPGDGDTNYNGKFKGRATLTADTSSSTAYMQLSSLTSEDSAVYFCARSITTVVGCAMDYWGQGTSVTVSSTRIQNPDPAVYQLRDSKSSDKSVCLFTDFDSQTNVSQSKDSDVYITDKTVLDMRSMDFKSNSAVAWSNKSDFACANAFNNSIIPEDTFFPSPESSCGTQSFGLLDPKLSYLLDGILFIYGVILTALFLSSRRVKFSRSADAPAYQQGQNQLYNELNLGRREEYDVLDKRRGRDPEMGGKPQRRKNPQEGLYNELQKDKMAEAYSEIGMKGERRRGKGHDGLYQGLSTATKDTYDALHMQALPPRRAKRSGSGVKQTLNFDLLKLAGDVESNPGPGHMTEYKPTVRLATRDDVPRAVRTLAAAFADYPATRHTVDPDRHIERVTELQELFLTRVGLDIGKVWVADDGAAVAVWTTPESVEAGAVFAEIGPRMAELSGSRLAAQQQMEGLLAPHRPKEPAWFLATVGVSPDHQGKGLGSAVVLPGVEAAERAGVPAFLETSAPRNLPFYERLGFTVTADVEVPEGPRTWCMTRKPGA

SEQ ID NO: 4456 - protein, 1060 aa, Artificial Sequence
  Synthetic Polypeptide
MALPVTALLLPLALLLHAARPEVQLVESGGGLVQAGGSLRLSCAASGRTFSMGWFRQAPGKEREFVAAITYSGGSPYYADSVKGRFTISRDNAKNTVYLQMNSLKPEDTAVYYCAANPTYGSDWNAENWGQGTQVTVSSLEDLKNVFPPEVAVFEPSEAEISHTQKATLVCLATGFYPDHVELSWWVNGKEVHSGVSTDPQPLKEQPALNDSRYCLSSRLRVSATFWQNPRNHFRCQVQFYGLSENDEWTQDRAKPVTQIVSAEAWGRADCGSQSFGLLDPKLSYLLDGILFIYGVILTALFLSTSRVKFSRSADAPAYQQGQNQLYNELNLGRREEYDVLDKRRGRDPEMGGKPQRRKNPQEGLYNELQKDKMAEAYSEIGMKGERRRGKGHDGLYQGLSTATKDTYDALHMQALPPRRAKRSGSGATNFSLLKQAGDVEENPGPMDWIWRILFLVGAATGAHSGPEVQLVESGGGLVQAGGSLRLSCAASGRTFTMGWFRQAPGKEREFVAAISLSPTLAYYADSVKGRFTISRDNAKNTVVLQMNSLKPEDTALYYCAADRKSVMSIRPDYWGQGTQVTVSSTRIQNPDPAVYQLRDSKSSDKSVCLFTDFDSQTNVSQSKDSDVYITDKTVLDMRSMDFKSNSAVAWSNKSDFACANAFNNSIIPEDTFFPSPESSCGTQSFGLLDPKLSYLLDGILFIYGVILTALFLSSRRVKFSRSADAPAYQQGQNQLYNELNLGRREEYDVLDKRRGRDPEMGGKPQRRKNPQEGLYNELQKDKMAEAYSEIGMKGERRRGKGHDGLYQGLSTATKDTYDALHMQALPPRRAKRSGSGVKQTLNFDLLKLAGDVESNPGPGHMTEYKPTVRLATRDDVPRAVRTLAAAFADYPATRHTVDPDRHIERVTELQELFLTRVGLDIGKVWVADDGAAVAVWTTPESVEAGAVFAEIGPRMAELSGSRLAAQQQMEGLLAPHRPKEPAWFLATVGVSPDHQGKGLGSAVVLPGVEAAERAGVPAFLETSAPRNLPFYERLGFTVTADVEVPEGPRTWCMTRKPGA

SEQ ID NO: 4457 - protein, 541 aa, Artificial Sequence
  Synthetic Polypeptide
MALPVTALLLPLALLLHAARPACEVQLLESGGGLIQPGGSLRLSCAASGFTFSSHAMTWVRQAPGKGLEWVSAISGSGDYTHYADSVKGRFTISRDNSKNTVYLQMNSLRAEDSAVYYCAKDEDGGSLLGHRGQGTLVTVSSGTGGGGSGGGGSGGGGSEFGSLEQSFGLLDPKLSYLLDGILFIYGVILTALFLSTSRVKFSRSADAPAYQQGQNQLYNELNLGRREEYDVLDKRRGRDPEMGGKPQRRKNPQEGLYNELQKDKMAEAYSEIGMKGERRRGKGHDGLYQGLSTATKDTYDALHMQALPPRRAKRSGSGATNFSLLKQAGDVEENPGPTRGHMTEYKPTVRLATRDDVPRAVRTLAAAFADYPATRHTVDPDRHIERVTELQELFLTRVGLDIGKVWVADDGAAVAVWTTPESVEAGAVFAEIGPRMAELSGSRLAAQQQMEGLLAPHRPKEPAWFLATVGVSPDHQGKGLGSAVVLPGVEAAERAGVPAFLETSAPRNLPFYERLGFTVTADVEVPEGPRTWCMTRKPGA

SEQ ID NO: 4458 - protein, 905 aa, Artificial Sequence
  Synthetic Polypeptide
MALPVTALLLPLALLLHAARPDIQMTQSPSSLSASVGDRVTITCKASDHINNWLAWYQQKPGQAPKLLIYGATTLETGVPSRFSGSGSGTDYTLTISSLQPEDFATYYCQQSWNTPWTFGQGTKLEIKRLETTPGERSSLPAFYPGTSGSCSGCGSLSLPLLAGLVAADAVASLLIVGAVFLCARPRRSPAQEDGKVYINMPGRGSTSRVKFSRSADAPAYQQGQNQLYNELNLGRREEYDVLDKRRGRDPEMGGKPQRRKNPQEGLYNELQKDKMAEAYSEIGMKGERRRGKGHDGLYQGLSTATKDTYDALHMQALPPRRAKRSGSGATNFSLLKQAGDVEENPGPMDWIWRILFLVGAATGAHSFEQVQLQQPGAELVKPGASVKMSCKASGYAFSSYWINWMKQKPGQGLEWIGQIYPGDGDTNYNGKFKGRATLTADTSSSTAYMQLSSLTSEDSAVYFCARSITTVVGCAMDYWGQGTSVTVSSTRQSFGLLDPKLCYLLDGILFIYGVILTALFLRDQRLPPDAHKPPGGGSFRTPIQEEQADAHSTLAKISSRRVKFSRSADAPAYQQGQNQLYNELNLGRREEYDVLDKRRGRDPEMGGKPQRRKNPQEGLYNELQKDKMAEAYSEIGMKGERRRGKGHDGLYQGLSTATKDTYDALHMQALPPRRAKRSGSGVKQTLNFDLLKLAGDVESNPGPGHMTEYKPTVRLATRDDVPRAVRTLAAAFADYPATRHTVDPDRHIERVTELQELFLTRVGLDIGKVWVADDGAAVAVWTTPESVEAGAVFAEIGPRMAELSGSRLAAQQQMEGLLAPHRPKEPAWFLATVGVSPDHQGKGLGSAVVLPGVEAAERAGVPAFLETSAPRNLPFYERLGFTVTADVEVPEGPRTWCMTRKPGA

SEQ ID NO: 4459 - protein, 957 aa, Artificial Sequence
  Synthetic Polypeptide
MALPVTALLLPLALLLHAARPACEVQLLESGGGLIQPGGSLRLSCAASGFTFSSHAMTWVRQAPGKGLEWVSAISGSGDYTHYADSVKGRFTISRDNSKNTVYLQMNSLRAEDSAVYYCAKDEDGGSLLGHRGQGTLVTVSSGTGGGGSGGGGSGGGGSEFGSLETTPGERSSLPAFYPGTSGSCSGCGSLSLPLLAGLVAADAVASLLIVGAVFLCARPRRSPAQEDGKVYINMPGRGSTSRVKFSRSADAPAYQQGQNQLYNELNLGRREEYDVLDKRRGRDPEMGGKPQRRKNPQEGLYNELQKDKMAEAYSEIGMKGERRRGKGHDGLYQGLSTATKDTYDALHMQALPPRRAKRSGSGATNFSLLKQAGDVEENPGPMDWIWRILFLVGAATGAHSGPEVQLVESGGGLVQAGGSLRLSCAASGRTFSMGWFRQAPGKEREFVAAITYSGGSPYYADSVKGRFTISRDNAKNTVYLQMNSLKPEDTAVYYCAANPTYGSDWNAENWGQGTQVTVSSGSGGGGSGGGGSGGGGSFEGSTRQSFGLLDPKLCYLLDGILFIYGVILTALFLRDQRLPPDAHKPPGGGSFRTPIQEEQADAHSTLAKISSRRVKFSRSADAPAYQQGQNQLYNELNLGRREEYDVLDKRRGRDPEMGGKPQRRKNPQEGLYNELQKDKMAEAYSEIGMKGERRRGKGHDGLYQGLSTATKDTYDALHMQALPPRRAKRSGSGVKQTLNFDLLKLAGDVESNPGPGHMTEYKPTVRLATRDDVPRAVRTLAAAFADYPATRHTVDPDRHIERVTELQELFLTRVGLDIGKVWVADDGAAVAVWTTPESVEAGAVFAEIGPRMAELSGSRLAAQQQMEGLLAPHRPKEPAWFLATVGVSPDHQGKGLGSAVVLPGVEAAERAGVPAFLETSAPRNLPFYERLGFTVTADVEVPEGPRTWCMTRKPGA

SEQ ID NO: 4460 - protein, 1107 aa, Artificial Sequence
  Synthetic Polypeptide
MALPVTALLLPLALLLHAARPDIQMTQSPSSLSASVGDRVTITCKASDHINNWLAWYQQKPGQAPKLLIYGATTLETGVPSRFSGSGSGTDYTLTISSLQPEDFATYYCQQSWNTPWTFGQGTKLEIKRLEGQPKANPTVTLFPPSSEELQANKATLVCLISDFYPGAVTVAWKADGSPVKAGVETTKPSKQSNNKYAASSYLSLTPEQWKSHRSYSCQVTHEGSTVEKTVAPTECSGSTTPGERSSLPAFYPGTSGSCSGCGSLSLPLLAGLVAADAVASLLIVGAVFLCARPRRSPAQEDGKVYINMPGRGSTSRVKFSRSADAPAYQQGQNQLYNELNLGRREEYDVLDKRRGRDPEMGGKPQRRKNPQEGLYNELQKDKMAEAYSEIGMKGERRRGKGHDGLYQGLSTATKDTYDALHMQALPPRRAKRSGSGATNFSLLKQAGDVEENPGPMDWIWRILFLVGAATGAHSFEQVQLQQPGAELVKPGASVKMSCKASGYAFSSYWINWMKQKPGQGLEWIGQIYPGDGDTNYNGKFKGRATLTADTSSSTAYMQLSSLTSEDSAVYFCARSITTVVGCAMDYWGQGTSVTVSSTRASTKGPSVFPLAPSSKSTSGGTAALGCLVKDYFPEPVTVSWNSGALTSGVHTFPAVLQSSGLYSLSSVVTVPSSSLGTQTYICNVNHKPSNTKVDKRVEPKSCGTQSFGLLDPKLCYLLDGILFIYGVILTALFLRDQRLPPDAHKPPGGGSFRTPIQEEQADAHSTLAKISSRRVKFSRSADAPAYQQGQNQLYNELNLGRREEYDVLDKRRGRDPEMGGKPQRRKNPQEGLYNELQKDKMAEAYSEIGMKGERRRGKGHDGLYQGLSTATKDTYDALHMQALPPRRAKRSGSGVKQTLNFDLLKLAGDVESNPGPGHMATYEVLCEVARKLGTDDREVVLFLLNVFIPQPTLAQLIGALRALKEEGRLTFPLLAECLFRAGRRDLLRDLLHLDPRFLERHLAGTMSYFSPYQLTVLHVDGELCARDIRSLIFLSKDTIGSRSTPQTFLHWVYCMENLDLLGPTDVDALMSMLRSLSRVDLQRQVQTLMGLHLSGPSHSQHYRHTP

SEQ ID NO: 4461 - protein, 1160 aa, Artificial Sequence
  Synthetic Polypeptide
MALPVTALLLPLALLLHAARPDIQMTQSPSSLSASVGDRVTITCKASDHINNWLAWYQQKPGQAPKLLIYGATTLETGVPSRFSGSGSGTDYTLTISSLQPEDFATYYCQQSWNTPWTFGQGTKLEIKRLEGQPKANPTVTLFPPSSEELQANKATLVCLISDFYPGAVTVAWKADGSPVKAGVETTKPSKQSNNKYAASSYLSLTPEQWKSHRSYSCQVTHEGSTVEKTVAPTECSGSTTPGERSSLPAFYPGTSGSCSGCGSLSLPLLAGLVAADAVASLLIVGAVFLCARPRRSPAQEDGKVYINMPGRGSTSRVKFSRSADAPAYQQGQNQLYNELNLGRREEYDVLDKRRGRDPEMGGKPQRRKNPQEGLYNELQKDKMAEAYSEIGMKGERRRGKGHDGLYQGLSTATKDTYDALHMQALPPRRAKRSGSGATNFSLLKQAGDVEENPGPMDWIWRILFLVGAATGAHSFEQVQLQQPGAELVKPGASVKMSCKASGYAFSSYWINWMKQKPGQGLEWIGQIYPGDGDTNYNGKFKGRATLTADTSSSTAYMQLSSLTSEDSAVYFCARSITTVVGCAMDYWGQGTSVTVSSTRASTKGPSVFPLAPSSKSTSGGTAALGCLVKDYFPEPVTVSWNSGALTSGVHTFPAVLQSSGLYSLSSVVTVPSSSLGTQTYICNVNHKPSNTKVDKRVEPKSCGTQSFGLLDPKLCYLLDGILFIYGVILTALFLRDQRLPPDAHKPPGGGSFRTPIQEEQADAHSTLAKISSRRVKFSRSADAPAYQQGQNQLYNELNLGRREEYDVLDKRRGRDPEMGGKPQRRKNPQEGLYNELQKDKMAEAYSEIGMKGERRRGKGHDGLYQGLSTATKDTYDALHMQALPPRRAKRSGSGVKQTLNFDLLKLAGDVESNPGPGHMSDSKEVPSLPFLRHLLEELDSHEDSLLLFLCHDAAPGCTTVTQALCSLSQQRKLTLAALVEMLYVLQRMDLLKSRFGLSKEGAEQLLGTSFLTRYRKLMVCVGEELDSSELRALRLFACNLNPSLSTALSESSRFVELVLALENVGLVSPSSVSVLADMLRTLRRLDLCQQLVEYEQQEQARYRYCYAASPSLPVRTLRRGHGASEHEQLCMPVQESSDSPELLRTPVQESSSDSPEQTT

SEQ ID NO: 4462 - protein, 1118 aa, Artificial Sequence
  Synthetic Polypeptide
MALPVTALLLPLALLLHAARPDIQMTQSPSSLSASVGDRVTITCKASDHINNWLAWYQQKPGQAPKLLIYGATTLETGVPSRFSGSGSGTDYTLTISSLQPEDFATYYCQQSWNTPWTFGQGTKLEIKRLEGQPKANPTVTLFPPSSEELQANKATLVCLISDFYPGAVTVAWKADGSPVKAGVETTKPSKQSNNKYAASSYLSLTPEQWKSHRSYSCQVTHEGSTVEKTVAPTECSGSTTPGERSSLPAFYPGTSGSCSGCGSLSLPLLAGLVAADAVASLLIVGAVFLCARPRRSPAQEDGKVYINMPGRGSTSRVKFSRSADAPAYQQGQNQLYNELNLGRREEYDVLDKRRGRDPEMGGKPQRRKNPQEGLYNELQKDKMAEAYSEIGMKGERRRGKGHDGLYQGLSTATKDTYDALHMQALPPRRAKRSGSGATNFSLLKQAGDVEENPGPMDWIWRILFLVGAATGAHSFEQVQLQQPGAELVKPGASVKMSCKASGYAFSSYWINWMKQKPGQGLEWIGQIYPGDGDTNYNGKFKGRATLTADTSSSTAYMQLSSLTSEDSAVYFCARSITTVVGCAMDYWGQGTSVTVSSTRASTKGPSVFPLAPSSKSTSGGTAALGCLVKDYFPEPVTVSWNSGALTSGVHTFPAVLQSSGLYSLSSVVTVPSSSLGTQTYICNVNHKPSNTKVDKRVEPKSCGTQSFGLLDPKLCYLLDGILFIYGVILTALFLRDQRLPPDAHKPPGGGSFRTPIQEEQADAHSTLAKISSRRVKFSRSADAPAYQQGQNQLYNELNLGRREEYDVLDKRRGRDPEMGGKPQRRKNPQEGLYNELQKDKMAEAYSEIGMKGERRRGKGHDGLYQGLSTATKDTYDALHMQALPPRRAKRSGSGVKQTLNFDLLKLAGDVESNPGPGHMTEYKPTVRLATRDDVPRAVRTLAAAFADYPATRHTVDPDRHIERVTELQELFLTRVGLDIGKVWVADDGAAVAVWTTPESVEAGAVFAEIGPRMAELSGSRLAAQQQMEGLLAPHRPKEPAWFLATVGVSPDHQGKGLGSAVVLPGVEAAERAGVPAFLETSAPRNLPFYERLGFTVTADVEVPEGPRTWCMTRKPGA

SEQ ID NO: 4463 - protein, 1255 aa, Artificial Sequence
  Synthetic Polypeptide
MALPVTALLLPLALLLHAARPEVQLVESGGGLVQAGGSLRLSCAASGRTFSMGWFRQAPGKEREFVAAITYSGGSPYYADSVKGRFTISRDNAKNTVYLQMNSLKPEDTAVYYCAANPTYGSDWNAENWGQGTQVTVSSGTGGGGSGGGGSGGGGSEFDIQMTQSPSSLSASVGDRVTITCKASDHINNWLAWYQQKPGQAPKLLIYGATTLETGVPSRFSGSGSGTDYTLTISSLQPEDFATYYCQQSWNTPWTFGQGTKLEIKRLEGQPKANPTVTLFPPSSEELQANKATLVCLISDFYPGAVTVAWKADGSPVKAGVETTKPSKQSNNKYAASSYLSLTPEQWKSHRSYSCQVTHEGSTVEKTVAPTECSGSTTPGERSSLPAFYPGTSGSCSGCGSLSLPLLAGLVAADAVASLLIVGAVFLCARPRRSPAQEDGKVYINMPGRGSTSRVKFSRSADAPAYQQGQNQLYNELNLGRREEYDVLDKRRGRDPEMGGKPQRRKNPQEGLYNELQKDKMAEAYSEIGMKGERRRGKGHDGLYQGLSTATKDTYDALHMQALPPRRAKRSGSGATNFSLLKQAGDVEENPGPMDWIWRILFLVGAATGAHSFEQVQLQQPGAELVKPGASVKMSCKASGYAFSSYWINWMKQKPGQGLEWIGQIYPGDGDTNYNGKFKGRATLTADTSSSTAYMQLSSLTSEDSAVYFCARSITTVVGCAMDYWGQGTSVTVSSTRASTKGPSVFPLAPSSKSTSGGTAALGCLVKDYFPEPVTVSWNSGALTSGVHTFPAVLQSSGLYSLSSVVTVPSSSLGTQTYICNVNHKPSNTKVDKRVEPKSCGTQSFGLLDPKLCYLLDGILFIYGVILTALFLRDQRLPPDAHKPPGGGSFRTPIQEEQADAHSTLAKISSRRVKFSRSADAPAYQQGQNQLYNELNLGRREEYDVLDKRRGRDPEMGGKPQRRKNPQEGLYNELQKDKMAEAYSEIGMKGERRRGKGHDGLYQGLSTATKDTYDALHMQALPPRRAKRSGSGVKQTLNFDLLKLAGDVESNPGPGHMTEYKPTVRLATRDDVPRAVRTLAAAFADYPATRHTVDPDRHIERVTELQELFLTRVGLDIGKVWVADDGAAVAVWTTPESVEAGAVFAEIGPRMAELSGSRLAAQQQMEGLLAPHRPKEPAWFLATVGVSPDHQGKGLGSAVVLPGVEAAERAGVPAFLETSAPRNLPFYERLGFTVTADVEVPEGPRTWCMTRKPGA

SEQ ID NO: 4464 - protein, 1392 aa, Artificial Sequence
  Synthetic Polypeptide
MALPVTALLLPLALLLHAARPEVQLVESGGGLVQAGGSLRLSCAASGRTFSMGWFRQAPGKEREFVAAITYSGGSPYYADSVKGRFTISRDNAKNTVYLQMNSLKPEDTAVYYCAANPTYGSDWNAENWGQGTQVTVSSGTGGGGSGGGGSGGGGSEFDIQMTQSPSSLSASVGDRVTITCKASDHINNWLAWYQQKPGQAPKLLIYGATTLETGVPSRFSGSGSGTDYTLTISSLQPEDFATYYCQQSWNTPWTFGQGTKLEIKRLEGQPKANPTVTLFPPSSEELQANKATLVCLISDFYPGAVTVAWKADGSPVKAGVETTKPSKQSNNKYAASSYLSLTPEQWKSHRSYSCQVTHEGSTVEKTVAPTECSGSTTPGERSSLPAFYPGTSGSCSGCGSLSLPLLAGLVAADAVASLLIVGAVFLCARPRRSPAQEDGKVYINMPGRGSTSRVKFSRSADAPAYQQGQNQLYNELNLGRREEYDVLDKRRGRDPEMGGKPQRRKNPQEGLYNELQKDKMAEAYSEIGMKGERRRGKGHDGLYQGLSTATKDTYDALHMQALPPRRAKRSGSGATNFSLLKQAGDVEENPGPMDWIWRILFLVGAATGAHSGPEVQLVESGGGLVQAGGSLRLSCAASGRTFTMGWFRQAPGKEREFVAAISLSPTLAYYADSVKGRFTISRDNAKNTVVLQMNSLKPEDTALYYCAADRKSVMSIRPDYWGQGTQVTVSSGSGGGGSGGGGSGGGGSFEQVQLQQPGAELVKPGASVKMSCKASGYAFSSYWINWMKQKPGQGLEWIGQIYPGDGDTNYNGKFKGRATLTADTSSSTAYMQLSSLTSEDSAVYFCARSITTVVGCAMDYWGQGTSVTVSSTRASTKGPSVFPLAPSSKSTSGGTAALGCLVKDYFPEPVTVSWNSGALTSGVHTFPAVLQSSGLYSLSSVVTVPSSSLGTQTYICNVNHKPSNTKVDKRVEPKSCGTQSFGLLDPKLCYLLDGILFIYGVILTALFLRDQRLPPDAHKPPGGGSFRTPIQEEQADAHSTLAKISSRRVKFSRSADAPAYQQGQNQLYNELNLGRREEYDVLDKRRGRDPEMGGKPQRRKNPQEGLYNELQKDKMAEAYSEIGMKGERRRGKGHDGLYQGLSTATKDTYDALHMQALPPRRAKRSGSGVKQTLNFDLLKLAGDVESNPGPGHMTEYKPTVRLATRDDVPRAVRTLAAAFADYPATRHTVDPDRHIERVTELQELFLTRVGLDIGKVWVADDGAAVAVWTTPESVEAGAVFAEIGPRMAELSGSRLAAQQQMEGLLAPHRPKEPAWFLATVGVSPDHQGKGLGSAVVLPGVEAAERAGVPAFLETSAPRNLPFYERLGFTVTADVEVPEGPRTWCMTRKPGA

SEQ ID NO: 4465 - protein, 1125 aa, Artificial Sequence
  Synthetic Polypeptide
MALPVTALLLPLALLLHAARPEVQLVESGGGLVQAGGSLRLSCAASGRTFSMGWFRQAPGKEREFVAAITYSGGSPYYADSVKGRFTISRDNAKNTVYLQMNSLKPEDTAVYYCAANPTYGSDWNAENWGQGTQVTVSSLEGQPKANPTVTLFPPSSEELQANKATLVCLISDFYPGAVTVAWKADGSPVKAGVETTKPSKQSNNKYAASSYLSLTPEQWKSHRSYSCQVTHEGSTVEKTVAPTECSGSTTPGERSSLPAFYPGTSGSCSGCGSLSLPLLAGLVAADAVASLLIVGAVFLCARPRRSPAQEDGKVYINMPGRGSTSRVKFSRSADAPAYQQGQNQLYNELNLGRREEYDVLDKRRGRDPEMGGKPQRRKNPQEGLYNELQKDKMAEAYSEIGMKGERRRGKGHDGLYQGLSTATKDTYDALHMQALPPRRAKRSGSGATNFSLLKQAGDVEENPGPMDWIWRILFLVGAATGAHSGPEVQLVESGGGLVQAGGSLRLSCAASGRTFTMGWFRQAPGKEREFVAAISLSPTLAYYADSVKGRFTISRDNAKNTVVLQMNSLKPEDTALYYCAADRKSVMSIRPDYWGQGTQVTVSSTRASTKGPSVFPLAPSSKSTSGGTAALGCLVKDYFPEPVTVSWNSGALTSGVHTFPAVLQSSGLYSLSSVVTVPSSSLGTQTYICNVNHKPSNTKVDKRVEPKSCGTQSFGLLDPKLCYLLDGILFIYGVILTALFLRDQRLPPDAHKPPGGGSFRTPIQEEQADAHSTLAKISSRRVKFSRSADAPAYQQGQNQLYNELNLGRREEYDVLDKRRGRDPEMGGKPQRRKNPQEGLYNELQKDKMAEAYSEIGMKGERRRGKGHDGLYQGLSTATKDTYDALHMQALPPRRAKRSGSGVKQTLNFDLLKLAGDVESNPGPGHMTEYKPTVRLATRDDVPRAVRTLAAAFADYPATRHTVDPDRHIERVTELQELFLTRVGLDIGKVWVADDGAAVAVWTTPESVEAGAVFAEIGPRMAELSGSRLAAQQQMEGLLAPHRPKEPAWFLATVGVSPDHQGKGLGSAVVLPGVEAAERAGVPAFLETSAPRNLPFYERLGFTVTADVEVPEGPRTWCMTRKPGA

SEQ ID NO: 4466 - protein, 1133 aa, Artificial Sequence
  Synthetic Polypeptide
MALPVTALLLPLALLLHAARPDIQMTQSPSSLSASVGDRVTITCKASDHINNWLAWYQQKPGQAPKLLIYGATTLETGVPSRFSGSGSGTDYTLTISSLQPEDFATYYCQQSWNTPWTFGQGTKLEIKRLEDLKNVFPPEVAVFEPSEAEISHTQKATLVCLATGFYPDHVELSWWVNGKEVHSGVSTDPQPLKEQPALNDSRYCLSSRLRVSATFWQNPRNHFRCQVQFYGLSENDEWTQDRAKPVTQIVSAEAWGRADCGSTTPGERSSLPAFYPGTSGSCSGCGSLSLPLLAGLVAADAVASLLIVGAVFLCARPRRSPAQEDGKVYINMPGRGSTSRVKFSRSADAPAYQQGQNQLYNELNLGRREEYDVLDKRRGRDPEMGGKPQRRKNPQEGLYNELQKDKMAEAYSEIGMKGERRRGKGHDGLYQGLSTATKDTYDALHMQALPPRRAKRSGSGATNFSLLKQAGDVEENPGPMDWIWRILFLVGAATGAHSFEQVQLQQPGAELVKPGASVKMSCKASGYAFSSYWINWMKQKPGQGLEWIGQIYPGDGDTNYNGKFKGRATLTADTSSSTAYMQLSSLTSEDSAVYFCARSITTVVGCAMDYWGQGTSVTVSSTRIQNPDPAVYQLRDSKSSDKSVCLFTDFDSQTNVSQSKDSDVYITDKTVLDMRSMDFKSNSAVAWSNKSDFACANAFNNSIIPEDTFFPSPESSCGTQSFGLLDPKLCYLLDGILFIYGVILTALFLRDQRLPPDAHKPPGGGSFRTPIQEEQADAHSTLAKISSRRVKFSRSADAPAYQQGQNQLYNELNLGRREEYDVLDKRRGRDPEMGGKPQRRKNPQEGLYNELQKDKMAEAYSEIGMKGERRRGKGHDGLYQGLSTATKDTYDALHMQALPPRRAKRSGSGVKQTLNFDLLKLAGDVESNPGPGHMTEYKPTVRLATRDDVPRAVRTLAAAFADYPATRHTVDPDRHIERVTELQELFLTRVGLDIGKVWVADDGAAVAVWTTPESVEAGAVFAEIGPRMAELSGSRLAAQQQMEGLLAPHRPKEPAWFLATVGVSPDHQGKGLGSAVVLPGVEAAERAGVPAFLETSAPRNLPFYERLGFTVTADVEVPEGPRTWCMTRKPGA

SEQ ID NO: 4467 - protein, 1270 aa, Artificial Sequence
  Synthetic Polypeptide
MALPVTALLLPLALLLHAARPEVQLVESGGGLVQAGGSLRLSCAASGRTFSMGWFRQAPGKEREFVAAITYSGGSPYYADSVKGRFTISRDNAKNTVYLQMNSLKPEDTAVYYCAANPTYGSDWNAENWGQGTQVTVSSGTGGGGSGGGGSGGGGSEFDIQMTQSPSSLSASVGDRVTITCKASDHINNWLAWYQQKPGQAPKLLIYGATTLETGVPSRFSGSGSGTDYTLTISSLQPEDFATYYCQQSWNTPWTFGQGTKLEIKRLEDLKNVFPPEVAVFEPSEAEISHTQKATLVCLATGFYPDHVELSWWVNGKEVHSGVSTDPQPLKEQPALNDSRYCLSSRLRVSATFWQNPRNHFRCQVQFYGLSENDEWTQDRAKPVTQIVSAEAWGRADCGSTTPGERSSLPAFYPGTSGSCSGCGSLSLPLLAGLVAADAVASLLIVGAVFLCARPRRSPAQEDGKVYINMPGRGSTSRVKFSRSADAPAYQQGQNQLYNELNLGRREEYDVLDKRRGRDPEMGGKPQRRKNPQEGLYNELQKDKMAEAYSEIGMKGERRRGKGHDGLYQGLSTATKDTYDALHMQALPPRRAKRSGSGATNFSLLKQAGDVEENPGPMDWIWRILFLVGAATGAHSFEQVQLQQPGAELVKPGASVKMSCKASGYAFSSYWINWMKQKPGQGLEWIGQIYPGDGDTNYNGKFKGRATLTADTSSSTAYMQLSSLTSEDSAVYFCARSITTVVGCAMDYWGQGTSVTVSSTRIQNPDPAVYQLRDSKSSDKSVCLFTDFDSQTNVSQSKDSDVYITDKTVLDMRSMDFKSNSAVAWSNKSDFACANAFNNSIIPEDTFFPSPESSCGTQSFGLLDPKLCYLLDGILFIYGVILTALFLRDQRLPPDAHKPPGGGSFRTPIQEEQADAHSTLAKISSRRVKFSRSADAPAYQQGQNQLYNELNLGRREEYDVLDKRRGRDPEMGGKPQRRKNPQEGLYNELQKDKMAEAYSEIGMKGERRRGKGHDGLYQGLSTATKDTYDALHMQALPPRRAKRSGSGVKQTLNFDLLKLAGDVESNPGPGHMTEYKPTVRLATRDDVPRAVRTLAAAFADYPATRHTVDPDRHIERVTELQELFLTRVGLDIGKVWVADDGAAVAVWTTPESVEAGAVFAEIGPRMAELSGSRLAAQQQMEGLLAPHRPKEPAWFLATVGVSPDHQGKGLGSAVVLPGVEAAERAGVPAFLETSAPRNLPFYERLGFTVTADVEVPEGPRTWCMTRKPGA

SEQ ID NO: 4468 - protein, 1407 aa, Artificial Sequence
  Synthetic Polypeptide
MALPVTALLLPLALLLHAARPEVQLVESGGGLVQAGGSLRLSCAASGRTFSMGWFRQAPGKEREFVAAITYSGGSPYYADSVKGRFTISRDNAKNTVYLQMNSLKPEDTAVYYCAANPTYGSDWNAENWGQGTQVTVSSGTGGGGSGGGGSGGGGSEFDIQMTQSPSSLSASVGDRVTITCKASDHINNWLAWYQQKPGQAPKLLIYGATTLETGVPSRFSGSGSGTDYTLTISSLQPEDFATYYCQQSWNTPWTFGQGTKLEIKRLEDLKNVFPPEVAVFEPSEAEISHTQKATLVCLATGFYPDHVELSWWVNGKEVHSGVSTDPQPLKEQPALNDSRYCLSSRLRVSATFWQNPRNHFRCQVQFYGLSENDEWTQDRAKPVTQIVSAEAWGRADCGSTTPGERSSLPAFYPGTSGSCSGCGSLSLPLLAGLVAADAVASLLIVGAVFLCARPRRSPAQEDGKVYINMPGRGSTSRVKFSRSADAPAYQQGQNQLYNELNLGRREEYDVLDKRRGRDPEMGGKPQRRKNPQEGLYNELQKDKMAEAYSEIGMKGERRRGKGHDGLYQGLSTATKDTYDALHMQALPPRRAKRSGSGATNFSLLKQAGDVEENPGPMDWIWRILFLVGAATGAHSGPEVQLVESGGGLVQAGGSLRLSCAASGRTFTMGWFRQAPGKEREFVAAISLSPTLAYYADSVKGRFTISRDNAKNTVVLQMNSLKPEDTALYYCAADRKSVMSIRPDYWGQGTQVTVSSGSGGGGSGGGGSGGGGSFEQVQLQQPGAELVKPGASVKMSCKASGYAFSSYWINWMKQKPGQGLEWIGQIYPGDGDTNYNGKFKGRATLTADTSSSTAYMQLSSLTSEDSAVYFCARSITTVVGCAMDYWGQGTSVTVSSTRIQNPDPAVYQLRDSKSSDKSVCLFTDFDSQTNVSQSKDSDVYITDKTVLDMRSMDFKSNSAVAWSNKSDFACANAFNNSIIPEDTFFPSPESSCGTQSFGLLDPKLCYLLDGILFIYGVILTALFLRDQRLPPDAHKPPGGGSFRTPIQEEQADAHSTLAKISSRRVKFSRSADAPAYQQGQNQLYNELNLGRREEYDVLDKRRGRDPEMGGKPQRRKNPQEGLYNELQKDKMAEAYSEIGMKGERRRGKGHDGLYQGLSTATKDTYDALHMQALPPRRAKRSGSGVKQTLNFDLLKLAGDVESNPGPGHMTEYKPTVRLATRDDVPRAVRTLAAAFADYPATRHTVDPDRHIERVTELQELFLTRVGLDIGKVWVADDGAAVAVWTTPESVEAGAVFAEIGPRMAELSGSRLAAQQQMEGLLAPHRPKEPAWFLATVGVSPDHQGKGLGSAVVLPGVEAAERAGVPAFLETSAPRNLPFYERLGFTVTADVEVPEGPRTWCMTRKPGA

SEQ ID NO: 4469 - protein, 1140 aa, Artificial Sequence
  Synthetic Polypeptide
MALPVTALLLPLALLLHAARPEVQLVESGGGLVQAGGSLRLSCAASGRTFSMGWFRQAPGKEREFVAAITYSGGSPYYADSVKGRFTISRDNAKNTVYLQMNSLKPEDTAVYYCAANPTYGSDWNAENWGQGTQVTVSSLEDLKNVFPPEVAVFEPSEAEISHTQKATLVCLATGFYPDHVELSWWVNGKEVHSGVSTDPQPLKEQPALNDSRYCLSSRLRVSATFWQNPRNHFRCQVQFYGLSENDEWTQDRAKPVTQIVSAEAWGRADCGSTTPGERSSLPAFYPGTSGSCSGCGSLSLPLLAGLVAADAVASLLIVGAVFLCARPRRSPAQEDGKVYINMPGRGSTSRVKFSRSADAPAYQQGQNQLYNELNLGRREEYDVLDKRRGRDPEMGGKPQRRKNPQEGLYNELQKDKMAEAYSEIGMKGERRRGKGHDGLYQGLSTATKDTYDALHMQALPPRRAKRSGSGATNFSLLKQAGDVEENPGPMDWIWRILFLVGAATGAHSGPEVQLVESGGGLVQAGGSLRLSCAASGRTFTMGWFRQAPGKEREFVAAISLSPTLAYYADSVKGRFTISRDNAKNTVVLQMNSLKPEDTALYYCAADRKSVMSIRPDYWGQGTQVTVSSTRIQNPDPAVYQLRDSKSSDKSVCLFTDFDSQTNVSQSKDSDVYITDKTVLDMRSMDFKSNSAVAWSNKSDFACANAFNNSIIPEDTFFPSPESSCGTQSFGLLDPKLCYLLDGILFIYGVILTALFLRDQRLPPDAHKPPGGGSFRTPIQEEQADAHSTLAKISSRRVKFSRSADAPAYQQGQNQLYNELNLGRREEYDVLDKRRGRDPEMGGKPQRRKNPQEGLYNELQKDKMAEAYSEIGMKGERRRGKGHDGLYQGLSTATKDTYDALHMQALPPRRAKRSGSGVKQTLNFDLLKLAGDVESNPGPGHMTEYKPTVRLATRDDVPRAVRTLAAAFADYPATRHTVDPDRHIERVTELQELFLTRVGLDIGKVWVADDGAAVAVWTTPESVEAGAVFAEIGPRMAELSGSRLAAQQQMEGLLAPHRPKEPAWFLATVGVSPDHQGKGLGSAVVLPGVEAAERAGVPAFLETSAPRNLPFYERLGFTVTADVEVPEGPRTWCMTRKPGA

SEQ ID NO: 4470 - protein, 585 aa, Artificial Sequence; identical to SEQ ID NO: 4431
  Synthetic Polypeptide

SEQ ID NO: 4471 - protein, 897 aa, Artificial Sequence
  Synthetic Polypeptide
MALPVTALLLPLALLLHAARPDIQMTQSPSSLSASVGDRVTITCKASDHINNWLAWYQQKPGQAPKLLIYGATTLETGVPSRFSGSGSGTDYTLTISSLQPEDFATYYCQQSWNTPWTFGQGTKLEIKRLEQSFGLLDPKLCYLLDGILFIYGVILTALFLRDQRLPPDAHKPPGGGSFRTPIQEEQADAHSTLAKISTSRVKFSRSADAPAYQQGQNQLYNELNLGRREEYDVLDKRRGRDPEMGGKPQRRKNPQEGLYNELQKDKMAEAYSEIGMKGERRRGKGHDGLYQGLSTATKDTYDALHMQALPPRRAKRSGSGATNFSLLKQAGDVEENPGPMDWIWRILFLVGAATGAHSFEQVQLQQPGAELVKPGASVKMSCKASGYAFSSYWINWMKQKPGQGLEWIGQIYPGDGDTNYNGKFKGRATLTADTSSSTAYMQLSSLTSEDSAVYFCARSITTVVGCAMDYWGQGTSVTVSSTRQSFGLLDPKLCYLLDGILFIYGVILTALFLRDQRLPPDAHKPPGGGSFRTPIQEEQADAHSTLAKISSRRVKFSRSADAPAYQQGQNQLYNELNLGRREEYDVLDKRRGRDPEMGGKPQRRKNPQEGLYNELQKDKMAEAYSEIGMKGERRRGKGHDGLYQGLSTATKDTYDALHMQALPPRRAKRSGSGVKQTLNFDLLKLAGDVESNPGPGHMTEYKPTVRLATRDDVPRAVRTLAAAFADYPATRHTVDPDRHIERVTELQELFLTRVGLDIGKVWVADDGAAVAVWTTPESVEAGAVFAEIGPRMAELSGSRLAAQQQMEGLLAPHRPKEPAWFLATVGVSPDHQGKGLGSAVVLPGVEAAERAGVPAFLETSAPRNLPFYERLGFTVTADVEVPEGPRTWCMTRKPGA

SEQ ID NO: 4472 - protein, 949 aa, Artificial Sequence
  Synthetic Polypeptide
MALPVTALLLPLALLLHAARPACEVQLLESGGGLIQPGGSLRLSCAASGFTFSSHAMTWVRQAPGKGLEWVSAISGSGDYTHYADSVKGRFTISRDNSKNTVYLQMNSLRAEDSAVYYCAKDEDGGSLLGHRGQGTLVTVSSGTGGGGSGGGGSGGGGSEFGSLEQSFGLLDPKLCYLLDGILFIYGVILTALFLRDQRLPPDAHKPPGGGSFRTPIQEEQADAHSTLAKISTSRVKFSRSADAPAYQQGQNQLYNELNLGRREEYDVLDKRRGRDPEMGGKPQRRKNPQEGLYNELQKDKMAEAYSEIGMKGERRRGKGHDGLYQGLSTATKDTYDALHMQALPPRRAKRSGSGATNFSLLKQAGDVEENPGPMDWIWRILFLVGAATGAHSGPEVQLVESGGGLVQAGGSLRLSCAASGRTFSMGWFRQAPGKEREFVAAITYSGGSPYYADSVKGRFTISRDNAKNTVYLQMNSLKPEDTAVYYCAANPTYGSDWNAENWGQGTQVTVSSGSGGGGSGGGGSGGGGSFEGSTRQSFGLLDPKLCYLLDGILFIYGVILTALFLRDQRLPPDAHKPPGGGSFRTPIQEEQADAHSTLAKISSRRVKFSRSADAPAYQQGQNQLYNELNLGRREEYDVLDKRRGRDPEMGGKPQRRKNPQEGLYNELQKDKMAEAYSEIGMKGERRRGKGHDGLYQGLSTATKDTYDALHMQALPPRRAKRSGSGVKQTLNFDLLKLAGDVESNPGPGHMTEYKPTVRLATRDDVPRAVRTLAAAFADYPATRHTVDPDRHIERVTELQELFLTRVGLDIGKVWVADDGAAVAVWTTPESVEAGAVFAEIGPRMAELSGSRLAAQQQMEGLLAPHRPKEPAWFLATVGVSPDHQGKGLGSAVVLPGVEAAERAGVPAFLETSAPRNLPFYERLGFTVTADVEVPEGPRTWCMTRKPGA

SEQ ID NO: 4473 - protein, 1099 aa, Artificial Sequence
  Synthetic Polypeptide
MALPVTALLLPLALLLHAARPDIQMTQSPSSLSASVGDRVTITCKASDHINNWLAWYQQKPGQAPKLLIYGATTLETGVPSRFSGSGSGTDYTLTISSLQPEDFATYYCQQSWNTPWTFGQGTKLEIKRLEGQPKANPTVTLFPPSSEELQANKATLVCLISDFYPGAVTVAWKADGSPVKAGVETTKPSKQSNNKYAASSYLSLTPEQWKSHRSYSCQVTHEGSTVEKTVAPTECSGSQSFGLLDPKLCYLLDGILFIYGVILTALFLRDQRLPPDAHKPPGGGSFRTPIQEEQADAHSTLAKISTSRVKFSRSADAPAYQQGQNQLYNELNLGRREEYDVLDKRRGRDPEMGGKPQRRKNPQEGLYNELQKDKMAEAYSEIGMKGERRRGKGHDGLYQGLSTATKDTYDALHMQALPPRRAKRSGSGATNFSLLKQAGDVEENPGPMDWIWRILFLVGAATGAHSFEQVQLQQPGAELVKPGASVKMSCKASGYAFSSYWINWMKQKPGQGLEWIGQIYPGDGDTNYNGKFKGRATLTADTSSSTAYMQLSSLTSEDSAVYFCARSITTVVGCAMDYWGQGTSVTVSSTRASTKGPSVFPLAPSSKSTSGGTAALGCLVKDYFPEPVTVSWNSGALTSGVHTFPAVLQSSGLYSLSSVVTVPSSSLGTQTYICNVNHKPSNTKVDKRVEPKSCGTQSFGLLDPKLCYLLDGILFIYGVILTALFLRDQRLPPDAHKPPGGGSFRTPIQEEQADAHSTLAKISSRRVKFSRSADAPAYQQGQNQLYNELNLGRREEYDVLDKRRGRDPEMGGKPQRRKNPQEGLYNELQKDKMAEAYSEIGMKGERRRGKGHDGLYQGLSTATKDTYDALHMQALPPRRAKRSGSGVKQTLNFDLLKLAGDVESNPGPGHMATYEVLCEVARKLGTDDREVVLFLLNVFIPQPTLAQLIGALRALKEEGRLTFPLLAECLFRAGRRDLLRDLLHLDPRFLERHLAGTMSYFSPYQLTVLHVDGELCARDIRSLIFLSKDTIGSRSTPQTFLHWVYCMENLDLLGPTDVDALMSMLRSLSRVDLQRQVQTLMGLHLSGPSHSQHYRHTP

SEQ ID NO: 4474 - protein, 1152 aa, Artificial Sequence
  Synthetic Polypeptide
MALPVTALLLPLALLLHAARPDIQMTQSPSSLSASVGDRVTITCKASDHINNWLAWYQQKPGQAPKLLIYGATTLETGVPSRFSGSGSGTDYTLTISSLQPEDFATYYCQQSWNTPWTFGQGTKLEIKRLEGQPKANPTVTLFPPSSEELQANKATLVCLISDFYPGAVTVAWKADGSPVKAGVETTKPSKQSNNKYAASSYLSLTPEQWKSHRSYSCQVTHEGSTVEKTVAPTECSGSQSFGLLDPKLCYLLDGILFIYGVILTALFLRDQRLPPDAHKPPGGGSFRTPIQEEQADAHSTLAKISTSRVKFSRSADAPAYQQGQNQLYNELNLGRREEYDVLDKRRGRDPEMGGKPQRRKNPQEGLYNELQKDKMAEAYSEIGMKGERRRGKGHDGLYQGLSTATKDTYDALHMQALPPRRAKRSGSGATNFSLLKQAGDVEENPGPMDWIWRILFLVGAATGAHSFEQVQLQQPGAELVKPGASVKMSCKASGYAFSSYWINWMKQKPGQGLEWIGQIYPGDGDTNYNGKFKGRATLTADTSSSTAYMQLSSLTSEDSAVYFCARSITTVVGCAMDYWGQGTSVTVSSTRASTKGPSVFPLAPSSKSTSGGTAALGCLVKDYFPEPVTVSWNSGALTSGVHTFPAVLQSSGLYSLSSVVTVPSSSLGTQTYICNVNHKPSNTKVDKRVEPKSCGTQSFGLLDPKLCYLLDGILFIYGVILTALFLRDQRLPPDAHKPPGGGSFRTPIQEEQADAHSTLAKISSRRVKFSRSADAPAYQQGQNQLYNELNLGRREEYDVLDKRRGRDPEMGGKPQRRKNPQEGLYNELQKDKMAEAYSEIGMKGERRRGKGHDGLYQGLSTATKDTYDALHMQALPPRRAKRSGSGVKQTLNFDLLKLAGDVESNPGPGHMSDSKEVPSLPFLRHLLEELDSHEDSLLLFLCHDAAPGCTTVTQALCSLSQQRKLTLAALVEMLYVLQRMDLLKSRFGLSKEGAEQLLGTSFLTRYRKLMVCVGEELDSSELRALRLFACNLNPSLSTALSESSRFVELVLALENVGLVSPSSVSVLADMLRTLRRLDLCQQLVEYEQQEQARYRYCYAASPSLPVRTLRRGHGASEHEQLCMPVQESSDSPELLRTPVQESSSDSPEQTT

SEQ ID NO: 4475 - protein, 1110 aa, Artificial Sequence
  Synthetic Polypeptide
MALPVTALLLPLALLLHAARPDIQMTQSPSSLSASVGDRVTITCKASDHINNWLAWYQQKPGQAPKLLIYGATTLETGVPSRFSGSGSGTDYTLTISSLQPEDFATYYCQQSWNTPWTFGQGTKLEIKRLEGQPKANPTVTLFPPSSEELQANKATLVCLISDFYPGAVTVAWKADGSPVKAGVETTKPSKQSNNKYAASSYLSLTPEQWKSHRSYSCQVTHEGSTVEKTVAPTECSGSQSFGLLDPKLCYLLDGILFIYGVILTALFLRDQRLPPDAHKPPGGGSFRTPIQEEQADAHSTLAKISTSRVKFSRSADAPAYQQGQNQLYNELNLGRREEYDVLDKRRGRDPEMGGKPQRRKNPQEGLYNELQKDKMAEAYSEIGMKGERRRGKGHDGLYQGLSTATKDTYDALHMQALPPRRAKRSGSGATNFSLLKQAGDVEENPGPMDWIWRILFLVGAATGAHSFEQVQLQQPGAELVKPGASVKMSCKASGYAFSSYWINWMKQKPGQGLEWIGQIYPGDGDTNYNGKFKGRATLTADTSSSTAYMQLSSLTSEDSAVYFCARSITTVVGCAMDYWGQGTSVTVSSTRASTKGPSVFPLAPSSKSTSGGTAALGCLVKDYFPEPVTVSWNSGALTSGVHTFPAVLQSSGLYSLSSVVTVPSSSLGTQTYICNVNHKPSNTKVDKRVEPKSCGTQSFGLLDPKLCYLLDGILFIYGVILTALFLRDQRLPPDAHKPPGGGSFRTPIQEEQADAHSTLAKISSRRVKFSRSADAPAYQQGQNQLYNELNLGRREEYDVLDKRRGRDPEMGGKPQRRKNPQEGLYNELQKDKMAEAYSEIGMKGERRRGKGHDGLYQGLSTATKDTYDALHMQALPPRRAKRSGSGVKQTLNFDLLKLAGDVESNPGPGHMTEYKPTVRLATRDDVPRAVRTLAAAFADYPATRHTVDPDRHIERVTELQELFLTRVGLDIGKVWVADDGAAVAVWTTPESVEAGAVFAEIGPRMAELSGSRLAAQQQMEGLLAPHRPKEPAWFLATVGVSPDHQGKGLGSAVVLPGVEAAERAGVPAFLETSAPRNLPFYERLGFTVTADVEVPEGPRTWCMTRKPGA

SEQ ID NO: 4476 - protein, 1247 aa, Artificial Sequence
  Synthetic Polypeptide
MALPVTALLLPLALLLHAARPEVQLVESGGGLVQAGGSLRLSCAASGRTFSMGWFRQAPGKEREFVAAITYSGGSPYYADSVKGRFTISRDNAKNTVYLQMNSLKPEDTAVYYCAANPTYGSDWNAENWGQGTQVTVSSGTGGGGSGGGGSGGGGSEFDIQMTQSPSSLSASVGDRVTITCKASDHINNWLAWYQQKPGQAPKLLIYGATTLETGVPSRFSGSGSGTDYTLTISSLQPEDFATYYCQQSWNTPWTFGQGTKLEIKRLEGQPKANPTVTLFPPSSEELQANKATLVCLISDFYPGAVTVAWKADGSPVKAGVETTKPSKQSNNKYAASSYLSLTPEQWKSHRSYSCQVTHEGSTVEKTVAPTECSGSQSFGLLDPKLCYLLDGILFIYGVILTALFLRDQRLPPDAHKPPGGGSFRTPIQEEQADAHSTLAKISTSRVKFSRSADAPAYQQGQNQLYNELNLGRREEYDVLDKRRGRDPEMGGKPQRRKNPQEGLYNELQKDKMAEAYSEIGMKGERRRGKGHDGLYQGLSTATKDTYDALHMQALPPRRAKRSGSGATNFSLLKQAGDVEENPGPMDWIWRILFLVGAATGAHSFEQVQLQQPGAELVKPGASVKMSCKASGYAFSSYWINWMKQKPGQGLEWIGQIYPGDGDTNYNGKFKGRATLTADTSSSTAYMQLSSLTSEDSAVYFCARSITTVVGCAMDYWGQGTSVTVSSTRASTKGPSVFPLAPSSKSTSGGTAALGCLVKDYFPEPVTVSWNSGALTSGVHTFPAVLQSSGLYSLSSVVTVPSSSLGTQTYICNVNHKPSNTKVDKRVEPKSCGTQSFGLLDPKLCYLLDGILFIYGVILTALFLRDQRLPPDAHKPPGGGSFRTPIQEEQADAHSTLAKISSRRVKFSRSADAPAYQQGQNQLYNELNLGRREEYDVLDKRRGRDPEMGGKPQRRKNPQEGLYNELQKDKMAEAYSEIGMKGERRRGKGHDGLYQGLSTATKDTYDALHMQALPPRRAKRSGSGVKQTLNFDLLKLAGDVESNPGPGHMTEYKPTVRLATRDDVPRAVRTLAAAFADYPATRHTVDPDRHIERVTELQELFLTRVGLDIGKVWVADDGAAVAVWTTPESVEAGAVFAEIGPRMAELSGSRLAAQQQMEGLLAPHRPKEPAWFLATVGVSPDHQGKGLGSAVVLPGVEAAERAGVPAFLETSAPRNLPFYERLGFTVTADVEVPEGPRTWCMTRKPGA

SEQ ID NO: 4477 - protein, 1384 aa, Artificial Sequence
  Synthetic Polypeptide
MALPVTALLLPLALLLHAARPEVQLVESGGGLVQAGGSLRLSCAASGRTFSMGWFRQAPGKEREFVAAITYSGGSPYYADSVKGRFTISRDNAKNTVYLQMNSLKPEDTAVYYCAANPTYGSDWNAENWGQGTQVTVSSGTGGGGSGGGGSGGGGSEFDIQMTQSPSSLSASVGDRVTITCKASDHINNWLAWYQQKPGQAPKLLIYGATTLETGVPSRFSGSGSGTDYTLTISSLQPEDFATYYCQQSWNTPWTFGQGTKLEIKRLEGQPKANPTVTLFPPSSEELQANKATLVCLISDFYPGAVTVAWKADGSPVKAGVETTKPSKQSNNKYAASSYLSLTPEQWKSHRSYSCQVTHEGSTVEKTVAPTECSGSQSFGLLDPKLCYLLDGILFIYGVILTALFLRDQRLPPDAHKPPGGGSFRTPIQEEQADAHSTLAKISTSRVKFSRSADAPAYQQGQNQLYNELNLGRREEYDVLDKRRGRDPEMGGKPQRRKNPQEGLYNELQKDKMAEAYSEIGMKGERRRGKGHDGLYQGLSTATKDTYDALHMQALPPRRAKRSGSGATNFSLLKQAGDVEENPGPMDWIWRILFLVGAATGAHSGPEVQLVESGGGLVQAGGSLRLSCAASGRTFTMGWFRQAPGKEREFVAAISLSPTLAYYADSVKGRFTISRDNAKNTVVLQMNSLKPEDTALYYCAADRKSVMSIRPDYWGQGTQVTVSSGSGGGGSGGGGSGGGGSFEQVQLQQPGAELVKPGASVKMSCKASGYAFSSYWINWMKQKPGQGLEWIGQIYPGDGDTNYNGKFKGRATLTADTSSSTAYMQLSSLTSEDSAVYFCARSITTVVGCAMDYWGQGTSVTVSSTRASTKGPSVFPLAPSSKSTSGGTAALGCLVKDYFPEPVTVSWNSGALTSGVHTFPAVLQSSGLYSLSSVVTVPSSSLGTQTYICNVNHKPSNTKVDKRVEPKSCGTQSFGLLDPKLCYLLDGILFIYGVILTALFLRDQRLPPDAHKPPGGGSFRTPIQEEQADAHSTLAKISSRRVKFSRSADAPAYQQGQNQLYNELNLGRREEYDVLDKRRGRDPEMGGKPQRRKNPQEGLYNELQKDKMAEAYSEIGMKGERRRGKGHDGLYQGLSTATKDTYDALHMQALPPRRAKRSGSGVKQTLNFDLLKLAGDVESNPGPGHMTEYKPTVRLATRDDVPRAVRTLAAAFADYPATRHTVDPDRHIERVTELQELFLTRVGLDIGKVWVADDGAAVAVWTTPESVEAGAVFAEIGPRMAELSGSRLAAQQQMEGLLAPHRPKEPAWFLATVGVSPDHQGKGLGSAVVLPGVEAAERAGVPAFLETSAPRNLPFYERLGFTVTADVEVPEGPRTWCMTRKPGA

SEQ ID NO: 4478 - protein, 1117 aa, Artificial Sequence
  Synthetic Polypeptide
MALPVTALLLPLALLLHAARPEVQLVESGGGLVQAGGSLRLSCAASGRTFSMGWFRQAPGKEREFVAAITYSGGSPYYADSVKGRFTISRDNAKNTVYLQMNSLKPEDTAVYYCAANPTYGSDWNAENWGQGTQVTVSSLEGQPKANPTVTLFPPSSEELQANKATLVCLISDFYPGAVTVAWKADGSPVKAGVETTKPSKQSNNKYAASSYLSLTPEQWKSHRSYSCQVTHEGSTVEKTVAPTECSGSQSFGLLDPKLCYLLDGILFIYGVILTALFLRDQRLPPDAHKPPGGGSFRTPIQEEQADAHSTLAKISTSRVKFSRSADAPAYQQGQNQLYNELNLGRREEYDVLDKRRGRDPEMGGKPQRRKNPQEGLYNELQKDKMAEAYSEIGMKGERRRGKGHDGLYQGLSTATKDTYDALHMQALPPRRAKRSGSGATNFSLLKQAGDVEENPGPMDWIWRILFLVGAATGAHSGPEVQLVESGGGLVQAGGSLRLSCAASGRTFTMGWFRQAPGKEREFVAAISLSPTLAYYADSVKGRFTISRDNAKNTVVLQMNSLKPEDTALYYCAADRKSVMSIRPDYWGQGTQVTVSSTRASTKGPSVFPLAPSSKSTSGGTAALGCLVKDYFPEPVTVSWNSGALTSGVHTFPAVLQSSGLYSLSSVVTVPSSSLGTQTYICNVNHKPSNTKVDKRVEPKSCGTQSFGLLDPKLCYLLDGILFIYGVILTALFLRDQRLPPDAHKPPGGGSFRTPIQEEQADAHSTLAKISSRRVKFSRSADAPAYQQGQNQLYNELNLGRREEYDVLDKRRGRDPEMGGKPQRRKNPQEGLYNELQKDKMAEAYSEIGMKGERRRGKGHDGLYQGLSTATKDTYDALHMQALPPRRAKRSGSGVKQTLNFDLLKLAGDVESNPGPGHMTEYKPTVRLATRDDVPRAVRTLAAAFADYPATRHTVDPDRHIERVTELQELFLTRVGLDIGKVWVADDGAAVAVWTTPESVEAGAVFAEIGPRMAELSGSRLAAQQQMEGLLAPHRPKEPAWFLATVGVSPDHQGKGLGSAVVLPGVEAAERAGVPAFLETSAPRNLPFYERLGFTVTADVEVPEGPRTWCMTRKPGA

SEQ ID NO: 4479 - protein, 1125 aa, Artificial Sequence
  Synthetic Polypeptide
MALPVTALLLPLALLLHAARPDIQMTQSPSSLSASVGDRVTITCKASDHINNWLAWYQQKPGQAPKLLIYGATTLETGVPSRFSGSGSGTDYTLTISSLQPEDFATYYCQQSWNTPWTFGQGTKLEIKRLEDLKNVFPPEVAVFEPSEAEISHTQKATLVCLATGFYPDHVELSWWVNGKEVHSGVSTDPQPLKEQPALNDSRYCLSSRLRVSATFWQNPRNHFRCQVQFYGLSENDEWTQDRAKPVTQIVSAEAWGRADCGSQSFGLLDPKLCYLLDGILFIYGVILTALFLRDQRLPPDAHKPPGGGSFRTPIQEEQADAHSTLAKISTSRVKFSRSADAPAYQQGQNQLYNELNLGRREEYDVLDKRRGRDPEMGGKPQRRKNPQEGLYNELQKDKMAEAYSEIGMKGERRRGKGHDGLYQGLSTATKDTYDALHMQALPPRRAKRSGSGATNFSLLKQAGDVEENPGPMDWIWRILFLVGAATGAHSFEQVQLQQPGAELVKPGASVKMSCKASGYAFSSYWINWMKQKPGQGLEWIGQIYPGDGDTNYNGKFKGRATLTADTSSSTAYMQLSSLTSEDSAVYFCARSITTVVGCAMDYWGQGTSVTVSSTRIQNPDPAVYQLRDSKSSDKSVCLFTDFDSQTNVSQSKDSDVYITDKTVLDMRSMDFKSNSAVAWSNKSDFACANAFNNSIIPEDTFFPSPESSCGTQSFGLLDPKLCYLLDGILFIYGVILTALFLRDQRLPPDAHKPPGGGSFRTPIQEEQADAHSTLAKISSRRVKFSRSADAPAYQQGQNQLYNELNLGRREEYDVLDKRRGRDPEMGGKPQRRKNPQEGLYNELQKDKMAEAYSEIGMKGERRRGKGHDGLYQGLSTATKDTYDALHMQALPPRRAKRSGSGVKQTLNFDLLKLAGDVESNPGPGHMTEYKPTVRLATRDDVPRAVRTLAAAFADYPATRHTVDPDRHIERVTELQELFLTRVGLDIGKVWVADDGAAVAVWTTPESVEAGAVFAEIGPRMAELSGSRLAAQQQMEGLLAPHRPKEPAWFLATVGVSPDHQGKGLGSAVVLPGVEAAERAGVPAFLETSAPRNLPFYERLGFTVTADVEVPEGPRTWCMTRKPGA

SEQ ID NO: 4480 - protein, 1262 aa, Artificial Sequence
  Synthetic Polypeptide
MALPVTALLLPLALLLHAARPEVQLVESGGGLVQAGGSLRLSCAASGRTFSMGWFRQAPGKEREFVAAITYSGGSPYYADSVKGRFTISRDNAKNTVYLQMNSLKPEDTAVYYCAANPTYGSDWNAENWGQGTQVTVSSGTGGGGSGGGGSGGGGSEFDIQMTQSPSSLSASVGDRVTITCKASDHINNWLAWYQQKPGQAPKLLIYGATTLETGVPSRFSGSGSGTDYTLTISSLQPEDFATYYCQQSWNTPWTFGQGTKLEIKRLEDLKNVFPPEVAVFEPSEAEISHTQKATLVCLATGFYPDHVELSWWVNGKEVHSGVSTDPQPLKEQPALNDSRYCLSSRLRVSATFWQNPRNHFRCQVQFYGLSENDEWTQDRAKPVTQIVSAEAWGRADCGSQSFGLLDPKLCYLLDGILFIYGVILTALFLRDQRLPPDAHKPPGGGSFRTPIQEEQADAHSTLAKISTSRVKFSRSADAPAYQQGQNQLYNELNLGRREEYDVLDKRRGRDPEMGGKPQRRKNPQEGLYNELQKDKMAEAYSEIGMKGERRRGKGHDGLYQGLSTATKDTYDALHMQALPPRRAKRSGSGATNFSLLKQAGDVEENPGPMDWIWRILFLVGAATGAHSFEQVQLQQPGAELVKPGASVKMSCKASGYAFSSYWINWMKQKPGQGLEWIGQIYPGDGDTNYNGKFKGRATLTADTSSSTAYMQLSSLTSEDSAVYFCARSITTVVGCAMDYWGQGTSVTVSSTRIQNPDPAVYQLRDSKSSDKSVCLFTDFDSQTNVSQSKDSDVYITDKTVLDMRSMDFKSNSAVAWSNKSDFACANAFNNSIIPEDTFFPSPESSCGTQSFGLLDPKLCYLLDGILFIYGVILTALFLRDQRLPPDAHKPPGGGSFRTPIQEEQADAHSTLAKISSRRVKFSRSADAPAYQQGQNQLYNELNLGRREEYDVLDKRRGRDPEMGGKPQRRKNPQEGLYNELQKDKMAEAYSEIGMKGERRRGKGHDGLYQGLSTATKDTYDALHMQALPPRRAKRSGSGVKQTLNFDLLKLAGDVESNPGPGHMTEYKPTVRLATRDDVPRAVRTLAAAFADYPATRHTVDPDRHIERVTELQELFLTRVGLDIGKVWVADDGAAVAVWTTPESVEAGAVFAEIGPRMAELSGSRLAAQQQMEGLLAPHRPKEPAWFLATVGVSPDHQGKGLGSAVVLPGVEAAERAGVPAFLETSAPRNLPFYERLGFTVTADVEVPEGPRTWCMTRKPGA

SEQ ID NO: 4481 - protein, 1399 aa, Artificial Sequence
  Synthetic Polypeptide
MALPVTALLLPLALLLHAARPEVQLVESGGGLVQAGGSLRLSCAASGRTFSMGWFRQAPGKEREFVAAITYSGGSPYYADSVKGRFTISRDNAKNTVYLQMNSLKPEDTAVYYCAANPTYGSDWNAENWGQGTQVTVSSGTGGGGSGGGGSGGGGSEFDIQMTQSPSSLSASVGDRVTITCKASDHINNWLAWYQQKPGQAPKLLIYGATTLETGVPSRFSGSGSGTDYTLTISSLQPEDFATYYCQQSWNTPWTFGQGTKLEIKRLEDLKNVFPPEVAVFEPSEAEISHTQKATLVCLATGFYPDHVELSWWVNGKEVHSGVSTDPQPLKEQPALNDSRYCLSSRLRVSATFWQNPRNHFRCQVQFYGLSENDEWTQDRAKPVTQIVSAEAWGRADCGSQSFGLLDPKLCYLLDGILFIYGVILTALFLRDQRLPPDAHKPPGGGSFRTPIQEEQADAHSTLAKISTSRVKFSRSADAPAYQQGQNQLYNELNLGRREEYDVLDKRRGRDPEMGGKPQRRKNPQEGLYNELQKDKMAEAYSEIGMKGERRRGKGHDGLYQGLSTATKDTYDALHMQALPPRRAKRSGSGATNFSLLKQAGDVEENPGPMDWIWRILFLVGAATGAHSGPEVQLVESGGGLVQAGGSLRLSCAASGRTFTMGWFRQAPGKEREFVAAISLSPTLAYYADSVKGRFTISRDNAKNTVVLQMNSLKPEDTALYYCAADRKSVMSIRPDYWGQGTQVTVSSGSGGGGSGGGGSGGGGSFEQVQLQQPGAELVKPGASVKMSCKASGYAFSSYWINWMKQKPGQGLEWIGQIYPGDGDTNYNGKFKGRATLTADTSSSTAYMQLSSLTSEDSAVYFCARSITTVVGCAMDYWGQGTSVTVSSTRIQNPDPAVYQLRDSKSSDKSVCLFTDFDSQTNVSQSKDSDVYITDKTVLDMRSMDFKSNSAVAWSNKSDFACANAFNNSIIPEDTFFPSPESSCGTQSFGLLDPKLCYLLDGILFIYGVILTALFLRDQRLPPDAHKPPGGGSFRTPIQEEQADAHSTLAKISSRRVKFSRSADAPAYQQGQNQLYNELNLGRREEYDVLDKRRGRDPEMGGKPQRRKNPQEGLYNELQKDKMAEAYSEIGMKGERRRGKGHDGLYQGLSTATKDTYDALHMQALPPRRAKRSGSGVKQTLNFDLLKLAGDVESNPGPGHMTEYKPTVRLATRDDVPRAVRTLAAAFADYPATRHTVDPDRHIERVTELQELFLTRVGLDIGKVWVADDGAAVAVWTTPESVEAGAVFAEIGPRMAELSGSRLAAQQQMEGLLAPHRPKEPAWFLATVGVSPDHQGKGLGSAVVLPGVEAAERAGVPAFLETSAPRNLPFYERLGFTVTADVEVPEGPRTWCMTRKPGA

SEQ ID NO: 4482 - protein, 1132 aa, Artificial Sequence
  Synthetic Polypeptide
MALPVTALLLPLALLLHAARPEVQLVESGGGLVQAGGSLRLSCAASGRTFSMGWFRQAPGKEREFVAAITYSGGSPYYADSVKGRFTISRDNAKNTVYLQMNSLKPEDTAVYYCAANPTYGSDWNAENWGQGTQVTVSSLEDLKNVFPPEVAVFEPSEAEISHTQKATLVCLATGFYPDHVELSWWVNGKEVHSGVSTDPQPLKEQPALNDSRYCLSSRLRVSATFWQNPRNHFRCQVQFYGLSENDEWTQDRAKPVTQIVSAEAWGRADCGSQSFGLLDPKLCYLLDGILFIYGVILTALFLRDQRLPPDAHKPPGGGSFRTPIQEEQADAHSTLAKISTSRVKFSRSADAPAYQQGQNQLYNELNLGRREEYDVLDKRRGRDPEMGGKPQRRKNPQEGLYNELQKDKMAEAYSEIGMKGERRRGKGHDGLYQGLSTATKDTYDALHMQALPPRRAKRSGSGATNFSLLKQAGDVEENPGPMDWIWRILFLVGAATGAHSGPEVQLVESGGGLVQAGGSLRLSCAASGRTFTMGWFRQAPGKEREFVAAISLSPTLAYYADSVKGRFTISRDNAKNTVVLQMNSLKPEDTALYYCAADRKSVMSIRPDYWGQGTQVTVSSTRIQNPDPAVYQLRDSKSSDKSVCLFTDFDSQTNVSQSKDSDVYITDKTVLDMRSMDFKSNSAVAWSNKSDFACANAFNNSIIPEDTFFPSPESSCGTQSFGLLDPKLCYLLDGILFIYGVILTALFLRDQRLPPDAHKPPGGGSFRTPIQEEQADAHSTLAKISSRRVKFSRSADAPAYQQGQNQLYNELNLGRREEYDVLDKRRGRDPEMGGKPQRRKNPQEGLYNELQKDKMAEAYSEIGMKGERRRGKGHDGLYQGLSTATKDTYDALHMQALPPRRAKRSGSGVKQTLNFDLLKLAGDVESNPGPGHMTEYKPTVRLATRDDVPRAVRTLAAAFADYPATRHTVDPDRHIERVTELQELFLTRVGLDIGKVWVADDGAAVAVWTTPESVEAGAVFAEIGPRMAELSGSRLAAQQQMEGLLAPHRPKEPAWFLATVGVSPDHQGKGLGSAVVLPGVEAAERAGVPAFLETSAPRNLPFYERLGFTVTADVEVPEGPRTWCMTRKPGA

SEQ ID NO: 4483 - protein, 577 aa, Artificial Sequence
  Synthetic Polypeptide
MALPVTALLLPLALLLHAARPACEVQLLESGGGLIQPGGSLRLSCAASGFTFSSHAMTWVRQAPGKGLEWVSAISGSGDYTHYADSVKGRFTISRDNSKNTVYLQMNSLRAEDSAVYYCAKDEDGGSLLGHRGQGTLVTVSSGTGGGGSGGGGSGGGGSEFGSLEQSFGLLDPKLCYLLDGILFIYGVILTALFLRDQRLPPDAHKPPGGGSFRTPIQEEQADAHSTLAKISTSRVKFSRSADAPAYQQGQNQLYNELNLGRREEYDVLDKRRGRDPEMGGKPQRRKNPQEGLYNELQKDKMAEAYSEIGMKGERRRGKGHDGLYQGLSTATKDTYDALHMQALPPRRAKRSGSGATNFSLLKQAGDVEENPGPTRGHMTEYKPTVRLATRDDVPRAVRTLAAAFADYPATRHTVDPDRHIERVTELQELFLTRVGLDIGKVWVADDGAAVAVWTTPESVEAGAVFAEIGPRMAELSGSRLAAQQQMEGLLAPHRPKEPAWFLATVGVSPDHQGKGLGSAVVLPGVEAAERAGVPAFLETSAPRNLPFYERLGFTVTADVEVPEGPRTWCMTRKPGA

SEQ ID NO: 4484 - protein, 905 aa, Artificial Sequence
  Synthetic Polypeptide
MALPVTALLLPLALLLHAARPDIQMTQSPSSLSASVGDRVTITCKASDHINNWLAWYQQKPGQAPKLLIYGATTLETGVPSRFSGSGSGTDYTLTISSLQPEDFATYYCQQSWNTPWTFGQGTKLEIKRLETTPGERSSLPAFYPGTSGSCSGCGSLSLPLLAGLVAADAVASLLIVGAVFLCARPRRSPAQEDGKVYINMPGRGSTSRVKFSRSADAPAYQQGQNQLYNELNLGRREEYDVLDKRRGRDPEMGGKPQRRKNPQEGLYNELQKDKMAEAYSEIGMKGERRRGKGHDGLYQGLSTATKDTYDALHMQALPPRRAKRSGSGATNFSLLKQAGDVEENPGPMDWIWRILFLVGAATGAHSFEQVQLQQPGAELVKPGASVKMSCKASGYAFSSYWINWMKQKPGQGLEWIGQIYPGDGDTNYNGKFKGRATLTADTSSSTAYMQLSSLTSEDSAVYFCARSITTVVGCAMDYWGQGTSVTVSSTRQSFGLLDPKLSYLLDGILFIYGVILTALFLRDQRLPPDAHKPPGGGSFRTPIQEEQADAHSTLAKISSRRVKFSRSADAPAYQQGQNQLYNELNLGRREEYDVLDKRRGRDPEMGGKPQRRKNPQEGLYNELQKDKMAEAYSEIGMKGERRRGKGHDGLYQGLSTATKDTYDALHMQALPPRRAKRSGSGVKQTLNFDLLKLAGDVESNPGPGHMTEYKPTVRLATRDDVPRAVRTLAAAFADYPATRHTVDPDRHIERVTELQELFLTRVGLDIGKVWVADDGAAVAVWTTPESVEAGAVFAEIGPRMAELSGSRLAAQQQMEGLLAPHRPKEPAWFLATVGVSPDHQGKGLGSAVVLPGVEAAERAGVPAFLETSAPRNLPFYERLGFTVTADVEVPEGPRTWCMTRKPGA

SEQ ID NO: 4485 - protein, 957 aa, Artificial Sequence
  Synthetic Polypeptide
MALPVTALLLPLALLLHAARPACEVQLLESGGGLIQPGGSLRLSCAASGFTFSSHAMTWVRQAPGKGLEWVSAISGSGDYTHYADSVKGRFTISRDNSKNTVYLQMNSLRAEDSAVYYCAKDEDGGSLLGHRGQGTLVTVSSGTGGGGSGGGGSGGGGSEFGSLETTPGERSSLPAFYPGTSGSCSGCGSLSLPLLAGLVAADAVASLLIVGAVFLCARPRRSPAQEDGKVYINMPGRGSTSRVKFSRSADAPAYQQGQNQLYNELNLGRREEYDVLDKRRGRDPEMGGKPQRRKNPQEGLYNELQKDKMAEAYSEIGMKGERRRGKGHDGLYQGLSTATKDTYDALHMQALPPRRAKRSGSGATNFSLLKQAGDVEENPGPMDWIWRILFLVGAATGAHSGPEVQLVESGGGLVQAGGSLRLSCAASGRTFSMGWFRQAPGKEREFVAAITYSGGSPYYADSVKGRFTISRDNAKNTVYLQMNSLKPEDTAVYYCAANPTYGSDWNAENWGQGTQVTVSSGSGGGGSGGGGSGGGGSFEGSTRQSFGLLDPKLSYLLDGILFIYGVILTALFLRDQRLPPDAHKPPGGGSFRTPIQEEQADAHSTLAKISSRRVKFSRSADAPAYQQGQNQLYNELNLGRREEYDVLDKRRGRDPEMGGKPQRRKNPQEGLYNELQKDKMAEAYSEIGMKGERRRGKGHDGLYQGLSTATKDTYDALHMQALPPRRAKRSGSGVKQTLNFDLLKLAGDVESNPGPGHMTEYKPTVRLATRDDVPRAVRTLAAAFADYPATRHTVDPDRHIERVTELQELFLTRVGLDIGKVWVADDGAAVAVWTTPESVEAGAVFAEIGPRMAELSGSRLAAQQQMEGLLAPHRPKEPAWFLATVGVSPDHQGKGLGSAVVLPGVEAAERAGVPAFLETSAPRNLPFYERLGFTVTADVEVPEGPRTWCMTRKPGA

SEQ ID NO: 4486 - protein, 1107 aa, Artificial Sequence
  Synthetic Polypeptide
MALPVTALLLPLALLLHAARPDIQMTQSPSSLSASVGDRVTITCKASDHINNWLAWYQQKPGQAPKLLIYGATTLETGVPSRFSGSGSGTDYTLTISSLQPEDFATYYCQQSWNTPWTFGQGTKLEIKRLEGQPKANPTVTLFPPSSEELQANKATLVCLISDFYPGAVTVAWKADGSPVKAGVETTKPSKQSNNKYAASSYLSLTPEQWKSHRSYSCQVTHEGSTVEKTVAPTECSGSTTPGERSSLPAFYPGTSGSCSGCGSLSLPLLAGLVAADAVASLLIVGAVFLCARPRRSPAQEDGKVYINMPGRGSTSRVKFSRSADAPAYQQGQNQLYNELNLGRREEYDVLDKRRGRDPEMGGKPQRRKNPQEGLYNELQKDKMAEAYSEIGMKGERRRGKGHDGLYQGLSTATKDTYDALHMQALPPRRAKRSGSGATNFSLLKQAGDVEENPGPMDWIWRILFLVGAATGAHSFEQVQLQQPGAELVKPGASVKMSCKASGYAFSSYWINWMKQKPGQGLEWIGQIYPGDGDTNYNGKFKGRATLTADTSSSTAYMQLSSLTSEDSAVYFCARSITTVVGCAMDYWGQGTSVTVSSTRASTKGPSVFPLAPSSKSTSGGTAALGCLVKDYFPEPVTVSWNSGALTSGVHTFPAVLQSSGLYSLSSVVTVPSSSLGTQTYICNVNHKPSNTKVDKRVEPKSCGTQSFGLLDPKLSYLLDGILFIYGVILTALFLRDQRLPPDAHKPPGGGSFRTPIQEEQADAHSTLAKISSRRVKFSRSADAPAYQQGQNQLYNELNLGRREEYDVLDKRRGRDPEMGGKPQRRKNPQEGLYNELQKDKMAEAYSEIGMKGERRRGKGHDGLYQGLSTATKDTYDALHMQALPPRRAKRSGSGVKQTLNFDLLKLAGDVESNPGPGHMATYEVLCEVARKLGTDDREVVLFLLNVFIPQPTLAQLIGALRALKEEGRLTFPLLAECLFRAGRRDLLRDLLHLDPRFLERHLAGTMSYFSPYQLTVLHVDGELCARDIRSLIFLSKDTIGSRSTPQTFLHWVYCMENLDLLGPTDVDALMSMLRSLSRVDLQRQVQTLMGLHLSGPSHSQHYRHTP

SEQ ID NO: 4487 - protein, 1160 aa, Artificial Sequence
  Synthetic Polypeptide
MALPVTALLLPLALLLHAARPDIQMTQSPSSLSASVGDRVTITCKASDHINNWLAWYQQKPGQAPKLLIYGATTLETGVPSRFSGSGSGTDYTLTISSLQPEDFATYYCQQSWNTPWTFGQGTKLEIKRLEGQPKANPTVTLFPPSSEELQANKATLVCLISDFYPGAVTVAWKADGSPVKAGVETTKPSKQSNNKYAASSYLSLTPEQWKSHRSYSCQVTHEGSTVEKTVAPTECSGSTTPGERSSLPAFYPGTSGSCSGCGSLSLPLLAGLVAADAVASLLIVGAVFLCARPRRSPAQEDGKVYINMPGRGSTSRVKFSRSADAPAYQQGQNQLYNELNLGRREEYDVLDKRRGRDPEMGGKPQRRKNPQEGLYNELQKDKMAEAYSEIGMKGERRRGKGHDGLYQGLSTATKDTYDALHMQALPPRRAKRSGSGATNFSLLKQAGDVEENPGPMDWIWRILFLVGAATGAHSFEQVQLQQPGAELVKPGASVKMSCKASGYAFSSYWINWMKQKPGQGLEWIGQIYPGDGDTNYNGKFKGRATLTADTSSSTAYMQLSSLTSEDSAVYFCARSITTVVGCAMDYWGQGTSVTVSSTRASTKGPSVFPLAPSSKSTSGGTAALGCLVKDYFPEPVTVSWNSGALTSGVHTFPAVLQSSGLYSLSSVVTVPSSSLGTQTYICNVNHKPSNTKVDKRVEPKSCGTQSFGLLDPKLSYLLDGILFIYGVILTALFLRDQRLPPDAHKPPGGGSFRTPIQEEQADAHSTLAKISSRRVKFSRSADAPAYQQGQNQLYNELNLGRREEYDVLDKRRGRDPEMGGKPQRRKNPQEGLYNELQKDKMAEAYSEIGMKGERRRGKGHDGLYQGLSTATKDTYDALHMQALPPRRAKRSGSGVKQTLNFDLLKLAGDVESNPGPGHMSDSKEVPSLPFLRHLLEELDSHEDSLLLFLCHDAAPGCTTVTQALCSLSQQRKLTLAALVEMLYVLQRMDLLKSRFGLSKEGAEQLLGTSFLTRYRKLMVCVGEELDSSELRALRLFACNLNPSLSTALSESSRFVELVLALENVGLVSPSSVSVLADMLRTLRRLDLCQQLVEYEQQEQARYRYCYAASPSLPVRTLRRGHGASEHEQLCMPVQESSDSPELLRTPVQESSSDSPEQTT

SEQ ID NO: 4488 - protein, 1118 aa, Artificial Sequence
  Synthetic Polypeptide
MALPVTALLLPLALLLHAARPDIQMTQSPSSLSASVGDRVTITCKASDHINNWLAWYQQKPGQAPKLLIYGATTLETGVPSRFSGSGSGTDYTLTISSLQPEDFATYYCQQSWNTPWTFGQGTKLEIKRLEGQPKANPTVTLFPPSSEELQANKATLVCLISDFYPGAVTVAWKADGSPVKAGVETTKPSKQSNNKYAASSYLSLTPEQWKSHRSYSCQVTHEGSTVEKTVAPTECSGSTTPGERSSLPAFYPGTSGSCSGCGSLSLPLLAGLVAADAVASLLIVGAVFLCARPRRSPAQEDGKVYINMPGRGSTSRVKFSRSADAPAYQQGQNQLYNELNLGRREEYDVLDKRRGRDPEMGGKPQRRKNPQEGLYNELQKDKMAEAYSEIGMKGERRRGKGHDGLYQGLSTATKDTYDALHMQALPPRRAKRSGSGATNFSLLKQAGDVEENPGPMDWIWRILFLVGAATGAHSFEQVQLQQPGAELVKPGASVKMSCKASGYAFSSYWINWMKQKPGQGLEWIGQIYPGDGDTNYNGKFKGRATLTADTSSSTAYMQLSSLTSEDSAVYFCARSITTVVGCAMDYWGQGTSVTVSSTRASTKGPSVFPLAPSSKSTSGGTAALGCLVKDYFPEPVTVSWNSGALTSGVHTFPAVLQSSGLYSLSSVVTVPSSSLGTQTYICNVNHKPSNTKVDKRVEPKSCGTQSFGLLDPKLSYLLDGILFIYGVILTALFLRDQRLPPDAHKPPGGGSFRTPIQEEQADAHSTLAKISSRRVKFSRSADAPAYQQGQNQLYNELNLGRREEYDVLDKRRGRDPEMGGKPQRRKNPQEGLYNELQKDKMAEAYSEIGMKGERRRGKGHDGLYQGLSTATKDTYDALHMQALPPRRAKRSGSGVKQTLNFDLLKLAGDVESNPGPGHMTEYKPTVRLATRDDVPRAVRTLAAAFADYPATRHTVDPDRHIERVTELQELFLTRVGLDIGKVWVADDGAAVAVWTTPESVEAGAVFAEIGPRMAELSGSRLAAQQQMEGLLAPHRPKEPAWFLATVGVSPDHQGKGLGSAVVLPGVEAAERAGVPAFLETSAPRNLPFYERLGFTVTADVEVPEGPRTWCMTRKPGA

SEQ ID NO: 4489 - protein, 1255 aa, Artificial Sequence
  Synthetic Polypeptide
MALPVTALLLPLALLLHAARPEVQLVESGGGLVQAGGSLRLSCAASGRTFSMGWFRQAPGKEREFVAAITYSGGSPYYADSVKGRFTISRDNAKNTVYLQMNSLKPEDTAVYYCAANPTYGSDWNAENWGQGTQVTVSSGTGGGGSGGGGSGGGGSEFDIQMTQSPSSLSASVGDRVTITCKASDHINNWLAWYQQKPGQAPKLLIYGATTLETGVPSRFSGSGSGTDYTLTISSLQPEDFATYYCQQSWNTPWTFGQGTKLEIKRLEGQPKANPTVTLFPPSSEELQANKATLVCLISDFYPGAVTVAWKADGSPVKAGVETTKPSKQSNNKYAASSYLSLTPEQWKSHRSYSCQVTHEGSTVEKTVAPTECSGSTTPGERSSLPAFYPGTSGSCSGCGSLSLPLLAGLVAADAVASLLIVGAVFLCARPRRSPAQEDGKVYINMPGRGSTSRVKFSRSADAPAYQQGQNQLYNELNLGRREEYDVLDKRRGRDPEMGGKPQRRKNPQEGLYNELQKDKMAEAYSEIGMKGERRRGKGHDGLYQGLSTATKDTYDALHMQALPPRRAKRSGSGATNFSLLKQAGDVEENPGPMDWIWRILFLVGAATGAHSFEQVQLQQPGAELVKPGASVKMSCKASGYAFSSYWINWMKQKPGQGLEWIGQIYPGDGDTNYNGKFKGRATLTADTSSSTAYMQLSSLTSEDSAVYFCARSITTVVGCAMDYWGQGTSVTVSSTRASTKGPSVFPLAPSSKSTSGGTAALGCLVKDYFPEPVTVSWNSGALTSGVHTFPAVLQSSGLYSLSSVVTVPSSSLGTQTYICNVNHKPSNTKVDKRVEPKSCGTQSFGLLDPKLSYLLDGILFIYGVILTALFLRDQRLPPDAHKPPGGGSFRTPIQEEQADAHSTLAKISSRRVKFSRSADAPAYQQGQNQLYNELNLGRREEYDVLDKRRGRDPEMGGKPQRRKNPQEGLYNELQKDKMAEAYSEIGMKGERRRGKGHDGLYQGLSTATKDTYDALHMQALPPRRAKRSGSGVKQTLNFDLLKLAGDVESNPGPGHMTEYKPTVRLATRDDVPRAVRTLAAAFADYPATRHTVDPDRHIERVTELQELFLTRVGLDIGKVWVADDGAAVAVWTTPESVEAGAVFAEIGPRMAELSGSRLAAQQQMEGLLAPHRPKEPAWFLATVGVSPDHQGKGLGSAVVLPGVEAAERAGVPAFLETSAPRNLPFYERLGFTVTADVEVPEGPRTWCMTRKPGA

SEQ ID NO: 4490 - protein, 1392 aa, Artificial Sequence
  Synthetic Polypeptide
MALPVTALLLPLALLLHAARPEVQLVESGGGLVQAGGSLRLSCAASGRTFSMGWFRQAPGKEREFVAAITYSGGSPYYADSVKGRFTISRDNAKNTVYLQMNSLKPEDTAVYYCAANPTYGSDWNAENWGQGTQVTVSSGTGGGGSGGGGSGGGGSEFDIQMTQSPSSLSASVGDRVTITCKASDHINNWLAWYQQKPGQAPKLLIYGATTLETGVPSRFSGSGSGTDYTLTISSLQPEDFATYYCQQSWNTPWTFGQGTKLEIKRLEGQPKANPTVTLFPPSSEELQANKATLVCLISDFYPGAVTVAWKADGSPVKAGVETTKPSKQSNNKYAASSYLSLTPEQWKSHRSYSCQVTHEGSTVEKTVAPTECSGSTTPGERSSLPAFYPGTSGSCSGCGSLSLPLLAGLVAADAVASLLIVGAVFLCARPRRSPAQEDGKVYINMPGRGSTSRVKFSRSADAPAYQQGQNQLYNELNLGRREEYDVLDKRRGRDPEMGGKPQRRKNPQEGLYNELQKDKMAEAYSEIGMKGERRRGKGHDGLYQGLSTATKDTYDALHMQALPPRRAKRSGSGATNFSLLKQAGDVEENPGPMDWIWRILFLVGAATGAHSGPEVQLVESGGGLVQAGGSLRLSCAASGRTFTMGWFRQAPGKEREFVAAISLSPTLAYYADSVKGRFTISRDNAKNTVVLQMNSLKPEDTALYYCAADRKSVMSIRPDYWGQGTQVTVSSGSGGGGSGGGGSGGGGSFEQVQLQQPGAELVKPGASVKMSCKASGYAFSSYWINWMKQKPGQGLEWIGQIYPGDGDTNYNGKFKGRATLTADTSSSTAYMQLSSLTSEDSAVYFCARSITTVVGCAMDYWGQGTSVTVSSTRASTKGPSVFPLAPSSKSTSGGTAALGCLVKDYFPEPVTVSWNSGALTSGVHTFPAVLQSSGLYSLSSVVTVPSSSLGTQTYICNVNHKPSNTKVDKRVEPKSCGTQSFGLLDPKLSYLLDGILFIYGVILTALFLRDQRLPPDAHKPPGGGSFRTPIQEEQADAHSTLAKISSRRVKFSRSADAPAYQQGQNQLYNELNLGRREEYDVLDKRRGRDPEMGGKPQRRKNPQEGLYNELQKDKMAEAYSEIGMKGERRRGKGHDGLYQGLSTATKDTYDALHMQALPPRRAKRSGSGVKQTLNFDLLKLAGDVESNPGPGHMTEYKPTVRLATRDDVPRAVRTLAAAFADYPATRHTVDPDRHIERVTELQELFLTRVGLDIGKVWVADDGAAVAVWTTPESVEAGAVFAEIGPRMAELSGSRLAAQQQMEGLLAPHRPKEPAWFLATVGVSPDHQGKGLGSAVVLPGVEAAERAGVPAFLETSAPRNLPFYERLGFTVTADVEVPEGPRTWCMTRKPGA

SEQ ID NO: 4491 - protein, 1125 aa, Artificial Sequence
  Synthetic Polypeptide
MALPVTALLLPLALLLHAARPEVQLVESGGGLVQAGGSLRLSCAASGRTFSMGWFRQAPGKEREFVAAITYSGGSPYYADSVKGRFTISRDNAKNTVYLQMNSLKPEDTAVYYCAANPTYGSDWNAENWGQGTQVTVSSLEGQPKANPTVTLFPPSSEELQANKATLVCLISDFYPGAVTVAWKADGSPVKAGVETTKPSKQSNNKYAASSYLSLTPEQWKSHRSYSCQVTHEGSTVEKTVAPTECSGSTTPGERSSLPAFYPGTSGSCSGCGSLSLPLLAGLVAADAVASLLIVGAVFLCARPRRSPAQEDGKVYINMPGRGSTSRVKFSRSADAPAYQQGQNQLYNELNLGRREEYDVLDKRRGRDPEMGGKPQRRKNPQEGLYNELQKDKMAEAYSEIGMKGERRRGKGHDGLYQGLSTATKDTYDALHMQALPPRRAKRSGSGATNFSLLKQAGDVEENPGPMDWIWRILFLVGAATGAHSGPEVQLVESGGGLVQAGGSLRLSCAASGRTFTMGWFRQAPGKEREFVAAISLSPTLAYYADSVKGRFTISRDNAKNTVVLQMNSLKPEDTALYYCAADRKSVMSIRPDYWGQGTQVTVSSTRASTKGPSVFPLAPSSKSTSGGTAALGCLVKDYFPEPVTVSWNSGALTSGVHTFPAVLQSSGLYSLSSVVTVPSSSLGTQTYICNVNHKPSNTKVDKRVEPKSCGTQSFGLLDPKLSYLLDGILFIYGVILTALFLRDQRLPPDAHKPPGGGSFRTPIQEEQADAHSTLAKISSRRVKFSRSADAPAYQQGQNQLYNELNLGRREEYDVLDKRRGRDPEMGGKPQRRKNPQEGLYNELQKDKMAEAYSEIGMKGERRRGKGHDGLYQGLSTATKDTYDALHMQALPPRRAKRSGSGVKQTLNFDLLKLAGDVESNPGPGHMTEYKPTVRLATRDDVPRAVRTLAAAFADYPATRHTVDPDRHIERVTELQELFLTRVGLDIGKVWVADDGAAVAVWTTPESVEAGAVFAEIGPRMAELSGSRLAAQQQMEGLLAPHRPKEPAWFLATVGVSPDHQGKGLGSAVVLPGVEAAERAGVPAFLETSAPRNLPFYERLGFTVTADVEVPEGPRTWCMTRKPGA

SEQ ID NO: 4492 - protein, 1133 aa, Artificial Sequence
  Synthetic Polypeptide
MALPVTALLLPLALLLHAARPDIQMTQSPSSLSASVGDRVTITCKASDHINNWLAWYQQKPGQAPKLLIYGATTLETGVPSRFSGSGSGTDYTLTISSLQPEDFATYYCQQSWNTPWTFGQGTKLEIKRLEDLKNVFPPEVAVFEPSEAEISHTQKATLVCLATGFYPDHVELSWWVNGKEVHSGVSTDPQPLKEQPALNDSRYCLSSRLRVSATFWQNPRNHFRCQVQFYGLSENDEWTQDRAKPVTQIVSAEAWGRADCGSTTPGERSSLPAFYPGTSGSCSGCGSLSLPLLAGLVAADAVASLLIVGAVFLCARPRRSPAQEDGKVYINMPGRGSTSRVKFSRSADAPAYQQGQNQLYNELNLGRREEYDVLDKRRGRDPEMGGKPQRRKNPQEGLYNELQKDKMAEAYSEIGMKGERRRGKGHDGLYQGLSTATKDTYDALHMQALPPRRAKRSGSGATNFSLLKQAGDVEENPGPMDWIWRILFLVGAATGAHSFEQVQLQQPGAELVKPGASVKMSCKASGYAFSSYWINWMKQKPGQGLEWIGQIYPGDGDTNYNGKFKGRATLTADTSSSTAYMQLSSLTSEDSAVYFCARSITTVVGCAMDYWGQGTSVTVSSTRIQNPDPAVYQLRDSKSSDKSVCLFTDFDSQTNVSQSKDSDVYITDKTVLDMRSMDFKSNSAVAWSNKSDFACANAFNNSIIPEDTFFPSPESSCGTQSFGLLDPKLSYLLDGILFIYGVILTALFLRDQRLPPDAHKPPGGGSFRTPIQEEQADAHSTLAKISSRRVKFSRSADAPAYQQGQNQLYNELNLGRREEYDVLDKRRGRDPEMGGKPQRRKNPQEGLYNELQKDKMAEAYSEIGMKGERRRGKGHDGLYQGLSTATKDTYDALHMQALPPRRAKRSGSGVKQTLNFDLLKLAGDVESNPGPGHMTEYKPTVRLATRDDVPRAVRTLAAAFADYPATRHTVDPDRHIERVTELQELFLTRVGLDIGKVWVADDGAAVAVWTTPESVEAGAVFAEIGPRMAELSGSRLAAQQQMEGLLAPHRPKEPAWFLATVGVSPDHQGKGLGSAVVLPGVEAAERAGVPAFLETSAPRNLPFYERLGFTVTADVEVPEGPRTWCMTRKPGA

SEQ ID NO: 4493 - protein, 1270 aa, Artificial Sequence
  Synthetic Polypeptide
MALPVTALLLPLALLLHAARPEVQLVESGGGLVQAGGSLRLSCAASGRTFSMGWFRQAPGKEREFVAAITYSGGSPYYADSVKGRFTISRDNAKNTVYLQMNSLKPEDTAVYYCAANPTYGSDWNAENWGQGTQVTVSSGTGGGGSGGGGSGGGGSEFDIQMTQSPSSLSASVGDRVTITCKASDHINNWLAWYQQKPGQAPKLLIYGATTLETGVPSRFSGSGSGTDYTLTISSLQPEDFATYYCQQSWNTPWTFGQGTKLEIKRLEDLKNVFPPEVAVFEPSEAEISHTQKATLVCLATGFYPDHVELSWWVNGKEVHSGVSTDPQPLKEQPALNDSRYCLSSRLRVSATFWQNPRNHFRCQVQFYGLSENDEWTQDRAKPVTQIVSAEAWGRADCGSTTPGERSSLPAFYPGTSGSCSGCGSLSLPLLAGLVAADAVASLLIVGAVFLCARPRRSPAQEDGKVYINMPGRGSTSRVKFSRSADAPAYQQGQNQLYNELNLGRREEYDVLDKRRGRDPEMGGKPQRRKNPQEGLYNELQKDKMAEAYSEIGMKGERRRGKGHDGLYQGLSTATKDTYDALHMQALPPRRAKRSGSGATNFSLLKQAGDVEENPGPMDWIWRILFLVGAATGAHSFEQVQLQQPGAELVKPGASVKMSCKASGYAFSSYWINWMKQKPGQGLEWIGQIYPGDGDTNYNGKFKGRATLTADTSSSTAYMQLSSLTSEDSAVYFCARSITTVVGCAMDYWGQGTSVTVSSTRIQNPDPAVYQLRDSKSSDKSVCLFTDFDSQTNVSQSKDSDVYITDKTVLDMRSMDFKSNSAVAWSNKSDFACANAFNNSIIPEDTFFPSPESSCGTQSFGLLDPKLSYLLDGILFIYGVILTALFLRDQRLPPDAHKPPGGGSFRTPIQEEQADAHSTLAKISSRRVKFSRSADAPAYQQGQNQLYNELNLGRREEYDVLDKRRGRDPEMGGKPQRRKNPQEGLYNELQKDKMAEAYSEIGMKGERRRGKGHDGLYQGLSTATKDTYDALHMQALPPRRAKRSGSGVKQTLNFDLLKLAGDVESNPGPGHMTEYKPTVRLATRDDVPRAVRTLAAAFADYPATRHTVDPDRHIERVTELQELFLTRVGLDIGKVWVADDGAAVAVWTTPESVEAGAVFAEIGPRMAELSGSRLAAQQQMEGLLAPHRPKEPAWFLATVGVSPDHQGKGLGSAVVLPGVEAAERAGVPAFLETSAPRNLPFYERLGFTVTADVEVPEGPRTWCMTRKPGA

SEQ ID NO: 4494 - protein, 1407 aa, Artificial Sequence
  Synthetic Polypeptide
MALPVTALLLPLALLLHAARPEVQLVESGGGLVQAGGSLRLSCAASGRTFSMGWFRQAPGKEREFVAAITYSGGSPYYADSVKGRFTISRDNAKNTVYLQMNSLKPEDTAVYYCAANPTYGSDWNAENWGQGTQVTVSSGTGGGGSGGGGSGGGGSEFDIQMTQSPSSLSASVGDRVTITCKASDHINNWLAWYQQKPGQAPKLLIYGATTLETGVPSRFSGSGSGTDYTLTISSLQPEDFATYYCQQSWNTPWTFGQGTKLEIKRLEDLKNVFPPEVAVFEPSEAEISHTQKATLVCLATGFYPDHVELSWWVNGKEVHSGVSTDPQPLKEQPALNDSRYCLSSRLRVSATFWQNPRNHFRCQVQFYGLSENDEWTQDRAKPVTQIVSAEAWGRADCGSTTPGERSSLPAFYPGTSGSCSGCGSLSLPLLAGLVAADAVASLLIVGAVFLCARPRRSPAQEDGKVYINMPGRGSTSRVKFSRSADAPAYQQGQNQLYNELNLGRREEYDVLDKRRGRDPEMGGKPQRRKNPQEGLYNELQKDKMAEAYSEIGMKGERRRGKGHDGLYQGLSTATKDTYDALHMQALPPRRAKRSGSGATNFSLLKQAGDVEENPGPMDWIWRILFLVGAATGAHSGPEVQLVESGGGLVQAGGSLRLSCAASGRTFTMGWFRQAPGKEREFVAAISLSPTLAYYADSVKGRFTISRDNAKNTVVLQMNSLKPEDTALYYCAADRKSVMSIRPDYWGQGTQVTVSSGSGGGGSGGGGSGGGGSFEQVQLQQPGAELVKPGASVKMSCKASGYAFSSYWINWMKQKPGQGLEWIGQIYPGDGDTNYNGKFKGRATLTADTSSSTAYMQLSSLTSEDSAVYFCARSITTVVGCAMDYWGQGTSVTVSSTRIQNPDPAVYQLRDSKSSDKSVCLFTDFDSQTNVSQSKDSDVYITDKTVLDMRSMDFKSNSAVAWSNKSDFACANAFNNSIIPEDTFFPSPESSCGTQSFGLLDPKLSYLLDGILFIYGVILTALFLRDQRLPPDAHKPPGGGSFRTPIQEEQADAHSTLAKISSRRVKFSRSADAPAYQQGQNQLYNELNLGRREEYDVLDKRRGRDPEMGGKPQRRKNPQEGLYNELQKDKMAEAYSEIGMKGERRRGKGHDGLYQGLSTATKDTYDALHMQALPPRRAKRSGSGVKQTLNFDLLKLAGDVESNPGPGHMTEYKPTVRLATRDDVPRAVRTLAAAFADYPATRHTVDPDRHIERVTELQELFLTRVGLDIGKVWVADDGAAVAVWTTPESVEAGAVFAEIGPRMAELSGSRLAAQQQMEGLLAPHRPKEPAWFLATVGVSPDHQGKGLGSAVVLPGVEAAERAGVPAFLETSAPRNLPFYERLGFTVTADVEVPEGPRTWCMTRKPGA

SEQ ID NO: 4495 - protein, 1140 aa, Artificial Sequence
  Synthetic Polypeptide
MALPVTALLLPLALLLHAARPEVQLVESGGGLVQAGGSLRLSCAASGRTFSMGWFRQAPGKEREFVAAITYSGGSPYYADSVKGRFTISRDNAKNTVYLQMNSLKPEDTAVYYCAANPTYGSDWNAENWGQGTQVTVSSLEDLKNVFPPEVAVFEPSEAEISHTQKATLVCLATGFYPDHVELSWWVNGKEVHSGVSTDPQPLKEQPALNDSRYCLSSRLRVSATFWQNPRNHFRCQVQFYGLSENDEWTQDRAKPVTQIVSAEAWGRADCGSTTPGERSSLPAFYPGTSGSCSGCGSLSLPLLAGLVAADAVASLLIVGAVFLCARPRRSPAQEDGKVYINMPGRGSTSRVKFSRSADAPAYQQGQNQLYNELNLGRREEYDVLDKRRGRDPEMGGKPQRRKNPQEGLYNELQKDKMAEAYSEIGMKGERRRGKGHDGLYQGLSTATKDTYDALHMQALPPRRAKRSGSGATNFSLLKQAGDVEENPGPMDWIWRILFLVGAATGAHSGPEVQLVESGGGLVQAGGSLRLSCAASGRTFTMGWFRQAPGKEREFVAAISLSPTLAYYADSVKGRFTISRDNAKNTVVLQMNSLKPEDTALYYCAADRKSVMSIRPDYWGQGTQVTVSSTRIQNPDPAVYQLRDSKSSDKSVCLFTDFDSQTNVSQSKDSDVYITDKTVLDMRSMDFKSNSAVAWSNKSDFACANAFNNSIIPEDTFFPSPESSCGTQSFGLLDPKLSYLLDGILFIYGVILTALFLRDQRLPPDAHKPPGGGSFRTPIQEEQADAHSTLAKISSRRVKFSRSADAPAYQQGQNQLYNELNLGRREEYDVLDKRRGRDPEMGGKPQRRKNPQEGLYNELQKDKMAEAYSEIGMKGERRRGKGHDGLYQGLSTATKDTYDALHMQALPPRRAKRSGSGVKQTLNFDLLKLAGDVESNPGPGHMTEYKPTVRLATRDDVPRAVRTLAAAFADYPATRHTVDPDRHIERVTELQELFLTRVGLDIGKVWVADDGAAVAVWTTPESVEAGAVFAEIGPRMAELSGSRLAAQQQMEGLLAPHRPKEPAWFLATVGVSPDHQGKGLGSAVVLPGVEAAERAGVPAFLETSAPRNLPFYERLGFTVTADVEVPEGPRTWCMTRKPGA

SEQ ID NO: 4496 - protein, 585 aa, Artificial Sequence; identical to SEQ ID NO: 4431
  Synthetic Polypeptide

SEQ ID NO: 4497 - protein, 897 aa, Artificial Sequence
  Synthetic Polypeptide
MALPVTALLLPLALLLHAARPDIQMTQSPSSLSASVGDRVTITCKASDHINNWLAWYQQKPGQAPKLLIYGATTLETGVPSRFSGSGSGTDYTLTISSLQPEDFATYYCQQSWNTPWTFGQGTKLEIKRLEQSFGLLDPKLSYLLDGILFIYGVILTALFLRDQRLPPDAHKPPGGGSFRTPIQEEQADAHSTLAKISTSRVKFSRSADAPAYQQGQNQLYNELNLGRREEYDVLDKRRGRDPEMGGKPQRRKNPQEGLYNELQKDKMAEAYSEIGMKGERRRGKGHDGLYQGLSTATKDTYDALHMQALPPRRAKRSGSGATNFSLLKQAGDVEENPGPMDWIWRILFLVGAATGAHSFEQVQLQQPGAELVKPGASVKMSCKASGYAFSSYWINWMKQKPGQGLEWIGQIYPGDGDTNYNGKFKGRATLTADTSSSTAYMQLSSLTSEDSAVYFCARSITTVVGCAMDYWGQGTSVTVSSTRQSFGLLDPKLSYLLDGILFIYGVILTALFLRDQRLPPDAHKPPGGGSFRTPIQEEQADAHSTLAKISSRRVKFSRSADAPAYQQGQNQLYNELNLGRREEYDVLDKRRGRDPEMGGKPQRRKNPQEGLYNELQKDKMAEAYSEIGMKGERRRGKGHDGLYQGLSTATKDTYDALHMQALPPRRAKRSGSGVKQTLNFDLLKLAGDVESNPGPGHMTEYKPTVRLATRDDVPRAVRTLAAAFADYPATRHTVDPDRHIERVTELQELFLTRVGLDIGKVWVADDGAAVAVWTTPESVEAGAVFAEIGPRMAELSGSRLAAQQQMEGLLAPHRPKEPAWFLATVGVSPDHQGKGLGSAVVLPGVEAAERAGVPAFLETSAPRNLPFYERLGFTVTADVEVPEGPRTWCMTRKPGA

SEQ ID NO: 4498 - protein, 949 aa, Artificial Sequence
  Synthetic Polypeptide
MALPVTALLLPLALLLHAARPACEVQLLESGGGLIQPGGSLRLSCAASGFTFSSHAMTWVRQAPGKGLEWVSAISGSGDYTHYADSVKGRFTISRDNSKNTVYLQMNSLRAEDSAVYYCAKDEDGGSLLGHRGQGTLVTVSSGTGGGGSGGGGSGGGGSEFGSLEQSFGLLDPKLSYLLDGILFIYGVILTALFLRDQRLPPDAHKPPGGGSFRTPIQEEQADAHSTLAKISTSRVKFSRSADAPAYQQGQNQLYNELNLGRREEYDVLDKRRGRDPEMGGKPQRRKNPQEGLYNELQKDKMAEAYSEIGMKGERRRGKGHDGLYQGLSTATKDTYDALHMQALPPRRAKRSGSGATNFSLLKQAGDVEENPGPMDWIWRILFLVGAATGAHSGPEVQLVESGGGLVQAGGSLRLSCAASGRTFSMGWFRQAPGKEREFVAAITYSGGSPYYADSVKGRFTISRDNAKNTVYLQMNSLKPEDTAVYYCAANPTYGSDWNAENWGQGTQVTVSSGSGGGGSGGGGSGGGGSFEGSTRQSFGLLDPKLSYLLDGILFIYGVILTALFLRDQRLPPDAHKPPGGGSFRTPIQEEQADAHSTLAKISSRRVKFSRSADAPAYQQGQNQLYNELNLGRREEYDVLDKRRGRDPEMGGKPQRRKNPQEGLYNELQKDKMAEAYSEIGMKGERRRGKGHDGLYQGLSTATKDTYDALHMQALPPRRAKRSGSGVKQTLNFDLLKLAGDVESNPGPGHMTEYKPTVRLATRDDVPRAVRTLAAAFADYPATRHTVDPDRHIERVTELQELFLTRVGLDIGKVWVADDGAAVAVWTTPESVEAGAVFAEIGPRMAELSGSRLAAQQQMEGLLAPHRPKEPAWFLATVGVSPDHQGKGLGSAVVLPGVEAAERAGVPAFLETSAPRNLPFYERLGFTVTADVEVPEGPRTWCMTRKPGA

SEQ ID NO: 4499 - protein, 1099 aa, Artificial Sequence
  Synthetic Polypeptide
MALPVTALLLPLALLLHAARPDIQMTQSPSSLSASVGDRVTITCKASDHINNWLAWYQQKPGQAPKLLIYGATTLETGVPSRFSGSGSGTDYTLTISSLQPEDFATYYCQQSWNTPWTFGQGTKLEIKRLEGQPKANPTVTLFPPSSEELQANKATLVCLISDFYPGAVTVAWKADGSPVKAGVETTKPSKQSNNKYAASSYLSLTPEQWKSHRSYSCQVTHEGSTVEKTVAPTECSGSQSFGLLDPKLSYLLDGILFIYGVILTALFLRDQRLPPDAHKPPGGGSFRTPIQEEQADAHSTLAKISTSRVKFSRSADAPAYQQGQNQLYNELNLGRREEYDVLDKRRGRDPEMGGKPQRRKNPQEGLYNELQKDKMAEAYSEIGMKGERRRGKGHDGLYQGLSTATKDTYDALHMQALPPRRAKRSGSGATNFSLLKQAGDVEENPGPMDWIWRILFLVGAATGAHSFEQVQLQQPGAELVKPGASVKMSCKASGYAFSSYWINWMKQKPGQGLEWIGQIYPGDGDTNYNGKFKGRATLTADTSSSTAYMQLSSLTSEDSAVYFCARSITTVVGCAMDYWGQGTSVTVSSTRASTKGPSVFPLAPSSKSTSGGTAALGCLVKDYFPEPVTVSWNSGALTSGVHTFPAVLQSSGLYSLSSVVTVPSSSLGTQTYICNVNHKPSNTKVDKRVEPKSCGTQSFGLLDPKLSYLLDGILFIYGVILTALFLRDQRLPPDAHKPPGGGSFRTPIQEEQADAHSTLAKISSRRVKFSRSADAPAYQQGQNQLYNELNLGRREEYDVLDKRRGRDPEMGGKPQRRKNPQEGLYNELQKDKMAEAYSEIGMKGERRRGKGHDGLYQGLSTATKDTYDALHMQALPPRRAKRSGSGVKQTLNFDLLKLAGDVESNPGPGHMATYEVLCEVARKLGTDDREVVLFLLNVFIPQPTLAQLIGALRALKEEGRLTFPLLAECLFRAGRRDLLRDLLHLDPRFLERHLAGTMSYFSPYQLTVLHVDGELCARDIRSLIFLSKDTIGSRSTPQTFLHWVYCMENLDLLGPTDVDALMSMLRSLSRVDLQRQVQTLMGLHLSGPSHSQHYRHTP

SEQ ID NO: 4500 - protein, 1152 aa, Artificial Sequence
  Synthetic Polypeptide
MALPVTALLLPLALLLHAARPDIQMTQSPSSLSASVGDRVTITCKASDHINNWLAWYQQKPGQAPKLLIYGATTLETGVPSRFSGSGSGTDYTLTISSLQPEDFATYYCQQSWNTPWTFGQGTKLEIKRLEGQPKANPTVTLFPPSSEELQANKATLVCLISDFYPGAVTVAWKADGSPVKAGVETTKPSKQSNNKYAASSYLSLTPEQWKSHRSYSCQVTHEGSTVEKTVAPTECSGSQSFGLLDPKLSYLLDGILFIYGVILTALFLRDQRLPPDAHKPPGGGSFRTPIQEEQADAHSTLAKISTSRVKFSRSADAPAYQQGQNQLYNELNLGRREEYDVLDKRRGRDPEMGGKPQRRKNPQEGLYNELQKDKMAEAYSEIGMKGERRRGKGHDGLYQGLSTATKDTYDALHMQALPPRRAKRSGSGATNFSLLKQAGDVEENPGPMDWIWRILFLVGAATGAHSFEQVQLQQPGAELVKPGASVKMSCKASGYAFSSYWINWMKQKPGQGLEWIGQIYPGDGDTNYNGKFKGRATLTADTSSSTAYMQLSSLTSEDSAVYFCARSITTVVGCAMDYWGQGTSVTVSSTRASTKGPSVFPLAPSSKSTSGGTAALGCLVKDYFPEPVTVSWNSGALTSGVHTFPAVLQSSGLYSLSSVVTVPSSSLGTQTYICNVNHKPSNTKVDKRVEPKSCGTQSFGLLDPKLSYLLDGILFIYGVILTALFLRDQRLPPDAHKPPGGGSFRTPIQEEQADAHSTLAKISSRRVKFSRSADAPAYQQGQNQLYNELNLGRREEYDVLDKRRGRDPEMGGKPQRRKNPQEGLYNELQKDKMAEAYSEIGMKGERRRGKGHDGLYQGLSTATKDTYDALHMQALPPRRAKRSGSGVKQTLNFDLLKLAGDVESNPGPGHMSDSKEVPSLPFLRHLLEELDSHEDSLLLFLCHDAAPGCTTVTQALCSLSQQRKLTLAALVEMLYVLQRMDLLKSRFGLSKEGAEQLLGTSFLTRYRKLMVCVGEELDSSELRALRLFACNLNPSLSTALSESSRFVELVLALENVGLVSPSSVSVLADMLRTLRRLDLCQQLVEYEQQEQARYRYCYAASPSLPVRTLRRGHGASEHEQLCMPVQESSDSPELLRTPVQESSSDSPEQTT

SEQ ID NO: 4501 - protein, 1110 aa, Artificial Sequence
  Synthetic Polypeptide
MALPVTALLLPLALLLHAARPDIQMTQSPSSLSASVGDRVTITCKASDHINNWLAWYQQKPGQAPKLLIYGATTLETGVPSRFSGSGSGTDYTLTISSLQPEDFATYYCQQSWNTPWTFGQGTKLEIKRLEGQPKANPTVTLFPPSSEELQANKATLVCLISDFYPGAVTVAWKADGSPVKAGVETTKPSKQSNNKYAASSYLSLTPEQWKSHRSYSCQVTHEGSTVEKTVAPTECSGSQSFGLLDPKLSYLLDGILFIYGVILTALFLRDQRLPPDAHKPPGGGSFRTPIQEEQADAHSTLAKISTSRVKFSRSADAPAYQQGQNQLYNELNLGRREEYDVLDKRRGRDPEMGGKPQRRKNPQEGLYNELQKDKMAEAYSEIGMKGERRRGKGHDGLYQGLSTATKDTYDALHMQALPPRRAKRSGSGATNFSLLKQAGDVEENPGPMDWIWRILFLVGAATGAHSFEQVQLQQPGAELVKPGASVKMSCKASGYAFSSYWINWMKQKPGQGLEWIGQIYPGDGDTNYNGKFKGRATLTADTSSSTAYMQLSSLTSEDSAVYFCARSITTVVGCAMDYWGQGTSVTVSSTRASTKGPSVFPLAPSSKSTSGGTAALGCLVKDYFPEPVTVSWNSGALTSGVHTFPAVLQSSGLYSLSSVVTVPSSSLGTQTYICNVNHKPSNTKVDKRVEPKSCGTQSFGLLDPKLSYLLDGILFIYGVILTALFLRDQRLPPDAHKPPGGGSFRTPIQEEQADAHSTLAKISSRRVKFSRSADAPAYQQGQNQLYNELNLGRREEYDVLDKRRGRDPEMGGKPQRRKNPQEGLYNELQKDKMAEAYSEIGMKGERRRGKGHDGLYQGLSTATKDTYDALHMQALPPRRAKRSGSGVKQTLNFDLLKLAGDVESNPGPGHMTEYKPTVRLATRDDVPRAVRTLAAAFADYPATRHTVDPDRHIERVTELQELFLTRVGLDIGKVWVADDGAAVAVWTTPESVEAGAVFAEIGPRMAELSGSRLAAQQQMEGLLAPHRPKEPAWFLATVGVSPDHQGKGLGSAVVLPGVEAAERAGVPAFLETSAPRNLPFYERLGFTVTADVEVPEGPRTWCMTRKPGA

SEQ ID NO: 4502 - protein, 1247 aa, Artificial Sequence
  Synthetic Polypeptide
MALPVTALLLPLALLLHAARPEVQLVESGGGLVQAGGSLRLSCAASGRTFSMGWFRQAPGKEREFVAAITYSGGSPYYADSVKGRFTISRDNAKNTVYLQMNSLKPEDTAVYYCAANPTYGSDWNAENWGQGTQVTVSSGTGGGGSGGGGSGGGGSEFDIQMTQSPSSLSASVGDRVTITCKASDHINNWLAWYQQKPGQAPKLLIYGATTLETGVPSRFSGSGSGTDYTLTISSLQPEDFATYYCQQSWNTPWTFGQGTKLEIKRLEGQPKANPTVTLFPPSSEELQANKATLVCLISDFYPGAVTVAWKADGSPVKAGVETTKPSKQSNNKYAASSYLSLTPEQWKSHRSYSCQVTHEGSTVEKTVAPTECSGSQSFGLLDPKLSYLLDGILFIYGVILTALFLRDQRLPPDAHKPPGGGSFRTPIQEEQADAHSTLAKISTSRVKFSRSADAPAYQQGQNQLYNELNLGRREEYDVLDKRRGRDPEMGGKPQRRKNPQEGLYNELQKDKMAEAYSEIGMKGERRRGKGHDGLYQGLSTATKDTYDALHMQALPPRRAKRSGSGATNFSLLKQAGDVEENPGPMDWIWRILFLVGAATGAHSFEQVQLQQPGAELVKPGASVKMSCKASGYAFSSYWINWMKQKPGQGLEWIGQIYPGDGDTNYNGKFKGRATLTADTSSSTAYMQLSSLTSEDSAVYFCARSITTVVGCAMDYWGQGTSVTVSSTRASTKGPSVFPLAPSSKSTSGGTAALGCLVKDYFPEPVTVSWNSGALTSGVHTFPAVLQSSGLYSLSSVVTVPSSSLGTQTYICNVNHKPSNTKVDKRVEPKSCGTQSFGLLDPKLSYLLDGILFIYGVILTALFLRDQRLPPDAHKPPGGGSFRTPIQEEQADAHSTLAKISSRRVKFSRSADAPAYQQGQNQLYNELNLGRREEYDVLDKRRGRDPEMGGKPQRRKNPQEGLYNELQKDKMAEAYSEIGMKGERRRGKGHDGLYQGLSTATKDTYDALHMQALPPRRAKRSGSGVKQTLNFDLLKLAGDVESNPGPGHMTEYKPTVRLATRDDVPRAVRTLAAAFADYPATRHTVDPDRHIERVTELQELFLTRVGLDIGKVWVADDGAAVAVWTTPESVEAGAVFAEIGPRMAELSGSRLAAQQQMEGLLAPHRPKEPAWFLATVGVSPDHQGKGLGSAVVLPGVEAAERAGVPAFLETSAPRNLPFYERLGFTVTADVEVPEGPRTWCMTRKPGA

SEQ ID NO: 4503 - protein, 1384 aa, Artificial Sequence
  Synthetic Polypeptide
MALPVTALLLPLALLLHAARPEVQLVESGGGLVQAGGSLRLSCAASGRTFSMGWFRQAPGKEREFVAAITYSGGSPYYADSVKGRFTISRDNAKNTVYLQMNSLKPEDTAVYYCAANPTYGSDWNAENWGQGTQVTVSSGTGGGGSGGGGSGGGGSEFDIQMTQSPSSLSASVGDRVTITCKASDHINNWLAWYQQKPGQAPKLLIYGATTLETGVPSRFSGSGSGTDYTLTISSLQPEDFATYYCQQSWNTPWTFGQGTKLEIKRLEGQPKANPTVTLFPPSSEELQANKATLVCLISDFYPGAVTVAWKADGSPVKAGVETTKPSKQSNNKYAASSYLSLTPEQWKSHRSYSCQVTHEGSTVEKTVAPTECSGSQSFGLLDPKLSYLLDGILFIYGVILTALFLRDQRLPPDAHKPPGGGSFRTPIQEEQADAHSTLAKISTSRVKFSRSADAPAYQQGQNQLYNELNLGRREEYDVLDKRRGRDPEMGGKPQRRKNPQEGLYNELQKDKMAEAYSEIGMKGERRRGKGHDGLYQGLSTATKDTYDALHMQALPPRRAKRSGSGATNFSLLKQAGDVEENPGPMDWIWRILFLVGAATGAHSGPEVQLVESGGGLVQAGGSLRLSCAASGRTFTMGWFRQAPGKEREFVAAISLSPTLAYYADSVKGRFTISRDNAKNTVVLQMNSLKPEDTALYYCAADRKSVMSIRPDYWGQGTQVTVSSGSGGGGSGGGGSGGGGSFEQVQLQQPGAELVKPGASVKMSCKASGYAFSSYWINWMKQKPGQGLEWIGQIYPGDGDTNYNGKFKGRATLTADTSSSTAYMQLSSLTSEDSAVYFCARSITTVVGCAMDYWGQGTSVTVSSTRASTKGPSVFPLAPSSKSTSGGTAALGCLVKDYFPEPVTVSWNSGALTSGVHTFPAVLQSSGLYSLSSVVTVPSSSLGTQTYICNVNHKPSNTKVDKRVEPKSCGTQSFGLLDPKLSYLLDGILFIYGVILTALFLRDQRLPPDAHKPPGGGSFRTPIQEEQADAHSTLAKISSRRVKFSRSADAPAYQQGQNQLYNELNLGRREEYDVLDKRRGRDPEMGGKPQRRKNPQEGLYNELQKDKMAEAYSEIGMKGERRRGKGHDGLYQGLSTATKDTYDALHMQALPPRRAKRSGSGVKQTLNFDLLKLAGDVESNPGPGHMTEYKPTVRLATRDDVPRAVRTLAAAFADYPATRHTVDPDRHIERVTELQELFLTRVGLDIGKVWVADDGAAVAVWTTPESVEAGAVFAEIGPRMAELSGSRLAAQQQMEGLLAPHRPKEPAWFLATVGVSPDHQGKGLGSAVVLPGVEAAERAGVPAFLETSAPRNLPFYERLGFTVTADVEVPEGPRTWCMTRKPGA

SEQ ID NO: 4504 - protein, 1117 aa, Artificial Sequence
  Synthetic Polypeptide
MALPVTALLLPLALLLHAARPEVQLVESGGGLVQAGGSLRLSCAASGRTFSMGWFRQAPGKEREFVAAITYSGGSPYYADSVKGRFTISRDNAKNTVYLQMNSLKPEDTAVYYCAANPTYGSDWNAENWGQGTQVTVSSLEGQPKANPTVTLFPPSSEELQANKATLVCLISDFYPGAVTVAWKADGSPVKAGVETTKPSKQSNNKYAASSYLSLTPEQWKSHRSYSCQVTHEGSTVEKTVAPTECSGSQSFGLLDPKLSYLLDGILFIYGVILTALFLRDQRLPPDAHKPPGGGSFRTPIQEEQADAHSTLAKISTSRVKFSRSADAPAYQQGQNQLYNELNLGRREEYDVLDKRRGRDPEMGGKPQRRKNPQEGLYNELQKDKMAEAYSEIGMKGERRRGKGHDGLYQGLSTATKDTYDALHMQALPPRRAKRSGSGATNFSLLKQAGDVEENPGPMDWIWRILFLVGAATGAHSGPEVQLVESGGGLVQAGGSLRLSCAASGRTFTMGWFRQAPGKEREFVAAISLSPTLAYYADSVKGRFTISRDNAKNTVVLQMNSLKPEDTALYYCAADRKSVMSIRPDYWGQGTQVTVSSTRASTKGPSVFPLAPSSKSTSGGTAALGCLVKDYFPEPVTVSWNSGALTSGVHTFPAVLQSSGLYSLSSVVTVPSSSLGTQTYICNVNHKPSNTKVDKRVEPKSCGTQSFGLLDPKLSYLLDGILFIYGVILTALFLRDQRLPPDAHKPPGGGSFRTPIQEEQADAHSTLAKISSRRVKFSRSADAPAYQQGQNQLYNELNLGRREEYDVLDKRRGRDPEMGGKPQRRKNPQEGLYNELQKDKMAEAYSEIGMKGERRRGKGHDGLYQGLSTATKDTYDALHMQALPPRRAKRSGSGVKQTLNFDLLKLAGDVESNPGPGHMTEYKPTVRLATRDDVPRAVRTLAAAFADYPATRHTVDPDRHIERVTELQELFLTRVGLDIGKVWVADDGAAVAVWTTPESVEAGAVFAEIGPRMAELSGSRLAAQQQMEGLLAPHRPKEPAWFLATVGVSPDHQGKGLGSAVVLPGVEAAERAGVPAFLETSAPRNLPFYERLGFTVTADVEVPEGPRTWCMTRKPGA

SEQ ID NO: 4505 - protein, 1125 aa, Artificial Sequence
  Synthetic Polypeptide
MALPVTALLLPLALLLHAARPDIQMTQSPSSLSASVGDRVTITCKASDHINNWLAWYQQKPGQAPKLLIYGATTLETGVPSRFSGSGSGTDYTLTISSLQPEDFATYYCQQSWNTPWTFGQGTKLEIKRLEDLKNVFPPEVAVFEPSEAEISHTQKATLVCLATGFYPDHVELSWWVNGKEVHSGVSTDPQPLKEQPALNDSRYCLSSRLRVSATFWQNPRNHFRCQVQFYGLSENDEWTQDRAKPVTQIVSAEAWGRADCGSQSFGLLDPKLSYLLDGILFIYGVILTALFLRDQRLPPDAHKPPGGGSFRTPIQEEQADAHSTLAKISTSRVKFSRSADAPAYQQGQNQLYNELNLGRREEYDVLDKRRGRDPEMGGKPQRRKNPQEGLYNELQKDKMAEAYSEIGMKGERRRGKGHDGLYQGLSTATKDTYDALHMQALPPRRAKRSGSGATNFSLLKQAGDVEENPGPMDWIWRILFLVGAATGAHSFEQVQLQQPGAELVKPGASVKMSCKASGYAFSSYWINWMKQKPGQGLEWIGQIYPGDGDTNYNGKFKGRATLTADTSSSTAYMQLSSLTSEDSAVYFCARSITTVVGCAMDYWGQGTSVTVSSTRIQNPDPAVYQLRDSKSSDKSVCLFTDFDSQTNVSQSKDSDVYITDKTVLDMRSMDFKSNSAVAWSNKSDFACANAFNNSIIPEDTFFPSPESSCGTQSFGLLDPKLSYLLDGILFIYGVILTALFLRDQRLPPDAHKPPGGGSFRTPIQEEQADAHSTLAKISSRRVKFSRSADAPAYQQGQNQLYNELNLGRREEYDVLDKRRGRDPEMGGKPQRRKNPQEGLYNELQKDKMAEAYSEIGMKGERRRGKGHDGLYQGLSTATKDTYDALHMQALPPRRAKRSGSGVKQTLNFDLLKLAGDVESNPGPGHMTEYKPTVRLATRDDVPRAVRTLAAAFADYPATRHTVDPDRHIERVTELQELFLTRVGLDIGKVWVADDGAAVAVWTTPESVEAGAVFAEIGPRMAELSGSRLAAQQQMEGLLAPHRPKEPAWFLATVGVSPDHQGKGLGSAVVLPGVEAAERAGVPAFLETSAPRNLPFYERLGFTVTADVEVPEGPRTWCMTRKPGA

SEQ ID NO: 4506 - protein, 1262 aa, Artificial Sequence
  Synthetic Polypeptide
MALPVTALLLPLALLLHAARPEVQLVESGGGLVQAGGSLRLSCAASGRTFSMGWFRQAPGKEREFVAAITYSGGSPYYADSVKGRFTISRDNAKNTVYLQMNSLKPEDTAVYYCAANPTYGSDWNAENWGQGTQVTVSSGTGGGGSGGGGSGGGGSEFDIQMTQSPSSLSASVGDRVTITCKASDHINNWLAWYQQKPGQAPKLLIYGATTLETGVPSRFSGSGSGTDYTLTISSLQPEDFATYYCQQSWNTPWTFGQGTKLEIKRLEDLKNVFPPEVAVFEPSEAEISHTQKATLVCLATGFYPDHVELSWWVNGKEVHSGVSTDPQPLKEQPALNDSRYCLSSRLRVSATFWQNPRNHFRCQVQFYGLSENDEWTQDRAKPVTQIVSAEAWGRADCGSQSFGLLDPKLSYLLDGILFIYGVILTALFLRDQRLPPDAHKPPGGGSFRTPIQEEQADAHSTLAKISTSRVKFSRSADAPAYQQGQNQLYNELNLGRREEYDVLDKRRGRDPEMGGKPQRRKNPQEGLYNELQKDKMAEAYSEIGMKGERRRGKGHDGLYQGLSTATKDTYDALHMQALPPRRAKRSGSGATNFSLLKQAGDVEENPGPMDWIWRILFLVGAATGAHSFEQVQLQQPGAELVKPGASVKMSCKASGYAFSSYWINWMKQKPGQGLEWIGQIYPGDGDTNYNGKFKGRATLTADTSSSTAYMQLSSLTSEDSAVYFCARSITTVVGCAMDYWGQGTSVTVSSTRIQNPDPAVYQLRDSKSSDKSVCLFTDFDSQTNVSQSKDSDVYITDKTVLDMRSMDFKSNSAVAWSNKSDFACANAFNNSIIPEDTFFPSPESSCGTQSFGLLDPKLSYLLDGILFIYGVILTALFLRDQRLPPDAHKPPGGGSFRTPIQEEQADAHSTLAKISSRRVKFSRSADAPAYQQGQNQLYNELNLGRREEYDVLDKRRGRDPEMGGKPQRRKNPQEGLYNELQKDKMAEAYSEIGMKGERRRGKGHDGLYQGLSTATKDTYDALHMQALPPRRAKRSGSGVKQTLNFDLLKLAGDVESNPGPGHMTEYKPTVRLATRDDVPRAVRTLAAAFADYPATRHTVDPDRHIERVTELQELFLTRVGLDIGKVWVADDGAAVAVWTTPESVEAGAVFAEIGPRMAELSGSRLAAQQQMEGLLAPHRPKEPAWFLATVGVSPDHQGKGLGSAVVLPGVEAAERAGVPAFLETSAPRNLPFYERLGFTVTADVEVPEGPRTWCMTRKPGA

SEQ ID NO: 4507 - protein, 1399 aa, Artificial Sequence
  Synthetic Polypeptide
MALPVTALLLPLALLLHAARPEVQLVESGGGLVQAGGSLRLSCAASGRTFSMGWFRQAPGKEREFVAAITYSGGSPYYADSVKGRFTISRDNAKNTVYLQMNSLKPEDTAVYYCAANPTYGSDWNAENWGQGTQVTVSSGTGGGGSGGGGSGGGGSEFDIQMTQSPSSLSASVGDRVTITCKASDHINNWLAWYQQKPGQAPKLLIYGATTLETGVPSRFSGSGSGTDYTLTISSLQPEDFATYYCQQSWNTPWTFGQGTKLEIKRLEDLKNVFPPEVAVFEPSEAEISHTQKATLVCLATGFYPDHVELSWWVNGKEVHSGVSTDPQPLKEQPALNDSRYCLSSRLRVSATFWQNPRNHFRCQVQFYGLSENDEWTQDRAKPVTQIVSAEAWGRADCGSQSFGLLDPKLSYLLDGILFIYGVILTALFLRDQRLPPDAHKPPGGGSFRTPIQEEQADAHSTLAKISTSRVKFSRSADAPAYQQGQNQLYNELNLGRREEYDVLDKRRGRDPEMGGKPQRRKNPQEGLYNELQKDKMAEAYSEIGMKGERRRGKGHDGLYQGLSTATKDTYDALHMQALPPRRAKRSGSGATNFSLLKQAGDVEENPGPMDWIWRILFLVGAATGAHSGPEVQLVESGGGLVQAGGSLRLSCAASGRTFTMGWFRQAPGKEREFVAAISLSPTLAYYADSVKGRFTISRDNAKNTVVLQMNSLKPEDTALYYCAADRKSVMSIRPDYWGQGTQVTVSSGSGGGGSGGGGSGGGGSFEQVQLQQPGAELVKPGASVKMSCKASGYAFSSYWINWMKQKPGQGLEWIGQIYPGDGDTNYNGKFKGRATLTADTSSSTAYMQLSSLTSEDSAVYFCARSITTVVGCAMDYWGQGTSVTVSSTRIQNPDPAVYQLRDSKSSDKSVCLFTDFDSQTNVSQSKDSDVYITDKTVLDMRSMDFKSNSAVAWSNKSDFACANAFNNSIIPEDTFFPSPESSCGTQSFGLLDPKLSYLLDGILFIYGVILTALFLRDQRLPPDAHKPPGGGSFRTPIQEEQADAHSTLAKISSRRVKFSRSADAPAYQQGQNQLYNELNLGRREEYDVLDKRRGRDPEMGGKPQRRKNPQEGLYNELQKDKMAEAYSEIGMKGERRRGKGHDGLYQGLSTATKDTYDALHMQALPPRRAKRSGSGVKQTLNFDLLKLAGDVESNPGPGHMTEYKPTVRLATRDDVPRAVRTLAAAFADYPATRHTVDPDRHIERVTELQELFLTRVGLDIGKVWVADDGAAVAVWTTPESVEAGAVFAEIGPRMAELSGSRLAAQQQMEGLLAPHRPKEPAWFLATVGVSPDHQGKGLGSAVVLPGVEAAERAGVPAFLETSAPRNLPFYERLGFTVTADVEVPEGPRTWCMTRKPGA

SEQ ID NO: 4508 - protein, 1132 aa, Artificial Sequence
  Synthetic Polypeptide
MALPVTALLLPLALLLHAARPEVQLVESGGGLVQAGGSLRLSCAASGRTFSMGWFRQAPGKEREFVAAITYSGGSPYYADSVKGRFTISRDNAKNTVYLQMNSLKPEDTAVYYCAANPTYGSDWNAENWGQGTQVTVSSLEDLKNVFPPEVAVFEPSEAEISHTQKATLVCLATGFYPDHVELSWWVNGKEVHSGVSTDPQPLKEQPALNDSRYCLSSRLRVSATFWQNPRNHFRCQVQFYGLSENDEWTQDRAKPVTQIVSAEAWGRADCGSQSFGLLDPKLSYLLDGILFIYGVILTALFLRDQRLPPDAHKPPGGGSFRTPIQEEQADAHSTLAKISTSRVKFSRSADAPAYQQGQNQLYNELNLGRREEYDVLDKRRGRDPEMGGKPQRRKNPQEGLYNELQKDKMAEAYSEIGMKGERRRGKGHDGLYQGLSTATKDTYDALHMQALPPRRAKRSGSGATNFSLLKQAGDVEENPGPMDWIWRILFLVGAATGAHSGPEVQLVESGGGLVQAGGSLRLSCAASGRTFTMGWFRQAPGKEREFVAAISLSPTLAYYADSVKGRFTISRDNAKNTVVLQMNSLKPEDTALYYCAADRKSVMSIRPDYWGQGTQVTVSSTRIQNPDPAVYQLRDSKSSDKSVCLFTDFDSQTNVSQSKDSDVYITDKTVLDMRSMDFKSNSAVAWSNKSDFACANAFNNSIIPEDTFFPSPESSCGTQSFGLLDPKLSYLLDGILFIYGVILTALFLRDQRLPPDAHKPPGGGSFRTPIQEEQADAHSTLAKISSRRVKFSRSADAPAYQQGQNQLYNELNLGRREEYDVLDKRRGRDPEMGGKPQRRKNPQEGLYNELQKDKMAEAYSEIGMKGERRRGKGHDGLYQGLSTATKDTYDALHMQALPPRRAKRSGSGVKQTLNFDLLKLAGDVESNPGPGHMTEYKPTVRLATRDDVPRAVRTLAAAFADYPATRHTVDPDRHIERVTELQELFLTRVGLDIGKVWVADDGAAVAVWTTPESVEAGAVFAEIGPRMAELSGSRLAAQQQMEGLLAPHRPKEPAWFLATVGVSPDHQGKGLGSAVVLPGVEAAERAGVPAFLETSAPRNLPFYERLGFTVTADVEVPEGPRTWCMTRKPGA

SEQ ID NO: 4509 - protein, 577 aa, Artificial Sequence
  Synthetic Polypeptide
MALPVTALLLPLALLLHAARPACEVQLLESGGGLIQPGGSLRLSCAASGFTFSSHAMTWVRQAPGKGLEWVSAISGSGDYTHYADSVKGRFTISRDNSKNTVYLQMNSLRAEDSAVYYCAKDEDGGSLLGHRGQGTLVTVSSGTGGGGSGGGGSGGGGSEFGSLEQSFGLLDPKLSYLLDGILFIYGVILTALFLRDQRLPPDAHKPPGGGSFRTPIQEEQADAHSTLAKISTSRVKFSRSADAPAYQQGQNQLYNELNLGRREEYDVLDKRRGRDPEMGGKPQRRKNPQEGLYNELQKDKMAEAYSEIGMKGERRRGKGHDGLYQGLSTATKDTYDALHMQALPPRRAKRSGSGATNFSLLKQAGDVEENPGPTRGHMTEYKPTVRLATRDDVPRAVRTLAAAFADYPATRHTVDPDRHIERVTELQELFLTRVGLDIGKVWVADDGAAVAVWTTPESVEAGAVFAEIGPRMAELSGSRLAAQQQMEGLLAPHRPKEPAWFLATVGVSPDHQGKGLGSAVVLPGVEAAERAGVPAFLETSAPRNLPFYERLGFTVTADVEVPEGPRTWCMTRKPGA

SEQ ID NO: 4510 - protein, 925 aa, Artificial Sequence
  Synthetic Polypeptide
MALPVTALLLPLALLLHAARPDIQMTQSPSSLSASVGDRVTITCKASDHINNWLAWYQQKPGQAPKLLIYGATTLETGVPSRFSGSGSGTDYTLTISSLQPEDFATYYCQQSWNTPWTFGQGTKLEIKRLETTPGERSSLPAFYPGTSGSCSGCGSLSLPLLAGLVAADAVASLLIVGAVFLCARPRRSPAQEDGKVYINMPGRGSTSRVKFSRSADAPAYQQGQNQLYNELNLGRREEYDVLDKRRGRDPEMGGKPQRRKNPQEGLYNELQKDKMAEAYSEIGMKGERRRGKGHDGLYQGLSTATKDTYDALHMQALPPRRAKRSGSGATNFSLLKQAGDVEENPGPMDWIWRILFLVGAATGAHSFEQVQLQQPGAELVKPGASVKMSCKASGYAFSSYWINWMKQKPGQGLEWIGQIYPGDGDTNYNGKFKGRATLTADTSSSTAYMQLSSLTSEDSAVYFCARSITTVVGCAMDYWGQGTSVTVSSTRQAQSDCSCSTVSPGVLAGIVMGDLVLTVLIALAVYFLGRLVPRGRGAAEAATRKQRITETESPYQELQGQRSDVYSDLNTQRPYYKSSRRVKFSRSADAPAYQQGQNQLYNELNLGRREEYDVLDKRRGRDPEMGGKPQRRKNPQEGLYNELQKDKMAEAYSEIGMKGERRRGKGHDGLYQGLSTATKDTYDALHMQALPPRRAKRSGSGVKQTLNFDLLKLAGDVESNPGPGHMTEYKPTVRLATRDDVPRAVRTLAAAFADYPATRHTVDPDRHIERVTELQELFLTRVGLDIGKVWVADDGAAVAVWTTPESVEAGAVFAEIGPRMAELSGSRLAAQQQMEGLLAPHRPKEPAWFLATVGVSPDHQGKGLGSAVVLPGVEAAERAGVPAFLETSAPRNLPFYERLGFTVTADVEVPEGPRTWCMTRKPGA

SEQ ID NO: 4511 - protein, 977 aa, Artificial Sequence
  Synthetic Polypeptide
MALPVTALLLPLALLLHAARPACEVQLLESGGGLIQPGGSLRLSCAASGFTFSSHAMTWVRQAPGKGLEWVSAISGSGDYTHYADSVKGRFTISRDNSKNTVYLQMNSLRAEDSAVYYCAKDEDGGSLLGHRGQGTLVTVSSGTGGGGSGGGGSGGGGSEFGSLETTPGERSSLPAFYPGTSGSCSGCGSLSLPLLAGLVAADAVASLLIVGAVFLCARPRRSPAQEDGKVYINMPGRGSTSRVKFSRSADAPAYQQGQNQLYNELNLGRREEYDVLDKRRGRDPEMGGKPQRRKNPQEGLYNELQKDKMAEAYSEIGMKGERRRGKGHDGLYQGLSTATKDTYDALHMQALPPRRAKRSGSGATNFSLLKQAGDVEENPGPMDWIWRILFLVGAATGAHSGPEVQLVESGGGLVQAGGSLRLSCAASGRTFSMGWFRQAPGKEREFVAAITYSGGSPYYADSVKGRFTISRDNAKNTVYLQMNSLKPEDTAVYYCAANPTYGSDWNAENWGQGTQVTVSSGSGGGGSGGGGSGGGGSFEGSTRQAQSDCSCSTVSPGVLAGIVMGDLVLTVLIALAVYFLGRLVPRGRGAAEAATRKQRITETESPYQELQGQRSDVYSDLNTQRPYYKSSRRVKFSRSADAPAYQQGQNQLYNELNLGRREEYDVLDKRRGRDPEMGGKPQRRKNPQEGLYNELQKDKMAEAYSEIGMKGERRRGKGHDGLYQGLSTATKDTYDALHMQALPPRRAKRSGSGVKQTLNFDLLKLAGDVESNPGPGHMTEYKPTVRLATRDDVPRAVRTLAAAFADYPATRHTVDPDRHIERVTELQELFLTRVGLDIGKVWVADDGAAVAVWTTPESVEAGAVFAEIGPRMAELSGSRLAAQQQMEGLLAPHRPKEPAWFLATVGVSPDHQGKGLGSAVVLPGVEAAERAGVPAFLETSAPRNLPFYERLGFTVTADVEVPEGPRTWCMTRKPGA

SEQ ID NO: 4512 - protein, 1127 aa, Artificial Sequence
  Synthetic Polypeptide
MALPVTALLLPLALLLHAARPDIQMTQSPSSLSASVGDRVTITCKASDHINNWLAWYQQKPGQAPKLLIYGATTLETGVPSRFSGSGSGTDYTLTISSLQPEDFATYYCQQSWNTPWTFGQGTKLEIKRLEGQPKANPTVTLFPPSSEELQANKATLVCLISDFYPGAVTVAWKADGSPVKAGVETTKPSKQSNNKYAASSYLSLTPEQWKSHRSYSCQVTHEGSTVEKTVAPTECSGSTTPGERSSLPAFYPGTSGSCSGCGSLSLPLLAGLVAADAVASLLIVGAVFLCARPRRSPAQEDGKVYINMPGRGSTSRVKFSRSADAPAYQQGQNQLYNELNLGRREEYDVLDKRRGRDPEMGGKPQRRKNPQEGLYNELQKDKMAEAYSEIGMKGERRRGKGHDGLYQGLSTATKDTYDALHMQALPPRRAKRSGSGATNFSLLKQAGDVEENPGPMDWIWRILFLVGAATGAHSFEQVQLQQPGAELVKPGASVKMSCKASGYAFSSYWINWMKQKPGQGLEWIGQIYPGDGDTNYNGKFKGRATLTADTSSSTAYMQLSSLTSEDSAVYFCARSITTVVGCAMDYWGQGTSVTVSSTRASTKGPSVFPLAPSSKSTSGGTAALGCLVKDYFPEPVTVSWNSGALTSGVHTFPAVLQSSGLYSLSSVVTVPSSSLGTQTYICNVNHKPSNTKVDKRVEPKSCGTQAQSDCSCSTVSPGVLAGIVMGDLVLTVLIALAVYFLGRLVPRGRGAAEAATRKQRITETESPYQELQGQRSDVYSDLNTQRPYYKSSRRVKFSRSADAPAYQQGQNQLYNELNLGRREEYDVLDKRRGRDPEMGGKPQRRKNPQEGLYNELQKDKMAEAYSEIGMKGERRRGKGHDGLYQGLSTATKDTYDALHMQALPPRRAKRSGSGVKQTLNFDLLKLAGDVESNPGPGHMATYEVLCEVARKLGTDDREVVLFLLNVFIPQPTLAQLIGALRALKEEGRLTFPLLAECLFRAGRRDLLRDLLHLDPRFLERHLAGTMSYFSPYQLTVLHVDGELCARDIRSLIFLSKDTIGSRSTPQTFLHWVYCMENLDLLGPTDVDALMSMLRSLSRVDLQRQVQTLMGLHLSGPSHSQHYRHTP

SEQ ID NO: 4513 - protein, 1180 aa, Artificial Sequence
  Synthetic Polypeptide
MALPVTALLLPLALLLHAARPDIQMTQSPSSLSASVGDRVTITCKASDHINNWLAWYQQKPGQAPKLLIYGATTLETGVPSRFSGSGSGTDYTLTISSLQPEDFATYYCQQSWNTPWTFGQGTKLEIKRLEGQPKANPTVTLFPPSSEELQANKATLVCLISDFYPGAVTVAWKADGSPVKAGVETTKPSKQSNNKYAASSYLSLTPEQWKSHRSYSCQVTHEGSTVEKTVAPTECSGSTTPGERSSLPAFYPGTSGSCSGCGSLSLPLLAGLVAADAVASLLIVGAVFLCARPRRSPAQEDGKVYINMPGRGSTSRVKFSRSADAPAYQQGQNQLYNELNLGRREEYDVLDKRRGRDPEMGGKPQRRKNPQEGLYNELQKDKMAEAYSEIGMKGERRRGKGHDGLYQGLSTATKDTYDALHMQALPPRRAKRSGSGATNFSLLKQAGDVEENPGPMDWIWRILFLVGAATGAHSFEQVQLQQPGAELVKPGASVKMSCKASGYAFSSYWINWMKQKPGQGLEWIGQIYPGDGDTNYNGKFKGRATLTADTSSSTAYMQLSSLTSEDSAVYFCARSITTVVGCAMDYWGQGTSVTVSSTRASTKGPSVFPLAPSSKSTSGGTAALGCLVKDYFPEPVTVSWNSGALTSGVHTFPAVLQSSGLYSLSSVVTVPSSSLGTQTYICNVNHKPSNTKVDKRVEPKSCGTQAQSDCSCSTVSPGVLAGIVMGDLVLTVLIALAVYFLGRLVPRGRGAAEAATRKQRITETESPYQELQGQRSDVYSDLNTQRPYYKSSRRVKFSRSADAPAYQQGQNQLYNELNLGRREEYDVLDKRRGRDPEMGGKPQRRKNPQEGLYNELQKDKMAEAYSEIGMKGERRRGKGHDGLYQGLSTATKDTYDALHMQALPPRRAKRSGSGVKQTLNFDLLKLAGDVESNPGPGHMSDSKEVPSLPFLRHLLEELDSHEDSLLLFLCHDAAPGCTTVTQALCSLSQQRKLTLAALVEMLYVLQRMDLLKSRFGLSKEGAEQLLGTSFLTRYRKLMVCVGEELDSSELRALRLFACNLNPSLSTALSESSRFVELVLALENVGLVSPSSVSVLADMLRTLRRLDLCQQLVEYEQQEQARYRYCYAASPSLPVRTLRRGHGASEHEQLCMPVQESSDSPELLRTPVQESSSDSPEQTT

SEQ ID NO: 4514 - protein, 1138 aa, Artificial Sequence
  Synthetic Polypeptide
MALPVTALLLPLALLLHAARPDIQMTQSPSSLSASVGDRVTITCKASDHINNWLAWYQQKPGQAPKLLIYGATTLETGVPSRFSGSGSGTDYTLTISSLQPEDFATYYCQQSWNTPWTFGQGTKLEIKRLEGQPKANPTVTLFPPSSEELQANKATLVCLISDFYPGAVTVAWKADGSPVKAGVETTKPSKQSNNKYAASSYLSLTPEQWKSHRSYSCQVTHEGSTVEKTVAPTECSGSTTPGERSSLPAFYPGTSGSCSGCGSLSLPLLAGLVAADAVASLLIVGAVFLCARPRRSPAQEDGKVYINMPGRGSTSRVKFSRSADAPAYQQGQNQLYNELNLGRREEYDVLDKRRGRDPEMGGKPQRRKNPQEGLYNELQKDKMAEAYSEIGMKGERRRGKGHDGLYQGLSTATKDTYDALHMQALPPRRAKRSGSGATNFSLLKQAGDVEENPGPMDWIWRILFLVGAATGAHSFEQVQLQQPGAELVKPGASVKMSCKASGYAFSSYWINWMKQKPGQGLEWIGQIYPGDGDTNYNGKFKGRATLTADTSSSTAYMQLSSLTSEDSAVYFCARSITTVVGCAMDYWGQGTSVTVSSTRASTKGPSVFPLAPSSKSTSGGTAALGCLVKDYFPEPVTVSWNSGALTSGVHTFPAVLQSSGLYSLSSVVTVPSSSLGTQTYICNVNHKPSNTKVDKRVEPKSCGTQAQSDCSCSTVSPGVLAGIVMGDLVLTVLIALAVYFLGRLVPRGRGAAEAATRKQRITETESPYQELQGQRSDVYSDLNTQRPYYKSSRRVKFSRSADAPAYQQGQNQLYNELNLGRREEYDVLDKRRGRDPEMGGKPQRRKNPQEGLYNELQKDKMAEAYSEIGMKGERRRGKGHDGLYQGLSTATKDTYDALHMQALPPRRAKRSGSGVKQTLNFDLLKLAGDVESNPGPGHMTEYKPTVRLATRDDVPRAVRTLAAAFADYPATRHTVDPDRHIERVTELQELFLTRVGLDIGKVWVADDGAAVAVWTTPESVEAGAVFAEIGPRMAELSGSRLAAQQQMEGLLAPHRPKEPAWFLATVGVSPDHQGKGLGSAVVLPGVEAAERAGVPAFLETSAPRNLPFYERLGFTVTADVEVPEGPRTWCMTRKPGA

SEQ ID NO: 4515 - protein, 1275 aa, Artificial Sequence
  Synthetic Polypeptide
MALPVTALLLPLALLLHAARPEVQLVESGGGLVQAGGSLRLSCAASGRTFSMGWFRQAPGKEREFVAAITYSGGSPYYADSVKGRFTISRDNAKNTVYLQMNSLKPEDTAVYYCAANPTYGSDWNAENWGQGTQVTVSSGTGGGGSGGGGSGGGGSEFDIQMTQSPSSLSASVGDRVTITCKASDHINNWLAWYQQKPGQAPKLLIYGATTLETGVPSRFSGSGSGTDYTLTISSLQPEDFATYYCQQSWNTPWTFGQGTKLEIKRLEGQPKANPTVTLFPPSSEELQANKATLVCLISDFYPGAVTVAWKADGSPVKAGVETTKPSKQSNNKYAASSYLSLTPEQWKSHRSYSCQVTHEGSTVEKTVAPTECSGSTTPGERSSLPAFYPGTSGSCSGCGSLSLPLLAGLVAADAVASLLIVGAVFLCARPRRSPAQEDGKVYINMPGRGSTSRVKFSRSADAPAYQQGQNQLYNELNLGRREEYDVLDKRRGRDPEMGGKPQRRKNPQEGLYNELQKDKMAEAYSEIGMKGERRRGKGHDGLYQGLSTATKDTYDALHMQALPPRRAKRSGSGATNFSLLKQAGDVEENPGPMDWIWRILFLVGAATGAHSFEQVQLQQPGAELVKPGASVKMSCKASGYAFSSYWINWMKQKPGQGLEWIGQIYPGDGDTNYNGKFKGRATLTADTSSSTAYMQLSSLTSEDSAVYFCARSITTVVGCAMDYWGQGTSVTVSSTRASTKGPSVFPLAPSSKSTSGGTAALGCLVKDYFPEPVTVSWNSGALTSGVHTFPAVLQSSGLYSLSSVVTVPSSSLGTQTYICNVNHKPSNTKVDKRVEPKSCGTQAQSDCSCSTVSPGVLAGIVMGDLVLTVLIALAVYFLGRLVPRGRGAAEAATRKQRITETESPYQELQGQRSDVYSDLNTQRPYYKSSRRVKFSRSADAPAYQQGQNQLYNELNLGRREEYDVLDKRRGRDPEMGGKPQRRKNPQEGLYNELQKDKMAEAYSEIGMKGERRRGKGHDGLYQGLSTATKDTYDALHMQALPPRRAKRSGSGVKQTLNFDLLKLAGDVESNPGPGHMTEYKPTVRLATRDDVPRAVRTLAAAFADYPATRHTVDPDRHIERVTELQELFLTRVGLDIGKVWVADDGAAVAVWTTPESVEAGAVFAEIGPRMAELSGSRLAAQQQMEGLLAPHRPKEPAWFLATVGVSPDHQGKGLGSAVVLPGVEAAERAGVPAFLETSAPRNLPFYERLGFTVTADVEVPEGPRTWCMTRKPGA

SEQ ID NO: 4516 - protein, 1412 aa, Artificial Sequence
  Synthetic Polypeptide
MALPVTALLLPLALLLHAARPEVQLVESGGGLVQAGGSLRLSCAASGRTFSMGWFRQAPGKEREFVAAITYSGGSPYYADSVKGRFTISRDNAKNTVYLQMNSLKPEDTAVYYCAANPTYGSDWNAENWGQGTQVTVSSGTGGGGSGGGGSGGGGSEFDIQMTQSPSSLSASVGDRVTITCKASDHINNWLAWYQQKPGQAPKLLIYGATTLETGVPSRFSGSGSGTDYTLTISSLQPEDFATYYCQQSWNTPWTFGQGTKLEIKRLEGQPKANPTVTLFPPSSEELQANKATLVCLISDFYPGAVTVAWKADGSPVKAGVETTKPSKQSNNKYAASSYLSLTPEQWKSHRSYSCQVTHEGSTVEKTVAPTECSGSTTPGERSSLPAFYPGTSGSCSGCGSLSLPLLAGLVAADAVASLLIVGAVFLCARPRRSPAQEDGKVYINMPGRGSTSRVKFSRSADAPAYQQGQNQLYNELNLGRREEYDVLDKRRGRDPEMGGKPQRRKNPQEGLYNELQKDKMAEAYSEIGMKGERRRGKGHDGLYQGLSTATKDTYDALHMQALPPRRAKRSGSGATNFSLLKQAGDVEENPGPMDWIWRILFLVGAATGAHSGPEVQLVESGGGLVQAGGSLRLSCAASGRTFTMGWFRQAPGKEREFVAAISLSPTLAYYADSVKGRFTISRDNAKNTVVLQMNSLKPEDTALYYCAADRKSVMSIRPDYWGQGTQVTVSSGSGGGGSGGGGSGGGGSFEQVQLQQPGAELVKPGASVKMSCKASGYAFSSYWINWMKQKPGQGLEWIGQIYPGDGDTNYNGKFKGRATLTADTSSSTAYMQLSSLTSEDSAVYFCARSITTVVGCAMDYWGQGTSVTVSSTRASTKGPSVFPLAPSSKSTSGGTAALGCLVKDYFPEPVTVSWNSGALTSGVHTFPAVLQSSGLYSLSSVVTVPSSSLGTQTYICNVNHKPSNTKVDKRVEPKSCGTQAQSDCSCSTVSPGVLAGIVMGDLVLTVLIALAVYFLGRLVPRGRGAAEAATRKQRITETESPYQELQGQRSDVYSDLNTQRPYYKSSRRVKFSRSADAPAYQQGQNQLYNELNLGRREEYDVLDKRRGRDPEMGGKPQRRKNPQEGLYNELQKDKMAEAYSEIGMKGERRRGKGHDGLYQGLSTATKDTYDALHMQALPPRRAKRSGSGVKQTLNFDLLKLAGDVESNPGPGHMTEYKPTVRLATRDDVPRAVRTLAAAFADYPATRHTVDPDRHIERVTELQELFLTRVGLDIGKVWVADDGAAVAVWTTPESVEAGAVFAEIGPRMAELSGSRLAAQQQMEGLLAPHRPKEPAWFLATVGVSPDHQGKGLGSAVVLPGVEAAERAGVPAFLETSAPRNLPFYERLGFTVTADVEVPEGPRTWCMTRKPGA

SEQ ID NO: 4517 - protein, 1145 aa, Artificial Sequence
  Synthetic Polypeptide
MALPVTALLLPLALLLHAARPEVQLVESGGGLVQAGGSLRLSCAASGRTFSMGWFRQAPGKEREFVAAITYSGGSPYYADSVKGRFTISRDNAKNTVYLQMNSLKPEDTAVYYCAANPTYGSDWNAENWGQGTQVTVSSLEGQPKANPTVTLFPPSSEELQANKATLVCLISDFYPGAVTVAWKADGSPVKAGVETTKPSKQSNNKYAASSYLSLTPEQWKSHRSYSCQVTHEGSTVEKTVAPTECSGSTTPGERSSLPAFYPGTSGSCSGCGSLSLPLLAGLVAADAVASLLIVGAVFLCARPRRSPAQEDGKVYINMPGRGSTSRVKFSRSADAPAYQQGQNQLYNELNLGRREEYDVLDKRRGRDPEMGGKPQRRKNPQEGLYNELQKDKMAEAYSEIGMKGERRRGKGHDGLYQGLSTATKDTYDALHMQALPPRRAKRSGSGATNFSLLKQAGDVEENPGPMDWIWRILFLVGAATGAHSGPEVQLVESGGGLVQAGGSLRLSCAASGRTFTMGWFRQAPGKEREFVAAISLSPTLAYYADSVKGRFTISRDNAKNTVVLQMNSLKPEDTALYYCAADRKSVMSIRPDYWGQGTQVTVSSTRASTKGPSVFPLAPSSKSTSGGTAALGCLVKDYFPEPVTVSWNSGALTSGVHTFPAVLQSSGLYSLSSVVTVPSSSLGTQTYICNVNHKPSNTKVDKRVEPKSCGTQAQSDCSCSTVSPGVLAGIVMGDLVLTVLIALAVYFLGRLVPRGRGAAEAATRKQRITETESPYQELQGQRSDVYSDLNTQRPYYKSSRRVKFSRSADAPAYQQGQNQLYNELNLGRREEYDVLDKRRGRDPEMGGKPQRRKNPQEGLYNELQKDKMAEAYSEIGMKGERRRGKGHDGLYQGLSTATKDTYDALHMQALPPRRAKRSGSGVKQTLNFDLLKLAGDVESNPGPGHMTEYKPTVRLATRDDVPRAVRTLAAAFADYPATRHTVDPDRHIERVTELQELFLTRVGLDIGKVWVADDGAAVAVWTTPESVEAGAVFAEIGPRMAELSGSRLAAQQQMEGLLAPHRPKEPAWFLATVGVSPDHQGKGLGSAVVLPGVEAAERAGVPAFLETSAPRNLPFYERLGFTVTADVEVPEGPRTWCMTRKPGA

SEQ ID NO: 4518 - protein, 1153 aa, Artificial Sequence
  Synthetic Polypeptide
MALPVTALLLPLALLLHAARPDIQMTQSPSSLSASVGDRVTITCKASDHINNWLAWYQQKPGQAPKLLIYGATTLETGVPSRFSGSGSGTDYTLTISSLQPEDFATYYCQQSWNTPWTFGQGTKLEIKRLEDLKNVFPPEVAVFEPSEAEISHTQKATLVCLATGFYPDHVELSWWVNGKEVHSGVSTDPQPLKEQPALNDSRYCLSSRLRVSATFWQNPRNHFRCQVQFYGLSENDEWTQDRAKPVTQIVSAEAWGRADCGSTTPGERSSLPAFYPGTSGSCSGCGSLSLPLLAGLVAADAVASLLIVGAVFLCARPRRSPAQEDGKVYINMPGRGSTSRVKFSRSADAPAYQQGQNQLYNELNLGRREEYDVLDKRRGRDPEMGGKPQRRKNPQEGLYNELQKDKMAEAYSEIGMKGERRRGKGHDGLYQGLSTATKDTYDALHMQALPPRRAKRSGSGATNFSLLKQAGDVEENPGPMDWIWRILFLVGAATGAHSFEQVQLQQPGAELVKPGASVKMSCKASGYAFSSYWINWMKQKPGQGLEWIGQIYPGDGDTNYNGKFKGRATLTADTSSSTAYMQLSSLTSEDSAVYFCARSITTVVGCAMDYWGQGTSVTVSSTRIQNPDPAVYQLRDSKSSDKSVCLFTDFDSQTNVSQSKDSDVYITDKTVLDMRSMDFKSNSAVAWSNKSDFACANAFNNSIIPEDTFFPSPESSCGTQAQSDCSCSTVSPGVLAGIVMGDLVLTVLIALAVYFLGRLVPRGRGAAEAATRKQRITETESPYQELQGQRSDVYSDLNTQRPYYKSSRRVKFSRSADAPAYQQGQNQLYNELNLGRREEYDVLDKRRGRDPEMGGKPQRRKNPQEGLYNELQKDKMAEAYSEIGMKGERRRGKGHDGLYQGLSTATKDTYDALHMQALPPRRAKRSGSGVKQTLNFDLLKLAGDVESNPGPGHMTEYKPTVRLATRDDVPRAVRTLAAAFADYPATRHTVDPDRHIERVTELQELFLTRVGLDIGKVWVADDGAAVAVWTTPESVEAGAVFAEIGPRMAELSGSRLAAQQQMEGLLAPHRPKEPAWFLATVGVSPDHQGKGLGSAVVLPGVEAAERAGVPAFLETSAPRNLPFYERLGFTVTADVEVPEGPRTWCMTRKPGA

SEQ ID NO: 4519 - protein, 1290 aa, Artificial Sequence
  Synthetic Polypeptide
MALPVTALLLPLALLLHAARPEVQLVESGGGLVQAGGSLRLSCAASGRTFSMGWFRQAPGKEREFVAAITYSGGSPYYADSVKGRFTISRDNAKNTVYLQMNSLKPEDTAVYYCAANPTYGSDWNAENWGQGTQVTVSSGTGGGGSGGGGSGGGGSEFDIQMTQSPSSLSASVGDRVTITCKASDHINNWLAWYQQKPGQAPKLLIYGATTLETGVPSRFSGSGSGTDYTLTISSLQPEDFATYYCQQSWNTPWTFGQGTKLEIKRLEDLKNVFPPEVAVFEPSEAEISHTQKATLVCLATGFYPDHVELSWWVNGKEVHSGVSTDPQPLKEQPALNDSRYCLSSRLRVSATFWQNPRNHFRCQVQFYGLSENDEWTQDRAKPVTQIVSAEAWGRADCGSTTPGERSSLPAFYPGTSGSCSGCGSLSLPLLAGLVAADAVASLLIVGAVFLCARPRRSPAQEDGKVYINMPGRGSTSRVKFSRSADAPAYQQGQNQLYNELNLGRREEYDVLDKRRGRDPEMGGKPQRRKNPQEGLYNELQKDKMAEAYSEIGMKGERRRGKGHDGLYQGLSTATKDTYDALHMQALPPRRAKRSGSGATNFSLLKQAGDVEENPGPMDWIWRILFLVGAATGAHSFEQVQLQQPGAELVKPGASVKMSCKASGYAFSSYWINWMKQKPGQGLEWIGQIYPGDGDTNYNGKFKGRATLTADTSSSTAYMQLSSLTSEDSAVYFCARSITTVVGCAMDYWGQGTSVTVSSTRIQNPDPAVYQLRDSKSSDKSVCLFTDFDSQTNVSQSKDSDVYITDKTVLDMRSMDFKSNSAVAWSNKSDFACANAFNNSIIPEDTFFPSPESSCGTQAQSDCSCSTVSPGVLAGIVMGDLVLTVLIALAVYFLGRLVPRGRGAAEAATRKQRITETESPYQELQGQRSDVYSDLNTQRPYYKSSRRVKFSRSADAPAYQQGQNQLYNELNLGRREEYDVLDKRRGRDPEMGGKPQRRKNPQEGLYNELQKDKMAEAYSEIGMKGERRRGKGHDGLYQGLSTATKDTYDALHMQALPPRRAKRSGSGVKQTLNFDLLKLAGDVESNPGPGHMTEYKPTVRLATRDDVPRAVRTLAAAFADYPATRHTVDPDRHIERVTELQELFLTRVGLDIGKVWVADDGAAVAVWTTPESVEAGAVFAEIGPRMAELSGSRLAAQQQMEGLLAPHRPKEPAWFLATVGVSPDHQGKGLGSAVVLPGVEAAERAGVPAFLETSAPRNLPFYERLGFTVTADVEVPEGPRTWCMTRKPGA

SEQ ID NO: 4520 - protein, 1427 aa, Artificial Sequence
  Synthetic Polypeptide
MALPVTALLLPLALLLHAARPEVQLVESGGGLVQAGGSLRLSCAASGRTFSMGWFRQAPGKEREFVAAITYSGGSPYYADSVKGRFTISRDNAKNTVYLQMNSLKPEDTAVYYCAANPTYGSDWNAENWGQGTQVTVSSGTGGGGSGGGGSGGGGSEFDIQMTQSPSSLSASVGDRVTITCKASDHINNWLAWYQQKPGQAPKLLIYGATTLETGVPSRFSGSGSGTDYTLTISSLQPEDFATYYCQQSWNTPWTFGQGTKLEIKRLEDLKNVFPPEVAVFEPSEAEISHTQKATLVCLATGFYPDHVELSWWVNGKEVHSGVSTDPQPLKEQPALNDSRYCLSSRLRVSATFWQNPRNHFRCQVQFYGLSENDEWTQDRAKPVTQIVSAEAWGRADCGSTTPGERSSLPAFYPGTSGSCSGCGSLSLPLLAGLVAADAVASLLIVGAVFLCARPRRSPAQEDGKVYINMPGRGSTSRVKFSRSADAPAYQQGQNQLYNELNLGRREEYDVLDKRRGRDPEMGGKPQRRKNPQEGLYNELQKDKMAEAYSEIGMKGERRRGKGHDGLYQGLSTATKDTYDALHMQALPPRRAKRSGSGATNFSLLKQAGDVEENPGPMDWIWRILFLVGAATGAHSGPEVQLVESGGGLVQAGGSLRLSCAASGRTFTMGWFRQAPGKEREFVAAISLSPTLAYYADSVKGRFTISRDNAKNTVVLQMNSLKPEDTALYYCAADRKSVMSIRPDYWGQGTQVTVSSGSGGGGSGGGGSGGGGSFEQVQLQQPGAELVKPGASVKMSCKASGYAFSSYWINWMKQKPGQGLEWIGQIYPGDGDTNYNGKFKGRATLTADTSSSTAYMQLSSLTSEDSAVYFCARSITTVVGCAMDYWGQGTSVTVSSTRIQNPDPAVYQLRDSKSSDKSVCLFTDFDSQTNVSQSKDSDVYITDKTVLDMRSMDFKSNSAVAWSNKSDFACANAFNNSIIPEDTFFPSPESSCGTQAQSDCSCSTVSPGVLAGIVMGDLVLTVLIALAVYFLGRLVPRGRGAAEAATRKQRITETESPYQELQGQRSDVYSDLNTQRPYYKSSRRVKFSRSADAPAYQQGQNQLYNELNLGRREEYDVLDKRRGRDPEMGGKPQRRKNPQEGLYNELQKDKMAEAYSEIGMKGERRRGKGHDGLYQGLSTATKDTYDALHMQALPPRRAKRSGSGVKQTLNFDLLKLAGDVESNPGPGHMTEYKPTVRLATRDDVPRAVRTLAAAFADYPATRHTVDPDRHIERVTELQELFLTRVGLDIGKVWVADDGAAVAVWTTPESVEAGAVFAEIGPRMAELSGSRLAAQQQMEGLLAPHRPKEPAWFLATVGVSPDHQGKGLGSAVVLPGVEAAERAGVPAFLETSAPRNLPFYERLGFTVTADVEVPEGPRTWCMTRKPGA

SEQ ID NO: 4521 - protein, 1160 aa, Artificial Sequence
  Synthetic Polypeptide
MALPVTALLLPLALLLHAARPEVQLVESGGGLVQAGGSLRLSCAASGRTFSMGWFRQAPGKEREFVAAITYSGGSPYYADSVKGRFTISRDNAKNTVYLQMNSLKPEDTAVYYCAANPTYGSDWNAENWGQGTQVTVSSLEDLKNVFPPEVAVFEPSEAEISHTQKATLVCLATGFYPDHVELSWWVNGKEVHSGVSTDPQPLKEQPALNDSRYCLSSRLRVSATFWQNPRNHFRCQVQFYGLSENDEWTQDRAKPVTQIVSAEAWGRADCGSTTPGERSSLPAFYPGTSGSCSGCGSLSLPLLAGLVAADAVASLLIVGAVFLCARPRRSPAQEDGKVYINMPGRGSTSRVKFSRSADAPAYQQGQNQLYNELNLGRREEYDVLDKRRGRDPEMGGKPQRRKNPQEGLYNELQKDKMAEAYSEIGMKGERRRGKGHDGLYQGLSTATKDTYDALHMQALPPRRAKRSGSGATNFSLLKQAGDVEENPGPMDWIWRILFLVGAATGAHSGPEVQLVESGGGLVQAGGSLRLSCAASGRTFTMGWFRQAPGKEREFVAAISLSPTLAYYADSVKGRFTISRDNAKNTVVLQMNSLKPEDTALYYCAADRKSVMSIRPDYWGQGTQVTVSSTRIQNPDPAVYQLRDSKSSDKSVCLFTDFDSQTNVSQSKDSDVYITDKTVLDMRSMDFKSNSAVAWSNKSDFACANAFNNSIIPEDTFFPSPESSCGTQAQSDCSCSTVSPGVLAGIVMGDLVLTVLIALAVYFLGRLVPRGRGAAEAATRKQRITETESPYQELQGQRSDVYSDLNTQRPYYKSSRRVKFSRSADAPAYQQGQNQLYNELNLGRREEYDVLDKRRGRDPEMGGKPQRRKNPQEGLYNELQKDKMAEAYSEIGMKGERRRGKGHDGLYQGLSTATKDTYDALHMQALPPRRAKRSGSGVKQTLNFDLLKLAGDVESNPGPGHMTEYKPTVRLATRDDVPRAVRTLAAAFADYPATRHTVDPDRHIERVTELQELFLTRVGLDIGKVWVADDGAAVAVWTTPESVEAGAVFAEIGPRMAELSGSRLAAQQQMEGLLAPHRPKEPAWFLATVGVSPDHQGKGLGSAVVLPGVEAAERAGVPAFLETSAPRNLPFYERLGFTVTADVEVPEGPRTWCMTRKPGA

SEQ ID NO: 4522 - protein, 585 aa, Artificial Sequence; identical to SEQ ID NO: 4431
  Synthetic Polypeptide

SEQ ID NO: 4523 - protein, 937 aa, Artificial Sequence
  Synthetic Polypeptide
MALPVTALLLPLALLLHAARPDIQMTQSPSSLSASVGDRVTITCKASDHINNWLAWYQQKPGQAPKLLIYGATTLETGVPSRFSGSGSGTDYTLTISSLQPEDFATYYCQQSWNTPWTFGQGTKLEIKRLEQAQSDCSCSTVSPGVLAGIVMGDLVLTVLIALAVYFLGRLVPRGRGAAEAATRKQRITETESPYQELQGQRSDVYSDLNTQRPYYKSTSRVKFSRSADAPAYQQGQNQLYNELNLGRREEYDVLDKRRGRDPEMGGKPQRRKNPQEGLYNELQKDKMAEAYSEIGMKGERRRGKGHDGLYQGLSTATKDTYDALHMQALPPRRAKRSGSGATNFSLLKQAGDVEENPGPMDWIWRILFLVGAATGAHSFEQVQLQQPGAELVKPGASVKMSCKASGYAFSSYWINWMKQKPGQGLEWIGQIYPGDGDTNYNGKFKGRATLTADTSSSTAYMQLSSLTSEDSAVYFCARSITTVVGCAMDYWGQGTSVTVSSTRQAQSDCSCSTVSPGVLAGIVMGDLVLTVLIALAVYFLGRLVPRGRGAAEAATRKQRITETESPYQELQGQRSDVYSDLNTQRPYYKSSRRVKFSRSADAPAYQQGQNQLYNELNLGRREEYDVLDKRRGRDPEMGGKPQRRKNPQEGLYNELQKDKMAEAYSEIGMKGERRRGKGHDGLYQGLSTATKDTYDALHMQALPPRRAKRSGSGVKQTLNFDLLKLAGDVESNPGPGHMTEYKPTVRLATRDDVPRAVRTLAAAFADYPATRHTVDPDRHIERVTELQELFLTRVGLDIGKVWVADDGAAVAVWTTPESVEAGAVFAEIGPRMAELSGSRLAAQQQMEGLLAPHRPKEPAWFLATVGVSPDHQGKGLGSAVVLPGVEAAERAGVPAFLETSAPRNLPFYERLGFTVTADVEVPEGPRTWCMTRKPGA

SEQ ID NO: 4524 - protein, 989 aa, Artificial Sequence
  Synthetic Polypeptide
MALPVTALLLPLALLLHAARPACEVQLLESGGGLIQPGGSLRLSCAASGFTFSSHAMTWVRQAPGKGLEWVSAISGSGDYTHYADSVKGRFTISRDNSKNTVYLQMNSLRAEDSAVYYCAKDEDGGSLLGHRGQGTLVTVSSGTGGGGSGGGGSGGGGSEFGSLEQAQSDCSCSTVSPGVLAGIVMGDLVLTVLIALAVYFLGRLVPRGRGAAEAATRKQRITETESPYQELQGQRSDVYSDLNTQRPYYKSTSRVKFSRSADAPAYQQGQNQLYNELNLGRREEYDVLDKRRGRDPEMGGKPQRRKNPQEGLYNELQKDKMAEAYSEIGMKGERRRGKGHDGLYQGLSTATKDTYDALHMQALPPRRAKRSGSGATNFSLLKQAGDVEENPGPMDWIWRILFLVGAATGAHSGPEVQLVESGGGLVQAGGSLRLSCAASGRTFSMGWFRQAPGKEREFVAAITYSGGSPYYADSVKGRFTISRDNAKNTVYLQMNSLKPEDTAVYYCAANPTYGSDWNAENWGQGTQVTVSSGSGGGGSGGGGSGGGGSFEGSTRQAQSDCSCSTVSPGVLAGIVMGDLVLTVLIALAVYFLGRLVPRGRGAAEAATRKQRITETESPYQELQGQRSDVYSDLNTQRPYYKSSRRVKFSRSADAPAYQQGQNQLYNELNLGRREEYDVLDKRRGRDPEMGGKPQRRKNPQEGLYNELQKDKMAEAYSEIGMKGERRRGKGHDGLYQGLSTATKDTYDALHMQALPPRRAKRSGSGVKQTLNFDLLKLAGDVESNPGPGHMTEYKPTVRLATRDDVPRAVRTLAAAFADYPATRHTVDPDRHIERVTELQELFLTRVGLDIGKVWVADDGAAVAVWTTPESVEAGAVFAEIGPRMAELSGSRLAAQQQMEGLLAPHRPKEPAWFLATVGVSPDHQGKGLGSAVVLPGVEAAERAGVPAFLETSAPRNLPFYERLGFTVTADVEVPEGPRTWCMTRKPGA

SEQ ID NO: 4525 - protein, 1139 aa, Artificial Sequence
  Synthetic Polypeptide
MALPVTALLLPLALLLHAARPDIQMTQSPSSLSASVGDRVTITCKASDHINNWLAWYQQKPGQAPKLLIYGATTLETGVPSRFSGSGSGTDYTLTISSLQPEDFATYYCQQSWNTPWTFGQGTKLEIKRLEGQPKANPTVTLFPPSSEELQANKATLVCLISDFYPGAVTVAWKADGSPVKAGVETTKPSKQSNNKYAASSYLSLTPEQWKSHRSYSCQVTHEGSTVEKTVAPTECSGSQAQSDCSCSTVSPGVLAGIVMGDLVLTVLIALAVYFLGRLVPRGRGAAEAATRKQRITETESPYQELQGQRSDVYSDLNTQRPYYKSTSRVKFSRSADAPAYQQGQNQLYNELNLGRREEYDVLDKRRGRDPEMGGKPQRRKNPQEGLYNELQKDKMAEAYSEIGMKGERRRGKGHDGLYQGLSTATKDTYDALHMQALPPRRAKRSGSGATNFSLLKQAGDVEENPGPMDWIWRILFLVGAATGAHSFEQVQLQQPGAELVKPGASVKMSCKASGYAFSSYWINWMKQKPGQGLEWIGQIYPGDGDTNYNGKFKGRATLTADTSSSTAYMQLSSLTSEDSAVYFCARSITTVVGCAMDYWGQGTSVTVSSTRASTKGPSVFPLAPSSKSTSGGTAALGCLVKDYFPEPVTVSWNSGALTSGVHTFPAVLQSSGLYSLSSVVTVPSSSLGTQTYICNVNHKPSNTKVDKRVEPKSCGTQAQSDCSCSTVSPGVLAGIVMGDLVLTVLIALAVYFLGRLVPRGRGAAEAATRKQRITETESPYQELQGQRSDVYSDLNTQRPYYKSSRRVKFSRSADAPAYQQGQNQLYNELNLGRREEYDVLDKRRGRDPEMGGKPQRRKNPQEGLYNELQKDKMAEAYSEIGMKGERRRGKGHDGLYQGLSTATKDTYDALHMQALPPRRAKRSGSGVKQTLNFDLLKLAGDVESNPGPGHMATYEVLCEVARKLGTDDREVVLFLLNVFIPQPTLAQLIGALRALKEEGRLTFPLLAECLFRAGRRDLLRDLLHLDPRFLERHLAGTMSYFSPYQLTVLHVDGELCARDIRSLIFLSKDTIGSRSTPQTFLHWVYCMENLDLLGPTDVDALMSMLRSLSRVDLQRQVQTLMGLHLSGPSHSQHYRHTP

SEQ ID NO: 4526 - protein, 1192 aa, Artificial Sequence
  Synthetic Polypeptide
MALPVTALLLPLALLLHAARPDIQMTQSPSSLSASVGDRVTITCKASDHINNWLAWYQQKPGQAPKLLIYGATTLETGVPSRFSGSGSGTDYTLTISSLQPEDFATYYCQQSWNTPWTFGQGTKLEIKRLEGQPKANPTVTLFPPSSEELQANKATLVCLISDFYPGAVTVAWKADGSPVKAGVETTKPSKQSNNKYAASSYLSLTPEQWKSHRSYSCQVTHEGSTVEKTVAPTECSGSQAQSDCSCSTVSPGVLAGIVMGDLVLTVLIALAVYFLGRLVPRGRGAAEAATRKQRITETESPYQELQGQRSDVYSDLNTQRPYYKSTSRVKFSRSADAPAYQQGQNQLYNELNLGRREEYDVLDKRRGRDPEMGGKPQRRKNPQEGLYNELQKDKMAEAYSEIGMKGERRRGKGHDGLYQGLSTATKDTYDALHMQALPPRRAKRSGSGATNFSLLKQAGDVEENPGPMDWIWRILFLVGAATGAHSFEQVQLQQPGAELVKPGASVKMSCKASGYAFSSYWINWMKQKPGQGLEWIGQIYPGDGDTNYNGKFKGRATLTADTSSSTAYMQLSSLTSEDSAVYFCARSITTVVGCAMDYWGQGTSVTVSSTRASTKGPSVFPLAPSSKSTSGGTAALGCLVKDYFPEPVTVSWNSGALTSGVHTFPAVLQSSGLYSLSSVVTVPSSSLGTQTYICNVNHKPSNTKVDKRVEPKSCGTQAQSDCSCSTVSPGVLAGIVMGDLVLTVLIALAVYFLGRLVPRGRGAAEAATRKQRITETESPYQELQGQRSDVYSDLNTQRPYYKSSRRVKFSRSADAPAYQQGQNQLYNELNLGRREEYDVLDKRRGRDPEMGGKPQRRKNPQEGLYNELQKDKMAEAYSEIGMKGERRRGKGHDGLYQGLSTATKDTYDALHMQALPPRRAKRSGSGVKQTLNFDLLKLAGDVESNPGPGHMSDSKEVPSLPFLRHLLEELDSHEDSLLLFLCHDAAPGCTTVTQALCSLSQQRKLTLAALVEMLYVLQRMDLLKSRFGLSKEGAEQLLGTSFLTRYRKLMVCVGEELDSSELRALRLFACNLNPSLSTALSESSRFVELVLALENVGLVSPSSVSVLADMLRTLRRLDLCQQLVEYEQQEQARYRYCYAASPSLPVRTLRRGHGASEHEQLCMPVQESSDSPELLRTPVQESSSDSPEQTT

SEQ ID NO: 4527 - protein, 1150 aa, Artificial Sequence
  Synthetic Polypeptide
MALPVTALLLPLALLLHAARPDIQMTQSPSSLSASVGDRVTITCKASDHINNWLAWYQQKPGQAPKLLIYGATTLETGVPSRFSGSGSGTDYTLTISSLQPEDFATYYCQQSWNTPWTFGQGTKLEIKRLEGQPKANPTVTLFPPSSEELQANKATLVCLISDFYPGAVTVAWKADGSPVKAGVETTKPSKQSNNKYAASSYLSLTPEQWKSHRSYSCQVTHEGSTVEKTVAPTECSGSQAQSDCSCSTVSPGVLAGIVMGDLVLTVLIALAVYFLGRLVPRGRGAAEAATRKQRITETESPYQELQGQRSDVYSDLNTQRPYYKSTSRVKFSRSADAPAYQQGQNQLYNELNLGRREEYDVLDKRRGRDPEMGGKPQRRKNPQEGLYNELQKDKMAEAYSEIGMKGERRRGKGHDGLYQGLSTATKDTYDALHMQALPPRRAKRSGSGATNFSLLKQAGDVEENPGPMDWIWRILFLVGAATGAHSFEQVQLQQPGAELVKPGASVKMSCKASGYAFSSYWINWMKQKPGQGLEWIGQIYPGDGDTNYNGKFKGRATLTADTSSSTAYMQLSSLTSEDSAVYFCARSITTVVGCAMDYWGQGTSVTVSSTRASTKGPSVFPLAPSSKSTSGGTAALGCLVKDYFPEPVTVSWNSGALTSGVHTFPAVLQSSGLYSLSSVVTVPSSSLGTQTYICNVNHKPSNTKVDKRVEPKSCGTQAQSDCSCSTVSPGVLAGIVMGDLVLTVLIALAVYFLGRLVPRGRGAAEAATRKQRITETESPYQELQGQRSDVYSDLNTQRPYYKSSRRVKFSRSADAPAYQQGQNQLYNELNLGRREEYDVLDKRRGRDPEMGGKPQRRKNPQEGLYNELQKDKMAEAYSEIGMKGERRRGKGHDGLYQGLSTATKDTYDALHMQALPPRRAKRSGSGVKQTLNFDLLKLAGDVESNPGPGHMTEYKPTVRLATRDDVPRAVRTLAAAFADYPATRHTVDPDRHIERVTELQELFLTRVGLDIGKVWVADDGAAVAVWTTPESVEAGAVFAEIGPRMAELSGSRLAAQQQMEGLLAPHRPKEPAWFLATVGVSPDHQGKGLGSAVVLPGVEAAERAGVPAFLETSAPRNLPFYERLGFTVTADVEVPEGPRTWCMTRKPGA

SEQ ID NO: 4528 - protein, 1287 aa, Artificial Sequence
  Synthetic Polypeptide
MALPVTALLLPLALLLHAARPEVQLVESGGGLVQAGGSLRLSCAASGRTFSMGWFRQAPGKEREFVAAITYSGGSPYYADSVKGRFTISRDNAKNTVYLQMNSLKPEDTAVYYCAANPTYGSDWNAENWGQGTQVTVSSGTGGGGSGGGGSGGGGSEFDIQMTQSPSSLSASVGDRVTITCKASDHINNWLAWYQQKPGQAPKLLIYGATTLETGVPSRFSGSGSGTDYTLTISSLQPEDFATYYCQQSWNTPWTFGQGTKLEIKRLEGQPKANPTVTLFPPSSEELQANKATLVCLISDFYPGAVTVAWKADGSPVKAGVETTKPSKQSNNKYAASSYLSLTPEQWKSHRSYSCQVTHEGSTVEKTVAPTECSGSQAQSDCSCSTVSPGVLAGIVMGDLVLTVLIALAVYFLGRLVPRGRGAAEAATRKQRITETESPYQELQGQRSDVYSDLNTQRPYYKSTSRVKFSRSADAPAYQQGQNQLYNELNLGRREEYDVLDKRRGRDPEMGGKPQRRKNPQEGLYNELQKDKMAEAYSEIGMKGERRRGKGHDGLYQGLSTATKDTYDALHMQALPPRRAKRSGSGATNFSLLKQAGDVEENPGPMDWIWRILFLVGAATGAHSFEQVQLQQPGAELVKPGASVKMSCKASGYAFSSYWINWMKQKPGQGLEWIGQIYPGDGDTNYNGKFKGRATLTADTSSSTAYMQLSSLTSEDSAVYFCARSITTVVGCAMDYWGQGTSVTVSSTRASTKGPSVFPLAPSSKSTSGGTAALGCLVKDYFPEPVTVSWNSGALTSGVHTFPAVLQSSGLYSLSSVVTVPSSSLGTQTYICNVNHKPSNTKVDKRVEPKSCGTQAQSDCSCSTVSPGVLAGIVMGDLVLTVLIALAVYFLGRLVPRGRGAAEAATRKQRITETESPYQELQGQRSDVYSDLNTQRPYYKSSRRVKFSRSADAPAYQQGQNQLYNELNLGRREEYDVLDKRRGRDPEMGGKPQRRKNPQEGLYNELQKDKMAEAYSEIGMKGERRRGKGHDGLYQGLSTATKDTYDALHMQALPPRRAKRSGSGVKQTLNFDLLKLAGDVESNPGPGHMTEYKPTVRLATRDDVPRAVRTLAAAFADYPATRHTVDPDRHIERVTELQELFLTRVGLDIGKVWVADDGAAVAVWTTPESVEAGAVFAEIGPRMAELSGSRLAAQQQMEGLLAPHRPKEPAWFLATVGVSPDHQGKGLGSAVVLPGVEAAERAGVPAFLETSAPRNLPFYERLGFTVTADVEVPEGPRTWCMTRKPGA

SEQ ID NO: 4529 - protein, 1424 aa, Artificial Sequence
  Synthetic Polypeptide
MALPVTALLLPLALLLHAARPEVQLVESGGGLVQAGGSLRLSCAASGRTFSMGWFRQAPGKEREFVAAITYSGGSPYYADSVKGRFTISRDNAKNTVYLQMNSLKPEDTAVYYCAANPTYGSDWNAENWGQGTQVTVSSGTGGGGSGGGGSGGGGSEFDIQMTQSPSSLSASVGDRVTITCKASDHINNWLAWYQQKPGQAPKLLIYGATTLETGVPSRFSGSGSGTDYTLTISSLQPEDFATYYCQQSWNTPWTFGQGTKLEIKRLEGQPKANPTVTLFPPSSEELQANKATLVCLISDFYPGAVTVAWKADGSPVKAGVETTKPSKQSNNKYAASSYLSLTPEQWKSHRSYSCQVTHEGSTVEKTVAPTECSGSQAQSDCSCSTVSPGVLAGIVMGDLVLTVLIALAVYFLGRLVPRGRGAAEAATRKQRITETESPYQELQGQRSDVYSDLNTQRPYYKSTSRVKFSRSADAPAYQQGQNQLYNELNLGRREEYDVLDKRRGRDPEMGGKPQRRKNPQEGLYNELQKDKMAEAYSEIGMKGERRRGKGHDGLYQGLSTATKDTYDALHMQALPPRRAKRSGSGATNFSLLKQAGDVEENPGPMDWIWRILFLVGAATGAHSGPEVQLVESGGGLVQAGGSLRLSCAASGRTFTMGWFRQAPGKEREFVAAISLSPTLAYYADSVKGRFTISRDNAKNTVVLQMNSLKPEDTALYYCAADRKSVMSIRPDYWGQGTQVTVSSGSGGGGSGGGGSGGGGSFEQVQLQQPGAELVKPGASVKMSCKASGYAFSSYWINWMKQKPGQGLEWIGQIYPGDGDTNYNGKFKGRATLTADTSSSTAYMQLSSLTSEDSAVYFCARSITTVVGCAMDYWGQGTSVTVSSTRASTKGPSVFPLAPSSKSTSGGTAALGCLVKDYFPEPVTVSWNSGALTSGVHTFPAVLQSSGLYSLSSVVTVPSSSLGTQTYICNVNHKPSNTKVDKRVEPKSCGTQAQSDCSCSTVSPGVLAGIVMGDLVLTVLIALAVYFLGRLVPRGRGAAEAATRKQRITETESPYQELQGQRSDVYSDLNTQRPYYKSSRRVKFSRSADAPAYQQGQNQLYNELNLGRREEYDVLDKRRGRDPEMGGKPQRRKNPQEGLYNELQKDKMAEAYSEIGMKGERRRGKGHDGLYQGLSTATKDTYDALHMQALPPRRAKRSGSGVKQTLNFDLLKLAGDVESNPGPGHMTEYKPTVRLATRDDVPRAVRTLAAAFADYPATRHTVDPDRHIERVTELQELFLTRVGLDIGKVWVADDGAAVAVWTTPESVEAGAVFAEIGPRMAELSGSRLAAQQQMEGLLAPHRPKEPAWFLATVGVSPDHQGKGLGSAVVLPGVEAAERAGVPAFLETSAPRNLPFYERLGFTVTADVEVPEGPRTWCMTRKPGA

SEQ ID NO: 4530 - protein, 1157 aa, Artificial Sequence
  Synthetic Polypeptide
MALPVTALLLPLALLLHAARPEVQLVESGGGLVQAGGSLRLSCAASGRTFSMGWFRQAPGKEREFVAAITYSGGSPYYADSVKGRFTISRDNAKNTVYLQMNSLKPEDTAVYYCAANPTYGSDWNAENWGQGTQVTVSSLEGQPKANPTVTLFPPSSEELQANKATLVCLISDFYPGAVTVAWKADGSPVKAGVETTKPSKQSNNKYAASSYLSLTPEQWKSHRSYSCQVTHEGSTVEKTVAPTECSGSQAQSDCSCSTVSPGVLAGIVMGDLVLTVLIALAVYFLGRLVPRGRGAAEAATRKQRITETESPYQELQGQRSDVYSDLNTQRPYYKSTSRVKFSRSADAPAYQQGQNQLYNELNLGRREEYDVLDKRRGRDPEMGGKPQRRKNPQEGLYNELQKDKMAEAYSEIGMKGERRRGKGHDGLYQGLSTATKDTYDALHMQALPPRRAKRSGSGATNFSLLKQAGDVEENPGPMDWIWRILFLVGAATGAHSGPEVQLVESGGGLVQAGGSLRLSCAASGRTFTMGWFRQAPGKEREFVAAISLSPTLAYYADSVKGRFTISRDNAKNTVVLQMNSLKPEDTALYYCAADRKSVMSIRPDYWGQGTQVTVSSTRASTKGPSVFPLAPSSKSTSGGTAALGCLVKDYFPEPVTVSWNSGALTSGVHTFPAVLQSSGLYSLSSVVTVPSSSLGTQTYICNVNHKPSNTKVDKRVEPKSCGTQAQSDCSCSTVSPGVLAGIVMGDLVLTVLIALAVYFLGRLVPRGRGAAEAATRKQRITETESPYQELQGQRSDVYSDLNTQRPYYKSSRRVKFSRSADAPAYQQGQNQLYNELNLGRREEYDVLDKRRGRDPEMGGKPQRRKNPQEGLYNELQKDKMAEAYSEIGMKGERRRGKGHDGLYQGLSTATKDTYDALHMQALPPRRAKRSGSGVKQTLNFDLLKLAGDVESNPGPGHMTEYKPTVRLATRDDVPRAVRTLAAAFADYPATRHTVDPDRHIERVTELQELFLTRVGLDIGKVWVADDGAAVAVWTTPESVEAGAVFAEIGPRMAELSGSRLAAQQQMEGLLAPHRPKEPAWFLATVGVSPDHQGKGLGSAVVLPGVEAAERAGVPAFLETSAPRNLPFYERLGFTVTADVEVPEGPRTWCMTRKPGA

SEQ ID NO: 4531 - protein, 1165 aa, Artificial Sequence
  Synthetic Polypeptide
MALPVTALLLPLALLLHAARPDIQMTQSPSSLSASVGDRVTITCKASDHINNWLAWYQQKPGQAPKLLIYGATTLETGVPSRFSGSGSGTDYTLTISSLQPEDFATYYCQQSWNTPWTFGQGTKLEIKRLEDLKNVFPPEVAVFEPSEAEISHTQKATLVCLATGFYPDHVELSWWVNGKEVHSGVSTDPQPLKEQPALNDSRYCLSSRLRVSATFWQNPRNHFRCQVQFYGLSENDEWTQDRAKPVTQIVSAEAWGRADCGSQAQSDCSCSTVSPGVLAGIVMGDLVLTVLIALAVYFLGRLVPRGRGAAEAATRKQRITETESPYQELQGQRSDVYSDLNTQRPYYKSTSRVKFSRSADAPAYQQGQNQLYNELNLGRREEYDVLDKRRGRDPEMGGKPQRRKNPQEGLYNELQKDKMAEAYSEIGMKGERRRGKGHDGLYQGLSTATKDTYDALHMQALPPRRAKRSGSGATNFSLLKQAGDVEENPGPMDWIWRILFLVGAATGAHSFEQVQLQQPGAELVKPGASVKMSCKASGYAFSSYWINWMKQKPGQGLEWIGQIYPGDGDTNYNGKFKGRATLTADTSSSTAYMQLSSLTSEDSAVYFCARSITTVVGCAMDYWGQGTSVTVSSTRIQNPDPAVYQLRDSKSSDKSVCLFTDFDSQTNVSQSKDSDVYITDKTVLDMRSMDFKSNSAVAWSNKSDFACANAFNNSIIPEDTFFPSPESSCGTQAQSDCSCSTVSPGVLAGIVMGDLVLTVLIALAVYFLGRLVPRGRGAAEAATRKQRITETESPYQELQGQRSDVYSDLNTQRPYYKSSRRVKFSRSADAPAYQQGQNQLYNELNLGRREEYDVLDKRRGRDPEMGGKPQRRKNPQEGLYNELQKDKMAEAYSEIGMKGERRRGKGHDGLYQGLSTATKDTYDALHMQALPPRRAKRSGSGVKQTLNFDLLKLAGDVESNPGPGHMTEYKPTVRLATRDDVPRAVRTLAAAFADYPATRHTVDPDRHIERVTELQELFLTRVGLDIGKVWVADDGAAVAVWTTPESVEAGAVFAEIGPRMAELSGSRLAAQQQMEGLLAPHRPKEPAWFLATVGVSPDHQGKGLGSAVVLPGVEAAERAGVPAFLETSAPRNLPFYERLGFTVTADVEVPEGPRTWCMTRKPGA

SEQ ID NO: 4532 - protein, 1302 aa, Artificial Sequence
  Synthetic Polypeptide
MALPVTALLLPLALLLHAARPEVQLVESGGGLVQAGGSLRLSCAASGRTFSMGWFRQAPGKEREFVAAITYSGGSPYYADSVKGRFTISRDNAKNTVYLQMNSLKPEDTAVYYCAANPTYGSDWNAENWGQGTQVTVSSGTGGGGSGGGGSGGGGSEFDIQMTQSPSSLSASVGDRVTITCKASDHINNWLAWYQQKPGQAPKLLIYGATTLETGVPSRFSGSGSGTDYTLTISSLQPEDFATYYCQQSWNTPWTFGQGTKLEIKRLEDLKNVFPPEVAVFEPSEAEISHTQKATLVCLATGFYPDHVELSWWVNGKEVHSGVSTDPQPLKEQPALNDSRYCLSSRLRVSATFWQNPRNHFRCQVQFYGLSENDEWTQDRAKPVTQIVSAEAWGRADCGSQAQSDCSCSTVSPGVLAGIVMGDLVLTVLIALAVYFLGRLVPRGRGAAEAATRKQRITETESPYQELQGQRSDVYSDLNTQRPYYKSTSRVKFSRSADAPAYQQGQNQLYNELNLGRREEYDVLDKRRGRDPEMGGKPQRRKNPQEGLYNELQKDKMAEAYSEIGMKGERRRGKGHDGLYQGLSTATKDTYDALHMQALPPRRAKRSGSGATNFSLLKQAGDVEENPGPMDWIWRILFLVGAATGAHSFEQVQLQQPGAELVKPGASVKMSCKASGYAFSSYWINWMKQKPGQGLEWIGQIYPGDGDTNYNGKFKGRATLTADTSSSTAYMQLSSLTSEDSAVYFCARSITTVVGCAMDYWGQGTSVTVSSTRIQNPDPAVYQLRDSKSSDKSVCLFTDFDSQTNVSQSKDSDVYITDKTVLDMRSMDFKSNSAVAWSNKSDFACANAFNNSIIPEDTFFPSPESSCGTQAQSDCSCSTVSPGVLAGIVMGDLVLTVLIALAVYFLGRLVPRGRGAAEAATRKQRITETESPYQELQGQRSDVYSDLNTQRPYYKSSRRVKFSRSADAPAYQQGQNQLYNELNLGRREEYDVLDKRRGRDPEMGGKPQRRKNPQEGLYNELQKDKMAEAYSEIGMKGERRRGKGHDGLYQGLSTATKDTYDALHMQALPPRRAKRSGSGVKQTLNFDLLKLAGDVESNPGPGHMTEYKPTVRLATRDDVPRAVRTLAAAFADYPATRHTVDPDRHIERVTELQELFLTRVGLDIGKVWVADDGAAVAVWTTPESVEAGAVFAEIGPRMAELSGSRLAAQQQMEGLLAPHRPKEPAWFLATVGVSPDHQGKGLGSAVVLPGVEAAERAGVPAFLETSAPRNLPFYERLGFTVTADVEVPEGPRTWCMTRKPGA

SEQ ID NO: 4533 - protein, 1439 aa, Artificial Sequence
  Synthetic Polypeptide
MALPVTALLLPLALLLHAARPEVQLVESGGGLVQAGGSLRLSCAASGRTFSMGWFRQAPGKEREFVAAITYSGGSPYYADSVKGRFTISRDNAKNTVYLQMNSLKPEDTAVYYCAANPTYGSDWNAENWGQGTQVTVSSGTGGGGSGGGGSGGGGSEFDIQMTQSPSSLSASVGDRVTITCKASDHINNWLAWYQQKPGQAPKLLIYGATTLETGVPSRFSGSGSGTDYTLTISSLQPEDFATYYCQQSWNTPWTFGQGTKLEIKRLEDLKNVFPPEVAVFEPSEAEISHTQKATLVCLATGFYPDHVELSWWVNGKEVHSGVSTDPQPLKEQPALNDSRYCLSSRLRVSATFWQNPRNHFRCQVQFYGLSENDEWTQDRAKPVTQIVSAEAWGRADCGSQAQSDCSCSTVSPGVLAGIVMGDLVLTVLIALAVYFLGRLVPRGRGAAEAATRKQRITETESPYQELQGQRSDVYSDLNTQRPYYKSTSRVKFSRSADAPAYQQGQNQLYNELNLGRREEYDVLDKRRGRDPEMGGKPQRRKNPQEGLYNELQKDKMAEAYSEIGMKGERRRGKGHDGLYQGLSTATKDTYDALHMQALPPRRAKRSGSGATNFSLLKQAGDVEENPGPMDWIWRILFLVGAATGAHSGPEVQLVESGGGLVQAGGSLRLSCAASGRTFTMGWFRQAPGKEREFVAAISLSPTLAYYADSVKGRFTISRDNAKNTVVLQMNSLKPEDTALYYCAADRKSVMSIRPDYWGQGTQVTVSSGSGGGGSGGGGSGGGGSFEQVQLQQPGAELVKPGASVKMSCKASGYAFSSYWINWMKQKPGQGLEWIGQIYPGDGDTNYNGKFKGRATLTADTSSSTAYMQLSSLTSEDSAVYFCARSITTVVGCAMDYWGQGTSVTVSSTRIQNPDPAVYQLRDSKSSDKSVCLFTDFDSQTNVSQSKDSDVYITDKTVLDMRSMDFKSNSAVAWSNKSDFACANAFNNSIIPEDTFFPSPESSCGTQAQSDCSCSTVSPGVLAGIVMGDLVLTVLIALAVYFLGRLVPRGRGAAEAATRKQRITETESPYQELQGQRSDVYSDLNTQRPYYKSSRRVKFSRSADAPAYQQGQNQLYNELNLGRREEYDVLDKRRGRDPEMGGKPQRRKNPQEGLYNELQKDKMAEAYSEIGMKGERRRGKGHDGLYQGLSTATKDTYDALHMQALPPRRAKRSGSGVKQTLNFDLLKLAGDVESNPGPGHMTEYKPTVRLATRDDVPRAVRTLAAAFADYPATRHTVDPDRHIERVTELQELFLTRVGLDIGKVWVADDGAAVAVWTTPESVEAGAVFAEIGPRMAELSGSRLAAQQQMEGLLAPHRPKEPAWFLATVGVSPDHQGKGLGSAVVLPGVEAAERAGVPAFLETSAPRNLPFYERLGFTVTADVEVPEGPRTWCMTRKPGA

SEQ ID NO: 4534 - protein, 1172 aa, Artificial Sequence
  Synthetic Polypeptide
MALPVTALLLPLALLLHAARPEVQLVESGGGLVQAGGSLRLSCAASGRTFSMGWFRQAPGKEREFVAAITYSGGSPYYADSVKGRFTISRDNAKNTVYLQMNSLKPEDTAVYYCAANPTYGSDWNAENWGQGTQVTVSSLEDLKNVFPPEVAVFEPSEAEISHTQKATLVCLATGFYPDHVELSWWVNGKEVHSGVSTDPQPLKEQPALNDSRYCLSSRLRVSATFWQNPRNHFRCQVQFYGLSENDEWTQDRAKPVTQIVSAEAWGRADCGSQAQSDCSCSTVSPGVLAGIVMGDLVLTVLIALAVYFLGRLVPRGRGAAEAATRKQRITETESPYQELQGQRSDVYSDLNTQRPYYKSTSRVKFSRSADAPAYQQGQNQLYNELNLGRREEYDVLDKRRGRDPEMGGKPQRRKNPQEGLYNELQKDKMAEAYSEIGMKGERRRGKGHDGLYQGLSTATKDTYDALHMQALPPRRAKRSGSGATNFSLLKQAGDVEENPGPMDWIWRILFLVGAATGAHSGPEVQLVESGGGLVQAGGSLRLSCAASGRTFTMGWFRQAPGKEREFVAAISLSPTLAYYADSVKGRFTISRDNAKNTVVLQMNSLKPEDTALYYCAADRKSVMSIRPDYWGQGTQVTVSSTRIQNPDPAVYQLRDSKSSDKSVCLFTDFDSQTNVSQSKDSDVYITDKTVLDMRSMDFKSNSAVAWSNKSDFACANAFNNSIIPEDTFFPSPESSCGTQAQSDCSCSTVSPGVLAGIVMGDLVLTVLIALAVYFLGRLVPRGRGAAEAATRKQRITETESPYQELQGQRSDVYSDLNTQRPYYKSSRRVKFSRSADAPAYQQGQNQLYNELNLGRREEYDVLDKRRGRDPEMGGKPQRRKNPQEGLYNELQKDKMAEAYSEIGMKGERRRGKGHDGLYQGLSTATKDTYDALHMQALPPRRAKRSGSGVKQTLNFDLLKLAGDVESNPGPGHMTEYKPTVRLATRDDVPRAVRTLAAAFADYPATRHTVDPDRHIERVTELQELFLTRVGLDIGKVWVADDGAAVAVWTTPESVEAGAVFAEIGPRMAELSGSRLAAQQQMEGLLAPHRPKEPAWFLATVGVSPDHQGKGLGSAVVLPGVEAAERAGVPAFLETSAPRNLPFYERLGFTVTADVEVPEGPRTWCMTRKPGA

SEQ ID NO: 4535 - protein, 597 aa, Artificial Sequence
  Synthetic Polypeptide
MALPVTALLLPLALLLHAARPACEVQLLESGGGLIQPGGSLRLSCAASGFTFSSHAMTWVRQAPGKGLEWVSAISGSGDYTHYADSVKGRFTISRDNSKNTVYLQMNSLRAEDSAVYYCAKDEDGGSLLGHRGQGTLVTVSSGTGGGGSGGGGSGGGGSEFGSLEQAQSDCSCSTVSPGVLAGIVMGDLVLTVLIALAVYFLGRLVPRGRGAAEAATRKQRITETESPYQELQGQRSDVYSDLNTQRPYYKSTSRVKFSRSADAPAYQQGQNQLYNELNLGRREEYDVLDKRRGRDPEMGGKPQRRKNPQEGLYNELQKDKMAEAYSEIGMKGERRRGKGHDGLYQGLSTATKDTYDALHMQALPPRRAKRSGSGATNFSLLKQAGDVEENPGPTRGHMTEYKPTVRLATRDDVPRAVRTLAAAFADYPATRHTVDPDRHIERVTELQELFLTRVGLDIGKVWVADDGAAVAVWTTPESVEAGAVFAEIGPRMAELSGSRLAAQQQMEGLLAPHRPKEPAWFLATVGVSPDHQGKGLGSAVVLPGVEAAERAGVPAFLETSAPRNLPFYERLGFTVTADVEVPEGPRTWCMTRKPGA

SEQ ID NO: 4536 - protein, 925 aa, Artificial Sequence
  Synthetic Polypeptide
MALPVTALLLPLALLLHAARPDIQMTQSPSSLSASVGDRVTITCKASDHINNWLAWYQQKPGQAPKLLIYGATTLETGVPSRFSGSGSGTDYTLTISSLQPEDFATYYCQQSWNTPWTFGQGTKLEIKRLETTPGERSSLPAFYPGTSGSCSGCGSLSLPLLAGLVAADAVASLLIVGAVFLCARPRRSPAQEDGKVYINMPGRGSTSRVKFSRSADAPAYQQGQNQLYNELNLGRREEYDVLDKRRGRDPEMGGKPQRRKNPQEGLYNELQKDKMAEAYSEIGMKGERRRGKGHDGLYQGLSTATKDTYDALHMQALPPRRAKRSGSGATNFSLLKQAGDVEENPGPMDWIWRILFLVGAATGAHSFEQVQLQQPGAELVKPGASVKMSCKASGYAFSSYWINWMKQKPGQGLEWIGQIYPGDGDTNYNGKFKGRATLTADTSSSTAYMQLSSLTSEDSAVYFCARSITTVVGCAMDYWGQGTSVTVSSTRQAQSDCSSSTVSPGVLAGIVMGDLVLTVLIALAVYFLGRLVPRGRGAAEAATRKQRITETESPYQELQGQRSDVYSDLNTQRPYYKSSRRVKFSRSADAPAYQQGQNQLYNELNLGRREEYDVLDKRRGRDPEMGGKPQRRKNPQEGLYNELQKDKMAEAYSEIGMKGERRRGKGHDGLYQGLSTATKDTYDALHMQALPPRRAKRSGSGVKQTLNFDLLKLAGDVESNPGPGHMTEYKPTVRLATRDDVPRAVRTLAAAFADYPATRHTVDPDRHIERVTELQELFLTRVGLDIGKVWVADDGAAVAVWTTPESVEAGAVFAEIGPRMAELSGSRLAAQQQMEGLLAPHRPKEPAWFLATVGVSPDHQGKGLGSAVVLPGVEAAERAGVPAFLETSAPRNLPFYERLGFTVTADVEVPEGPRTWCMTRKPGA

SEQ ID NO: 4537 - protein, 977 aa, Artificial Sequence
  Synthetic Polypeptide
MALPVTALLLPLALLLHAARPACEVQLLESGGGLIQPGGSLRLSCAASGFTFSSHAMTWVRQAPGKGLEWVSAISGSGDYTHYADSVKGRFTISRDNSKNTVYLQMNSLRAEDSAVYYCAKDEDGGSLLGHRGQGTLVTVSSGTGGGGSGGGGSGGGGSEFGSLETTPGERSSLPAFYPGTSGSCSGCGSLSLPLLAGLVAADAVASLLIVGAVFLCARPRRSPAQEDGKVYINMPGRGSTSRVKFSRSADAPAYQQGQNQLYNELNLGRREEYDVLDKRRGRDPEMGGKPQRRKNPQEGLYNELQKDKMAEAYSEIGMKGERRRGKGHDGLYQGLSTATKDTYDALHMQALPPRRAKRSGSGATNFSLLKQAGDVEENPGPMDWIWRILFLVGAATGAHSGPEVQLVESGGGLVQAGGSLRLSCAASGRTFSMGWFRQAPGKEREFVAAITYSGGSPYYADSVKGRFTISRDNAKNTVYLQMNSLKPEDTAVYYCAANPTYGSDWNAENWGQGTQVTVSSGSGGGGSGGGGSGGGGSFEGSTRQAQSDCSSSTVSPGVLAGIVMGDLVLTVLIALAVYFLGRLVPRGRGAAEAATRKQRITETESPYQELQGQRSDVYSDLNTQRPYYKSSRRVKFSRSADAPAYQQGQNQLYNELNLGRREEYDVLDKRRGRDPEMGGKPQRRKNPQEGLYNELQKDKMAEAYSEIGMKGERRRGKGHDGLYQGLSTATKDTYDALHMQALPPRRAKRSGSGVKQTLNFDLLKLAGDVESNPGPGHMTEYKPTVRLATRDDVPRAVRTLAAAFADYPATRHTVDPDRHIERVTELQELFLTRVGLDIGKVWVADDGAAVAVWTTPESVEAGAVFAEIGPRMAELSGSRLAAQQQMEGLLAPHRPKEPAWFLATVGVSPDHQGKGLGSAVVLPGVEAAERAGVPAFLETSAPRNLPFYERLGFTVTADVEVPEGPRTWCMTRKPGA

SEQ ID NO: 4538 - protein, 1127 aa, Artificial Sequence
  Synthetic Polypeptide
MALPVTALLLPLALLLHAARPDIQMTQSPSSLSASVGDRVTITCKASDHINNWLAWYQQKPGQAPKLLIYGATTLETGVPSRFSGSGSGTDYTLTISSLQPEDFATYYCQQSWNTPWTFGQGTKLEIKRLEGQPKANPTVTLFPPSSEELQANKATLVCLISDFYPGAVTVAWKADGSPVKAGVETTKPSKQSNNKYAASSYLSLTPEQWKSHRSYSCQVTHEGSTVEKTVAPTECSGSTTPGERSSLPAFYPGTSGSCSGCGSLSLPLLAGLVAADAVASLLIVGAVFLCARPRRSPAQEDGKVYINMPGRGSTSRVKFSRSADAPAYQQGQNQLYNELNLGRREEYDVLDKRRGRDPEMGGKPQRRKNPQEGLYNELQKDKMAEAYSEIGMKGERRRGKGHDGLYQGLSTATKDTYDALHMQALPPRRAKRSGSGATNFSLLKQAGDVEENPGPMDWIWRILFLVGAATGAHSFEQVQLQQPGAELVKPGASVKMSCKASGYAFSSYWINWMKQKPGQGLEWIGQIYPGDGDTNYNGKFKGRATLTADTSSSTAYMQLSSLTSEDSAVYFCARSITTVVGCAMDYWGQGTSVTVSSTRASTKGPSVFPLAPSSKSTSGGTAALGCLVKDYFPEPVTVSWNSGALTSGVHTFPAVLQSSGLYSLSSVVTVPSSSLGTQTYICNVNHKPSNTKVDKRVEPKSCGTQAQSDCSSSTVSPGVLAGIVMGDLVLTVLIALAVYFLGRLVPRGRGAAEAATRKQRITETESPYQELQGQRSDVYSDLNTQRPYYKSSRRVKFSRSADAPAYQQGQNQLYNELNLGRREEYDVLDKRRGRDPEMGGKPQRRKNPQEGLYNELQKDKMAEAYSEIGMKGERRRGKGHDGLYQGLSTATKDTYDALHMQALPPRRAKRSGSGVKQTLNFDLLKLAGDVESNPGPGHMATYEVLCEVARKLGTDDREVVLFLLNVFIPQPTLAQLIGALRALKEEGRLTFPLLAECLFRAGRRDLLRDLLHLDPRFLERHLAGTMSYFSPYQLTVLHVDGELCARDIRSLIFLSKDTIGSRSTPQTFLHWVYCMENLDLLGPTDVDALMSMLRSLSRVDLQRQVQTLMGLHLSGPSHSQHYRHTP

SEQ ID NO: 4539 - protein, 1180 aa, Artificial Sequence
  Synthetic Polypeptide
MALPVTALLLPLALLLHAARPDIQMTQSPSSLSASVGDRVTITCKASDHINNWLAWYQQKPGQAPKLLIYGATTLETGVPSRFSGSGSGTDYTLTISSLQPEDFATYYCQQSWNTPWTFGQGTKLEIKRLEGQPKANPTVTLFPPSSEELQANKATLVCLISDFYPGAVTVAWKADGSPVKAGVETTKPSKQSNNKYAASSYLSLTPEQWKSHRSYSCQVTHEGSTVEKTVAPTECSGSTTPGERSSLPAFYPGTSGSCSGCGSLSLPLLAGLVAADAVASLLIVGAVFLCARPRRSPAQEDGKVYINMPGRGSTSRVKFSRSADAPAYQQGQNQLYNELNLGRREEYDVLDKRRGRDPEMGGKPQRRKNPQEGLYNELQKDKMAEAYSEIGMKGERRRGKGHDGLYQGLSTATKDTYDALHMQALPPRRAKRSGSGATNFSLLKQAGDVEENPGPMDWIWRILFLVGAATGAHSFEQVQLQQPGAELVKPGASVKMSCKASGYAFSSYWINWMKQKPGQGLEWIGQIYPGDGDTNYNGKFKGRATLTADTSSSTAYMQLSSLTSEDSAVYFCARSITTVVGCAMDYWGQGTSVTVSSTRASTKGPSVFPLAPSSKSTSGGTAALGCLVKDYFPEPVTVSWNSGALTSGVHTFPAVLQSSGLYSLSSVVTVPSSSLGTQTYICNVNHKPSNTKVDKRVEPKSCGTQAQSDCSSSTVSPGVLAGIVMGDLVLTVLIALAVYFLGRLVPRGRGAAEAATRKQRITETESPYQELQGQRSDVYSDLNTQRPYYKSSRRVKFSRSADAPAYQQGQNQLYNELNLGRREEYDVLDKRRGRDPEMGGKPQRRKNPQEGLYNELQKDKMAEAYSEIGMKGERRRGKGHDGLYQGLSTATKDTYDALHMQALPPRRAKRSGSGVKQTLNFDLLKLAGDVESNPGPGHMSDSKEVPSLPFLRHLLEELDSHEDSLLLFLCHDAAPGCTTVTQALCSLSQQRKLTLAALVEMLYVLQRMDLLKSRFGLSKEGAEQLLGTSFLTRYRKLMVCVGEELDSSELRALRLFACNLNPSLSTALSESSRFVELVLALENVGLVSPSSVSVLADMLRTLRRLDLCQQLVEYEQQEQARYRYCYAASPSLPVRTLRRGHGASEHEQLCMPVQESSDSPELLRTPVQESSSDSPEQTT

SEQ ID NO: 4540 - protein, 1138 aa, Artificial Sequence
  Synthetic Polypeptide
MALPVTALLLPLALLLHAARPDIQMTQSPSSLSASVGDRVTITCKASDHINNWLAWYQQKPGQAPKLLIYGATTLETGVPSRFSGSGSGTDYTLTISSLQPEDFATYYCQQSWNTPWTFGQGTKLEIKRLEGQPKANPTVTLFPPSSEELQANKATLVCLISDFYPGAVTVAWKADGSPVKAGVETTKPSKQSNNKYAASSYLSLTPEQWKSHRSYSCQVTHEGSTVEKTVAPTECSGSTTPGERSSLPAFYPGTSGSCSGCGSLSLPLLAGLVAADAVASLLIVGAVFLCARPRRSPAQEDGKVYINMPGRGSTSRVKFSRSADAPAYQQGQNQLYNELNLGRREEYDVLDKRRGRDPEMGGKPQRRKNPQEGLYNELQKDKMAEAYSEIGMKGERRRGKGHDGLYQGLSTATKDTYDALHMQALPPRRAKRSGSGATNFSLLKQAGDVEENPGPMDWIWRILFLVGAATGAHSFEQVQLQQPGAELVKPGASVKMSCKASGYAFSSYWINWMKQKPGQGLEWIGQIYPGDGDTNYNGKFKGRATLTADTSSSTAYMQLSSLTSEDSAVYFCARSITTVVGCAMDYWGQGTSVTVSSTRASTKGPSVFPLAPSSKSTSGGTAALGCLVKDYFPEPVTVSWNSGALTSGVHTFPAVLQSSGLYSLSSVVTVPSSSLGTQTYICNVNHKPSNTKVDKRVEPKSCGTQAQSDCSSSTVSPGVLAGIVMGDLVLTVLIALAVYFLGRLVPRGRGAAEAATRKQRITETESPYQELQGQRSDVYSDLNTQRPYYKSSRRVKFSRSADAPAYQQGQNQLYNELNLGRREEYDVLDKRRGRDPEMGGKPQRRKNPQEGLYNELQKDKMAEAYSEIGMKGERRRGKGHDGLYQGLSTATKDTYDALHMQALPPRRAKRSGSGVKQTLNFDLLKLAGDVESNPGPGHMTEYKPTVRLATRDDVPRAVRTLAAAFADYPATRHTVDPDRHIERVTELQELFLTRVGLDIGKVWVADDGAAVAVWTTPESVEAGAVFAEIGPRMAELSGSRLAAQQQMEGLLAPHRPKEPAWFLATVGVSPDHQGKGLGSAVVLPGVEAAERAGVPAFLETSAPRNLPFYERLGFTVTADVEVPEGPRTWCMTRKPGA

SEQ ID NO: 4541 - protein, 1275 aa, Artificial Sequence
  Synthetic Polypeptide
MALPVTALLLPLALLLHAARPEVQLVESGGGLVQAGGSLRLSCAASGRTFSMGWFRQAPGKEREFVAAITYSGGSPYYADSVKGRFTISRDNAKNTVYLQMNSLKPEDTAVYYCAANPTYGSDWNAENWGQGTQVTVSSGTGGGGSGGGGSGGGGSEFDIQMTQSPSSLSASVGDRVTITCKASDHINNWLAWYQQKPGQAPKLLIYGATTLETGVPSRFSGSGSGTDYTLTISSLQPEDFATYYCQQSWNTPWTFGQGTKLEIKRLEGQPKANPTVTLFPPSSEELQANKATLVCLISDFYPGAVTVAWKADGSPVKAGVETTKPSKQSNNKYAASSYLSLTPEQWKSHRSYSCQVTHEGSTVEKTVAPTECSGSTTPGERSSLPAFYPGTSGSCSGCGSLSLPLLAGLVAADAVASLLIVGAVFLCARPRRSPAQEDGKVYINMPGRGSTSRVKFSRSADAPAYQQGQNQLYNELNLGRREEYDVLDKRRGRDPEMGGKPQRRKNPQEGLYNELQKDKMAEAYSEIGMKGERRRGKGHDGLYQGLSTATKDTYDALHMQALPPRRAKRSGSGATNFSLLKQAGDVEENPGPMDWIWRILFLVGAATGAHSFEQVQLQQPGAELVKPGASVKMSCKASGYAFSSYWINWMKQKPGQGLEWIGQIYPGDGDTNYNGKFKGRATLTADTSSSTAYMQLSSLTSEDSAVYFCARSITTVVGCAMDYWGQGTSVTVSSTRASTKGPSVFPLAPSSKSTSGGTAALGCLVKDYFPEPVTVSWNSGALTSGVHTFPAVLQSSGLYSLSSVVTVPSSSLGTQTYICNVNHKPSNTKVDKRVEPKSCGTQAQSDCSSSTVSPGVLAGIVMGDLVLTVLIALAVYFLGRLVPRGRGAAEAATRKQRITETESPYQELQGQRSDVYSDLNTQRPYYKSSRRVKFSRSADAPAYQQGQNQLYNELNLGRREEYDVLDKRRGRDPEMGGKPQRRKNPQEGLYNELQKDKMAEAYSEIGMKGERRRGKGHDGLYQGLSTATKDTYDALHMQALPPRRAKRSGSGVKQTLNFDLLKLAGDVESNPGPGHMTEYKPTVRLATRDDVPRAVRTLAAAFADYPATRHTVDPDRHIERVTELQELFLTRVGLDIGKVWVADDGAAVAVWTTPESVEAGAVFAEIGPRMAELSGSRLAAQQQMEGLLAPHRPKEPAWFLATVGVSPDHQGKGLGSAVVLPGVEAAERAGVPAFLETSAPRNLPFYERLGFTVTADVEVPEGPRTWCMTRKPGA

SEQ ID NO: 4542 - protein, 1412 aa, Artificial Sequence
  Synthetic Polypeptide
MALPVTALLLPLALLLHAARPEVQLVESGGGLVQAGGSLRLSCAASGRTFSMGWFRQAPGKEREFVAAITYSGGSPYYADSVKGRFTISRDNAKNTVYLQMNSLKPEDTAVYYCAANPTYGSDWNAENWGQGTQVTVSSGTGGGGSGGGGSGGGGSEFDIQMTQSPSSLSASVGDRVTITCKASDHINNWLAWYQQKPGQAPKLLIYGATTLETGVPSRFSGSGSGTDYTLTISSLQPEDFATYYCQQSWNTPWTFGQGTKLEIKRLEGQPKANPTVTLFPPSSEELQANKATLVCLISDFYPGAVTVAWKADGSPVKAGVETTKPSKQSNNKYAASSYLSLTPEQWKSHRSYSCQVTHEGSTVEKTVAPTECSGSTTPGERSSLPAFYPGTSGSCSGCGSLSLPLLAGLVAADAVASLLIVGAVFLCARPRRSPAQEDGKVYINMPGRGSTSRVKFSRSADAPAYQQGQNQLYNELNLGRREEYDVLDKRRGRDPEMGGKPQRRKNPQEGLYNELQKDKMAEAYSEIGMKGERRRGKGHDGLYQGLSTATKDTYDALHMQALPPRRAKRSGSGATNFSLLKQAGDVEENPGPMDWIWRILFLVGAATGAHSGPEVQLVESGGGLVQAGGSLRLSCAASGRTFTMGWFRQAPGKEREFVAAISLSPTLAYYADSVKGRFTISRDNAKNTVVLQMNSLKPEDTALYYCAADRKSVMSIRPDYWGQGTQVTVSSGSGGGGSGGGGSGGGGSFEQVQLQQPGAELVKPGASVKMSCKASGYAFSSYWINWMKQKPGQGLEWIGQIYPGDGDTNYNGKFKGRATLTADTSSSTAYMQLSSLTSEDSAVYFCARSITTVVGCAMDYWGQGTSVTVSSTRASTKGPSVFPLAPSSKSTSGGTAALGCLVKDYFPEPVTVSWNSGALTSGVHTFPAVLQSSGLYSLSSVVTVPSSSLGTQTYICNVNHKPSNTKVDKRVEPKSCGTQAQSDCSSSTVSPGVLAGIVMGDLVLTVLIALAVYFLGRLVPRGRGAAEAATRKQRITETESPYQELQGQRSDVYSDLNTQRPYYKSSRRVKFSRSADAPAYQQGQNQLYNELNLGRREEYDVLDKRRGRDPEMGGKPQRRKNPQEGLYNELQKDKMAEAYSEIGMKGERRRGKGHDGLYQGLSTATKDTYDALHMQALPPRRAKRSGSGVKQTLNFDLLKLAGDVESNPGPGHMTEYKPTVRLATRDDVPRAVRTLAAAFADYPATRHTVDPDRHIERVTELQELFLTRVGLDIGKVWVADDGAAVAVWTTPESVEAGAVFAEIGPRMAELSGSRLAAQQQMEGLLAPHRPKEPAWFLATVGVSPDHQGKGLGSAVVLPGVEAAERAGVPAFLETSAPRNLPFYERLGFTVTADVEVPEGPRTWCMTRKPGA

SEQ ID NO: 4543 - protein, 1145 aa, Artificial Sequence
  Synthetic Polypeptide
MALPVTALLLPLALLLHAARPEVQLVESGGGLVQAGGSLRLSCAASGRTFSMGWFRQAPGKEREFVAAITYSGGSPYYADSVKGRFTISRDNAKNTVYLQMNSLKPEDTAVYYCAANPTYGSDWNAENWGQGTQVTVSSLEGQPKANPTVTLFPPSSEELQANKATLVCLISDFYPGAVTVAWKADGSPVKAGVETTKPSKQSNNKYAASSYLSLTPEQWKSHRSYSCQVTHEGSTVEKTVAPTECSGSTTPGERSSLPAFYPGTSGSCSGCGSLSLPLLAGLVAADAVASLLIVGAVFLCARPRRSPAQEDGKVYINMPGRGSTSRVKFSRSADAPAYQQGQNQLYNELNLGRREEYDVLDKRRGRDPEMGGKPQRRKNPQEGLYNELQKDKMAEAYSEIGMKGERRRGKGHDGLYQGLSTATKDTYDALHMQALPPRRAKRSGSGATNFSLLKQAGDVEENPGPMDWIWRILFLVGAATGAHSGPEVQLVESGGGLVQAGGSLRLSCAASGRTFTMGWFRQAPGKEREFVAAISLSPTLAYYADSVKGRFTISRDNAKNTVVLQMNSLKPEDTALYYCAADRKSVMSIRPDYWGQGTQVTVSSTRASTKGPSVFPLAPSSKSTSGGTAALGCLVKDYFPEPVTVSWNSGALTSGVHTFPAVLQSSGLYSLSSVVTVPSSSLGTQTYICNVNHKPSNTKVDKRVEPKSCGTQAQSDCSSSTVSPGVLAGIVMGDLVLTVLIALAVYFLGRLVPRGRGAAEAATRKQRITETESPYQELQGQRSDVYSDLNTQRPYYKSSRRVKFSRSADAPAYQQGQNQLYNELNLGRREEYDVLDKRRGRDPEMGGKPQRRKNPQEGLYNELQKDKMAEAYSEIGMKGERRRGKGHDGLYQGLSTATKDTYDALHMQALPPRRAKRSGSGVKQTLNFDLLKLAGDVESNPGPGHMTEYKPTVRLATRDDVPRAVRTLAAAFADYPATRHTVDPDRHIERVTELQELFLTRVGLDIGKVWVADDGAAVAVWTTPESVEAGAVFAEIGPRMAELSGSRLAAQQQMEGLLAPHRPKEPAWFLATVGVSPDHQGKGLGSAVVLPGVEAAERAGVPAFLETSAPRNLPFYERLGFTVTADVEVPEGPRTWCMTRKPGA

SEQ ID NO: 4544 - protein, 1153 aa, Artificial Sequence
  Synthetic Polypeptide
MALPVTALLLPLALLLHAARPDIQMTQSPSSLSASVGDRVTITCKASDHINNWLAWYQQKPGQAPKLLIYGATTLETGVPSRFSGSGSGTDYTLTISSLQPEDFATYYCQQSWNTPWTFGQGTKLEIKRLEDLKNVFPPEVAVFEPSEAEISHTQKATLVCLATGFYPDHVELSWWVNGKEVHSGVSTDPQPLKEQPALNDSRYCLSSRLRVSATFWQNPRNHFRCQVQFYGLSENDEWTQDRAKPVTQIVSAEAWGRADCGSTTPGERSSLPAFYPGTSGSCSGCGSLSLPLLAGLVAADAVASLLIVGAVFLCARPRRSPAQEDGKVYINMPGRGSTSRVKFSRSADAPAYQQGQNQLYNELNLGRREEYDVLDKRRGRDPEMGGKPQRRKNPQEGLYNELQKDKMAEAYSEIGMKGERRRGKGHDGLYQGLSTATKDTYDALHMQALPPRRAKRSGSGATNFSLLKQAGDVEENPGPMDWIWRILFLVGAATGAHSFEQVQLQQPGAELVKPGASVKMSCKASGYAFSSYWINWMKQKPGQGLEWIGQIYPGDGDTNYNGKFKGRATLTADTSSSTAYMQLSSLTSEDSAVYFCARSITTVVGCAMDYWGQGTSVTVSSTRIQNPDPAVYQLRDSKSSDKSVCLFTDFDSQTNVSQSKDSDVYITDKTVLDMRSMDFKSNSAVAWSNKSDFACANAFNNSIIPEDTFFPSPESSCGTQAQSDCSSSTVSPGVLAGIVMGDLVLTVLIALAVYFLGRLVPRGRGAAEAATRKQRITETESPYQELQGQRSDVYSDLNTQRPYYKSSRRVKFSRSADAPAYQQGQNQLYNELNLGRREEYDVLDKRRGRDPEMGGKPQRRKNPQEGLYNELQKDKMAEAYSEIGMKGERRRGKGHDGLYQGLSTATKDTYDALHMQALPPRRAKRSGSGVKQTLNFDLLKLAGDVESNPGPGHMTEYKPTVRLATRDDVPRAVRTLAAAFADYPATRHTVDPDRHIERVTELQELFLTRVGLDIGKVWVADDGAAVAVWTTPESVEAGAVFAEIGPRMAELSGSRLAAQQQMEGLLAPHRPKEPAWFLATVGVSPDHQGKGLGSAVVLPGVEAAERAGVPAFLETSAPRNLPFYERLGFTVTADVEVPEGPRTWCMTRKPGA

SEQ ID NO: 4545 - protein, 1290 aa, Artificial Sequence
  Synthetic Polypeptide
MALPVTALLLPLALLLHAARPEVQLVESGGGLVQAGGSLRLSCAASGRTFSMGWFRQAPGKEREFVAAITYSGGSPYYADSVKGRFTISRDNAKNTVYLQMNSLKPEDTAVYYCAANPTYGSDWNAENWGQGTQVTVSSGTGGGGSGGGGSGGGGSEFDIQMTQSPSSLSASVGDRVTITCKASDHINNWLAWYQQKPGQAPKLLIYGATTLETGVPSRFSGSGSGTDYTLTISSLQPEDFATYYCQQSWNTPWTFGQGTKLEIKRLEDLKNVFPPEVAVFEPSEAEISHTQKATLVCLATGFYPDHVELSWWVNGKEVHSGVSTDPQPLKEQPALNDSRYCLSSRLRVSATFWQNPRNHFRCQVQFYGLSENDEWTQDRAKPVTQIVSAEAWGRADCGSTTPGERSSLPAFYPGTSGSCSGCGSLSLPLLAGLVAADAVASLLIVGAVFLCARPRRSPAQEDGKVYINMPGRGSTSRVKFSRSADAPAYQQGQNQLYNELNLGRREEYDVLDKRRGRDPEMGGKPQRRKNPQEGLYNELQKDKMAEAYSEIGMKGERRRGKGHDGLYQGLSTATKDTYDALHMQALPPRRAKRSGSGATNFSLLKQAGDVEENPGPMDWIWRILFLVGAATGAHSFEQVQLQQPGAELVKPGASVKMSCKASGYAFSSYWINWMKQKPGQGLEWIGQIYPGDGDTNYNGKFKGRATLTADTSSSTAYMQLSSLTSEDSAVYFCARSITTVVGCAMDYWGQGTSVTVSSTRIQNPDPAVYQLRDSKSSDKSVCLFTDFDSQTNVSQSKDSDVYITDKTVLDMRSMDFKSNSAVAWSNKSDFACANAFNNSIIPEDTFFPSPESSCGTQAQSDCSSSTVSPGVLAGIVMGDLVLTVLIALAVYFLGRLVPRGRGAAEAATRKQRITETESPYQELQGQRSDVYSDLNTQRPYYKSSRRVKFSRSADAPAYQQGQNQLYNELNLGRREEYDVLDKRRGRDPEMGGKPQRRKNPQEGLYNELQKDKMAEAYSEIGMKGERRRGKGHDGLYQGLSTATKDTYDALHMQALPPRRAKRSGSGVKQTLNFDLLKLAGDVESNPGPGHMTEYKPTVRLATRDDVPRAVRTLAAAFADYPATRHTVDPDRHIERVTELQELFLTRVGLDIGKVWVADDGAAVAVWTTPESVEAGAVFAEIGPRMAELSGSRLAAQQQMEGLLAPHRPKEPAWFLATVGVSPDHQGKGLGSAVVLPGVEAAERAGVPAFLETSAPRNLPFYERLGFTVTADVEVPEGPRTWCMTRKPGA

SEQ ID NO: 4546 - protein, 1427 aa, Artificial Sequence
  Synthetic Polypeptide
MALPVTALLLPLALLLHAARPEVQLVESGGGLVQAGGSLRLSCAASGRTFSMGWFRQAPGKEREFVAAITYSGGSPYYADSVKGRFTISRDNAKNTVYLQMNSLKPEDTAVYYCAANPTYGSDWNAENWGQGTQVTVSSGTGGGGSGGGGSGGGGSEFDIQMTQSPSSLSASVGDRVTITCKASDHINNWLAWYQQKPGQAPKLLIYGATTLETGVPSRFSGSGSGTDYTLTISSLQPEDFATYYCQQSWNTPWTFGQGTKLEIKRLEDLKNVFPPEVAVFEPSEAEISHTQKATLVCLATGFYPDHVELSWWVNGKEVHSGVSTDPQPLKEQPALNDSRYCLSSRLRVSATFWQNPRNHFRCQVQFYGLSENDEWTQDRAKPVTQIVSAEAWGRADCGSTTPGERSSLPAFYPGTSGSCSGCGSLSLPLLAGLVAADAVASLLIVGAVFLCARPRRSPAQEDGKVYINMPGRGSTSRVKFSRSADAPAYQQGQNQLYNELNLGRREEYDVLDKRRGRDPEMGGKPQRRKNPQEGLYNELQKDKMAEAYSEIGMKGERRRGKGHDGLYQGLSTATKDTYDALHMQALPPRRAKRSGSGATNFSLLKQAGDVEENPGPMDWIWRILFLVGAATGAHSGPEVQLVESGGGLVQAGGSLRLSCAASGRTFTMGWFRQAPGKEREFVAAISLSPTLAYYADSVKGRFTISRDNAKNTVVLQMNSLKPEDTALYYCAADRKSVMSIRPDYWGQGTQVTVSSGSGGGGSGGGGSGGGGSFEQVQLQQPGAELVKPGASVKMSCKASGYAFSSYWINWMKQKPGQGLEWIGQIYPGDGDTNYNGKFKGRATLTADTSSSTAYMQLSSLTSEDSAVYFCARSITTVVGCAMDYWGQGTSVTVSSTRIQNPDPAVYQLRDSKSSDKSVCLFTDFDSQTNVSQSKDSDVYITDKTVLDMRSMDFKSNSAVAWSNKSDFACANAFNNSIIPEDTFFPSPESSCGTQAQSDCSSSTVSPGVLAGIVMGDLVLTVLIALAVYFLGRLVPRGRGAAEAATRKQRITETESPYQELQGQRSDVYSDLNTQRPYYKSSRRVKFSRSADAPAYQQGQNQLYNELNLGRREEYDVLDKRRGRDPEMGGKPQRRKNPQEGLYNELQKDKMAEAYSEIGMKGERRRGKGHDGLYQGLSTATKDTYDALHMQALPPRRAKRSGSGVKQTLNFDLLKLAGDVESNPGPGHMTEYKPTVRLATRDDVPRAVRTLAAAFADYPATRHTVDPDRHIERVTELQELFLTRVGLDIGKVWVADDGAAVAVWTTPESVEAGAVFAEIGPRMAELSGSRLAAQQQMEGLLAPHRPKEPAWFLATVGVSPDHQGKGLGSAVVLPGVEAAERAGVPAFLETSAPRNLPFYERLGFTVTADVEVPEGPRTWCMTRKPGA

SEQ ID NO: 4547 - protein, 1160 aa, Artificial Sequence
  Synthetic Polypeptide
MALPVTALLLPLALLLHAARPEVQLVESGGGLVQAGGSLRLSCAASGRTFSMGWFRQAPGKEREFVAAITYSGGSPYYADSVKGRFTISRDNAKNTVYLQMNSLKPEDTAVYYCAANPTYGSDWNAENWGQGTQVTVSSLEDLKNVFPPEVAVFEPSEAEISHTQKATLVCLATGFYPDHVELSWWVNGKEVHSGVSTDPQPLKEQPALNDSRYCLSSRLRVSATFWQNPRNHFRCQVQFYGLSENDEWTQDRAKPVTQIVSAEAWGRADCGSTTPGERSSLPAFYPGTSGSCSGCGSLSLPLLAGLVAADAVASLLIVGAVFLCARPRRSPAQEDGKVYINMPGRGSTSRVKFSRSADAPAYQQGQNQLYNELNLGRREEYDVLDKRRGRDPEMGGKPQRRKNPQEGLYNELQKDKMAEAYSEIGMKGERRRGKGHDGLYQGLSTATKDTYDALHMQALPPRRAKRSGSGATNFSLLKQAGDVEENPGPMDWIWRILFLVGAATGAHSGPEVQLVESGGGLVQAGGSLRLSCAASGRTFTMGWFRQAPGKEREFVAAISLSPTLAYYADSVKGRFTISRDNAKNTVVLQMNSLKPEDTALYYCAADRKSVMSIRPDYWGQGTQVTVSSTRIQNPDPAVYQLRDSKSSDKSVCLFTDFDSQTNVSQSKDSDVYITDKTVLDMRSMDFKSNSAVAWSNKSDFACANAFNNSIIPEDTFFPSPESSCGTQAQSDCSSSTVSPGVLAGIVMGDLVLTVLIALAVYFLGRLVPRGRGAAEAATRKQRITETESPYQELQGQRSDVYSDLNTQRPYYKSSRRVKFSRSADAPAYQQGQNQLYNELNLGRREEYDVLDKRRGRDPEMGGKPQRRKNPQEGLYNELQKDKMAEAYSEIGMKGERRRGKGHDGLYQGLSTATKDTYDALHMQALPPRRAKRSGSGVKQTLNFDLLKLAGDVESNPGPGHMTEYKPTVRLATRDDVPRAVRTLAAAFADYPATRHTVDPDRHIERVTELQELFLTRVGLDIGKVWVADDGAAVAVWTTPESVEAGAVFAEIGPRMAELSGSRLAAQQQMEGLLAPHRPKEPAWFLATVGVSPDHQGKGLGSAVVLPGVEAAERAGVPAFLETSAPRNLPFYERLGFTVTADVEVPEGPRTWCMTRKPGA

SEQ ID NO: 4548 - protein, 585 aa, Artificial Sequence; identical to SEQ ID NO: 4431
  Synthetic Polypeptide

SEQ ID NO: 4549 - protein, 937 aa, Artificial Sequence
  Synthetic Polypeptide
MALPVTALLLPLALLLHAARPDIQMTQSPSSLSASVGDRVTITCKASDHINNWLAWYQQKPGQAPKLLIYGATTLETGVPSRFSGSGSGTDYTLTISSLQPEDFATYYCQQSWNTPWTFGQGTKLEIKRLEQAQSDCSSSTVSPGVLAGIVMGDLVLTVLIALAVYFLGRLVPRGRGAAEAATRKQRITETESPYQELQGQRSDVYSDLNTQRPYYKSTSRVKFSRSADAPAYQQGQNQLYNELNLGRREEYDVLDKRRGRDPEMGGKPQRRKNPQEGLYNELQKDKMAEAYSEIGMKGERRRGKGHDGLYQGLSTATKDTYDALHMQALPPRRAKRSGSGATNFSLLKQAGDVEENPGPMDWIWRILFLVGAATGAHSFEQVQLQQPGAELVKPGASVKMSCKASGYAFSSYWINWMKQKPGQGLEWIGQIYPGDGDTNYNGKFKGRATLTADTSSSTAYMQLSSLTSEDSAVYFCARSITTVVGCAMDYWGQGTSVTVSSTRQAQSDCSSSTVSPGVLAGIVMGDLVLTVLIALAVYFLGRLVPRGRGAAEAATRKQRITETESPYQELQGQRSDVYSDLNTQRPYYKSSRRVKFSRSADAPAYQQGQNQLYNELNLGRREEYDVLDKRRGRDPEMGGKPQRRKNPQEGLYNELQKDKMAEAYSEIGMKGERRRGKGHDGLYQGLSTATKDTYDALHMQALPPRRAKRSGSGVKQTLNFDLLKLAGDVESNPGPGHMTEYKPTVRLATRDDVPRAVRTLAAAFADYPATRHTVDPDRHIERVTELQELFLTRVGLDIGKVWVADDGAAVAVWTTPESVEAGAVFAEIGPRMAELSGSRLAAQQQMEGLLAPHRPKEPAWFLATVGVSPDHQGKGLGSAVVLPGVEAAERAGVPAFLETSAPRNLPFYERLGFTVTADVEVPEGPRTWCMTRKPGA

SEQ ID NO: 4550 - protein, 989 aa, Artificial Sequence
  Synthetic Polypeptide
MALPVTALLLPLALLLHAARPACEVQLLESGGGLIQPGGSLRLSCAASGFTFSSHAMTWVRQAPGKGLEWVSAISGSGDYTHYADSVKGRFTISRDNSKNTVYLQMNSLRAEDSAVYYCAKDEDGGSLLGHRGQGTLVTVSSGTGGGGSGGGGSGGGGSEFGSLEQAQSDCSSSTVSPGVLAGIVMGDLVLTVLIALAVYFLGRLVPRGRGAAEAATRKQRITETESPYQELQGQRSDVYSDLNTQRPYYKSTSRVKFSRSADAPAYQQGQNQLYNELNLGRREEYDVLDKRRGRDPEMGGKPQRRKNPQEGLYNELQKDKMAEAYSEIGMKGERRRGKGHDGLYQGLSTATKDTYDALHMQALPPRRAKRSGSGATNFSLLKQAGDVEENPGPMDWIWRILFLVGAATGAHSGPEVQLVESGGGLVQAGGSLRLSCAASGRTFSMGWFRQAPGKEREFVAAITYSGGSPYYADSVKGRFTISRDNAKNTVYLQMNSLKPEDTAVYYCAANPTYGSDWNAENWGQGTQVTVSSGSGGGGSGGGGSGGGGSFEGSTRQAQSDCSSSTVSPGVLAGIVMGDLVLTVLIALAVYFLGRLVPRGRGAAEAATRKQRITETESPYQELQGQRSDVYSDLNTQRPYYKSSRRVKFSRSADAPAYQQGQNQLYNELNLGRREEYDVLDKRRGRDPEMGGKPQRRKNPQEGLYNELQKDKMAEAYSEIGMKGERRRGKGHDGLYQGLSTATKDTYDALHMQALPPRRAKRSGSGVKQTLNFDLLKLAGDVESNPGPGHMTEYKPTVRLATRDDVPRAVRTLAAAFADYPATRHTVDPDRHIERVTELQELFLTRVGLDIGKVWVADDGAAVAVWTTPESVEAGAVFAEIGPRMAELSGSRLAAQQQMEGLLAPHRPKEPAWFLATVGVSPDHQGKGLGSAVVLPGVEAAERAGVPAFLETSAPRNLPFYERLGFTVTADVEVPEGPRTWCMTRKPGA

SEQ ID NO: 4551 - protein, 1139 aa, Artificial Sequence
  Synthetic Polypeptide
MALPVTALLLPLALLLHAARPDIQMTQSPSSLSASVGDRVTITCKASDHINNWLAWYQQKPGQAPKLLIYGATTLETGVPSRFSGSGSGTDYTLTISSLQPEDFATYYCQQSWNTPWTFGQGTKLEIKRLEGQPKANPTVTLFPPSSEELQANKATLVCLISDFYPGAVTVAWKADGSPVKAGVETTKPSKQSNNKYAASSYLSLTPEQWKSHRSYSCQVTHEGSTVEKTVAPTECSGSQAQSDCSSSTVSPGVLAGIVMGDLVLTVLIALAVYFLGRLVPRGRGAAEAATRKQRITETESPYQELQGQRSDVYSDLNTQRPYYKSTSRVKFSRSADAPAYQQGQNQLYNELNLGRREEYDVLDKRRGRDPEMGGKPQRRKNPQEGLYNELQKDKMAEAYSEIGMKGERRRGKGHDGLYQGLSTATKDTYDALHMQALPPRRAKRSGSGATNFSLLKQAGDVEENPGPMDWIWRILFLVGAATGAHSFEQVQLQQPGAELVKPGASVKMSCKASGYAFSSYWINWMKQKPGQGLEWIGQIYPGDGDTNYNGKFKGRATLTADTSSSTAYMQLSSLTSEDSAVYFCARSITTVVGCAMDYWGQGTSVTVSSTRASTKGPSVFPLAPSSKSTSGGTAALGCLVKDYFPEPVTVSWNSGALTSGVHTFPAVLQSSGLYSLSSVVTVPSSSLGTQTYICNVNHKPSNTKVDKRVEPKSCGTQAQSDCSSSTVSPGVLAGIVMGDLVLTVLIALAVYFLGRLVPRGRGAAEAATRKQRITETESPYQELQGQRSDVYSDLNTQRPYYKSSRRVKFSRSADAPAYQQGQNQLYNELNLGRREEYDVLDKRRGRDPEMGGKPQRRKNPQEGLYNELQKDKMAEAYSEIGMKGERRRGKGHDGLYQGLSTATKDTYDALHMQALPPRRAKRSGSGVKQTLNFDLLKLAGDVESNPGPGHMATYEVLCEVARKLGTDDREVVLFLLNVFIPQPTLAQLIGALRALKEEGRLTFPLLAECLFRAGRRDLLRDLLHLDPRFLERHLAGTMSYFSPYQLTVLHVDGELCARDIRSLIFLSKDTIGSRSTPQTFLHWVYCMENLDLLGPTDVDALMSMLRSLSRVDLQRQVQTLMGLHLSGPSHSQHYRHTP

SEQ ID NO: 4552 - protein, 1192 aa, Artificial Sequence
  Synthetic Polypeptide
MALPVTALLLPLALLLHAARPDIQMTQSPSSLSASVGDRVTITCKASDHINNWLAWYQQKPGQAPKLLIYGATTLETGVPSRFSGSGSGTDYTLTISSLQPEDFATYYCQQSWNTPWTFGQGTKLEIKRLEGQPKANPTVTLFPPSSEELQANKATLVCLISDFYPGAVTVAWKADGSPVKAGVETTKPSKQSNNKYAASSYLSLTPEQWKSHRSYSCQVTHEGSTVEKTVAPTECSGSQAQSDCSSSTVSPGVLAGIVMGDLVLTVLIALAVYFLGRLVPRGRGAAEAATRKQRITETESPYQELQGQRSDVYSDLNTQRPYYKSTSRVKFSRSADAPAYQQGQNQLYNELNLGRREEYDVLDKRRGRDPEMGGKPQRRKNPQEGLYNELQKDKMAEAYSEIGMKGERRRGKGHDGLYQGLSTATKDTYDALHMQALPPRRAKRSGSGATNFSLLKQAGDVEENPGPMDWIWRILFLVGAATGAHSFEQVQLQQPGAELVKPGASVKMSCKASGYAFSSYWINWMKQKPGQGLEWIGQIYPGDGDTNYNGKFKGRATLTADTSSSTAYMQLSSLTSEDSAVYFCARSITTVVGCAMDYWGQGTSVTVSSTRASTKGPSVFPLAPSSKSTSGGTAALGCLVKDYFPEPVTVSWNSGALTSGVHTFPAVLQSSGLYSLSSVVTVPSSSLGTQTYICNVNHKPSNTKVDKRVEPKSCGTQAQSDCSSSTVSPGVLAGIVMGDLVLTVLIALAVYFLGRLVPRGRGAAEAATRKQRITETESPYQELQGQRSDVYSDLNTQRPYYKSSRRVKFSRSADAPAYQQGQNQLYNELNLGRREEYDVLDKRRGRDPEMGGKPQRRKNPQEGLYNELQKDKMAEAYSEIGMKGERRRGKGHDGLYQGLSTATKDTYDALHMQALPPRRAKRSGSGVKQTLNFDLLKLAGDVESNPGPGHMSDSKEVPSLPFLRHLLEELDSHEDSLLLFLCHDAAPGCTTVTQALCSLSQQRKLTLAALVEMLYVLQRMDLLKSRFGLSKEGAEQLLGTSFLTRYRKLMVCVGEELDSSELRALRLFACNLNPSLSTALSESSRFVELVLALENVGLVSPSSVSVLADMLRTLRRLDLCQQLVEYEQQEQARYRYCYAASPSLPVRTLRRGHGASEHEQLCMPVQESSDSPELLRTPVQESSSDSPEQTT

SEQ ID NO: 4553 - protein, 1150 aa, Artificial Sequence
  Synthetic Polypeptide
MALPVTALLLPLALLLHAARPDIQMTQSPSSLSASVGDRVTITCKASDHINNWLAWYQQKPGQAPKLLIYGATTLETGVPSRFSGSGSGTDYTLTISSLQPEDFATYYCQQSWNTPWTFGQGTKLEIKRLEGQPKANPTVTLFPPSSEELQANKATLVCLISDFYPGAVTVAWKADGSPVKAGVETTKPSKQSNNKYAASSYLSLTPEQWKSHRSYSCQVTHEGSTVEKTVAPTECSGSQAQSDCSSSTVSPGVLAGIVMGDLVLTVLIALAVYFLGRLVPRGRGAAEAATRKQRITETESPYQELQGQRSDVYSDLNTQRPYYKSTSRVKFSRSADAPAYQQGQNQLYNELNLGRREEYDVLDKRRGRDPEMGGKPQRRKNPQEGLYNELQKDKMAEAYSEIGMKGERRRGKGHDGLYQGLSTATKDTYDALHMQALPPRRAKRSGSGATNFSLLKQAGDVEENPGPMDWIWRILFLVGAATGAHSFEQVQLQQPGAELVKPGASVKMSCKASGYAFSSYWINWMKQKPGQGLEWIGQIYPGDGDTNYNGKFKGRATLTADTSSSTAYMQLSSLTSEDSAVYFCARSITTVVGCAMDYWGQGTSVTVSSTRASTKGPSVFPLAPSSKSTSGGTAALGCLVKDYFPEPVTVSWNSGALTSGVHTFPAVLQSSGLYSLSSVVTVPSSSLGTQTYICNVNHKPSNTKVDKRVEPKSCGTQAQSDCSSSTVSPGVLAGIVMGDLVLTVLIALAVYFLGRLVPRGRGAAEAATRKQRITETESPYQELQGQRSDVYSDLNTQRPYYKSSRRVKFSRSADAPAYQQGQNQLYNELNLGRREEYDVLDKRRGRDPEMGGKPQRRKNPQEGLYNELQKDKMAEAYSEIGMKGERRRGKGHDGLYQGLSTATKDTYDALHMQALPPRRAKRSGSGVKQTLNFDLLKLAGDVESNPGPGHMTEYKPTVRLATRDDVPRAVRTLAAAFADYPATRHTVDPDRHIERVTELQELFLTRVGLDIGKVWVADDGAAVAVWTTPESVEAGAVFAEIGPRMAELSGSRLAAQQQMEGLLAPHRPKEPAWFLATVGVSPDHQGKGLGSAVVLPGVEAAERAGVPAFLETSAPRNLPFYERLGFTVTADVEVPEGPRTWCMTRKPGA

SEQ ID NO: 4554 - protein, 1287 aa, Artificial Sequence
  Synthetic Polypeptide
MALPVTALLLPLALLLHAARPEVQLVESGGGLVQAGGSLRLSCAASGRTFSMGWFRQAPGKEREFVAAITYSGGSPYYADSVKGRFTISRDNAKNTVYLQMNSLKPEDTAVYYCAANPTYGSDWNAENWGQGTQVTVSSGTGGGGSGGGGSGGGGSEFDIQMTQSPSSLSASVGDRVTITCKASDHINNWLAWYQQKPGQAPKLLIYGATTLETGVPSRFSGSGSGTDYTLTISSLQPEDFATYYCQQSWNTPWTFGQGTKLEIKRLEGQPKANPTVTLFPPSSEELQANKATLVCLISDFYPGAVTVAWKADGSPVKAGVETTKPSKQSNNKYAASSYLSLTPEQWKSHRSYSCQVTHEGSTVEKTVAPTECSGSQAQSDCSSSTVSPGVLAGIVMGDLVLTVLIALAVYFLGRLVPRGRGAAEAATRKQRITETESPYQELQGQRSDVYSDLNTQRPYYKSTSRVKFSRSADAPAYQQGQNQLYNELNLGRREEYDVLDKRRGRDPEMGGKPQRRKNPQEGLYNELQKDKMAEAYSEIGMKGERRRGKGHDGLYQGLSTATKDTYDALHMQALPPRRAKRSGSGATNFSLLKQAGDVEENPGPMDWIWRILFLVGAATGAHSFEQVQLQQPGAELVKPGASVKMSCKASGYAFSSYWINWMKQKPGQGLEWIGQIYPGDGDTNYNGKFKGRATLTADTSSSTAYMQLSSLTSEDSAVYFCARSITTVVGCAMDYWGQGTSVTVSSTRASTKGPSVFPLAPSSKSTSGGTAALGCLVKDYFPEPVTVSWNSGALTSGVHTFPAVLQSSGLYSLSSVVTVPSSSLGTQTYICNVNHKPSNTKVDKRVEPKSCGTQAQSDCSSSTVSPGVLAGIVMGDLVLTVLIALAVYFLGRLVPRGRGAAEAATRKQRITETESPYQELQGQRSDVYSDLNTQRPYYKSSRRVKFSRSADAPAYQQGQNQLYNELNLGRREEYDVLDKRRGRDPEMGGKPQRRKNPQEGLYNELQKDKMAEAYSEIGMKGERRRGKGHDGLYQGLSTATKDTYDALHMQALPPRRAKRSGSGVKQTLNFDLLKLAGDVESNPGPGHMTEYKPTVRLATRDDVPRAVRTLAAAFADYPATRHTVDPDRHIERVTELQELFLTRVGLDIGKVWVADDGAAVAVWTTPESVEAGAVFAEIGPRMAELSGSRLAAQQQMEGLLAPHRPKEPAWFLATVGVSPDHQGKGLGSAVVLPGVEAAERAGVPAFLETSAPRNLPFYERLGFTVTADVEVPEGPRTWCMTRKPGA

SEQ ID NO: 4555 - protein, 1424 aa, Artificial Sequence
  Synthetic Polypeptide
MALPVTALLLPLALLLHAARPEVQLVESGGGLVQAGGSLRLSCAASGRTFSMGWFRQAPGKEREFVAAITYSGGSPYYADSVKGRFTISRDNAKNTVYLQMNSLKPEDTAVYYCAANPTYGSDWNAENWGQGTQVTVSSGTGGGGSGGGGSGGGGSEFDIQMTQSPSSLSASVGDRVTITCKASDHINNWLAWYQQKPGQAPKLLIYGATTLETGVPSRFSGSGSGTDYTLTISSLQPEDFATYYCQQSWNTPWTFGQGTKLEIKRLEGQPKANPTVTLFPPSSEELQANKATLVCLISDFYPGAVTVAWKADGSPVKAGVETTKPSKQSNNKYAASSYLSLTPEQWKSHRSYSCQVTHEGSTVEKTVAPTECSGSQAQSDCSSSTVSPGVLAGIVMGDLVLTVLIALAVYFLGRLVPRGRGAAEAATRKQRITETESPYQELQGQRSDVYSDLNTQRPYYKSTSRVKFSRSADAPAYQQGQNQLYNELNLGRREEYDVLDKRRGRDPEMGGKPQRRKNPQEGLYNELQKDKMAEAYSEIGMKGERRRGKGHDGLYQGLSTATKDTYDALHMQALPPRRAKRSGSGATNFSLLKQAGDVEENPGPMDWIWRILFLVGAATGAHSGPEVQLVESGGGLVQAGGSLRLSCAASGRTFTMGWFRQAPGKEREFVAAISLSPTLAYYADSVKGRFTISRDNAKNTVVLQMNSLKPEDTALYYCAADRKSVMSIRPDYWGQGTQVTVSSGSGGGGSGGGGSGGGGSFEQVQLQQPGAELVKPGASVKMSCKASGYAFSSYWINWMKQKPGQGLEWIGQIYPGDGDTNYNGKFKGRATLTADTSSSTAYMQLSSLTSEDSAVYFCARSITTVVGCAMDYWGQGTSVTVSSTRASTKGPSVFPLAPSSKSTSGGTAALGCLVKDYFPEPVTVSWNSGALTSGVHTFPAVLQSSGLYSLSSVVTVPSSSLGTQTYICNVNHKPSNTKVDKRVEPKSCGTQAQSDCSSSTVSPGVLAGIVMGDLVLTVLIALAVYFLGRLVPRGRGAAEAATRKQRITETESPYQELQGQRSDVYSDLNTQRPYYKSSRRVKFSRSADAPAYQQGQNQLYNELNLGRREEYDVLDKRRGRDPEMGGKPQRRKNPQEGLYNELQKDKMAEAYSEIGMKGERRRGKGHDGLYQGLSTATKDTYDALHMQALPPRRAKRSGSGVKQTLNFDLLKLAGDVESNPGPGHMTEYKPTVRLATRDDVPRAVRTLAAAFADYPATRHTVDPDRHIERVTELQELFLTRVGLDIGKVWVADDGAAVAVWTTPESVEAGAVFAEIGPRMAELSGSRLAAQQQMEGLLAPHRPKEPAWFLATVGVSPDHQGKGLGSAVVLPGVEAAERAGVPAFLETSAPRNLPFYERLGFTVTADVEVPEGPRTWCMTRKPGA

SEQ ID NO: 4556 - protein, 1157 aa, Artificial Sequence
  Synthetic Polypeptide
MALPVTALLLPLALLLHAARPEVQLVESGGGLVQAGGSLRLSCAASGRTFSMGWFRQAPGKEREFVAAITYSGGSPYYADSVKGRFTISRDNAKNTVYLQMNSLKPEDTAVYYCAANPTYGSDWNAENWGQGTQVTVSSLEGQPKANPTVTLFPPSSEELQANKATLVCLISDFYPGAVTVAWKADGSPVKAGVETTKPSKQSNNKYAASSYLSLTPEQWKSHRSYSCQVTHEGSTVEKTVAPTECSGSQAQSDCSSSTVSPGVLAGIVMGDLVLTVLIALAVYFLGRLVPRGRGAAEAATRKQRITETESPYQELQGQRSDVYSDLNTQRPYYKSTSRVKFSRSADAPAYQQGQNQLYNELNLGRREEYDVLDKRRGRDPEMGGKPQRRKNPQEGLYNELQKDKMAEAYSEIGMKGERRRGKGHDGLYQGLSTATKDTYDALHMQALPPRRAKRSGSGATNFSLLKQAGDVEENPGPMDWIWRILFLVGAATGAHSGPEVQLVESGGGLVQAGGSLRLSCAASGRTFTMGWFRQAPGKEREFVAAISLSPTLAYYADSVKGRFTISRDNAKNTVVLQMNSLKPEDTALYYCAADRKSVMSIRPDYWGQGTQVTVSSTRASTKGPSVFPLAPSSKSTSGGTAALGCLVKDYFPEPVTVSWNSGALTSGVHTFPAVLQSSGLYSLSSVVTVPSSSLGTQTYICNVNHKPSNTKVDKRVEPKSCGTQAQSDCSSSTVSPGVLAGIVMGDLVLTVLIALAVYFLGRLVPRGRGAAEAATRKQRITETESPYQELQGQRSDVYSDLNTQRPYYKSSRRVKFSRSADAPAYQQGQNQLYNELNLGRREEYDVLDKRRGRDPEMGGKPQRRKNPQEGLYNELQKDKMAEAYSEIGMKGERRRGKGHDGLYQGLSTATKDTYDALHMQALPPRRAKRSGSGVKQTLNFDLLKLAGDVESNPGPGHMTEYKPTVRLATRDDVPRAVRTLAAAFADYPATRHTVDPDRHIERVTELQELFLTRVGLDIGKVWVADDGAAVAVWTTPESVEAGAVFAEIGPRMAELSGSRLAAQQQMEGLLAPHRPKEPAWFLATVGVSPDHQGKGLGSAVVLPGVEAAERAGVPAFLETSAPRNLPFYERLGFTVTADVEVPEGPRTWCMTRKPGA

SEQ ID NO: 4557 - protein, 1165 aa, Artificial Sequence
  Synthetic Polypeptide
MALPVTALLLPLALLLHAARPDIQMTQSPSSLSASVGDRVTITCKASDHINNWLAWYQQKPGQAPKLLIYGATTLETGVPSRFSGSGSGTDYTLTISSLQPEDFATYYCQQSWNTPWTFGQGTKLEIKRLEDLKNVFPPEVAVFEPSEAEISHTQKATLVCLATGFYPDHVELSWWVNGKEVHSGVSTDPQPLKEQPALNDSRYCLSSRLRVSATFWQNPRNHFRCQVQFYGLSENDEWTQDRAKPVTQIVSAEAWGRADCGSQAQSDCSSSTVSPGVLAGIVMGDLVLTVLIALAVYFLGRLVPRGRGAAEAATRKQRITETESPYQELQGQRSDVYSDLNTQRPYYKSTSRVKFSRSADAPAYQQGQNQLYNELNLGRREEYDVLDKRRGRDPEMGGKPQRRKNPQEGLYNELQKDKMAEAYSEIGMKGERRRGKGHDGLYQGLSTATKDTYDALHMQALPPRRAKRSGSGATNFSLLKQAGDVEENPGPMDWIWRILFLVGAATGAHSFEQVQLQQPGAELVKPGASVKMSCKASGYAFSSYWINWMKQKPGQGLEWIGQIYPGDGDTNYNGKFKGRATLTADTSSSTAYMQLSSLTSEDSAVYFCARSITTVVGCAMDYWGQGTSVTVSSTRIQNPDPAVYQLRDSKSSDKSVCLFTDFDSQTNVSQSKDSDVYITDKTVLDMRSMDFKSNSAVAWSNKSDFACANAFNNSIIPEDTFFPSPESSCGTQAQSDCSSSTVSPGVLAGIVMGDLVLTVLIALAVYFLGRLVPRGRGAAEAATRKQRITETESPYQELQGQRSDVYSDLNTQRPYYKSSRRVKFSRSADAPAYQQGQNQLYNELNLGRREEYDVLDKRRGRDPEMGGKPQRRKNPQEGLYNELQKDKMAEAYSEIGMKGERRRGKGHDGLYQGLSTATKDTYDALHMQALPPRRAKRSGSGVKQTLNFDLLKLAGDVESNPGPGHMTEYKPTVRLATRDDVPRAVRTLAAAFADYPATRHTVDPDRHIERVTELQELFLTRVGLDIGKVWVADDGAAVAVWTTPESVEAGAVFAEIGPRMAELSGSRLAAQQQMEGLLAPHRPKEPAWFLATVGVSPDHQGKGLGSAVVLPGVEAAERAGVPAFLETSAPRNLPFYERLGFTVTADVEVPEGPRTWCMTRKPGA

SEQ ID NO: 4558 - protein, 1302 aa, Artificial Sequence
  Synthetic Polypeptide
MALPVTALLLPLALLLHAARPEVQLVESGGGLVQAGGSLRLSCAASGRTFSMGWFRQAPGKEREFVAAITYSGGSPYYADSVKGRFTISRDNAKNTVYLQMNSLKPEDTAVYYCAANPTYGSDWNAENWGQGTQVTVSSGTGGGGSGGGGSGGGGSEFDIQMTQSPSSLSASVGDRVTITCKASDHINNWLAWYQQKPGQAPKLLIYGATTLETGVPSRFSGSGSGTDYTLTISSLQPEDFATYYCQQSWNTPWTFGQGTKLEIKRLEDLKNVFPPEVAVFEPSEAEISHTQKATLVCLATGFYPDHVELSWWVNGKEVHSGVSTDPQPLKEQPALNDSRYCLSSRLRVSATFWQNPRNHFRCQVQFYGLSENDEWTQDRAKPVTQIVSAEAWGRADCGSQAQSDCSSSTVSPGVLAGIVMGDLVLTVLIALAVYFLGRLVPRGRGAAEAATRKQRITETESPYQELQGQRSDVYSDLNTQRPYYKSTSRVKFSRSADAPAYQQGQNQLYNELNLGRREEYDVLDKRRGRDPEMGGKPQRRKNPQEGLYNELQKDKMAEAYSEIGMKGERRRGKGHDGLYQGLSTATKDTYDALHMQALPPRRAKRSGSGATNFSLLKQAGDVEENPGPMDWIWRILFLVGAATGAHSFEQVQLQQPGAELVKPGASVKMSCKASGYAFSSYWINWMKQKPGQGLEWIGQIYPGDGDTNYNGKFKGRATLTADTSSSTAYMQLSSLTSEDSAVYFCARSITTVVGCAMDYWGQGTSVTVSSTRIQNPDPAVYQLRDSKSSDKSVCLFTDFDSQTNVSQSKDSDVYITDKTVLDMRSMDFKSNSAVAWSNKSDFACANAFNNSIIPEDTFFPSPESSCGTQAQSDCSSSTVSPGVLAGIVMGDLVLTVLIALAVYFLGRLVPRGRGAAEAATRKQRITETESPYQELQGQRSDVYSDLNTQRPYYKSSRRVKFSRSADAPAYQQGQNQLYNELNLGRREEYDVLDKRRGRDPEMGGKPQRRKNPQEGLYNELQKDKMAEAYSEIGMKGERRRGKGHDGLYQGLSTATKDTYDALHMQALPPRRAKRSGSGVKQTLNFDLLKLAGDVESNPGPGHMTEYKPTVRLATRDDVPRAVRTLAAAFADYPATRHTVDPDRHIERVTELQELFLTRVGLDIGKVWVADDGAAVAVWTTPESVEAGAVFAEIGPRMAELSGSRLAAQQQMEGLLAPHRPKEPAWFLATVGVSPDHQGKGLGSAVVLPGVEAAERAGVPAFLETSAPRNLPFYERLGFTVTADVEVPEGPRTWCMTRKPGA

SEQ ID NO: 4559 - protein, 1439 aa, Artificial Sequence
  Synthetic Polypeptide
MALPVTALLLPLALLLHAARPEVQLVESGGGLVQAGGSLRLSCAASGRTFSMGWFRQAPGKEREFVAAITYSGGSPYYADSVKGRFTISRDNAKNTVYLQMNSLKPEDTAVYYCAANPTYGSDWNAENWGQGTQVTVSSGTGGGGSGGGGSGGGGSEFDIQMTQSPSSLSASVGDRVTITCKASDHINNWLAWYQQKPGQAPKLLIYGATTLETGVPSRFSGSGSGTDYTLTISSLQPEDFATYYCQQSWNTPWTFGQGTKLEIKRLEDLKNVFPPEVAVFEPSEAEISHTQKATLVCLATGFYPDHVELSWWVNGKEVHSGVSTDPQPLKEQPALNDSRYCLSSRLRVSATFWQNPRNHFRCQVQFYGLSENDEWTQDRAKPVTQIVSAEAWGRADCGSQAQSDCSSSTVSPGVLAGIVMGDLVLTVLIALAVYFLGRLVPRGRGAAEAATRKQRITETESPYQELQGQRSDVYSDLNTQRPYYKSTSRVKFSRSADAPAYQQGQNQLYNELNLGRREEYDVLDKRRGRDPEMGGKPQRRKNPQEGLYNELQKDKMAEAYSEIGMKGERRRGKGHDGLYQGLSTATKDTYDALHMQALPPRRAKRSGSGATNFSLLKQAGDVEENPGPMDWIWRILFLVGAATGAHSGPEVQLVESGGGLVQAGGSLRLSCAASGRTFTMGWFRQAPGKEREFVAAISLSPTLAYYADSVKGRFTISRDNAKNTVVLQMNSLKPEDTALYYCAADRKSVMSIRPDYWGQGTQVTVSSGSGGGGSGGGGSGGGGSFEQVQLQQPGAELVKPGASVKMSCKASGYAFSSYWINWMKQKPGQGLEWIGQIYPGDGDTNYNGKFKGRATLTADTSSSTAYMQLSSLTSEDSAVYFCARSITTVVGCAMDYWGQGTSVTVSSTRIQNPDPAVYQLRDSKSSDKSVCLFTDFDSQTNVSQSKDSDVYITDKTVLDMRSMDFKSNSAVAWSNKSDFACANAFNNSIIPEDTFFPSPESSCGTQAQSDCSSSTVSPGVLAGIVMGDLVLTVLIALAVYFLGRLVPRGRGAAEAATRKQRITETESPYQELQGQRSDVYSDLNTQRPYYKSSRRVKFSRSADAPAYQQGQNQLYNELNLGRREEYDVLDKRRGRDPEMGGKPQRRKNPQEGLYNELQKDKMAEAYSEIGMKGERRRGKGHDGLYQGLSTATKDTYDALHMQALPPRRAKRSGSGVKQTLNFDLLKLAGDVESNPGPGHMTEYKPTVRLATRDDVPRAVRTLAAAFADYPATRHTVDPDRHIERVTELQELFLTRVGLDIGKVWVADDGAAVAVWTTPESVEAGAVFAEIGPRMAELSGSRLAAQQQMEGLLAPHRPKEPAWFLATVGVSPDHQGKGLGSAVVLPGVEAAERAGVPAFLETSAPRNLPFYERLGFTVTADVEVPEGPRTWCMTRKPGA

SEQ ID NO: 4560 - protein, 1172 aa, Artificial Sequence
  Synthetic Polypeptide
MALPVTALLLPLALLLHAARPEVQLVESGGGLVQAGGSLRLSCAASGRTFSMGWFRQAPGKEREFVAAITYSGGSPYYADSVKGRFTISRDNAKNTVYLQMNSLKPEDTAVYYCAANPTYGSDWNAENWGQGTQVTVSSLEDLKNVFPPEVAVFEPSEAEISHTQKATLVCLATGFYPDHVELSWWVNGKEVHSGVSTDPQPLKEQPALNDSRYCLSSRLRVSATFWQNPRNHFRCQVQFYGLSENDEWTQDRAKPVTQIVSAEAWGRADCGSQAQSDCSSSTVSPGVLAGIVMGDLVLTVLIALAVYFLGRLVPRGRGAAEAATRKQRITETESPYQELQGQRSDVYSDLNTQRPYYKSTSRVKFSRSADAPAYQQGQNQLYNELNLGRREEYDVLDKRRGRDPEMGGKPQRRKNPQEGLYNELQKDKMAEAYSEIGMKGERRRGKGHDGLYQGLSTATKDTYDALHMQALPPRRAKRSGSGATNFSLLKQAGDVEENPGPMDWIWRILFLVGAATGAHSGPEVQLVESGGGLVQAGGSLRLSCAASGRTFTMGWFRQAPGKEREFVAAISLSPTLAYYADSVKGRFTISRDNAKNTVVLQMNSLKPEDTALYYCAADRKSVMSIRPDYWGQGTQVTVSSTRIQNPDPAVYQLRDSKSSDKSVCLFTDFDSQTNVSQSKDSDVYITDKTVLDMRSMDFKSNSAVAWSNKSDFACANAFNNSIIPEDTFFPSPESSCGTQAQSDCSSSTVSPGVLAGIVMGDLVLTVLIALAVYFLGRLVPRGRGAAEAATRKQRITETESPYQELQGQRSDVYSDLNTQRPYYKSSRRVKFSRSADAPAYQQGQNQLYNELNLGRREEYDVLDKRRGRDPEMGGKPQRRKNPQEGLYNELQKDKMAEAYSEIGMKGERRRGKGHDGLYQGLSTATKDTYDALHMQALPPRRAKRSGSGVKQTLNFDLLKLAGDVESNPGPGHMTEYKPTVRLATRDDVPRAVRTLAAAFADYPATRHTVDPDRHIERVTELQELFLTRVGLDIGKVWVADDGAAVAVWTTPESVEAGAVFAEIGPRMAELSGSRLAAQQQMEGLLAPHRPKEPAWFLATVGVSPDHQGKGLGSAVVLPGVEAAERAGVPAFLETSAPRNLPFYERLGFTVTADVEVPEGPRTWCMTRKPGA

SEQ ID NO: 4561 - protein, 597 aa, Artificial Sequence
  Synthetic Polypeptide
MALPVTALLLPLALLLHAARPACEVQLLESGGGLIQPGGSLRLSCAASGFTFSSHAMTWVRQAPGKGLEWVSAISGSGDYTHYADSVKGRFTISRDNSKNTVYLQMNSLRAEDSAVYYCAKDEDGGSLLGHRGQGTLVTVSSGTGGGGSGGGGSGGGGSEFGSLEQAQSDCSSSTVSPGVLAGIVMGDLVLTVLIALAVYFLGRLVPRGRGAAEAATRKQRITETESPYQELQGQRSDVYSDLNTQRPYYKSTSRVKFSRSADAPAYQQGQNQLYNELNLGRREEYDVLDKRRGRDPEMGGKPQRRKNPQEGLYNELQKDKMAEAYSEIGMKGERRRGKGHDGLYQGLSTATKDTYDALHMQALPPRRAKRSGSGATNFSLLKQAGDVEENPGPTRGHMTEYKPTVRLATRDDVPRAVRTLAAAFADYPATRHTVDPDRHIERVTELQELFLTRVGLDIGKVWVADDGAAVAVWTTPESVEAGAVFAEIGPRMAELSGSRLAAQQQMEGLLAPHRPKEPAWFLATVGVSPDHQGKGLGSAVVLPGVEAAERAGVPAFLETSAPRNLPFYERLGFTVTADVEVPEGPRTWCMTRKPGA

SEQ ID NO: 4562 - protein, 991 aa, Artificial Sequence
  Synthetic Polypeptide
MALPVTALLLPLALLLHAARPDIQMTQSPSSLSASVGDRVTITCKASDHINNWLAWYQQKPGQAPKLLIYGATTLETGVPSRFSGSGSGTDYTLTISSLQPEDFATYYCQQSWNTPWTFGQGTKLEIKRLETTPGERSSLPAFYPGTSGSCSGCGSLSLPLLAGLVAADAVASLLIVGAVFLCARPRRSPAQEDGKVYINMPGRGSTSRVKFSRSADAPAYQQGQNQLYNELNLGRREEYDVLDKRRGRDPEMGGKPQRRKNPQEGLYNELQKDKMAEAYSEIGMKGERRRGKGHDGLYQGLSTATKDTYDALHMQALPPRRAKRSGSGATNFSLLKQAGDVEENPGPMDWIWRILFLVGAATGAHSFEQVQLQQPGAELVKPGASVKMSCKASGYAFSSYWINWMKQKPGQGLEWIGQIYPGDGDTNYNGKFKGRATLTADTSSSTAYMQLSSLTSEDSAVYFCARSITTVVGCAMDYWGQGTSVTVSSTRQSFGLLDPKLSYLLDGILFIYGVILTALFLWRRKRKEKQSETSPKEFLTIYEDVKDLKTRRNHEQEQTFPGGGSTIYSMIQSQSSAPTSQEPAYTLYSLIQPSRKSGSRKRNHSPSFNSTIYEVIGKSQPKAQNPARLSRKELENFDVYSSRSSRRVKFSRSADAPAYQQGQNQLYNELNLGRREEYDVLDKRRGRDPEMGGKPQRRKNPQEGLYNELQKDKMAEAYSEIGMKGERRRGKGHDGLYQGLSTATKDTYDALHMQALPPRRAKRSGSGVKQTLNFDLLKLAGDVESNPGPGHMTEYKPTVRLATRDDVPRAVRTLAAAFADYPATRHTVDPDRHIERVTELQELFLTRVGLDIGKVWVADDGAAVAVWTTPESVEAGAVFAEIGPRMAELSGSRLAAQQQMEGLLAPHRPKEPAWFLATVGVSPDHQGKGLGSAVVLPGVEAAERAGVPAFLETSAPRNLPFYERLGFTVTADVEVPEGPRTWCMTRKPGA

SEQ ID NO: 4563 - protein, 1043 aa, Artificial Sequence
  Synthetic Polypeptide
MALPVTALLLPLALLLHAARPACEVQLLESGGGLIQPGGSLRLSCAASGFTFSSHAMTWVRQAPGKGLEWVSAISGSGDYTHYADSVKGRFTISRDNSKNTVYLQMNSLRAEDSAVYYCAKDEDGGSLLGHRGQGTLVTVSSGTGGGGSGGGGSGGGGSEFGSLETTPGERSSLPAFYPGTSGSCSGCGSLSLPLLAGLVAADAVASLLIVGAVFLCARPRRSPAQEDGKVYINMPGRGSTSRVKFSRSADAPAYQQGQNQLYNELNLGRREEYDVLDKRRGRDPEMGGKPQRRKNPQEGLYNELQKDKMAEAYSEIGMKGERRRGKGHDGLYQGLSTATKDTYDALHMQALPPRRAKRSGSGATNFSLLKQAGDVEENPGPMDWIWRILFLVGAATGAHSGPEVQLVESGGGLVQAGGSLRLSCAASGRTFSMGWFRQAPGKEREFVAAITYSGGSPYYADSVKGRFTISRDNAKNTVYLQMNSLKPEDTAVYYCAANPTYGSDWNAENWGQGTQVTVSSGSGGGGSGGGGSGGGGSFEGSTRQSFGLLDPKLSYLLDGILFIYGVILTALFLWRRKRKEKQSETSPKEFLTIYEDVKDLKTRRNHEQEQTFPGGGSTIYSMIQSQSSAPTSQEPAYTLYSLIQPSRKSGSRKRNHSPSFNSTIYEVIGKSQPKAQNPARLSRKELENFDVYSSRSSRRVKFSRSADAPAYQQGQNQLYNELNLGRREEYDVLDKRRGRDPEMGGKPQRRKNPQEGLYNELQKDKMAEAYSEIGMKGERRRGKGHDGLYQGLSTATKDTYDALHMQALPPRRAKRSGSGVKQTLNFDLLKLAGDVESNPGPGHMTEYKPTVRLATRDDVPRAVRTLAAAFADYPATRHTVDPDRHIERVTELQELFLTRVGLDIGKVWVADDGAAVAVWTTPESVEAGAVFAEIGPRMAELSGSRLAAQQQMEGLLAPHRPKEPAWFLATVGVSPDHQGKGLGSAVVLPGVEAAERAGVPAFLETSAPRNLPFYERLGFTVTADVEVPEGPRTWCMTRKPGA

SEQ ID NO: 4564 - protein, 1193 aa, Artificial Sequence
  Synthetic Polypeptide
MALPVTALLLPLALLLHAARPDIQMTQSPSSLSASVGDRVTITCKASDHINNWLAWYQQKPGQAPKLLIYGATTLETGVPSRFSGSGSGTDYTLTISSLQPEDFATYYCQQSWNTPWTFGQGTKLEIKRLEGQPKANPTVTLFPPSSEELQANKATLVCLISDFYPGAVTVAWKADGSPVKAGVETTKPSKQSNNKYAASSYLSLTPEQWKSHRSYSCQVTHEGSTVEKTVAPTECSGSTTPGERSSLPAFYPGTSGSCSGCGSLSLPLLAGLVAADAVASLLIVGAVFLCARPRRSPAQEDGKVYINMPGRGSTSRVKFSRSADAPAYQQGQNQLYNELNLGRREEYDVLDKRRGRDPEMGGKPQRRKNPQEGLYNELQKDKMAEAYSEIGMKGERRRGKGHDGLYQGLSTATKDTYDALHMQALPPRRAKRSGSGATNFSLLKQAGDVEENPGPMDWIWRILFLVGAATGAHSFEQVQLQQPGAELVKPGASVKMSCKASGYAFSSYWINWMKQKPGQGLEWIGQIYPGDGDTNYNGKFKGRATLTADTSSSTAYMQLSSLTSEDSAVYFCARSITTVVGCAMDYWGQGTSVTVSSTRASTKGPSVFPLAPSSKSTSGGTAALGCLVKDYFPEPVTVSWNSGALTSGVHTFPAVLQSSGLYSLSSVVTVPSSSLGTQTYICNVNHKPSNTKVDKRVEPKSCGTQSFGLLDPKLSYLLDGILFIYGVILTALFLWRRKRKEKQSETSPKEFLTIYEDVKDLKTRRNHEQEQTFPGGGSTIYSMIQSQSSAPTSQEPAYTLYSLIQPSRKSGSRKRNHSPSFNSTIYEVIGKSQPKAQNPARLSRKELENFDVYSSRSSRRVKFSRSADAPAYQQGQNQLYNELNLGRREEYDVLDKRRGRDPEMGGKPQRRKNPQEGLYNELQKDKMAEAYSEIGMKGERRRGKGHDGLYQGLSTATKDTYDALHMQALPPRRAKRSGSGVKQTLNFDLLKLAGDVESNPGPGHMATYEVLCEVARKLGTDDREVVLFLLNVFIPQPTLAQLIGALRALKEEGRLTFPLLAECLFRAGRRDLLRDLLHLDPRFLERHLAGTMSYFSPYQLTVLHVDGELCARDIRSLIFLSKDTIGSRSTPQTFLHWVYCMENLDLLGPTDVDALMSMLRSLSRVDLQRQVQTLMGLHLSGPSHSQHYRHTP

SEQ ID NO: 4565 - protein, 1246 aa, Artificial Sequence
  Synthetic Polypeptide
MALPVTALLLPLALLLHAARPDIQMTQSPSSLSASVGDRVTITCKASDHINNWLAWYQQKPGQAPKLLIYGATTLETGVPSRFSGSGSGTDYTLTISSLQPEDFATYYCQQSWNTPWTFGQGTKLEIKRLEGQPKANPTVTLFPPSSEELQANKATLVCLISDFYPGAVTVAWKADGSPVKAGVETTKPSKQSNNKYAASSYLSLTPEQWKSHRSYSCQVTHEGSTVEKTVAPTECSGSTTPGERSSLPAFYPGTSGSCSGCGSLSLPLLAGLVAADAVASLLIVGAVFLCARPRRSPAQEDGKVYINMPGRGSTSRVKFSRSADAPAYQQGQNQLYNELNLGRREEYDVLDKRRGRDPEMGGKPQRRKNPQEGLYNELQKDKMAEAYSEIGMKGERRRGKGHDGLYQGLSTATKDTYDALHMQALPPRRAKRSGSGATNFSLLKQAGDVEENPGPMDWIWRILFLVGAATGAHSFEQVQLQQPGAELVKPGASVKMSCKASGYAFSSYWINWMKQKPGQGLEWIGQIYPGDGDTNYNGKFKGRATLTADTSSSTAYMQLSSLTSEDSAVYFCARSITTVVGCAMDYWGQGTSVTVSSTRASTKGPSVFPLAPSSKSTSGGTAALGCLVKDYFPEPVTVSWNSGALTSGVHTFPAVLQSSGLYSLSSVVTVPSSSLGTQTYICNVNHKPSNTKVDKRVEPKSCGTQSFGLLDPKLSYLLDGILFIYGVILTALFLWRRKRKEKQSETSPKEFLTIYEDVKDLKTRRNHEQEQTFPGGGSTIYSMIQSQSSAPTSQEPAYTLYSLIQPSRKSGSRKRNHSPSFNSTIYEVIGKSQPKAQNPARLSRKELENFDVYSSRSSRRVKFSRSADAPAYQQGQNQLYNELNLGRREEYDVLDKRRGRDPEMGGKPQRRKNPQEGLYNELQKDKMAEAYSEIGMKGERRRGKGHDGLYQGLSTATKDTYDALHMQALPPRRAKRSGSGVKQTLNFDLLKLAGDVESNPGPGHMSDSKEVPSLPFLRHLLEELDSHEDSLLLFLCHDAAPGCTTVTQALCSLSQQRKLTLAALVEMLYVLQRMDLLKSRFGLSKEGAEQLLGTSFLTRYRKLMVCVGEELDSSELRALRLFACNLNPSLSTALSESSRFVELVLALENVGLVSPSSVSVLADMLRTLRRLDLCQQLVEYEQQEQARYRYCYAASPSLPVRTLRRGHGASEHEQLCMPVQESSDSPELLRTPVQESSSDSPEQTT

SEQ ID NO: 4566 - protein, 1204 aa, Artificial Sequence
  Synthetic Polypeptide
MALPVTALLLPLALLLHAARPDIQMTQSPSSLSASVGDRVTITCKASDHINNWLAWYQQKPGQAPKLLIYGATTLETGVPSRFSGSGSGTDYTLTISSLQPEDFATYYCQQSWNTPWTFGQGTKLEIKRLEGQPKANPTVTLFPPSSEELQANKATLVCLISDFYPGAVTVAWKADGSPVKAGVETTKPSKQSNNKYAASSYLSLTPEQWKSHRSYSCQVTHEGSTVEKTVAPTECSGSTTPGERSSLPAFYPGTSGSCSGCGSLSLPLLAGLVAADAVASLLIVGAVFLCARPRRSPAQEDGKVYINMPGRGSTSRVKFSRSADAPAYQQGQNQLYNELNLGRREEYDVLDKRRGRDPEMGGKPQRRKNPQEGLYNELQKDKMAEAYSEIGMKGERRRGKGHDGLYQGLSTATKDTYDALHMQALPPRRAKRSGSGATNFSLLKQAGDVEENPGPMDWIWRILFLVGAATGAHSFEQVQLQQPGAELVKPGASVKMSCKASGYAFSSYWINWMKQKPGQGLEWIGQIYPGDGDTNYNGKFKGRATLTADTSSSTAYMQLSSLTSEDSAVYFCARSITTVVGCAMDYWGQGTSVTVSSTRASTKGPSVFPLAPSSKSTSGGTAALGCLVKDYFPEPVTVSWNSGALTSGVHTFPAVLQSSGLYSLSSVVTVPSSSLGTQTYICNVNHKPSNTKVDKRVEPKSCGTQSFGLLDPKLSYLLDGILFIYGVILTALFLWRRKRKEKQSETSPKEFLTIYEDVKDLKTRRNHEQEQTFPGGGSTIYSMIQSQSSAPTSQEPAYTLYSLIQPSRKSGSRKRNHSPSFNSTIYEVIGKSQPKAQNPARLSRKELENFDVYSSRSSRRVKFSRSADAPAYQQGQNQLYNELNLGRREEYDVLDKRRGRDPEMGGKPQRRKNPQEGLYNELQKDKMAEAYSEIGMKGERRRGKGHDGLYQGLSTATKDTYDALHMQALPPRRAKRSGSGVKQTLNFDLLKLAGDVESNPGPGHMTEYKPTVRLATRDDVPRAVRTLAAAFADYPATRHTVDPDRHIERVTELQELFLTRVGLDIGKVWVADDGAAVAVWTTPESVEAGAVFAEIGPRMAELSGSRLAAQQQMEGLLAPHRPKEPAWFLATVGVSPDHQGKGLGSAVVLPGVEAAERAGVPAFLETSAPRNLPFYERLGFTVTADVEVPEGPRTWCMTRKPGA

SEQ ID NO: 4567 - protein, 1341 aa, Artificial Sequence
  Synthetic Polypeptide
MALPVTALLLPLALLLHAARPEVQLVESGGGLVQAGGSLRLSCAASGRTFSMGWFRQAPGKEREFVAAITYSGGSPYYADSVKGRFTISRDNAKNTVYLQMNSLKPEDTAVYYCAANPTYGSDWNAENWGQGTQVTVSSGTGGGGSGGGGSGGGGSEFDIQMTQSPSSLSASVGDRVTITCKASDHINNWLAWYQQKPGQAPKLLIYGATTLETGVPSRFSGSGSGTDYTLTISSLQPEDFATYYCQQSWNTPWTFGQGTKLEIKRLEGQPKANPTVTLFPPSSEELQANKATLVCLISDFYPGAVTVAWKADGSPVKAGVETTKPSKQSNNKYAASSYLSLTPEQWKSHRSYSCQVTHEGSTVEKTVAPTECSGSTTPGERSSLPAFYPGTSGSCSGCGSLSLPLLAGLVAADAVASLLIVGAVFLCARPRRSPAQEDGKVYINMPGRGSTSRVKFSRSADAPAYQQGQNQLYNELNLGRREEYDVLDKRRGRDPEMGGKPQRRKNPQEGLYNELQKDKMAEAYSEIGMKGERRRGKGHDGLYQGLSTATKDTYDALHMQALPPRRAKRSGSGATNFSLLKQAGDVEENPGPMDWIWRILFLVGAATGAHSFEQVQLQQPGAELVKPGASVKMSCKASGYAFSSYWINWMKQKPGQGLEWIGQIYPGDGDTNYNGKFKGRATLTADTSSSTAYMQLSSLTSEDSAVYFCARSITTVVGCAMDYWGQGTSVTVSSTRASTKGPSVFPLAPSSKSTSGGTAALGCLVKDYFPEPVTVSWNSGALTSGVHTFPAVLQSSGLYSLSSVVTVPSSSLGTQTYICNVNHKPSNTKVDKRVEPKSCGTQSFGLLDPKLSYLLDGILFIYGVILTALFLWRRKRKEKQSETSPKEFLTIYEDVKDLKTRRNHEQEQTFPGGGSTIYSMIQSQSSAPTSQEPAYTLYSLIQPSRKSGSRKRNHSPSFNSTIYEVIGKSQPKAQNPARLSRKELENFDVYSSRSSRRVKFSRSADAPAYQQGQNQLYNELNLGRREEYDVLDKRRGRDPEMGGKPQRRKNPQEGLYNELQKDKMAEAYSEIGMKGERRRGKGHDGLYQGLSTATKDTYDALHMQALPPRRAKRSGSGVKQTLNFDLLKLAGDVESNPGPGHMTEYKPTVRLATRDDVPRAVRTLAAAFADYPATRHTVDPDRHIERVTELQELFLTRVGLDIGKVWVADDGAAVAVWTTPESVEAGAVFAEIGPRMAELSGSRLAAQQQMEGLLAPHRPKEPAWFLATVGVSPDHQGKGLGSAVVLPGVEAAERAGVPAFLETSAPRNLPFYERLGFTVTADVEVPEGPRTWCMTRKPGA

SEQ ID NO: 4568 - protein, 1478 aa, Artificial Sequence
  Synthetic Polypeptide
MALPVTALLLPLALLLHAARPEVQLVESGGGLVQAGGSLRLSCAASGRTFSMGWFRQAPGKEREFVAAITYSGGSPYYADSVKGRFTISRDNAKNTVYLQMNSLKPEDTAVYYCAANPTYGSDWNAENWGQGTQVTVSSGTGGGGSGGGGSGGGGSEFDIQMTQSPSSLSASVGDRVTITCKASDHINNWLAWYQQKPGQAPKLLIYGATTLETGVPSRFSGSGSGTDYTLTISSLQPEDFATYYCQQSWNTPWTFGQGTKLEIKRLEGQPKANPTVTLFPPSSEELQANKATLVCLISDFYPGAVTVAWKADGSPVKAGVETTKPSKQSNNKYAASSYLSLTPEQWKSHRSYSCQVTHEGSTVEKTVAPTECSGSTTPGERSSLPAFYPGTSGSCSGCGSLSLPLLAGLVAADAVASLLIVGAVFLCARPRRSPAQEDGKVYINMPGRGSTSRVKFSRSADAPAYQQGQNQLYNELNLGRREEYDVLDKRRGRDPEMGGKPQRRKNPQEGLYNELQKDKMAEAYSEIGMKGERRRGKGHDGLYQGLSTATKDTYDALHMQALPPRRAKRSGSGATNFSLLKQAGDVEENPGPMDWIWRILFLVGAATGAHSGPEVQLVESGGGLVQAGGSLRLSCAASGRTFTMGWFRQAPGKEREFVAAISLSPTLAYYADSVKGRFTISRDNAKNTVVLQMNSLKPEDTALYYCAADRKSVMSIRPDYWGQGTQVTVSSGSGGGGSGGGGSGGGGSFEQVQLQQPGAELVKPGASVKMSCKASGYAFSSYWINWMKQKPGQGLEWIGQIYPGDGDTNYNGKFKGRATLTADTSSSTAYMQLSSLTSEDSAVYFCARSITTVVGCAMDYWGQGTSVTVSSTRASTKGPSVFPLAPSSKSTSGGTAALGCLVKDYFPEPVTVSWNSGALTSGVHTFPAVLQSSGLYSLSSVVTVPSSSLGTQTYICNVNHKPSNTKVDKRVEPKSCGTQSFGLLDPKLSYLLDGILFIYGVILTALFLWRRKRKEKQSETSPKEFLTIYEDVKDLKTRRNHEQEQTFPGGGSTIYSMIQSQSSAPTSQEPAYTLYSLIQPSRKSGSRKRNHSPSFNSTIYEVIGKSQPKAQNPARLSRKELENFDVYSSRSSRRVKFSRSADAPAYQQGQNQLYNELNLGRREEYDVLDKRRGRDPEMGGKPQRRKNPQEGLYNELQKDKMAEAYSEIGMKGERRRGKGHDGLYQGLSTATKDTYDALHMQALPPRRAKRSGSGVKQTLNFDLLKLAGDVESNPGPGHMTEYKPTVRLATRDDVPRAVRTLAAAFADYPATRHTVDPDRHIERVTELQELFLTRVGLDIGKVWVADDGAAVAVWTTPESVEAGAVFAEIGPRMAELSGSRLAAQQQMEGLLAPHRPKEPAWFLATVGVSPDHQGKGLGSAVVLPGVEAAERAGVPAFLETSAPRNLPFYERLGFTVTADVEVPEGPRTWCMTRKPGA

SEQ ID NO: 4569 - protein, 1211 aa, Artificial Sequence
  Synthetic Polypeptide
MALPVTALLLPLALLLHAARPEVQLVESGGGLVQAGGSLRLSCAASGRTFSMGWFRQAPGKEREFVAAITYSGGSPYYADSVKGRFTISRDNAKNTVYLQMNSLKPEDTAVYYCAANPTYGSDWNAENWGQGTQVTVSSLEGQPKANPTVTLFPPSSEELQANKATLVCLISDFYPGAVTVAWKADGSPVKAGVETTKPSKQSNNKYAASSYLSLTPEQWKSHRSYSCQVTHEGSTVEKTVAPTECSGSTTPGERSSLPAFYPGTSGSCSGCGSLSLPLLAGLVAADAVASLLIVGAVFLCARPRRSPAQEDGKVYINMPGRGSTSRVKFSRSADAPAYQQGQNQLYNELNLGRREEYDVLDKRRGRDPEMGGKPQRRKNPQEGLYNELQKDKMAEAYSEIGMKGERRRGKGHDGLYQGLSTATKDTYDALHMQALPPRRAKRSGSGATNFSLLKQAGDVEENPGPMDWIWRILFLVGAATGAHSGPEVQLVESGGGLVQAGGSLRLSCAASGRTFTMGWFRQAPGKEREFVAAISLSPTLAYYADSVKGRFTISRDNAKNTVVLQMNSLKPEDTALYYCAADRKSVMSIRPDYWGQGTQVTVSSTRASTKGPSVFPLAPSSKSTSGGTAALGCLVKDYFPEPVTVSWNSGALTSGVHTFPAVLQSSGLYSLSSVVTVPSSSLGTQTYICNVNHKPSNTKVDKRVEPKSCGTQSFGLLDPKLSYLLDGILFIYGVILTALFLWRRKRKEKQSETSPKEFLTIYEDVKDLKTRRNHEQEQTFPGGGSTIYSMIQSQSSAPTSQEPAYTLYSLIQPSRKSGSRKRNHSPSFNSTIYEVIGKSQPKAQNPARLSRKELENFDVYSSRSSRRVKFSRSADAPAYQQGQNQLYNELNLGRREEYDVLDKRRGRDPEMGGKPQRRKNPQEGLYNELQKDKMAEAYSEIGMKGERRRGKGHDGLYQGLSTATKDTYDALHMQALPPRRAKRSGSGVKQTLNFDLLKLAGDVESNPGPGHMTEYKPTVRLATRDDVPRAVRTLAAAFADYPATRHTVDPDRHIERVTELQELFLTRVGLDIGKVWVADDGAAVAVWTTPESVEAGAVFAEIGPRMAELSGSRLAAQQQMEGLLAPHRPKEPAWFLATVGVSPDHQGKGLGSAVVLPGVEAAERAGVPAFLETSAPRNLPFYERLGFTVTADVEVPEGPRTWCMTRKPGA

SEQ ID NO: 4570 - protein, 1219 aa, Artificial Sequence
  Synthetic Polypeptide
MALPVTALLLPLALLLHAARPDIQMTQSPSSLSASVGDRVTITCKASDHINNWLAWYQQKPGQAPKLLIYGATTLETGVPSRFSGSGSGTDYTLTISSLQPEDFATYYCQQSWNTPWTFGQGTKLEIKRLEDLKNVFPPEVAVFEPSEAEISHTQKATLVCLATGFYPDHVELSWWVNGKEVHSGVSTDPQPLKEQPALNDSRYCLSSRLRVSATFWQNPRNHFRCQVQFYGLSENDEWTQDRAKPVTQIVSAEAWGRADCGSTTPGERSSLPAFYPGTSGSCSGCGSLSLPLLAGLVAADAVASLLIVGAVFLCARPRRSPAQEDGKVYINMPGRGSTSRVKFSRSADAPAYQQGQNQLYNELNLGRREEYDVLDKRRGRDPEMGGKPQRRKNPQEGLYNELQKDKMAEAYSEIGMKGERRRGKGHDGLYQGLSTATKDTYDALHMQALPPRRAKRSGSGATNFSLLKQAGDVEENPGPMDWIWRILFLVGAATGAHSFEQVQLQQPGAELVKPGASVKMSCKASGYAFSSYWINWMKQKPGQGLEWIGQIYPGDGDTNYNGKFKGRATLTADTSSSTAYMQLSSLTSEDSAVYFCARSITTVVGCAMDYWGQGTSVTVSSTRIQNPDPAVYQLRDSKSSDKSVCLFTDFDSQTNVSQSKDSDVYITDKTVLDMRSMDFKSNSAVAWSNKSDFACANAFNNSIIPEDTFFPSPESSCGTQSFGLLDPKLSYLLDGILFIYGVILTALFLWRRKRKEKQSETSPKEFLTIYEDVKDLKTRRNHEQEQTFPGGGSTIYSMIQSQSSAPTSQEPAYTLYSLIQPSRKSGSRKRNHSPSFNSTIYEVIGKSQPKAQNPARLSRKELENFDVYSSRSSRRVKFSRSADAPAYQQGQNQLYNELNLGRREEYDVLDKRRGRDPEMGGKPQRRKNPQEGLYNELQKDKMAEAYSEIGMKGERRRGKGHDGLYQGLSTATKDTYDALHMQALPPRRAKRSGSGVKQTLNFDLLKLAGDVESNPGPGHMTEYKPTVRLATRDDVPRAVRTLAAAFADYPATRHTVDPDRHIERVTELQELFLTRVGLDIGKVWVADDGAAVAVWTTPESVEAGAVFAEIGPRMAELSGSRLAAQQQMEGLLAPHRPKEPAWFLATVGVSPDHQGKGLGSAVVLPGVEAAERAGVPAFLETSAPRNLPFYERLGFTVTADVEVPEGPRTWCMTRKPGA

SEQ ID NO: 4571 - protein, 1356 aa, Artificial Sequence
  Synthetic Polypeptide
MALPVTALLLPLALLLHAARPEVQLVESGGGLVQAGGSLRLSCAASGRTFSMGWFRQAPGKEREFVAAITYSGGSPYYADSVKGRFTISRDNAKNTVYLQMNSLKPEDTAVYYCAANPTYGSDWNAENWGQGTQVTVSSGTGGGGSGGGGSGGGGSEFDIQMTQSPSSLSASVGDRVTITCKASDHINNWLAWYQQKPGQAPKLLIYGATTLETGVPSRFSGSGSGTDYTLTISSLQPEDFATYYCQQSWNTPWTFGQGTKLEIKRLEDLKNVFPPEVAVFEPSEAEISHTQKATLVCLATGFYPDHVELSWWVNGKEVHSGVSTDPQPLKEQPALNDSRYCLSSRLRVSATFWQNPRNHFRCQVQFYGLSENDEWTQDRAKPVTQIVSAEAWGRADCGSTTPGERSSLPAFYPGTSGSCSGCGSLSLPLLAGLVAADAVASLLIVGAVFLCARPRRSPAQEDGKVYINMPGRGSTSRVKFSRSADAPAYQQGQNQLYNELNLGRREEYDVLDKRRGRDPEMGGKPQRRKNPQEGLYNELQKDKMAEAYSEIGMKGERRRGKGHDGLYQGLSTATKDTYDALHMQALPPRRAKRSGSGATNFSLLKQAGDVEENPGPMDWIWRILFLVGAATGAHSFEQVQLQQPGAELVKPGASVKMSCKASGYAFSSYWINWMKQKPGQGLEWIGQIYPGDGDTNYNGKFKGRATLTADTSSSTAYMQLSSLTSEDSAVYFCARSITTVVGCAMDYWGQGTSVTVSSTRIQNPDPAVYQLRDSKSSDKSVCLFTDFDSQTNVSQSKDSDVYITDKTVLDMRSMDFKSNSAVAWSNKSDFACANAFNNSIIPEDTFFPSPESSCGTQSFGLLDPKLSYLLDGILFIYGVILTALFLWRRKRKEKQSETSPKEFLTIYEDVKDLKTRRNHEQEQTFPGGGSTIYSMIQSQSSAPTSQEPAYTLYSLIQPSRKSGSRKRNHSPSFNSTIYEVIGKSQPKAQNPARLSRKELENFDVYSSRSSRRVKFSRSADAPAYQQGQNQLYNELNLGRREEYDVLDKRRGRDPEMGGKPQRRKNPQEGLYNELQKDKMAEAYSEIGMKGERRRGKGHDGLYQGLSTATKDTYDALHMQALPPRRAKRSGSGVKQTLNFDLLKLAGDVESNPGPGHMTEYKPTVRLATRDDVPRAVRTLAAAFADYPATRHTVDPDRHIERVTELQELFLTRVGLDIGKVWVADDGAAVAVWTTPESVEAGAVFAEIGPRMAELSGSRLAAQQQMEGLLAPHRPKEPAWFLATVGVSPDHQGKGLGSAVVLPGVEAAERAGVPAFLETSAPRNLPFYERLGFTVTADVEVPEGPRTWCMTRKPGA

SEQ ID NO: 4572 - protein, 1493 aa, Artificial Sequence
  Synthetic Polypeptide
MALPVTALLLPLALLLHAARPEVQLVESGGGLVQAGGSLRLSCAASGRTFSMGWFRQAPGKEREFVAAITYSGGSPYYADSVKGRFTISRDNAKNTVYLQMNSLKPEDTAVYYCAANPTYGSDWNAENWGQGTQVTVSSGTGGGGSGGGGSGGGGSEFDIQMTQSPSSLSASVGDRVTITCKASDHINNWLAWYQQKPGQAPKLLIYGATTLETGVPSRFSGSGSGTDYTLTISSLQPEDFATYYCQQSWNTPWTFGQGTKLEIKRLEDLKNVFPPEVAVFEPSEAEISHTQKATLVCLATGFYPDHVELSWWVNGKEVHSGVSTDPQPLKEQPALNDSRYCLSSRLRVSATFWQNPRNHFRCQVQFYGLSENDEWTQDRAKPVTQIVSAEAWGRADCGSTTPGERSSLPAFYPGTSGSCSGCGSLSLPLLAGLVAADAVASLLIVGAVFLCARPRRSPAQEDGKVYINMPGRGSTSRVKFSRSADAPAYQQGQNQLYNELNLGRREEYDVLDKRRGRDPEMGGKPQRRKNPQEGLYNELQKDKMAEAYSEIGMKGERRRGKGHDGLYQGLSTATKDTYDALHMQALPPRRAKRSGSGATNFSLLKQAGDVEENPGPMDWIWRILFLVGAATGAHSGPEVQLVESGGGLVQAGGSLRLSCAASGRTFTMGWFRQAPGKEREFVAAISLSPTLAYYADSVKGRFTISRDNAKNTVVLQMNSLKPEDTALYYCAADRKSVMSIRPDYWGQGTQVTVSSGSGGGGSGGGGSGGGGSFEQVQLQQPGAELVKPGASVKMSCKASGYAFSSYWINWMKQKPGQGLEWIGQIYPGDGDTNYNGKFKGRATLTADTSSSTAYMQLSSLTSEDSAVYFCARSITTVVGCAMDYWGQGTSVTVSSTRIQNPDPAVYQLRDSKSSDKSVCLFTDFDSQTNVSQSKDSDVYITDKTVLDMRSMDFKSNSAVAWSNKSDFACANAFNNSIIPEDTFFPSPESSCGTQSFGLLDPKLSYLLDGILFIYGVILTALFLWRRKRKEKQSETSPKEFLTIYEDVKDLKTRRNHEQEQTFPGGGSTIYSMIQSQSSAPTSQEPAYTLYSLIQPSRKSGSRKRNHSPSFNSTIYEVIGKSQPKAQNPARLSRKELENFDVYSSRSSRRVKFSRSADAPAYQQGQNQLYNELNLGRREEYDVLDKRRGRDPEMGGKPQRRKNPQEGLYNELQKDKMAEAYSEIGMKGERRRGKGHDGLYQGLSTATKDTYDALHMQALPPRRAKRSGSGVKQTLNFDLLKLAGDVESNPGPGHMTEYKPTVRLATRDDVPRAVRTLAAAFADYPATRHTVDPDRHIERVTELQELFLTRVGLDIGKVWVADDGAAVAVWTTPESVEAGAVFAEIGPRMAELSGSRLAAQQQMEGLLAPHRPKEPAWFLATVGVSPDHQGKGLGSAVVLPGVEAAERAGVPAFLETSAPRNLPFYERLGFTVTADVEVPEGPRTWCMTRKPGA

SEQ ID NO: 4573 - protein, 1226 aa, Artificial Sequence
  Synthetic Polypeptide
MALPVTALLLPLALLLHAARPEVQLVESGGGLVQAGGSLRLSCAASGRTFSMGWFRQAPGKEREFVAAITYSGGSPYYADSVKGRFTISRDNAKNTVYLQMNSLKPEDTAVYYCAANPTYGSDWNAENWGQGTQVTVSSLEDLKNVFPPEVAVFEPSEAEISHTQKATLVCLATGFYPDHVELSWWVNGKEVHSGVSTDPQPLKEQPALNDSRYCLSSRLRVSATFWQNPRNHFRCQVQFYGLSENDEWTQDRAKPVTQIVSAEAWGRADCGSTTPGERSSLPAFYPGTSGSCSGCGSLSLPLLAGLVAADAVASLLIVGAVFLCARPRRSPAQEDGKVYINMPGRGSTSRVKFSRSADAPAYQQGQNQLYNELNLGRREEYDVLDKRRGRDPEMGGKPQRRKNPQEGLYNELQKDKMAEAYSEIGMKGERRRGKGHDGLYQGLSTATKDTYDALHMQALPPRRAKRSGSGATNFSLLKQAGDVEENPGPMDWIWRILFLVGAATGAHSGPEVQLVESGGGLVQAGGSLRLSCAASGRTFTMGWFRQAPGKEREFVAAISLSPTLAYYADSVKGRFTISRDNAKNTVVLQMNSLKPEDTALYYCAADRKSVMSIRPDYWGQGTQVTVSSTRIQNPDPAVYQLRDSKSSDKSVCLFTDFDSQTNVSQSKDSDVYITDKTVLDMRSMDFKSNSAVAWSNKSDFACANAFNNSIIPEDTFFPSPESSCGTQSFGLLDPKLSYLLDGILFIYGVILTALFLWRRKRKEKQSETSPKEFLTIYEDVKDLKTRRNHEQEQTFPGGGSTIYSMIQSQSSAPTSQEPAYTLYSLIQPSRKSGSRKRNHSPSFNSTIYEVIGKSQPKAQNPARLSRKELENFDVYSSRSSRRVKFSRSADAPAYQQGQNQLYNELNLGRREEYDVLDKRRGRDPEMGGKPQRRKNPQEGLYNELQKDKMAEAYSEIGMKGERRRGKGHDGLYQGLSTATKDTYDALHMQALPPRRAKRSGSGVKQTLNFDLLKLAGDVESNPGPGHMTEYKPTVRLATRDDVPRAVRTLAAAFADYPATRHTVDPDRHIERVTELQELFLTRVGLDIGKVWVADDGAAVAVWTTPESVEAGAVFAEIGPRMAELSGSRLAAQQQMEGLLAPHRPKEPAWFLATVGVSPDHQGKGLGSAVVLPGVEAAERAGVPAFLETSAPRNLPFYERLGFTVTADVEVPEGPRTWCMTRKPGA

SEQ ID NO: 4574 - protein, 585 aa, Artificial Sequence; identical to SEQ ID NO: 4431
  Synthetic Polypeptide

SEQ ID NO: 4575 - protein, 1067 aa, Artificial Sequence
  Synthetic Polypeptide
MALPVTALLLPLALLLHAARPDIQMTQSPSSLSASVGDRVTITCKASDHINNWLAWYQQKPGQAPKLLIYGATTLETGVPSRFSGSGSGTDYTLTISSLQPEDFATYYCQQSWNTPWTFGQGTKLEIKRLEQSFGLLDPKLSYLLDGILFIYGVILTALFLWRRKRKEKQSETSPKEFLTIYEDVKDLKTRRNHEQEQTFPGGGSTIYSMIQSQSSAPTSQEPAYTLYSLIQPSRKSGSRKRNHSPSFNSTIYEVIGKSQPKAQNPARLSRKELENFDVYSSTSRVKFSRSADAPAYQQGQNQLYNELNLGRREEYDVLDKRRGRDPEMGGKPQRRKNPQEGLYNELQKDKMAEAYSEIGMKGERRRGKGHDGLYQGLSTATKDTYDALHMQALPPRRAKRSGSGATNFSLLKQAGDVEENPGPMDWIWRILFLVGAATGAHSFEQVQLQQPGAELVKPGASVKMSCKASGYAFSSYWINWMKQKPGQGLEWIGQIYPGDGDTNYNGKFKGRATLTADTSSSTAYMQLSSLTSEDSAVYFCARSITTVVGCAMDYWGQGTSVTVSSTRQSFGLLDPKLSYLLDGILFIYGVILTALFLWRRKRKEKQSETSPKEFLTIYEDVKDLKTRRNHEQEQTFPGGGSTIYSMIQSQSSAPTSQEPAYTLYSLIQPSRKSGSRKRNHSPSFNSTIYEVIGKSQPKAQNPARLSRKELENFDVYSSRSSRRVKFSRSADAPAYQQGQNQLYNELNLGRREEYDVLDKRRGRDPEMGGKPQRRKNPQEGLYNELQKDKMAEAYSEIGMKGERRRGKGHDGLYQGLSTATKDTYDALHMQALPPRRAKRSGSGVKQTLNFDLLKLAGDVESNPGPGHMTEYKPTVRLATRDDVPRAVRTLAAAFADYPATRHTVDPDRHIERVTELQELFLTRVGLDIGKVWVADDGAAVAVWTTPESVEAGAVFAEIGPRMAELSGSRLAAQQQMEGLLAPHRPKEPAWFLATVGVSPDHQGKGLGSAVVLPGVEAAERAGVPAFLETSAPRNLPFYERLGFTVTADVEVPEGPRTWCMTRKPGA

SEQ ID NO: 4576 - protein, 1119 aa, Artificial Sequence
  Synthetic Polypeptide
MALPVTALLLPLALLLHAARPACEVQLLESGGGLIQPGGSLRLSCAASGFTFSSHAMTWVRQAPGKGLEWVSAISGSGDYTHYADSVKGRFTISRDNSKNTVYLQMNSLRAEDSAVYYCAKDEDGGSLLGHRGQGTLVTVSSGTGGGGSGGGGSGGGGSEFGSLEQSFGLLDPKLSYLLDGILFIYGVILTALFLWRRKRKEKQSETSPKEFLTIYEDVKDLKTRRNHEQEQTFPGGGSTIYSMIQSQSSAPTSQEPAYTLYSLIQPSRKSGSRKRNHSPSFNSTIYEVIGKSQPKAQNPARLSRKELENFDVYSSTSRVKFSRSADAPAYQQGQNQLYNELNLGRREEYDVLDKRRGRDPEMGGKPQRRKNPQEGLYNELQKDKMAEAYSEIGMKGERRRGKGHDGLYQGLSTATKDTYDALHMQALPPRRAKRSGSGATNFSLLKQAGDVEENPGPMDWIWRILFLVGAATGAHSGPEVQLVESGGGLVQAGGSLRLSCAASGRTFSMGWFRQAPGKEREFVAAITYSGGSPYYADSVKGRFTISRDNAKNTVYLQMNSLKPEDTAVYYCAANPTYGSDWNAENWGQGTQVTVSSGSGGGGSGGGGSGGGGSFEGSTRQSFGLLDPKLSYLLDGILFIYGVILTALFLWRRKRKEKQSETSPKEFLTIYEDVKDLKTRRNHEQEQTFPGGGSTIYSMIQSQSSAPTSQEPAYTLYSLIQPSRKSGSRKRNHSPSFNSTIYEVIGKSQPKAQNPARLSRKELENFDVYSSRSSRRVKFSRSADAPAYQQGQNQLYNELNLGRREEYDVLDKRRGRDPEMGGKPQRRKNPQEGLYNELQKDKMAEAYSEIGMKGERRRGKGHDGLYQGLSTATKDTYDALHMQALPPRRAKRSGSGVKQTLNFDLLKLAGDVESNPGPGHMTEYKPTVRLATRDDVPRAVRTLAAAFADYPATRHTVDPDRHIERVTELQELFLTRVGLDIGKVWVADDGAAVAVWTTPESVEAGAVFAEIGPRMAELSGSRLAAQQQMEGLLAPHRPKEPAWFLATVGVSPDHQGKGLGSAVVLPGVEAAERAGVPAFLETSAPRNLPFYERLGFTVTADVEVPEGPRTWCMTRKPGA

SEQ ID NO: 4577 - protein, 1269 aa, Artificial Sequence
  Synthetic Polypeptide
MALPVTALLLPLALLLHAARPDIQMTQSPSSLSASVGDRVTITCKASDHINNWLAWYQQKPGQAPKLLIYGATTLETGVPSRFSGSGSGTDYTLTISSLQPEDFATYYCQQSWNTPWTFGQGTKLEIKRLEGQPKANPTVTLFPPSSEELQANKATLVCLISDFYPGAVTVAWKADGSPVKAGVETTKPSKQSNNKYAASSYLSLTPEQWKSHRSYSCQVTHEGSTVEKTVAPTECSGSQSFGLLDPKLSYLLDGILFIYGVILTALFLWRRKRKEKQSETSPKEFLTIYEDVKDLKTRRNHEQEQTFPGGGSTIYSMIQSQSSAPTSQEPAYTLYSLIQPSRKSGSRKRNHSPSFNSTIYEVIGKSQPKAQNPARLSRKELENFDVYSSTSRVKFSRSADAPAYQQGQNQLYNELNLGRREEYDVLDKRRGRDPEMGGKPQRRKNPQEGLYNELQKDKMAEAYSEIGMKGERRRGKGHDGLYQGLSTATKDTYDALHMQALPPRRAKRSGSGATNFSLLKQAGDVEENPGPMDWIWRILFLVGAATGAHSFEQVQLQQPGAELVKPGASVKMSCKASGYAFSSYWINWMKQKPGQGLEWIGQIYPGDGDTNYNGKFKGRATLTADTSSSTAYMQLSSLTSEDSAVYFCARSITTVVGCAMDYWGQGTSVTVSSTRASTKGPSVFPLAPSSKSTSGGTAALGCLVKDYFPEPVTVSWNSGALTSGVHTFPAVLQSSGLYSLSSVVTVPSSSLGTQTYICNVNHKPSNTKVDKRVEPKSCGTQSFGLLDPKLSYLLDGILFIYGVILTALFLWRRKRKEKQSETSPKEFLTIYEDVKDLKTRRNHEQEQTFPGGGSTIYSMIQSQSSAPTSQEPAYTLYSLIQPSRKSGSRKRNHSPSFNSTIYEVIGKSQPKAQNPARLSRKELENFDVYSSRSSRRVKFSRSADAPAYQQGQNQLYNELNLGRREEYDVLDKRRGRDPEMGGKPQRRKNPQEGLYNELQKDKMAEAYSEIGMKGERRRGKGHDGLYQGLSTATKDTYDALHMQALPPRRAKRSGSGVKQTLNFDLLKLAGDVESNPGPGHMATYEVLCEVARKLGTDDREVVLFLLNVFIPQPTLAQLIGALRALKEEGRLTFPLLAECLFRAGRRDLLRDLLHLDPRFLERHLAGTMSYFSPYQLTVLHVDGELCARDIRSLIFLSKDTIGSRSTPQTFLHWVYCMENLDLLGPTDVDALMSMLRSLSRVDLQRQVQTLMGLHLSGPSHSQHYRHTP

SEQ ID NO: 4578 - protein, 1322 aa, Artificial Sequence
  Synthetic Polypeptide
MALPVTALLLPLALLLHAARPDIQMTQSPSSLSASVGDRVTITCKASDHINNWLAWYQQKPGQAPKLLIYGATTLETGVPSRFSGSGSGTDYTLTISSLQPEDFATYYCQQSWNTPWTFGQGTKLEIKRLEGQPKANPTVTLFPPSSEELQANKATLVCLISDFYPGAVTVAWKADGSPVKAGVETTKPSKQSNNKYAASSYLSLTPEQWKSHRSYSCQVTHEGSTVEKTVAPTECSGSQSFGLLDPKLSYLLDGILFIYGVILTALFLWRRKRKEKQSETSPKEFLTIYEDVKDLKTRRNHEQEQTFPGGGSTIYSMIQSQSSAPTSQEPAYTLYSLIQPSRKSGSRKRNHSPSFNSTIYEVIGKSQPKAQNPARLSRKELENFDVYSSTSRVKFSRSADAPAYQQGQNQLYNELNLGRREEYDVLDKRRGRDPEMGGKPQRRKNPQEGLYNELQKDKMAEAYSEIGMKGERRRGKGHDGLYQGLSTATKDTYDALHMQALPPRRAKRSGSGATNFSLLKQAGDVEENPGPMDWIWRILFLVGAATGAHSFEQVQLQQPGAELVKPGASVKMSCKASGYAFSSYWINWMKQKPGQGLEWIGQIYPGDGDTNYNGKFKGRATLTADTSSSTAYMQLSSLTSEDSAVYFCARSITTVVGCAMDYWGQGTSVTVSSTRASTKGPSVFPLAPSSKSTSGGTAALGCLVKDYFPEPVTVSWNSGALTSGVHTFPAVLQSSGLYSLSSVVTVPSSSLGTQTYICNVNHKPSNTKVDKRVEPKSCGTQSFGLLDPKLSYLLDGILFIYGVILTALFLWRRKRKEKQSETSPKEFLTIYEDVKDLKTRRNHEQEQTFPGGGSTIYSMIQSQSSAPTSQEPAYTLYSLIQPSRKSGSRKRNHSPSFNSTIYEVIGKSQPKAQNPARLSRKELENFDVYSSRSSRRVKFSRSADAPAYQQGQNQLYNELNLGRREEYDVLDKRRGRDPEMGGKPQRRKNPQEGLYNELQKDKMAEAYSEIGMKGERRRGKGHDGLYQGLSTATKDTYDALHMQALPPRRAKRSGSGVKQTLNFDLLKLAGDVESNPGPGHMSDSKEVPSLPFLRHLLEELDSHEDSLLLFLCHDAAPGCTTVTQALCSLSQQRKLTLAALVEMLYVLQRMDLLKSRFGLSKEGAEQLLGTSFLTRYRKLMVCVGEELDSSELRALRLFACNLNPSLSTALSESSRFVELVLALENVGLVSPSSVSVLADMLRTLRRLDLCQQLVEYEQQEQARYRYCYAASPSLPVRTLRRGHGASEHEQLCMPVQESSDSPELLRTPVQESSSDSPEQTT

SEQ ID NO: 4579 - protein, 1280 aa, Artificial Sequence
  Synthetic Polypeptide
MALPVTALLLPLALLLHAARPDIQMTQSPSSLSASVGDRVTITCKASDHINNWLAWYQQKPGQAPKLLIYGATTLETGVPSRFSGSGSGTDYTLTISSLQPEDFATYYCQQSWNTPWTFGQGTKLEIKRLEGQPKANPTVTLFPPSSEELQANKATLVCLISDFYPGAVTVAWKADGSPVKAGVETTKPSKQSNNKYAASSYLSLTPEQWKSHRSYSCQVTHEGSTVEKTVAPTECSGSQSFGLLDPKLSYLLDGILFIYGVILTALFLWRRKRKEKQSETSPKEFLTIYEDVKDLKTRRNHEQEQTFPGGGSTIYSMIQSQSSAPTSQEPAYTLYSLIQPSRKSGSRKRNHSPSFNSTIYEVIGKSQPKAQNPARLSRKELENFDVYSSTSRVKFSRSADAPAYQQGQNQLYNELNLGRREEYDVLDKRRGRDPEMGGKPQRRKNPQEGLYNELQKDKMAEAYSEIGMKGERRRGKGHDGLYQGLSTATKDTYDALHMQALPPRRAKRSGSGATNFSLLKQAGDVEENPGPMDWIWRILFLVGAATGAHSFEQVQLQQPGAELVKPGASVKMSCKASGYAFSSYWINWMKQKPGQGLEWIGQIYPGDGDTNYNGKFKGRATLTADTSSSTAYMQLSSLTSEDSAVYFCARSITTVVGCAMDYWGQGTSVTVSSTRASTKGPSVFPLAPSSKSTSGGTAALGCLVKDYFPEPVTVSWNSGALTSGVHTFPAVLQSSGLYSLSSVVTVPSSSLGTQTYICNVNHKPSNTKVDKRVEPKSCGTQSFGLLDPKLSYLLDGILFIYGVILTALFLWRRKRKEKQSETSPKEFLTIYEDVKDLKTRRNHEQEQTFPGGGSTIYSMIQSQSSAPTSQEPAYTLYSLIQPSRKSGSRKRNHSPSFNSTIYEVIGKSQPKAQNPARLSRKELENFDVYSSRSSRRVKFSRSADAPAYQQGQNQLYNELNLGRREEYDVLDKRRGRDPEMGGKPQRRKNPQEGLYNELQKDKMAEAYSEIGMKGERRRGKGHDGLYQGLSTATKDTYDALHMQALPPRRAKRSGSGVKQTLNFDLLKLAGDVESNPGPGHMTEYKPTVRLATRDDVPRAVRTLAAAFADYPATRHTVDPDRHIERVTELQELFLTRVGLDIGKVWVADDGAAVAVWTTPESVEAGAVFAEIGPRMAELSGSRLAAQQQMEGLLAPHRPKEPAWFLATVGVSPDHQGKGLGSAVVLPGVEAAERAGVPAFLETSAPRNLPFYERLGFTVTADVEVPEGPRTWCMTRKPGA

SEQ ID NO: 4580 - protein, 1417 aa, Artificial Sequence
  Synthetic Polypeptide
MALPVTALLLPLALLLHAARPEVQLVESGGGLVQAGGSLRLSCAASGRTFSMGWFRQAPGKEREFVAAITYSGGSPYYADSVKGRFTISRDNAKNTVYLQMNSLKPEDTAVYYCAANPTYGSDWNAENWGQGTQVTVSSGTGGGGSGGGGSGGGGSEFDIQMTQSPSSLSASVGDRVTITCKASDHINNWLAWYQQKPGQAPKLLIYGATTLETGVPSRFSGSGSGTDYTLTISSLQPEDFATYYCQQSWNTPWTFGQGTKLEIKRLEGQPKANPTVTLFPPSSEELQANKATLVCLISDFYPGAVTVAWKADGSPVKAGVETTKPSKQSNNKYAASSYLSLTPEQWKSHRSYSCQVTHEGSTVEKTVAPTECSGSQSFGLLDPKLSYLLDGILFIYGVILTALFLWRRKRKEKQSETSPKEFLTIYEDVKDLKTRRNHEQEQTFPGGGSTIYSMIQSQSSAPTSQEPAYTLYSLIQPSRKSGSRKRNHSPSFNSTIYEVIGKSQPKAQNPARLSRKELENFDVYSSTSRVKFSRSADAPAYQQGQNQLYNELNLGRREEYDVLDKRRGRDPEMGGKPQRRKNPQEGLYNELQKDKMAEAYSEIGMKGERRRGKGHDGLYQGLSTATKDTYDALHMQALPPRRAKRSGSGATNFSLLKQAGDVEENPGPMDWIWRILFLVGAATGAHSFEQVQLQQPGAELVKPGASVKMSCKASGYAFSSYWINWMKQKPGQGLEWIGQIYPGDGDTNYNGKFKGRATLTADTSSSTAYMQLSSLTSEDSAVYFCARSITTVVGCAMDYWGQGTSVTVSSTRASTKGPSVFPLAPSSKSTSGGTAALGCLVKDYFPEPVTVSWNSGALTSGVHTFPAVLQSSGLYSLSSVVTVPSSSLGTQTYICNVNHKPSNTKVDKRVEPKSCGTQSFGLLDPKLSYLLDGILFIYGVILTALFLWRRKRKEKQSETSPKEFLTIYEDVKDLKTRRNHEQEQTFPGGGSTIYSMIQSQSSAPTSQEPAYTLYSLIQPSRKSGSRKRNHSPSFNSTIYEVIGKSQPKAQNPARLSRKELENFDVYSSRSSRRVKFSRSADAPAYQQGQNQLYNELNLGRREEYDVLDKRRGRDPEMGGKPQRRKNPQEGLYNELQKDKMAEAYSEIGMKGERRRGKGHDGLYQGLSTATKDTYDALHMQALPPRRAKRSGSGVKQTLNFDLLKLAGDVESNPGPGHMTEYKPTVRLATRDDVPRAVRTLAAAFADYPATRHTVDPDRHIERVTELQELFLTRVGLDIGKVWVADDGAAVAVWTTPESVEAGAVFAEIGPRMAELSGSRLAAQQQMEGLLAPHRPKEPAWFLATVGVSPDHQGKGLGSAVVLPGVEAAERAGVPAFLETSAPRNLPFYERLGFTVTADVEVPEGPRTWCMTRKPGA

SEQ ID NO: 4581 - protein, 1554 aa, Artificial Sequence
  Synthetic Polypeptide
MALPVTALLLPLALLLHAARPEVQLVESGGGLVQAGGSLRLSCAASGRTFSMGWFRQAPGKEREFVAAITYSGGSPYYADSVKGRFTISRDNAKNTVYLQMNSLKPEDTAVYYCAANPTYGSDWNAENWGQGTQVTVSSGTGGGGSGGGGSGGGGSEFDIQMTQSPSSLSASVGDRVTITCKASDHINNWLAWYQQKPGQAPKLLIYGATTLETGVPSRFSGSGSGTDYTLTISSLQPEDFATYYCQQSWNTPWTFGQGTKLEIKRLEGQPKANPTVTLFPPSSEELQANKATLVCLISDFYPGAVTVAWKADGSPVKAGVETTKPSKQSNNKYAASSYLSLTPEQWKSHRSYSCQVTHEGSTVEKTVAPTECSGSQSFGLLDPKLSYLLDGILFIYGVILTALFLWRRKRKEKQSETSPKEFLTIYEDVKDLKTRRNHEQEQTFPGGGSTIYSMIQSQSSAPTSQEPAYTLYSLIQPSRKSGSRKRNHSPSFNSTIYEVIGKSQPKAQNPARLSRKELENFDVYSSTSRVKFSRSADAPAYQQGQNQLYNELNLGRREEYDVLDKRRGRDPEMGGKPQRRKNPQEGLYNELQKDKMAEAYSEIGMKGERRRGKGHDGLYQGLSTATKDTYDALHMQALPPRRAKRSGSGATNFSLLKQAGDVEENPGPMDWIWRILFLVGAATGAHSGPEVQLVESGGGLVQAGGSLRLSCAASGRTFTMGWFRQAPGKEREFVAAISLSPTLAYYADSVKGRFTISRDNAKNTVVLQMNSLKPEDTALYYCAADRKSVMSIRPDYWGQGTQVTVSSGSGGGGSGGGGSGGGGSFEQVQLQQPGAELVKPGASVKMSCKASGYAFSSYWINWMKQKPGQGLEWIGQIYPGDGDTNYNGKFKGRATLTADTSSSTAYMQLSSLTSEDSAVYFCARSITTVVGCAMDYWGQGTSVTVSSTRASTKGPSVFPLAPSSKSTSGGTAALGCLVKDYFPEPVTVSWNSGALTSGVHTFPAVLQSSGLYSLSSVVTVPSSSLGTQTYICNVNHKPSNTKVDKRVEPKSCGTQSFGLLDPKLSYLLDGILFIYGVILTALFLWRRKRKEKQSETSPKEFLTIYEDVKDLKTRRNHEQEQTFPGGGSTIYSMIQSQSSAPTSQEPAYTLYSLIQPSRKSGSRKRNHSPSFNSTIYEVIGKSQPKAQNPARLSRKELENFDVYSSRSSRRVKFSRSADAPAYQQGQNQLYNELNLGRREEYDVLDKRRGRDPEMGGKPQRRKNPQEGLYNELQKDKMAEAYSEIGMKGERRRGKGHDGLYQGLSTATKDTYDALHMQALPPRRAKRSGSGVKQTLNFDLLKLAGDVESNPGPGHMTEYKPTVRLATRDDVPRAVRTLAAAFADYPATRHTVDPDRHIERVTELQELFLTRVGLDIGKVWVADDGAAVAVWTTPESVEAGAVFAEIGPRMAELSGSRLAAQQQMEGLLAPHRPKEPAWFLATVGVSPDHQGKGLGSAVVLPGVEAAERAGVPAFLETSAPRNLPFYERLGFTVTADVEVPEGPRTWCMTRKPGA

SEQ ID NO: 4582 - protein, 1287 aa, Artificial Sequence
  Synthetic Polypeptide
MALPVTALLLPLALLLHAARPEVQLVESGGGLVQAGGSLRLSCAASGRTFSMGWFRQAPGKEREFVAAITYSGGSPYYADSVKGRFTISRDNAKNTVYLQMNSLKPEDTAVYYCAANPTYGSDWNAENWGQGTQVTVSSLEGQPKANPTVTLFPPSSEELQANKATLVCLISDFYPGAVTVAWKADGSPVKAGVETTKPSKQSNNKYAASSYLSLTPEQWKSHRSYSCQVTHEGSTVEKTVAPTECSGSQSFGLLDPKLSYLLDGILFIYGVILTALFLWRRKRKEKQSETSPKEFLTIYEDVKDLKTRRNHEQEQTFPGGGSTIYSMIQSQSSAPTSQEPAYTLYSLIQPSRKSGSRKRNHSPSFNSTIYEVIGKSQPKAQNPARLSRKELENFDVYSSTSRVKFSRSADAPAYQQGQNQLYNELNLGRREEYDVLDKRRGRDPEMGGKPQRRKNPQEGLYNELQKDKMAEAYSEIGMKGERRRGKGHDGLYQGLSTATKDTYDALHMQALPPRRAKRSGSGATNFSLLKQAGDVEENPGPMDWIWRILFLVGAATGAHSGPEVQLVESGGGLVQAGGSLRLSCAASGRTFTMGWFRQAPGKEREFVAAISLSPTLAYYADSVKGRFTISRDNAKNTVVLQMNSLKPEDTALYYCAADRKSVMSIRPDYWGQGTQVTVSSTRASTKGPSVFPLAPSSKSTSGGTAALGCLVKDYFPEPVTVSWNSGALTSGVHTFPAVLQSSGLYSLSSVVTVPSSSLGTQTYICNVNHKPSNTKVDKRVEPKSCGTQSFGLLDPKLSYLLDGILFIYGVILTALFLWRRKRKEKQSETSPKEFLTIYEDVKDLKTRRNHEQEQTFPGGGSTIYSMIQSQSSAPTSQEPAYTLYSLIQPSRKSGSRKRNHSPSFNSTIYEVIGKSQPKAQNPARLSRKELENFDVYSSRSSRRVKFSRSADAPAYQQGQNQLYNELNLGRREEYDVLDKRRGRDPEMGGKPQRRKNPQEGLYNELQKDKMAEAYSEIGMKGERRRGKGHDGLYQGLSTATKDTYDALHMQALPPRRAKRSGSGVKQTLNFDLLKLAGDVESNPGPGHMTEYKPTVRLATRDDVPRAVRTLAAAFADYPATRHTVDPDRHIERVTELQELFLTRVGLDIGKVWVADDGAAVAVWTTPESVEAGAVFAEIGPRMAELSGSRLAAQQQMEGLLAPHRPKEPAWFLATVGVSPDHQGKGLGSAVVLPGVEAAERAGVPAFLETSAPRNLPFYERLGFTVTADVEVPEGPRTWCMTRKPGA

SEQ ID NO: 4583 - protein, 1295 aa, Artificial Sequence
  Synthetic Polypeptide
MALPVTALLLPLALLLHAARPDIQMTQSPSSLSASVGDRVTITCKASDHINNWLAWYQQKPGQAPKLLIYGATTLETGVPSRFSGSGSGTDYTLTISSLQPEDFATYYCQQSWNTPWTFGQGTKLEIKRLEDLKNVFPPEVAVFEPSEAEISHTQKATLVCLATGFYPDHVELSWWVNGKEVHSGVSTDPQPLKEQPALNDSRYCLSSRLRVSATFWQNPRNHFRCQVQFYGLSENDEWTQDRAKPVTQIVSAEAWGRADCGSQSFGLLDPKLSYLLDGILFIYGVILTALFLWRRKRKEKQSETSPKEFLTIYEDVKDLKTRRNHEQEQTFPGGGSTIYSMIQSQSSAPTSQEPAYTLYSLIQPSRKSGSRKRNHSPSFNSTIYEVIGKSQPKAQNPARLSRKELENFDVYSSTSRVKFSRSADAPAYQQGQNQLYNELNLGRREEYDVLDKRRGRDPEMGGKPQRRKNPQEGLYNELQKDKMAEAYSEIGMKGERRRGKGHDGLYQGLSTATKDTYDALHMQALPPRRAKRSGSGATNFSLLKQAGDVEENPGPMDWIWRILFLVGAATGAHSFEQVQLQQPGAELVKPGASVKMSCKASGYAFSSYWINWMKQKPGQGLEWIGQIYPGDGDTNYNGKFKGRATLTADTSSSTAYMQLSSLTSEDSAVYFCARSITTVVGCAMDYWGQGTSVTVSSTRIQNPDPAVYQLRDSKSSDKSVCLFTDFDSQTNVSQSKDSDVYITDKTVLDMRSMDFKSNSAVAWSNKSDFACANAFNNSIIPEDTFFPSPESSCGTQSFGLLDPKLSYLLDGILFIYGVILTALFLWRRKRKEKQSETSPKEFLTIYEDVKDLKTRRNHEQEQTFPGGGSTIYSMIQSQSSAPTSQEPAYTLYSLIQPSRKSGSRKRNHSPSFNSTIYEVIGKSQPKAQNPARLSRKELENFDVYSSRSSRRVKFSRSADAPAYQQGQNQLYNELNLGRREEYDVLDKRRGRDPEMGGKPQRRKNPQEGLYNELQKDKMAEAYSEIGMKGERRRGKGHDGLYQGLSTATKDTYDALHMQALPPRRAKRSGSGVKQTLNFDLLKLAGDVESNPGPGHMTEYKPTVRLATRDDVPRAVRTLAAAFADYPATRHTVDPDRHIERVTELQELFLTRVGLDIGKVWVADDGAAVAVWTTPESVEAGAVFAEIGPRMAELSGSRLAAQQQMEGLLAPHRPKEPAWFLATVGVSPDHQGKGLGSAVVLPGVEAAERAGVPAFLETSAPRNLPFYERLGFTVTADVEVPEGPRTWCMTRKPGA

SEQ ID NO: 4584 - protein, 1432 aa, Artificial Sequence
  Synthetic Polypeptide
MALPVTALLLPLALLLHAARPEVQLVESGGGLVQAGGSLRLSCAASGRTFSMGWFRQAPGKEREFVAAITYSGGSPYYADSVKGRFTISRDNAKNTVYLQMNSLKPEDTAVYYCAANPTYGSDWNAENWGQGTQVTVSSGTGGGGSGGGGSGGGGSEFDIQMTQSPSSLSASVGDRVTITCKASDHINNWLAWYQQKPGQAPKLLIYGATTLETGVPSRFSGSGSGTDYTLTISSLQPEDFATYYCQQSWNTPWTFGQGTKLEIKRLEDLKNVFPPEVAVFEPSEAEISHTQKATLVCLATGFYPDHVELSWWVNGKEVHSGVSTDPQPLKEQPALNDSRYCLSSRLRVSATFWQNPRNHFRCQVQFYGLSENDEWTQDRAKPVTQIVSAEAWGRADCGSQSFGLLDPKLSYLLDGILFIYGVILTALFLWRRKRKEKQSETSPKEFLTIYEDVKDLKTRRNHEQEQTFPGGGSTIYSMIQSQSSAPTSQEPAYTLYSLIQPSRKSGSRKRNHSPSFNSTIYEVIGKSQPKAQNPARLSRKELENFDVYSSTSRVKFSRSADAPAYQQGQNQLYNELNLGRREEYDVLDKRRGRDPEMGGKPQRRKNPQEGLYNELQKDKMAEAYSEIGMKGERRRGKGHDGLYQGLSTATKDTYDALHMQALPPRRAKRSGSGATNFSLLKQAGDVEENPGPMDWIWRILFLVGAATGAHSFEQVQLQQPGAELVKPGASVKMSCKASGYAFSSYWINWMKQKPGQGLEWIGQIYPGDGDTNYNGKFKGRATLTADTSSSTAYMQLSSLTSEDSAVYFCARSITTVVGCAMDYWGQGTSVTVSSTRIQNPDPAVYQLRDSKSSDKSVCLFTDFDSQTNVSQSKDSDVYITDKTVLDMRSMDFKSNSAVAWSNKSDFACANAFNNSIIPEDTFFPSPESSCGTQSFGLLDPKLSYLLDGILFIYGVILTALFLWRRKRKEKQSETSPKEFLTIYEDVKDLKTRRNHEQEQTFPGGGSTIYSMIQSQSSAPTSQEPAYTLYSLIQPSRKSGSRKRNHSPSFNSTIYEVIGKSQPKAQNPARLSRKELENFDVYSSRSSRRVKFSRSADAPAYQQGQNQLYNELNLGRREEYDVLDKRRGRDPEMGGKPQRRKNPQEGLYNELQKDKMAEAYSEIGMKGERRRGKGHDGLYQGLSTATKDTYDALHMQALPPRRAKRSGSGVKQTLNFDLLKLAGDVESNPGPGHMTEYKPTVRLATRDDVPRAVRTLAAAFADYPATRHTVDPDRHIERVTELQELFLTRVGLDIGKVWVADDGAAVAVWTTPESVEAGAVFAEIGPRMAELSGSRLAAQQQMEGLLAPHRPKEPAWFLATVGVSPDHQGKGLGSAVVLPGVEAAERAGVPAFLETSAPRNLPFYERLGFTVTADVEVPEGPRTWCMTRKPGA

SEQ ID NO: 4585 - protein, 1569 aa, Artificial Sequence
  Synthetic Polypeptide
MALPVTALLLPLALLLHAARPEVQLVESGGGLVQAGGSLRLSCAASGRTFSMGWFRQAPGKEREFVAAITYSGGSPYYADSVKGRFTISRDNAKNTVYLQMNSLKPEDTAVYYCAANPTYGSDWNAENWGQGTQVTVSSGTGGGGSGGGGSGGGGSEFDIQMTQSPSSLSASVGDRVTITCKASDHINNWLAWYQQKPGQAPKLLIYGATTLETGVPSRFSGSGSGTDYTLTISSLQPEDFATYYCQQSWNTPWTFGQGTKLEIKRLEDLKNVFPPEVAVFEPSEAEISHTQKATLVCLATGFYPDHVELSWWVNGKEVHSGVSTDPQPLKEQPALNDSRYCLSSRLRVSATFWQNPRNHFRCQVQFYGLSENDEWTQDRAKPVTQIVSAEAWGRADCGSQSFGLLDPKLSYLLDGILFIYGVILTALFLWRRKRKEKQSETSPKEFLTIYEDVKDLKTRRNHEQEQTFPGGGSTIYSMIQSQSSAPTSQEPAYTLYSLIQPSRKSGSRKRNHSPSFNSTIYEVIGKSQPKAQNPARLSRKELENFDVYSSTSRVKFSRSADAPAYQQGQNQLYNELNLGRREEYDVLDKRRGRDPEMGGKPQRRKNPQEGLYNELQKDKMAEAYSEIGMKGERRRGKGHDGLYQGLSTATKDTYDALHMQALPPRRAKRSGSGATNFSLLKQAGDVEENPGPMDWIWRILFLVGAATGAHSGPEVQLVESGGGLVQAGGSLRLSCAASGRTFTMGWFRQAPGKEREFVAAISLSPTLAYYADSVKGRFTISRDNAKNTVVLQMNSLKPEDTALYYCAADRKSVMSIRPDYWGQGTQVTVSSGSGGGGSGGGGSGGGGSFEQVQLQQPGAELVKPGASVKMSCKASGYAFSSYWINWMKQKPGQGLEWIGQIYPGDGDTNYNGKFKGRATLTADTSSSTAYMQLSSLTSEDSAVYFCARSITTVVGCAMDYWGQGTSVTVSSTRIQNPDPAVYQLRDSKSSDKSVCLFTDFDSQTNVSQSKDSDVYITDKTVLDMRSMDFKSNSAVAWSNKSDFACANAFNNSIIPEDTFFPSPESSCGTQSFGLLDPKLSYLLDGILFIYGVILTALFLWRRKRKEKQSETSPKEFLTIYEDVKDLKTRRNHEQEQTFPGGGSTIYSMIQSQSSAPTSQEPAYTLYSLIQPSRKSGSRKRNHSPSFNSTIYEVIGKSQPKAQNPARLSRKELENFDVYSSRSSRRVKFSRSADAPAYQQGQNQLYNELNLGRREEYDVLDKRRGRDPEMGGKPQRRKNPQEGLYNELQKDKMAEAYSEIGMKGERRRGKGHDGLYQGLSTATKDTYDALHMQALPPRRAKRSGSGVKQTLNFDLLKLAGDVESNPGPGHMTEYKPTVRLATRDDVPRAVRTLAAAFADYPATRHTVDPDRHIERVTELQELFLTRVGLDIGKVWVADDGAAVAVWTTPESVEAGAVFAEIGPRMAELSGSRLAAQQQMEGLLAPHRPKEPAWFLATVGVSPDHQGKGLGSAVVLPGVEAAERAGVPAFLETSAPRNLPFYERLGFTVTADVEVPEGPRTWCMTRKPGA

SEQ ID NO: 4586 - protein, 1302 aa, Artificial Sequence
  Synthetic Polypeptide
MALPVTALLLPLALLLHAARPEVQLVESGGGLVQAGGSLRLSCAASGRTFSMGWFRQAPGKEREFVAAITYSGGSPYYADSVKGRFTISRDNAKNTVYLQMNSLKPEDTAVYYCAANPTYGSDWNAENWGQGTQVTVSSLEDLKNVFPPEVAVFEPSEAEISHTQKATLVCLATGFYPDHVELSWWVNGKEVHSGVSTDPQPLKEQPALNDSRYCLSSRLRVSATFWQNPRNHFRCQVQFYGLSENDEWTQDRAKPVTQIVSAEAWGRADCGSQSFGLLDPKLSYLLDGILFIYGVILTALFLWRRKRKEKQSETSPKEFLTIYEDVKDLKTRRNHEQEQTFPGGGSTIYSMIQSQSSAPTSQEPAYTLYSLIQPSRKSGSRKRNHSPSFNSTIYEVIGKSQPKAQNPARLSRKELENFDVYSSTSRVKFSRSADAPAYQQGQNQLYNELNLGRREEYDVLDKRRGRDPEMGGKPQRRKNPQEGLYNELQKDKMAEAYSEIGMKGERRRGKGHDGLYQGLSTATKDTYDALHMQALPPRRAKRSGSGATNFSLLKQAGDVEENPGPMDWIWRILFLVGAATGAHSGPEVQLVESGGGLVQAGGSLRLSCAASGRTFTMGWFRQAPGKEREFVAAISLSPTLAYYADSVKGRFTISRDNAKNTVVLQMNSLKPEDTALYYCAADRKSVMSIRPDYWGQGTQVTVSSTRIQNPDPAVYQLRDSKSSDKSVCLFTDFDSQTNVSQSKDSDVYITDKTVLDMRSMDFKSNSAVAWSNKSDFACANAFNNSIIPEDTFFPSPESSCGTQSFGLLDPKLSYLLDGILFIYGVILTALFLWRRKRKEKQSETSPKEFLTIYEDVKDLKTRRNHEQEQTFPGGGSTIYSMIQSQSSAPTSQEPAYTLYSLIQPSRKSGSRKRNHSPSFNSTIYEVIGKSQPKAQNPARLSRKELENFDVYSSRSSRRVKFSRSADAPAYQQGQNQLYNELNLGRREEYDVLDKRRGRDPEMGGKPQRRKNPQEGLYNELQKDKMAEAYSEIGMKGERRRGKGHDGLYQGLSTATKDTYDALHMQALPPRRAKRSGSGVKQTLNFDLLKLAGDVESNPGPGHMTEYKPTVRLATRDDVPRAVRTLAAAFADYPATRHTVDPDRHIERVTELQELFLTRVGLDIGKVWVADDGAAVAVWTTPESVEAGAVFAEIGPRMAELSGSRLAAQQQMEGLLAPHRPKEPAWFLATVGVSPDHQGKGLGSAVVLPGVEAAERAGVPAFLETSAPRNLPFYERLGFTVTADVEVPEGPRTWCMTRKPGA

SEQ ID NO: 4587 - protein, 661 aa, Artificial Sequence
  Synthetic Polypeptide
MALPVTALLLPLALLLHAARPACEVQLLESGGGLIQPGGSLRLSCAASGFTFSSHAMTWVRQAPGKGLEWVSAISGSGDYTHYADSVKGRFTISRDNSKNTVYLQMNSLRAEDSAVYYCAKDEDGGSLLGHRGQGTLVTVSSGTGGGGSGGGGSGGGGSEFGSLEQSFGLLDPKLSYLLDGILFIYGVILTALFLWRRKRKEKQSETSPKEFLTIYEDVKDLKTRRNHEQEQTFPGGGSTIYSMIQSQSSAPTSQEPAYTLYSLIQPSRKSGSRKRNHSPSFNSTIYEVIGKSQPKAQNPARLSRKELENFDVYSSTSRVKFSRSADAPAYQQGQNQLYNELNLGRREEYDVLDKRRGRDPEMGGKPQRRKNPQEGLYNELQKDKMAEAYSEIGMKGERRRGKGHDGLYQGLSTATKDTYDALHMQALPPRRAKRSGSGATNFSLLKQAGDVEENPGPTRGHMTEYKPTVRLATRDDVPRAVRTLAAAFADYPATRHTVDPDRHIERVTELQELFLTRVGLDIGKVWVADDGAAVAVWTTPESVEAGAVFAEIGPRMAELSGSRLAAQQQMEGLLAPHRPKEPAWFLATVGVSPDHQGKGLGSAVVLPGVEAAERAGVPAFLETSAPRNLPFYERLGFTVTADVEVPEGPRTWCMTRKPGA

SEQ ID NO: 4588 - protein, 1038 aa, Artificial Sequence
  Synthetic Polypeptide
MALPVTALLLPLALLLHAARPDIQMTQSPSSLSASVGDRVTITCKASDHINNWLAWYQQKPGQAPKLLIYGATTLETGVPSRFSGSGSGTDYTLTISSLQPEDFATYYCQQSWNTPWTFGQGTKLEIKRLETTPGERSSLPAFYPGTSGSCSGCGSLSLPLLAGLVAADAVASLLIVGAVFLCARPRRSPAQEDGKVYINMPGRGSTSRVKFSRSADAPAYQQGQNQLYNELNLGRREEYDVLDKRRGRDPEMGGKPQRRKNPQEGLYNELQKDKMAEAYSEIGMKGERRRGKGHDGLYQGLSTATKDTYDALHMQALPPRRAKRSGSGATNFSLLKQAGDVEENPGPMDWIWRILFLVGAATGAHSFEQVQLQQPGAELVKPGASVKMSCKASGYAFSSYWINWMKQKPGQGLEWIGQIYPGDGDTNYNGKFKGRATLTADTSSSTAYMQLSSLTSEDSAVYFCARSITTVVGCAMDYWGQGTSVTVSSTRAKPTTTPAPRPPTPAPTIASQPLSLRPEACRPAAGGAVHTRGLDFACDSNLFVASWIAVMIIFRIGMAVAIFCCFFFPSWRRKRKEKQSETSPKEFLTIYEDVKDLKTRRNHEQEQTFPGGGSTIYSMIQSQSSAPTSQEPAYTLYSLIQPSRKSGSRKRNHSPSFNSTIYEVIGKSQPKAQNPARLSRKELENFDVYSSSRRVKFSRSADAPAYQQGQNQLYNELNLGRREEYDVLDKRRGRDPEMGGKPQRRKNPQEGLYNELQKDKMAEAYSEIGMKGERRRGKGHDGLYQGLSTATKDTYDALHMQALPPRRAKRSGSGVKQTLNFDLLKLAGDVESNPGPGHMTEYKPTVRLATRDDVPRAVRTLAAAFADYPATRHTVDPDRHIERVTELQELFLTRVGLDIGKVWVADDGAAVAVWTTPESVEAGAVFAEIGPRMAELSGSRLAAQQQMEGLLAPHRPKEPAWFLATVGVSPDHQGKGLGSAVVLPGVEAAERAGVPAFLETSAPRNLPFYERLGFTVTADVEVPEGPRTWCMTRKPGA

SEQ ID NO: 4589 - protein, 1090 aa, Artificial Sequence
  Synthetic Polypeptide
MALPVTALLLPLALLLHAARPACEVQLLESGGGLIQPGGSLRLSCAASGFTFSSHAMTWVRQAPGKGLEWVSAISGSGDYTHYADSVKGRFTISRDNSKNTVYLQMNSLRAEDSAVYYCAKDEDGGSLLGHRGQGTLVTVSSGTGGGGSGGGGSGGGGSEFGSLETTPGERSSLPAFYPGTSGSCSGCGSLSLPLLAGLVAADAVASLLIVGAVFLCARPRRSPAQEDGKVYINMPGRGSTSRVKFSRSADAPAYQQGQNQLYNELNLGRREEYDVLDKRRGRDPEMGGKPQRRKNPQEGLYNELQKDKMAEAYSEIGMKGERRRGKGHDGLYQGLSTATKDTYDALHMQALPPRRAKRSGSGATNFSLLKQAGDVEENPGPMDWIWRILFLVGAATGAHSGPEVQLVESGGGLVQAGGSLRLSCAASGRTFSMGWFRQAPGKEREFVAAITYSGGSPYYADSVKGRFTISRDNAKNTVYLQMNSLKPEDTAVYYCAANPTYGSDWNAENWGQGTQVTVSSGSGGGGSGGGGSGGGGSFEGSTRAKPTTTPAPRPPTPAPTIASQPLSLRPEACRPAAGGAVHTRGLDFACDSNLFVASWIAVMIIFRIGMAVAIFCCFFFPSWRRKRKEKQSETSPKEFLTIYEDVKDLKTRRNHEQEQTFPGGGSTIYSMIQSQSSAPTSQEPAYTLYSLIQPSRKSGSRKRNHSPSFNSTIYEVIGKSQPKAQNPARLSRKELENFDVYSSSRRVKFSRSADAPAYQQGQNQLYNELNLGRREEYDVLDKRRGRDPEMGGKPQRRKNPQEGLYNELQKDKMAEAYSEIGMKGERRRGKGHDGLYQGLSTATKDTYDALHMQALPPRRAKRSGSGVKQTLNFDLLKLAGDVESNPGPGHMTEYKPTVRLATRDDVPRAVRTLAAAFADYPATRHTVDPDRHIERVTELQELFLTRVGLDIGKVWVADDGAAVAVWTTPESVEAGAVFAEIGPRMAELSGSRLAAQQQMEGLLAPHRPKEPAWFLATVGVSPDHQGKGLGSAVVLPGVEAAERAGVPAFLETSAPRNLPFYERLGFTVTADVEVPEGPRTWCMTRKPGA

SEQ ID NO: 4590 - protein, 1240 aa, Artificial Sequence
  Synthetic Polypeptide
MALPVTALLLPLALLLHAARPDIQMTQSPSSLSASVGDRVTITCKASDHINNWLAWYQQKPGQAPKLLIYGATTLETGVPSRFSGSGSGTDYTLTISSLQPEDFATYYCQQSWNTPWTFGQGTKLEIKRLEGQPKANPTVTLFPPSSEELQANKATLVCLISDFYPGAVTVAWKADGSPVKAGVETTKPSKQSNNKYAASSYLSLTPEQWKSHRSYSCQVTHEGSTVEKTVAPTECSGSTTPGERSSLPAFYPGTSGSCSGCGSLSLPLLAGLVAADAVASLLIVGAVFLCARPRRSPAQEDGKVYINMPGRGSTSRVKFSRSADAPAYQQGQNQLYNELNLGRREEYDVLDKRRGRDPEMGGKPQRRKNPQEGLYNELQKDKMAEAYSEIGMKGERRRGKGHDGLYQGLSTATKDTYDALHMQALPPRRAKRSGSGATNFSLLKQAGDVEENPGPMDWIWRILFLVGAATGAHSFEQVQLQQPGAELVKPGASVKMSCKASGYAFSSYWINWMKQKPGQGLEWIGQIYPGDGDTNYNGKFKGRATLTADTSSSTAYMQLSSLTSEDSAVYFCARSITTVVGCAMDYWGQGTSVTVSSTRASTKGPSVFPLAPSSKSTSGGTAALGCLVKDYFPEPVTVSWNSGALTSGVHTFPAVLQSSGLYSLSSVVTVPSSSLGTQTYICNVNHKPSNTKVDKRVEPKSCGTAKPTTTPAPRPPTPAPTIASQPLSLRPEACRPAAGGAVHTRGLDFACDSNLFVASWIAVMIIFRIGMAVAIFCCFFFPSWRRKRKEKQSETSPKEFLTIYEDVKDLKTRRNHEQEQTFPGGGSTIYSMIQSQSSAPTSQEPAYTLYSLIQPSRKSGSRKRNHSPSFNSTIYEVIGKSQPKAQNPARLSRKELENFDVYSSSRRVKFSRSADAPAYQQGQNQLYNELNLGRREEYDVLDKRRGRDPEMGGKPQRRKNPQEGLYNELQKDKMAEAYSEIGMKGERRRGKGHDGLYQGLSTATKDTYDALHMQALPPRRAKRSGSGVKQTLNFDLLKLAGDVESNPGPGHMATYEVLCEVARKLGTDDREVVLFLLNVFIPQPTLAQLIGALRALKEEGRLTFPLLAECLFRAGRRDLLRDLLHLDPRFLERHLAGTMSYFSPYQLTVLHVDGELCARDIRSLIFLSKDTIGSRSTPQTFLHWVYCMENLDLLGPTDVDALMSMLRSLSRVDLQRQVQTLMGLHLSGPSHSQHYRHTP

SEQ ID NO: 4591 - protein, 1293 aa, Artificial Sequence
  Synthetic Polypeptide
MALPVTALLLPLALLLHAARPDIQMTQSPSSLSASVGDRVTITCKASDHINNWLAWYQQKPGQAPKLLIYGATTLETGVPSRFSGSGSGTDYTLTISSLQPEDFATYYCQQSWNTPWTFGQGTKLEIKRLEGQPKANPTVTLFPPSSEELQANKATLVCLISDFYPGAVTVAWKADGSPVKAGVETTKPSKQSNNKYAASSYLSLTPEQWKSHRSYSCQVTHEGSTVEKTVAPTECSGSTTPGERSSLPAFYPGTSGSCSGCGSLSLPLLAGLVAADAVASLLIVGAVFLCARPRRSPAQEDGKVYINMPGRGSTSRVKFSRSADAPAYQQGQNQLYNELNLGRREEYDVLDKRRGRDPEMGGKPQRRKNPQEGLYNELQKDKMAEAYSEIGMKGERRRGKGHDGLYQGLSTATKDTYDALHMQALPPRRAKRSGSGATNFSLLKQAGDVEENPGPMDWIWRILFLVGAATGAHSFEQVQLQQPGAELVKPGASVKMSCKASGYAFSSYWINWMKQKPGQGLEWIGQIYPGDGDTNYNGKFKGRATLTADTSSSTAYMQLSSLTSEDSAVYFCARSITTVVGCAMDYWGQGTSVTVSSTRASTKGPSVFPLAPSSKSTSGGTAALGCLVKDYFPEPVTVSWNSGALTSGVHTFPAVLQSSGLYSLSSVVTVPSSSLGTQTYICNVNHKPSNTKVDKRVEPKSCGTAKPTTTPAPRPPTPAPTIASQPLSLRPEACRPAAGGAVHTRGLDFACDSNLFVASWIAVMIIFRIGMAVAIFCCFFFPSWRRKRKEKQSETSPKEFLTIYEDVKDLKTRRNHEQEQTFPGGGSTIYSMIQSQSSAPTSQEPAYTLYSLIQPSRKSGSRKRNHSPSFNSTIYEVIGKSQPKAQNPARLSRKELENFDVYSSSRRVKFSRSADAPAYQQGQNQLYNELNLGRREEYDVLDKRRGRDPEMGGKPQRRKNPQEGLYNELQKDKMAEAYSEIGMKGERRRGKGHDGLYQGLSTATKDTYDALHMQALPPRRAKRSGSGVKQTLNFDLLKLAGDVESNPGPGHMSDSKEVPSLPFLRHLLEELDSHEDSLLLFLCHDAAPGCTTVTQALCSLSQQRKLTLAALVEMLYVLQRMDLLKSRFGLSKEGAEQLLGTSFLTRYRKLMVCVGEELDSSELRALRLFACNLNPSLSTALSESSRFVELVLALENVGLVSPSSVSVLADMLRTLRRLDLCQQLVEYEQQEQARYRYCYAASPSLPVRTLRRGHGASEHEQLCMPVQESSDSPELLRTPVQESSSDSPEQTT

SEQ ID NO: 4592 - protein, 1251 aa, Artificial Sequence
  Synthetic Polypeptide
MALPVTALLLPLALLLHAARPDIQMTQSPSSLSASVGDRVTITCKASDHINNWLAWYQQKPGQAPKLLIYGATTLETGVPSRFSGSGSGTDYTLTISSLQPEDFATYYCQQSWNTPWTFGQGTKLEIKRLEGQPKANPTVTLFPPSSEELQANKATLVCLISDFYPGAVTVAWKADGSPVKAGVETTKPSKQSNNKYAASSYLSLTPEQWKSHRSYSCQVTHEGSTVEKTVAPTECSGSTTPGERSSLPAFYPGTSGSCSGCGSLSLPLLAGLVAADAVASLLIVGAVFLCARPRRSPAQEDGKVYINMPGRGSTSRVKFSRSADAPAYQQGQNQLYNELNLGRREEYDVLDKRRGRDPEMGGKPQRRKNPQEGLYNELQKDKMAEAYSEIGMKGERRRGKGHDGLYQGLSTATKDTYDALHMQALPPRRAKRSGSGATNFSLLKQAGDVEENPGPMDWIWRILFLVGAATGAHSFEQVQLQQPGAELVKPGASVKMSCKASGYAFSSYWINWMKQKPGQGLEWIGQIYPGDGDTNYNGKFKGRATLTADTSSSTAYMQLSSLTSEDSAVYFCARSITTVVGCAMDYWGQGTSVTVSSTRASTKGPSVFPLAPSSKSTSGGTAALGCLVKDYFPEPVTVSWNSGALTSGVHTFPAVLQSSGLYSLSSVVTVPSSSLGTQTYICNVNHKPSNTKVDKRVEPKSCGTAKPTTTPAPRPPTPAPTIASQPLSLRPEACRPAAGGAVHTRGLDFACDSNLFVASWIAVMIIFRIGMAVAIFCCFFFPSWRRKRKEKQSETSPKEFLTIYEDVKDLKTRRNHEQEQTFPGGGSTIYSMIQSQSSAPTSQEPAYTLYSLIQPSRKSGSRKRNHSPSFNSTIYEVIGKSQPKAQNPARLSRKELENFDVYSSSRRVKFSRSADAPAYQQGQNQLYNELNLGRREEYDVLDKRRGRDPEMGGKPQRRKNPQEGLYNELQKDKMAEAYSEIGMKGERRRGKGHDGLYQGLSTATKDTYDALHMQALPPRRAKRSGSGVKQTLNFDLLKLAGDVESNPGPGHMTEYKPTVRLATRDDVPRAVRTLAAAFADYPATRHTVDPDRHIERVTELQELFLTRVGLDIGKVWVADDGAAVAVWTTPESVEAGAVFAEIGPRMAELSGSRLAAQQQMEGLLAPHRPKEPAWFLATVGVSPDHQGKGLGSAVVLPGVEAAERAGVPAFLETSAPRNLPFYERLGFTVTADVEVPEGPRTWCMTRKPGA

SEQ ID NO: 4593 - protein, 1388 aa, Artificial Sequence
  Synthetic Polypeptide
MALPVTALLLPLALLLHAARPEVQLVESGGGLVQAGGSLRLSCAASGRTFSMGWFRQAPGKEREFVAAITYSGGSPYYADSVKGRFTISRDNAKNTVYLQMNSLKPEDTAVYYCAANPTYGSDWNAENWGQGTQVTVSSGTGGGGSGGGGSGGGGSEFDIQMTQSPSSLSASVGDRVTITCKASDHINNWLAWYQQKPGQAPKLLIYGATTLETGVPSRFSGSGSGTDYTLTISSLQPEDFATYYCQQSWNTPWTFGQGTKLEIKRLEGQPKANPTVTLFPPSSEELQANKATLVCLISDFYPGAVTVAWKADGSPVKAGVETTKPSKQSNNKYAASSYLSLTPEQWKSHRSYSCQVTHEGSTVEKTVAPTECSGSTTPGERSSLPAFYPGTSGSCSGCGSLSLPLLAGLVAADAVASLLIVGAVFLCARPRRSPAQEDGKVYINMPGRGSTSRVKFSRSADAPAYQQGQNQLYNELNLGRREEYDVLDKRRGRDPEMGGKPQRRKNPQEGLYNELQKDKMAEAYSEIGMKGERRRGKGHDGLYQGLSTATKDTYDALHMQALPPRRAKRSGSGATNFSLLKQAGDVEENPGPMDWIWRILFLVGAATGAHSFEQVQLQQPGAELVKPGASVKMSCKASGYAFSSYWINWMKQKPGQGLEWIGQIYPGDGDTNYNGKFKGRATLTADTSSSTAYMQLSSLTSEDSAVYFCARSITTVVGCAMDYWGQGTSVTVSSTRASTKGPSVFPLAPSSKSTSGGTAALGCLVKDYFPEPVTVSWNSGALTSGVHTFPAVLQSSGLYSLSSVVTVPSSSLGTQTYICNVNHKPSNTKVDKRVEPKSCGTAKPTTTPAPRPPTPAPTIASQPLSLRPEACRPAAGGAVHTRGLDFACDSNLFVASWIAVMIIFRIGMAVAIFCCFFFPSWRRKRKEKQSETSPKEFLTIYEDVKDLKTRRNHEQEQTFPGGGSTIYSMIQSQSSAPTSQEPAYTLYSLIQPSRKSGSRKRNHSPSFNSTIYEVIGKSQPKAQNPARLSRKELENFDVYSSSRRVKFSRSADAPAYQQGQNQLYNELNLGRREEYDVLDKRRGRDPEMGGKPQRRKNPQEGLYNELQKDKMAEAYSEIGMKGERRRGKGHDGLYQGLSTATKDTYDALHMQALPPRRAKRSGSGVKQTLNFDLLKLAGDVESNPGPGHMTEYKPTVRLATRDDVPRAVRTLAAAFADYPATRHTVDPDRHIERVTELQELFLTRVGLDIGKVWVADDGAAVAVWTTPESVEAGAVFAEIGPRMAELSGSRLAAQQQMEGLLAPHRPKEPAWFLATVGVSPDHQGKGLGSAVVLPGVEAAERAGVPAFLETSAPRNLPFYERLGFTVTADVEVPEGPRTWCMTRKPGA

SEQ ID NO: 4594 - protein, 1525 aa, Artificial Sequence
  Synthetic Polypeptide
MALPVTALLLPLALLLHAARPEVQLVESGGGLVQAGGSLRLSCAASGRTFSMGWFRQAPGKEREFVAAITYSGGSPYYADSVKGRFTISRDNAKNTVYLQMNSLKPEDTAVYYCAANPTYGSDWNAENWGQGTQVTVSSGTGGGGSGGGGSGGGGSEFDIQMTQSPSSLSASVGDRVTITCKASDHINNWLAWYQQKPGQAPKLLIYGATTLETGVPSRFSGSGSGTDYTLTISSLQPEDFATYYCQQSWNTPWTFGQGTKLEIKRLEGQPKANPTVTLFPPSSEELQANKATLVCLISDFYPGAVTVAWKADGSPVKAGVETTKPSKQSNNKYAASSYLSLTPEQWKSHRSYSCQVTHEGSTVEKTVAPTECSGSTTPGERSSLPAFYPGTSGSCSGCGSLSLPLLAGLVAADAVASLLIVGAVFLCARPRRSPAQEDGKVYINMPGRGSTSRVKFSRSADAPAYQQGQNQLYNELNLGRREEYDVLDKRRGRDPEMGGKPQRRKNPQEGLYNELQKDKMAEAYSEIGMKGERRRGKGHDGLYQGLSTATKDTYDALHMQALPPRRAKRSGSGATNFSLLKQAGDVEENPGPMDWIWRILFLVGAATGAHSGPEVQLVESGGGLVQAGGSLRLSCAASGRTFTMGWFRQAPGKEREFVAAISLSPTLAYYADSVKGRFTISRDNAKNTVVLQMNSLKPEDTALYYCAADRKSVMSIRPDYWGQGTQVTVSSGSGGGGSGGGGSGGGGSFEQVQLQQPGAELVKPGASVKMSCKASGYAFSSYWINWMKQKPGQGLEWIGQIYPGDGDTNYNGKFKGRATLTADTSSSTAYMQLSSLTSEDSAVYFCARSITTVVGCAMDYWGQGTSVTVSSTRASTKGPSVFPLAPSSKSTSGGTAALGCLVKDYFPEPVTVSWNSGALTSGVHTFPAVLQSSGLYSLSSVVTVPSSSLGTQTYICNVNHKPSNTKVDKRVEPKSCGTAKPTTTPAPRPPTPAPTIASQPLSLRPEACRPAAGGAVHTRGLDFACDSNLFVASWIAVMIIFRIGMAVAIFCCFFFPSWRRKRKEKQSETSPKEFLTIYEDVKDLKTRRNHEQEQTFPGGGSTIYSMIQSQSSAPTSQEPAYTLYSLIQPSRKSGSRKRNHSPSFNSTIYEVIGKSQPKAQNPARLSRKELENFDVYSSSRRVKFSRSADAPAYQQGQNQLYNELNLGRREEYDVLDKRRGRDPEMGGKPQRRKNPQEGLYNELQKDKMAEAYSEIGMKGERRRGKGHDGLYQGLSTATKDTYDALHMQALPPRRAKRSGSGVKQTLNFDLLKLAGDVESNPGPGHMTEYKPTVRLATRDDVPRAVRTLAAAFADYPATRHTVDPDRHIERVTELQELFLTRVGLDIGKVWVADDGAAVAVWTTPESVEAGAVFAEIGPRMAELSGSRLAAQQQMEGLLAPHRPKEPAWFLATVGVSPDHQGKGLGSAVVLPGVEAAERAGVPAFLETSAPRNLPFYERLGFTVTADVEVPEGPRTWCMTRKPGA

SEQ ID NO: 4595 - protein, 1258 aa, Artificial Sequence
  Synthetic Polypeptide
MALPVTALLLPLALLLHAARPEVQLVESGGGLVQAGGSLRLSCAASGRTFSMGWFRQAPGKEREFVAAITYSGGSPYYADSVKGRFTISRDNAKNTVYLQMNSLKPEDTAVYYCAANPTYGSDWNAENWGQGTQVTVSSLEGQPKANPTVTLFPPSSEELQANKATLVCLISDFYPGAVTVAWKADGSPVKAGVETTKPSKQSNNKYAASSYLSLTPEQWKSHRSYSCQVTHEGSTVEKTVAPTECSGSTTPGERSSLPAFYPGTSGSCSGCGSLSLPLLAGLVAADAVASLLIVGAVFLCARPRRSPAQEDGKVYINMPGRGSTSRVKFSRSADAPAYQQGQNQLYNELNLGRREEYDVLDKRRGRDPEMGGKPQRRKNPQEGLYNELQKDKMAEAYSEIGMKGERRRGKGHDGLYQGLSTATKDTYDALHMQALPPRRAKRSGSGATNFSLLKQAGDVEENPGPMDWIWRILFLVGAATGAHSGPEVQLVESGGGLVQAGGSLRLSCAASGRTFTMGWFRQAPGKEREFVAAISLSPTLAYYADSVKGRFTISRDNAKNTVVLQMNSLKPEDTALYYCAADRKSVMSIRPDYWGQGTQVTVSSTRASTKGPSVFPLAPSSKSTSGGTAALGCLVKDYFPEPVTVSWNSGALTSGVHTFPAVLQSSGLYSLSSVVTVPSSSLGTQTYICNVNHKPSNTKVDKRVEPKSCGTAKPTTTPAPRPPTPAPTIASQPLSLRPEACRPAAGGAVHTRGLDFACDSNLFVASWIAVMIIFRIGMAVAIFCCFFFPSWRRKRKEKQSETSPKEFLTIYEDVKDLKTRRNHEQEQTFPGGGSTIYSMIQSQSSAPTSQEPAYTLYSLIQPSRKSGSRKRNHSPSFNSTIYEVIGKSQPKAQNPARLSRKELENFDVYSSSRRVKFSRSADAPAYQQGQNQLYNELNLGRREEYDVLDKRRGRDPEMGGKPQRRKNPQEGLYNELQKDKMAEAYSEIGMKGERRRGKGHDGLYQGLSTATKDTYDALHMQALPPRRAKRSGSGVKQTLNFDLLKLAGDVESNPGPGHMTEYKPTVRLATRDDVPRAVRTLAAAFADYPATRHTVDPDRHIERVTELQELFLTRVGLDIGKVWVADDGAAVAVWTTPESVEAGAVFAEIGPRMAELSGSRLAAQQQMEGLLAPHRPKEPAWFLATVGVSPDHQGKGLGSAVVLPGVEAAERAGVPAFLETSAPRNLPFYERLGFTVTADVEVPEGPRTWCMTRKPGA

SEQ ID NO: 4596 - protein, 1266 aa, Artificial Sequence
  Synthetic Polypeptide
MALPVTALLLPLALLLHAARPDIQMTQSPSSLSASVGDRVTITCKASDHINNWLAWYQQKPGQAPKLLIYGATTLETGVPSRFSGSGSGTDYTLTISSLQPEDFATYYCQQSWNTPWTFGQGTKLEIKRLEDLKNVFPPEVAVFEPSEAEISHTQKATLVCLATGFYPDHVELSWWVNGKEVHSGVSTDPQPLKEQPALNDSRYCLSSRLRVSATFWQNPRNHFRCQVQFYGLSENDEWTQDRAKPVTQIVSAEAWGRADCGSTTPGERSSLPAFYPGTSGSCSGCGSLSLPLLAGLVAADAVASLLIVGAVFLCARPRRSPAQEDGKVYINMPGRGSTSRVKFSRSADAPAYQQGQNQLYNELNLGRREEYDVLDKRRGRDPEMGGKPQRRKNPQEGLYNELQKDKMAEAYSEIGMKGERRRGKGHDGLYQGLSTATKDTYDALHMQALPPRRAKRSGSGATNFSLLKQAGDVEENPGPMDWIWRILFLVGAATGAHSFEQVQLQQPGAELVKPGASVKMSCKASGYAFSSYWINWMKQKPGQGLEWIGQIYPGDGDTNYNGKFKGRATLTADTSSSTAYMQLSSLTSEDSAVYFCARSITTVVGCAMDYWGQGTSVTVSSTRIQNPDPAVYQLRDSKSSDKSVCLFTDFDSQTNVSQSKDSDVYITDKTVLDMRSMDFKSNSAVAWSNKSDFACANAFNNSIIPEDTFFPSPESSCGTAKPTTTPAPRPPTPAPTIASQPLSLRPEACRPAAGGAVHTRGLDFACDSNLFVASWIAVMIIFRIGMAVAIFCCFFFPSWRRKRKEKQSETSPKEFLTIYEDVKDLKTRRNHEQEQTFPGGGSTIYSMIQSQSSAPTSQEPAYTLYSLIQPSRKSGSRKRNHSPSFNSTIYEVIGKSQPKAQNPARLSRKELENFDVYSSSRRVKFSRSADAPAYQQGQNQLYNELNLGRREEYDVLDKRRGRDPEMGGKPQRRKNPQEGLYNELQKDKMAEAYSEIGMKGERRRGKGHDGLYQGLSTATKDTYDALHMQALPPRRAKRSGSGVKQTLNFDLLKLAGDVESNPGPGHMTEYKPTVRLATRDDVPRAVRTLAAAFADYPATRHTVDPDRHIERVTELQELFLTRVGLDIGKVWVADDGAAVAVWTTPESVEAGAVFAEIGPRMAELSGSRLAAQQQMEGLLAPHRPKEPAWFLATVGVSPDHQGKGLGSAVVLPGVEAAERAGVPAFLETSAPRNLPFYERLGFTVTADVEVPEGPRTWCMTRKPGA

SEQ ID NO: 4597 - protein, 1403 aa, Artificial Sequence
  Synthetic Polypeptide
MALPVTALLLPLALLLHAARPEVQLVESGGGLVQAGGSLRLSCAASGRTFSMGWFRQAPGKEREFVAAITYSGGSPYYADSVKGRFTISRDNAKNTVYLQMNSLKPEDTAVYYCAANPTYGSDWNAENWGQGTQVTVSSGTGGGGSGGGGSGGGGSEFDIQMTQSPSSLSASVGDRVTITCKASDHINNWLAWYQQKPGQAPKLLIYGATTLETGVPSRFSGSGSGTDYTLTISSLQPEDFATYYCQQSWNTPWTFGQGTKLEIKRLEDLKNVFPPEVAVFEPSEAEISHTQKATLVCLATGFYPDHVELSWWVNGKEVHSGVSTDPQPLKEQPALNDSRYCLSSRLRVSATFWQNPRNHFRCQVQFYGLSENDEWTQDRAKPVTQIVSAEAWGRADCGSTTPGERSSLPAFYPGTSGSCSGCGSLSLPLLAGLVAADAVASLLIVGAVFLCARPRRSPAQEDGKVYINMPGRGSTSRVKFSRSADAPAYQQGQNQLYNELNLGRREEYDVLDKRRGRDPEMGGKPQRRKNPQEGLYNELQKDKMAEAYSEIGMKGERRRGKGHDGLYQGLSTATKDTYDALHMQALPPRRAKRSGSGATNFSLLKQAGDVEENPGPMDWIWRILFLVGAATGAHSFEQVQLQQPGAELVKPGASVKMSCKASGYAFSSYWINWMKQKPGQGLEWIGQIYPGDGDTNYNGKFKGRATLTADTSSSTAYMQLSSLTSEDSAVYFCARSITTVVGCAMDYWGQGTSVTVSSTRIQNPDPAVYQLRDSKSSDKSVCLFTDFDSQTNVSQSKDSDVYITDKTVLDMRSMDFKSNSAVAWSNKSDFACANAFNNSIIPEDTFFPSPESSCGTAKPTTTPAPRPPTPAPTIASQPLSLRPEACRPAAGGAVHTRGLDFACDSNLFVASWIAVMIIFRIGMAVAIFCCFFFPSWRRKRKEKQSETSPKEFLTIYEDVKDLKTRRNHEQEQTFPGGGSTIYSMIQSQSSAPTSQEPAYTLYSLIQPSRKSGSRKRNHSPSFNSTIYEVIGKSQPKAQNPARLSRKELENFDVYSSSRRVKFSRSADAPAYQQGQNQLYNELNLGRREEYDVLDKRRGRDPEMGGKPQRRKNPQEGLYNELQKDKMAEAYSEIGMKGERRRGKGHDGLYQGLSTATKDTYDALHMQALPPRRAKRSGSGVKQTLNFDLLKLAGDVESNPGPGHMTEYKPTVRLATRDDVPRAVRTLAAAFADYPATRHTVDPDRHIERVTELQELFLTRVGLDIGKVWVADDGAAVAVWTTPESVEAGAVFAEIGPRMAELSGSRLAAQQQMEGLLAPHRPKEPAWFLATVGVSPDHQGKGLGSAVVLPGVEAAERAGVPAFLETSAPRNLPFYERLGFTVTADVEVPEGPRTWCMTRKPGA

SEQ ID NO: 4598 - protein, 1540 aa, Artificial Sequence
  Synthetic Polypeptide
MALPVTALLLPLALLLHAARPEVQLVESGGGLVQAGGSLRLSCAASGRTFSMGWFRQAPGKEREFVAAITYSGGSPYYADSVKGRFTISRDNAKNTVYLQMNSLKPEDTAVYYCAANPTYGSDWNAENWGQGTQVTVSSGTGGGGSGGGGSGGGGSEFDIQMTQSPSSLSASVGDRVTITCKASDHINNWLAWYQQKPGQAPKLLIYGATTLETGVPSRFSGSGSGTDYTLTISSLQPEDFATYYCQQSWNTPWTFGQGTKLEIKRLEDLKNVFPPEVAVFEPSEAEISHTQKATLVCLATGFYPDHVELSWWVNGKEVHSGVSTDPQPLKEQPALNDSRYCLSSRLRVSATFWQNPRNHFRCQVQFYGLSENDEWTQDRAKPVTQIVSAEAWGRADCGSTTPGERSSLPAFYPGTSGSCSGCGSLSLPLLAGLVAADAVASLLIVGAVFLCARPRRSPAQEDGKVYINMPGRGSTSRVKFSRSADAPAYQQGQNQLYNELNLGRREEYDVLDKRRGRDPEMGGKPQRRKNPQEGLYNELQKDKMAEAYSEIGMKGERRRGKGHDGLYQGLSTATKDTYDALHMQALPPRRAKRSGSGATNFSLLKQAGDVEENPGPMDWIWRILFLVGAATGAHSGPEVQLVESGGGLVQAGGSLRLSCAASGRTFTMGWFRQAPGKEREFVAAISLSPTLAYYADSVKGRFTISRDNAKNTVVLQMNSLKPEDTALYYCAADRKSVMSIRPDYWGQGTQVTVSSGSGGGGSGGGGSGGGGSFEQVQLQQPGAELVKPGASVKMSCKASGYAFSSYWINWMKQKPGQGLEWIGQIYPGDGDTNYNGKFKGRATLTADTSSSTAYMQLSSLTSEDSAVYFCARSITTVVGCAMDYWGQGTSVTVSSTRIQNPDPAVYQLRDSKSSDKSVCLFTDFDSQTNVSQSKDSDVYITDKTVLDMRSMDFKSNSAVAWSNKSDFACANAFNNSIIPEDTFFPSPESSCGTAKPTTTPAPRPPTPAPTIASQPLSLRPEACRPAAGGAVHTRGLDFACDSNLFVASWIAVMIIFRIGMAVAIFCCFFFPSWRRKRKEKQSETSPKEFLTIYEDVKDLKTRRNHEQEQTFPGGGSTIYSMIQSQSSAPTSQEPAYTLYSLIQPSRKSGSRKRNHSPSFNSTIYEVIGKSQPKAQNPARLSRKELENFDVYSSSRRVKFSRSADAPAYQQGQNQLYNELNLGRREEYDVLDKRRGRDPEMGGKPQRRKNPQEGLYNELQKDKMAEAYSEIGMKGERRRGKGHDGLYQGLSTATKDTYDALHMQALPPRRAKRSGSGVKQTLNFDLLKLAGDVESNPGPGHMTEYKPTVRLATRDDVPRAVRTLAAAFADYPATRHTVDPDRHIERVTELQELFLTRVGLDIGKVWVADDGAAVAVWTTPESVEAGAVFAEIGPRMAELSGSRLAAQQQMEGLLAPHRPKEPAWFLATVGVSPDHQGKGLGSAVVLPGVEAAERAGVPAFLETSAPRNLPFYERLGFTVTADVEVPEGPRTWCMTRKPGA

SEQ ID NO: 4599 - protein, 1273 aa, Artificial Sequence
  Synthetic Polypeptide
MALPVTALLLPLALLLHAARPEVQLVESGGGLVQAGGSLRLSCAASGRTFSMGWFRQAPGKEREFVAAITYSGGSPYYADSVKGRFTISRDNAKNTVYLQMNSLKPEDTAVYYCAANPTYGSDWNAENWGQGTQVTVSSLEDLKNVFPPEVAVFEPSEAEISHTQKATLVCLATGFYPDHVELSWWVNGKEVHSGVSTDPQPLKEQPALNDSRYCLSSRLRVSATFWQNPRNHFRCQVQFYGLSENDEWTQDRAKPVTQIVSAEAWGRADCGSTTPGERSSLPAFYPGTSGSCSGCGSLSLPLLAGLVAADAVASLLIVGAVFLCARPRRSPAQEDGKVYINMPGRGSTSRVKFSRSADAPAYQQGQNQLYNELNLGRREEYDVLDKRRGRDPEMGGKPQRRKNPQEGLYNELQKDKMAEAYSEIGMKGERRRGKGHDGLYQGLSTATKDTYDALHMQALPPRRAKRSGSGATNFSLLKQAGDVEENPGPMDWIWRILFLVGAATGAHSGPEVQLVESGGGLVQAGGSLRLSCAASGRTFTMGWFRQAPGKEREFVAAISLSPTLAYYADSVKGRFTISRDNAKNTVVLQMNSLKPEDTALYYCAADRKSVMSIRPDYWGQGTQVTVSSTRIQNPDPAVYQLRDSKSSDKSVCLFTDFDSQTNVSQSKDSDVYITDKTVLDMRSMDFKSNSAVAWSNKSDFACANAFNNSIIPEDTFFPSPESSCGTAKPTTTPAPRPPTPAPTIASQPLSLRPEACRPAAGGAVHTRGLDFACDSNLFVASWIAVMIIFRIGMAVAIFCCFFFPSWRRKRKEKQSETSPKEFLTIYEDVKDLKTRRNHEQEQTFPGGGSTIYSMIQSQSSAPTSQEPAYTLYSLIQPSRKSGSRKRNHSPSFNSTIYEVIGKSQPKAQNPARLSRKELENFDVYSSSRRVKFSRSADAPAYQQGQNQLYNELNLGRREEYDVLDKRRGRDPEMGGKPQRRKNPQEGLYNELQKDKMAEAYSEIGMKGERRRGKGHDGLYQGLSTATKDTYDALHMQALPPRRAKRSGSGVKQTLNFDLLKLAGDVESNPGPGHMTEYKPTVRLATRDDVPRAVRTLAAAFADYPATRHTVDPDRHIERVTELQELFLTRVGLDIGKVWVADDGAAVAVWTTPESVEAGAVFAEIGPRMAELSGSRLAAQQQMEGLLAPHRPKEPAWFLATVGVSPDHQGKGLGSAVVLPGVEAAERAGVPAFLETSAPRNLPFYERLGFTVTADVEVPEGPRTWCMTRKPGA

SEQ ID NO: 4600 - protein, 585 aa, Artificial Sequence; identical to SEQ ID NO: 4431
  Synthetic Polypeptide

SEQ ID NO: 4601 - protein, 1163 aa, Artificial Sequence
  Synthetic Polypeptide
MALPVTALLLPLALLLHAARPDIQMTQSPSSLSASVGDRVTITCKASDHINNWLAWYQQKPGQAPKLLIYGATTLETGVPSRFSGSGSGTDYTLTISSLQPEDFATYYCQQSWNTPWTFGQGTKLEIKRLEAKPTTTPAPRPPTPAPTIASQPLSLRPEACRPAAGGAVHTRGLDFACDSNLFVASWIAVMIIFRIGMAVAIFCCFFFPSWRRKRKEKQSETSPKEFLTIYEDVKDLKTRRNHEQEQTFPGGGSTIYSMIQSQSSAPTSQEPAYTLYSLIQPSRKSGSRKRNHSPSFNSTIYEVIGKSQPKAQNPARLSRKELENFDVYSSTSRVKFSRSADAPAYQQGQNQLYNELNLGRREEYDVLDKRRGRDPEMGGKPQRRKNPQEGLYNELQKDKMAEAYSEIGMKGERRRGKGHDGLYQGLSTATKDTYDALHMQALPPRRAKRSGSGATNFSLLKQAGDVEENPGPMDWIWRILFLVGAATGAHSFEQVQLQQPGAELVKPGASVKMSCKASGYAFSSYWINWMKQKPGQGLEWIGQIYPGDGDTNYNGKFKGRATLTADTSSSTAYMQLSSLTSEDSAVYFCARSITTVVGCAMDYWGQGTSVTVSSTRAKPTTTPAPRPPTPAPTIASQPLSLRPEACRPAAGGAVHTRGLDFACDSNLFVASWIAVMIIFRIGMAVAIFCCFFFPSWRRKRKEKQSETSPKEFLTIYEDVKDLKTRRNHEQEQTFPGGGSTIYSMIQSQSSAPTSQEPAYTLYSLIQPSRKSGSRKRNHSPSFNSTIYEVIGKSQPKAQNPARLSRKELENFDVYSSSRRVKFSRSADAPAYQQGQNQLYNELNLGRREEYDVLDKRRGRDPEMGGKPQRRKNPQEGLYNELQKDKMAEAYSEIGMKGERRRGKGHDGLYQGLSTATKDTYDALHMQALPPRRAKRSGSGVKQTLNFDLLKLAGDVESNPGPGHMTEYKPTVRLATRDDVPRAVRTLAAAFADYPATRHTVDPDRHIERVTELQELFLTRVGLDIGKVWVADDGAAVAVWTTPESVEAGAVFAEIGPRMAELSGSRLAAQQQMEGLLAPHRPKEPAWFLATVGVSPDHQGKGLGSAVVLPGVEAAERAGVPAFLETSAPRNLPFYERLGFTVTADVEVPEGPRTWCMTRKPGA

SEQ ID NO: 4602 - protein, 1215 aa, Artificial Sequence
  Synthetic Polypeptide
MALPVTALLLPLALLLHAARPACEVQLLESGGGLIQPGGSLRLSCAASGFTFSSHAMTWVRQAPGKGLEWVSAISGSGDYTHYADSVKGRFTISRDNSKNTVYLQMNSLRAEDSAVYYCAKDEDGGSLLGHRGQGTLVTVSSGTGGGGSGGGGSGGGGSEFGSLEAKPTTTPAPRPPTPAPTIASQPLSLRPEACRPAAGGAVHTRGLDFACDSNLFVASWIAVMIIFRIGMAVAIFCCFFFPSWRRKRKEKQSETSPKEFLTIYEDVKDLKTRRNHEQEQTFPGGGSTIYSMIQSQSSAPTSQEPAYTLYSLIQPSRKSGSRKRNHSPSFNSTIYEVIGKSQPKAQNPARLSRKELENFDVYSSTSRVKFSRSADAPAYQQGQNQLYNELNLGRREEYDVLDKRRGRDPEMGGKPQRRKNPQEGLYNELQKDKMAEAYSEIGMKGERRRGKGHDGLYQGLSTATKDTYDALHMQALPPRRAKRSGSGATNFSLLKQAGDVEENPGPMDWIWRILFLVGAATGAHSGPEVQLVESGGGLVQAGGSLRLSCAASGRTFSMGWFRQAPGKEREFVAAITYSGGSPYYADSVKGRFTISRDNAKNTVYLQMNSLKPEDTAVYYCAANPTYGSDWNAENWGQGTQVTVSSGSGGGGSGGGGSGGGGSFEGSTRAKPTTTPAPRPPTPAPTIASQPLSLRPEACRPAAGGAVHTRGLDFACDSNLFVASWIAVMIIFRIGMAVAIFCCFFFPSWRRKRKEKQSETSPKEFLTIYEDVKDLKTRRNHEQEQTFPGGGSTIYSMIQSQSSAPTSQEPAYTLYSLIQPSRKSGSRKRNHSPSFNSTIYEVIGKSQPKAQNPARLSRKELENFDVYSSSRRVKFSRSADAPAYQQGQNQLYNELNLGRREEYDVLDKRRGRDPEMGGKPQRRKNPQEGLYNELQKDKMAEAYSEIGMKGERRRGKGHDGLYQGLSTATKDTYDALHMQALPPRRAKRSGSGVKQTLNFDLLKLAGDVESNPGPGHMTEYKPTVRLATRDDVPRAVRTLAAAFADYPATRHTVDPDRHIERVTELQELFLTRVGLDIGKVWVADDGAAVAVWTTPESVEAGAVFAEIGPRMAELSGSRLAAQQQMEGLLAPHRPKEPAWFLATVGVSPDHQGKGLGSAVVLPGVEAAERAGVPAFLETSAPRNLPFYERLGFTVTADVEVPEGPRTWCMTRKPGA

SEQ ID NO: 4603 - protein, 1365 aa, Artificial Sequence
  Synthetic Polypeptide
MALPVTALLLPLALLLHAARPDIQMTQSPSSLSASVGDRVTITCKASDHINNWLAWYQQKPGQAPKLLIYGATTLETGVPSRFSGSGSGTDYTLTISSLQPEDFATYYCQQSWNTPWTFGQGTKLEIKRLEGQPKANPTVTLFPPSSEELQANKATLVCLISDFYPGAVTVAWKADGSPVKAGVETTKPSKQSNNKYAASSYLSLTPEQWKSHRSYSCQVTHEGSTVEKTVAPTECSGSAKPTTTPAPRPPTPAPTIASQPLSLRPEACRPAAGGAVHTRGLDFACDSNLFVASWIAVMIIFRIGMAVAIFCCFFFPSWRRKRKEKQSETSPKEFLTIYEDVKDLKTRRNHEQEQTFPGGGSTIYSMIQSQSSAPTSQEPAYTLYSLIQPSRKSGSRKRNHSPSFNSTIYEVIGKSQPKAQNPARLSRKELENFDVYSSTSRVKFSRSADAPAYQQGQNQLYNELNLGRREEYDVLDKRRGRDPEMGGKPQRRKNPQEGLYNELQKDKMAEAYSEIGMKGERRRGKGHDGLYQGLSTATKDTYDALHMQALPPRRAKRSGSGATNFSLLKQAGDVEENPGPMDWIWRILFLVGAATGAHSFEQVQLQQPGAELVKPGASVKMSCKASGYAFSSYWINWMKQKPGQGLEWIGQIYPGDGDTNYNGKFKGRATLTADTSSSTAYMQLSSLTSEDSAVYFCARSITTVVGCAMDYWGQGTSVTVSSTRASTKGPSVFPLAPSSKSTSGGTAALGCLVKDYFPEPVTVSWNSGALTSGVHTFPAVLQSSGLYSLSSVVTVPSSSLGTQTYICNVNHKPSNTKVDKRVEPKSCGTAKPTTTPAPRPPTPAPTIASQPLSLRPEACRPAAGGAVHTRGLDFACDSNLFVASWIAVMIIFRIGMAVAIFCCFFFPSWRRKRKEKQSETSPKEFLTIYEDVKDLKTRRNHEQEQTFPGGGSTIYSMIQSQSSAPTSQEPAYTLYSLIQPSRKSGSRKRNHSPSFNSTIYEVIGKSQPKAQNPARLSRKELENFDVYSSSRRVKFSRSADAPAYQQGQNQLYNELNLGRREEYDVLDKRRGRDPEMGGKPQRRKNPQEGLYNELQKDKMAEAYSEIGMKGERRRGKGHDGLYQGLSTATKDTYDALHMQALPPRRAKRSGSGVKQTLNFDLLKLAGDVESNPGPGHMATYEVLCEVARKLGTDDREVVLFLLNVFIPQPTLAQLIGALRALKEEGRLTFPLLAECLFRAGRRDLLRDLLHLDPRFLERHLAGTMSYFSPYQLTVLHVDGELCARDIRSLIFLSKDTIGSRSTPQTFLHWVYCMENLDLLGPTDVDALMSMLRSLSRVDLQRQVQTLMGLHLSGPSHSQHYRHTP

SEQ ID NO: 4604 - protein, 1418 aa, Artificial Sequence
  Synthetic Polypeptide
MALPVTALLLPLALLLHAARPDIQMTQSPSSLSASVGDRVTITCKASDHINNWLAWYQQKPGQAPKLLIYGATTLETGVPSRFSGSGSGTDYTLTISSLQPEDFATYYCQQSWNTPWTFGQGTKLEIKRLEGQPKANPTVTLFPPSSEELQANKATLVCLISDFYPGAVTVAWKADGSPVKAGVETTKPSKQSNNKYAASSYLSLTPEQWKSHRSYSCQVTHEGSTVEKTVAPTECSGSAKPTTTPAPRPPTPAPTIASQPLSLRPEACRPAAGGAVHTRGLDFACDSNLFVASWIAVMIIFRIGMAVAIFCCFFFPSWRRKRKEKQSETSPKEFLTIYEDVKDLKTRRNHEQEQTFPGGGSTIYSMIQSQSSAPTSQEPAYTLYSLIQPSRKSGSRKRNHSPSFNSTIYEVIGKSQPKAQNPARLSRKELENFDVYSSTSRVKFSRSADAPAYQQGQNQLYNELNLGRREEYDVLDKRRGRDPEMGGKPQRRKNPQEGLYNELQKDKMAEAYSEIGMKGERRRGKGHDGLYQGLSTATKDTYDALHMQALPPRRAKRSGSGATNFSLLKQAGDVEENPGPMDWIWRILFLVGAATGAHSFEQVQLQQPGAELVKPGASVKMSCKASGYAFSSYWINWMKQKPGQGLEWIGQIYPGDGDTNYNGKFKGRATLTADTSSSTAYMQLSSLTSEDSAVYFCARSITTVVGCAMDYWGQGTSVTVSSTRASTKGPSVFPLAPSSKSTSGGTAALGCLVKDYFPEPVTVSWNSGALTSGVHTFPAVLQSSGLYSLSSVVTVPSSSLGTQTYICNVNHKPSNTKVDKRVEPKSCGTAKPTTTPAPRPPTPAPTIASQPLSLRPEACRPAAGGAVHTRGLDFACDSNLFVASWIAVMIIFRIGMAVAIFCCFFFPSWRRKRKEKQSETSPKEFLTIYEDVKDLKTRRNHEQEQTFPGGGSTIYSMIQSQSSAPTSQEPAYTLYSLIQPSRKSGSRKRNHSPSFNSTIYEVIGKSQPKAQNPARLSRKELENFDVYSSSRRVKFSRSADAPAYQQGQNQLYNELNLGRREEYDVLDKRRGRDPEMGGKPQRRKNPQEGLYNELQKDKMAEAYSEIGMKGERRRGKGHDGLYQGLSTATKDTYDALHMQALPPRRAKRSGSGVKQTLNFDLLKLAGDVESNPGPGHMSDSKEVPSLPFLRHLLEELDSHEDSLLLFLCHDAAPGCTTVTQALCSLSQQRKLTLAALVEMLYVLQRMDLLKSRFGLSKEGAEQLLGTSFLTRYRKLMVCVGEELDSSELRALRLFACNLNPSLSTALSESSRFVELVLALENVGLVSPSSVSVLADMLRTLRRLDLCQQLVEYEQQEQARYRYCYAASPSLPVRTLRRGHGASEHEQLCMPVQESSDSPELLRTPVQESSSDSPEQTT

SEQ ID NO: 4605 - protein, 1376 aa, Artificial Sequence
  Synthetic Polypeptide
MALPVTALLLPLALLLHAARPDIQMTQSPSSLSASVGDRVTITCKASDHINNWLAWYQQKPGQAPKLLIYGATTLETGVPSRFSGSGSGTDYTLTISSLQPEDFATYYCQQSWNTPWTFGQGTKLEIKRLEGQPKANPTVTLFPPSSEELQANKATLVCLISDFYPGAVTVAWKADGSPVKAGVETTKPSKQSNNKYAASSYLSLTPEQWKSHRSYSCQVTHEGSTVEKTVAPTECSGSAKPTTTPAPRPPTPAPTIASQPLSLRPEACRPAAGGAVHTRGLDFACDSNLFVASWIAVMIIFRIGMAVAIFCCFFFPSWRRKRKEKQSETSPKEFLTIYEDVKDLKTRRNHEQEQTFPGGGSTIYSMIQSQSSAPTSQEPAYTLYSLIQPSRKSGSRKRNHSPSFNSTIYEVIGKSQPKAQNPARLSRKELENFDVYSSTSRVKFSRSADAPAYQQGQNQLYNELNLGRREEYDVLDKRRGRDPEMGGKPQRRKNPQEGLYNELQKDKMAEAYSEIGMKGERRRGKGHDGLYQGLSTATKDTYDALHMQALPPRRAKRSGSGATNFSLLKQAGDVEENPGPMDWIWRILFLVGAATGAHSFEQVQLQQPGAELVKPGASVKMSCKASGYAFSSYWINWMKQKPGQGLEWIGQIYPGDGDTNYNGKFKGRATLTADTSSSTAYMQLSSLTSEDSAVYFCARSITTVVGCAMDYWGQGTSVTVSSTRASTKGPSVFPLAPSSKSTSGGTAALGCLVKDYFPEPVTVSWNSGALTSGVHTFPAVLQSSGLYSLSSVVTVPSSSLGTQTYICNVNHKPSNTKVDKRVEPKSCGTAKPTTTPAPRPPTPAPTIASQPLSLRPEACRPAAGGAVHTRGLDFACDSNLFVASWIAVMIIFRIGMAVAIFCCFFFPSWRRKRKEKQSETSPKEFLTIYEDVKDLKTRRNHEQEQTFPGGGSTIYSMIQSQSSAPTSQEPAYTLYSLIQPSRKSGSRKRNHSPSFNSTIYEVIGKSQPKAQNPARLSRKELENFDVYSSSRRVKFSRSADAPAYQQGQNQLYNELNLGRREEYDVLDKRRGRDPEMGGKPQRRKNPQEGLYNELQKDKMAEAYSEIGMKGERRRGKGHDGLYQGLSTATKDTYDALHMQALPPRRAKRSGSGVKQTLNFDLLKLAGDVESNPGPGHMTEYKPTVRLATRDDVPRAVRTLAAAFADYPATRHTVDPDRHIERVTELQELFLTRVGLDIGKVWVADDGAAVAVWTTPESVEAGAVFAEIGPRMAELSGSRLAAQQQMEGLLAPHRPKEPAWFLATVGVSPDHQGKGLGSAVVLPGVEAAERAGVPAFLETSAPRNLPFYERLGFTVTADVEVPEGPRTWCMTRKPGA

SEQ ID NO: 4606 - protein, 1513 aa, Artificial Sequence
  Synthetic Polypeptide
MALPVTALLLPLALLLHAARPEVQLVESGGGLVQAGGSLRLSCAASGRTFSMGWFRQAPGKEREFVAAITYSGGSPYYADSVKGRFTISRDNAKNTVYLQMNSLKPEDTAVYYCAANPTYGSDWNAENWGQGTQVTVSSGTGGGGSGGGGSGGGGSEFDIQMTQSPSSLSASVGDRVTITCKASDHINNWLAWYQQKPGQAPKLLIYGATTLETGVPSRFSGSGSGTDYTLTISSLQPEDFATYYCQQSWNTPWTFGQGTKLEIKRLEGQPKANPTVTLFPPSSEELQANKATLVCLISDFYPGAVTVAWKADGSPVKAGVETTKPSKQSNNKYAASSYLSLTPEQWKSHRSYSCQVTHEGSTVEKTVAPTECSGSAKPTTTPAPRPPTPAPTIASQPLSLRPEACRPAAGGAVHTRGLDFACDSNLFVASWIAVMIIFRIGMAVAIFCCFFFPSWRRKRKEKQSETSPKEFLTIYEDVKDLKTRRNHEQEQTFPGGGSTIYSMIQSQSSAPTSQEPAYTLYSLIQPSRKSGSRKRNHSPSFNSTIYEVIGKSQPKAQNPARLSRKELENFDVYSSTSRVKFSRSADAPAYQQGQNQLYNELNLGRREEYDVLDKRRGRDPEMGGKPQRRKNPQEGLYNELQKDKMAEAYSEIGMKGERRRGKGHDGLYQGLSTATKDTYDALHMQALPPRRAKRSGSGATNFSLLKQAGDVEENPGPMDWIWRILFLVGAATGAHSFEQVQLQQPGAELVKPGASVKMSCKASGYAFSSYWINWMKQKPGQGLEWIGQIYPGDGDTNYNGKFKGRATLTADTSSSTAYMQLSSLTSEDSAVYFCARSITTVVGCAMDYWGQGTSVTVSSTRASTKGPSVFPLAPSSKSTSGGTAALGCLVKDYFPEPVTVSWNSGALTSGVHTFPAVLQSSGLYSLSSVVTVPSSSLGTQTYICNVNHKPSNTKVDKRVEPKSCGTAKPTTTPAPRPPTPAPTIASQPLSLRPEACRPAAGGAVHTRGLDFACDSNLFVASWIAVMIIFRIGMAVAIFCCFFFPSWRRKRKEKQSETSPKEFLTIYEDVKDLKTRRNHEQEQTFPGGGSTIYSMIQSQSSAPTSQEPAYTLYSLIQPSRKSGSRKRNHSPSFNSTIYEVIGKSQPKAQNPARLSRKELENFDVYSSSRRVKFSRSADAPAYQQGQNQLYNELNLGRREEYDVLDKRRGRDPEMGGKPQRRKNPQEGLYNELQKDKMAEAYSEIGMKGERRRGKGHDGLYQGLSTATKDTYDALHMQALPPRRAKRSGSGVKQTLNFDLLKLAGDVESNPGPGHMTEYKPTVRLATRDDVPRAVRTLAAAFADYPATRHTVDPDRHIERVTELQELFLTRVGLDIGKVWVADDGAAVAVWTTPESVEAGAVFAEIGPRMAELSGSRLAAQQQMEGLLAPHRPKEPAWFLATVGVSPDHQGKGLGSAVVLPGVEAAERAGVPAFLETSAPRNLPFYERLGFTVTADVEVPEGPRTWCMTRKPGA

SEQ ID NO: 4607 - protein, 1650 aa, Artificial Sequence
  Synthetic Polypeptide
MALPVTALLLPLALLLHAARPEVQLVESGGGLVQAGGSLRLSCAASGRTFSMGWFRQAPGKEREFVAAITYSGGSPYYADSVKGRFTISRDNAKNTVYLQMNSLKPEDTAVYYCAANPTYGSDWNAENWGQGTQVTVSSGTGGGGSGGGGSGGGGSEFDIQMTQSPSSLSASVGDRVTITCKASDHINNWLAWYQQKPGQAPKLLIYGATTLETGVPSRFSGSGSGTDYTLTISSLQPEDFATYYCQQSWNTPWTFGQGTKLEIKRLEGQPKANPTVTLFPPSSEELQANKATLVCLISDFYPGAVTVAWKADGSPVKAGVETTKPSKQSNNKYAASSYLSLTPEQWKSHRSYSCQVTHEGSTVEKTVAPTECSGSAKPTTTPAPRPPTPAPTIASQPLSLRPEACRPAAGGAVHTRGLDFACDSNLFVASWIAVMIIFRIGMAVAIFCCFFFPSWRRKRKEKQSETSPKEFLTIYEDVKDLKTRRNHEQEQTFPGGGSTIYSMIQSQSSAPTSQEPAYTLYSLIQPSRKSGSRKRNHSPSFNSTIYEVIGKSQPKAQNPARLSRKELENFDVYSSTSRVKFSRSADAPAYQQGQNQLYNELNLGRREEYDVLDKRRGRDPEMGGKPQRRKNPQEGLYNELQKDKMAEAYSEIGMKGERRRGKGHDGLYQGLSTATKDTYDALHMQALPPRRAKRSGSGATNFSLLKQAGDVEENPGPMDWIWRILFLVGAATGAHSGPEVQLVESGGGLVQAGGSLRLSCAASGRTFTMGWFRQAPGKEREFVAAISLSPTLAYYADSVKGRFTISRDNAKNTVVLQMNSLKPEDTALYYCAADRKSVMSIRPDYWGQGTQVTVSSGSGGGGSGGGGSGGGGSFEQVQLQQPGAELVKPGASVKMSCKASGYAFSSYWINWMKQKPGQGLEWIGQIYPGDGDTNYNGKFKGRATLTADTSSSTAYMQLSSLTSEDSAVYFCARSITTVVGCAMDYWGQGTSVTVSSTRASTKGPSVFPLAPSSKSTSGGTAALGCLVKDYFPEPVTVSWNSGALTSGVHTFPAVLQSSGLYSLSSVVTVPSSSLGTQTYICNVNHKPSNTKVDKRVEPKSCGTAKPTTTPAPRPPTPAPTIASQPLSLRPEACRPAAGGAVHTRGLDFACDSNLFVASWIAVMIIFRIGMAVAIFCCFFFPSWRRKRKEKQSETSPKEFLTIYEDVKDLKTRRNHEQEQTFPGGGSTIYSMIQSQSSAPTSQEPAYTLYSLIQPSRKSGSRKRNHSPSFNSTIYEVIGKSQPKAQNPARLSRKELENFDVYSSSRRVKFSRSADAPAYQQGQNQLYNELNLGRREEYDVLDKRRGRDPEMGGKPQRRKNPQEGLYNELQKDKMAEAYSEIGMKGERRRGKGHDGLYQGLSTATKDTYDALHMQALPPRRAKRSGSGVKQTLNFDLLKLAGDVESNPGPGHMTEYKPTVRLATRDDVPRAVRTLAAAFADYPATRHTVDPDRHIERVTELQELFLTRVGLDIGKVWVADDGAAVAVWTTPESVEAGAVFAEIGPRMAELSGSRLAAQQQMEGLLAPHRPKEPAWFLATVGVSPDHQGKGLGSAVVLPGVEAAERAGVPAFLETSAPRNLPFYERLGFTVTADVEVPEGPRTWCMTRKPGA

SEQ ID NO: 4608 - protein, 1383 aa, Artificial Sequence
  Synthetic Polypeptide
MALPVTALLLPLALLLHAARPEVQLVESGGGLVQAGGSLRLSCAASGRTFSMGWFRQAPGKEREFVAAITYSGGSPYYADSVKGRFTISRDNAKNTVYLQMNSLKPEDTAVYYCAANPTYGSDWNAENWGQGTQVTVSSLEGQPKANPTVTLFPPSSEELQANKATLVCLISDFYPGAVTVAWKADGSPVKAGVETTKPSKQSNNKYAASSYLSLTPEQWKSHRSYSCQVTHEGSTVEKTVAPTECSGSAKPTTTPAPRPPTPAPTIASQPLSLRPEACRPAAGGAVHTRGLDFACDSNLFVASWIAVMIIFRIGMAVAIFCCFFFPSWRRKRKEKQSETSPKEFLTIYEDVKDLKTRRNHEQEQTFPGGGSTIYSMIQSQSSAPTSQEPAYTLYSLIQPSRKSGSRKRNHSPSFNSTIYEVIGKSQPKAQNPARLSRKELENFDVYSSTSRVKFSRSADAPAYQQGQNQLYNELNLGRREEYDVLDKRRGRDPEMGGKPQRRKNPQEGLYNELQKDKMAEAYSEIGMKGERRRGKGHDGLYQGLSTATKDTYDALHMQALPPRRAKRSGSGATNFSLLKQAGDVEENPGPMDWIWRILFLVGAATGAHSGPEVQLVESGGGLVQAGGSLRLSCAASGRTFTMGWFRQAPGKEREFVAAISLSPTLAYYADSVKGRFTISRDNAKNTVVLQMNSLKPEDTALYYCAADRKSVMSIRPDYWGQGTQVTVSSTRASTKGPSVFPLAPSSKSTSGGTAALGCLVKDYFPEPVTVSWNSGALTSGVHTFPAVLQSSGLYSLSSVVTVPSSSLGTQTYICNVNHKPSNTKVDKRVEPKSCGTAKPTTTPAPRPPTPAPTIASQPLSLRPEACRPAAGGAVHTRGLDFACDSNLFVASWIAVMIIFRIGMAVAIFCCFFFPSWRRKRKEKQSETSPKEFLTIYEDVKDLKTRRNHEQEQTFPGGGSTIYSMIQSQSSAPTSQEPAYTLYSLIQPSRKSGSRKRNHSPSFNSTIYEVIGKSQPKAQNPARLSRKELENFDVYSSSRRVKFSRSADAPAYQQGQNQLYNELNLGRREEYDVLDKRRGRDPEMGGKPQRRKNPQEGLYNELQKDKMAEAYSEIGMKGERRRGKGHDGLYQGLSTATKDTYDALHMQALPPRRAKRSGSGVKQTLNFDLLKLAGDVESNPGPGHMTEYKPTVRLATRDDVPRAVRTLAAAFADYPATRHTVDPDRHIERVTELQELFLTRVGLDIGKVWVADDGAAVAVWTTPESVEAGAVFAEIGPRMAELSGSRLAAQQQMEGLLAPHRPKEPAWFLATVGVSPDHQGKGLGSAVVLPGVEAAERAGVPAFLETSAPRNLPFYERLGFTVTADVEVPEGPRTWCMTRKPGA

SEQ ID NO: 4609 - protein, 1391 aa, Artificial Sequence
  Synthetic Polypeptide
MALPVTALLLPLALLLHAARPDIQMTQSPSSLSASVGDRVTITCKASDHINNWLAWYQQKPGQAPKLLIYGATTLETGVPSRFSGSGSGTDYTLTISSLQPEDFATYYCQQSWNTPWTFGQGTKLEIKRLEDLKNVFPPEVAVFEPSEAEISHTQKATLVCLATGFYPDHVELSWWVNGKEVHSGVSTDPQPLKEQPALNDSRYCLSSRLRVSATFWQNPRNHFRCQVQFYGLSENDEWTQDRAKPVTQIVSAEAWGRADCGSAKPTTTPAPRPPTPAPTIASQPLSLRPEACRPAAGGAVHTRGLDFACDSNLFVASWIAVMIIFRIGMAVAIFCCFFFPSWRRKRKEKQSETSPKEFLTIYEDVKDLKTRRNHEQEQTFPGGGSTIYSMIQSQSSAPTSQEPAYTLYSLIQPSRKSGSRKRNHSPSFNSTIYEVIGKSQPKAQNPARLSRKELENFDVYSSTSRVKFSRSADAPAYQQGQNQLYNELNLGRREEYDVLDKRRGRDPEMGGKPQRRKNPQEGLYNELQKDKMAEAYSEIGMKGERRRGKGHDGLYQGLSTATKDTYDALHMQALPPRRAKRSGSGATNFSLLKQAGDVEENPGPMDWIWRILFLVGAATGAHSFEQVQLQQPGAELVKPGASVKMSCKASGYAFSSYWINWMKQKPGQGLEWIGQIYPGDGDTNYNGKFKGRATLTADTSSSTAYMQLSSLTSEDSAVYFCARSITTVVGCAMDYWGQGTSVTVSSTRIQNPDPAVYQLRDSKSSDKSVCLFTDFDSQTNVSQSKDSDVYITDKTVLDMRSMDFKSNSAVAWSNKSDFACANAFNNSIIPEDTFFPSPESSCGTAKPTTTPAPRPPTPAPTIASQPLSLRPEACRPAAGGAVHTRGLDFACDSNLFVASWIAVMIIFRIGMAVAIFCCFFFPSWRRKRKEKQSETSPKEFLTIYEDVKDLKTRRNHEQEQTFPGGGSTIYSMIQSQSSAPTSQEPAYTLYSLIQPSRKSGSRKRNHSPSFNSTIYEVIGKSQPKAQNPARLSRKELENFDVYSSSRRVKFSRSADAPAYQQGQNQLYNELNLGRREEYDVLDKRRGRDPEMGGKPQRRKNPQEGLYNELQKDKMAEAYSEIGMKGERRRGKGHDGLYQGLSTATKDTYDALHMQALPPRRAKRSGSGVKQTLNFDLLKLAGDVESNPGPGHMTEYKPTVRLATRDDVPRAVRTLAAAFADYPATRHTVDPDRHIERVTELQELFLTRVGLDIGKVWVADDGAAVAVWTTPESVEAGAVFAEIGPRMAELSGSRLAAQQQMEGLLAPHRPKEPAWFLATVGVSPDHQGKGLGSAVVLPGVEAAERAGVPAFLETSAPRNLPFYERLGFTVTADVEVPEGPRTWCMTRKPGA

SEQ ID NO: 4610 - protein, 1528 aa, Artificial Sequence
  Synthetic Polypeptide
MALPVTALLLPLALLLHAARPEVQLVESGGGLVQAGGSLRLSCAASGRTFSMGWFRQAPGKEREFVAAITYSGGSPYYADSVKGRFTISRDNAKNTVYLQMNSLKPEDTAVYYCAANPTYGSDWNAENWGQGTQVTVSSGTGGGGSGGGGSGGGGSEFDIQMTQSPSSLSASVGDRVTITCKASDHINNWLAWYQQKPGQAPKLLIYGATTLETGVPSRFSGSGSGTDYTLTISSLQPEDFATYYCQQSWNTPWTFGQGTKLEIKRLEDLKNVFPPEVAVFEPSEAEISHTQKATLVCLATGFYPDHVELSWWVNGKEVHSGVSTDPQPLKEQPALNDSRYCLSSRLRVSATFWQNPRNHFRCQVQFYGLSENDEWTQDRAKPVTQIVSAEAWGRADCGSAKPTTTPAPRPPTPAPTIASQPLSLRPEACRPAAGGAVHTRGLDFACDSNLFVASWIAVMIIFRIGMAVAIFCCFFFPSWRRKRKEKQSETSPKEFLTIYEDVKDLKTRRNHEQEQTFPGGGSTIYSMIQSQSSAPTSQEPAYTLYSLIQPSRKSGSRKRNHSPSFNSTIYEVIGKSQPKAQNPARLSRKELENFDVYSSTSRVKFSRSADAPAYQQGQNQLYNELNLGRREEYDVLDKRRGRDPEMGGKPQRRKNPQEGLYNELQKDKMAEAYSEIGMKGERRRGKGHDGLYQGLSTATKDTYDALHMQALPPRRAKRSGSGATNFSLLKQAGDVEENPGPMDWIWRILFLVGAATGAHSFEQVQLQQPGAELVKPGASVKMSCKASGYAFSSYWINWMKQKPGQGLEWIGQIYPGDGDTNYNGKFKGRATLTADTSSSTAYMQLSSLTSEDSAVYFCARSITTVVGCAMDYWGQGTSVTVSSTRIQNPDPAVYQLRDSKSSDKSVCLFTDFDSQTNVSQSKDSDVYITDKTVLDMRSMDFKSNSAVAWSNKSDFACANAFNNSIIPEDTFFPSPESSCGTAKPTTTPAPRPPTPAPTIASQPLSLRPEACRPAAGGAVHTRGLDFACDSNLFVASWIAVMIIFRIGMAVAIFCCFFFPSWRRKRKEKQSETSPKEFLTIYEDVKDLKTRRNHEQEQTFPGGGSTIYSMIQSQSSAPTSQEPAYTLYSLIQPSRKSGSRKRNHSPSFNSTIYEVIGKSQPKAQNPARLSRKELENFDVYSSSRRVKFSRSADAPAYQQGQNQLYNELNLGRREEYDVLDKRRGRDPEMGGKPQRRKNPQEGLYNELQKDKMAEAYSEIGMKGERRRGKGHDGLYQGLSTATKDTYDALHMQALPPRRAKRSGSGVKQTLNFDLLKLAGDVESNPGPGHMTEYKPTVRLATRDDVPRAVRTLAAAFADYPATRHTVDPDRHIERVTELQELFLTRVGLDIGKVWVADDGAAVAVWTTPESVEAGAVFAEIGPRMAELSGSRLAAQQQMEGLLAPHRPKEPAWFLATVGVSPDHQGKGLGSAVVLPGVEAAERAGVPAFLETSAPRNLPFYERLGFTVTADVEVPEGPRTWCMTRKPGA

SEQ ID NO: 4611 - protein, 1665 aa, Artificial Sequence
  Synthetic Polypeptide
MALPVTALLLPLALLLHAARPEVQLVESGGGLVQAGGSLRLSCAASGRTFSMGWFRQAPGKEREFVAAITYSGGSPYYADSVKGRFTISRDNAKNTVYLQMNSLKPEDTAVYYCAANPTYGSDWNAENWGQGTQVTVSSGTGGGGSGGGGSGGGGSEFDIQMTQSPSSLSASVGDRVTITCKASDHINNWLAWYQQKPGQAPKLLIYGATTLETGVPSRFSGSGSGTDYTLTISSLQPEDFATYYCQQSWNTPWTFGQGTKLEIKRLEDLKNVFPPEVAVFEPSEAEISHTQKATLVCLATGFYPDHVELSWWVNGKEVHSGVSTDPQPLKEQPALNDSRYCLSSRLRVSATFWQNPRNHFRCQVQFYGLSENDEWTQDRAKPVTQIVSAEAWGRADCGSAKPTTTPAPRPPTPAPTIASQPLSLRPEACRPAAGGAVHTRGLDFACDSNLFVASWIAVMIIFRIGMAVAIFCCFFFPSWRRKRKEKQSETSPKEFLTIYEDVKDLKTRRNHEQEQTFPGGGSTIYSMIQSQSSAPTSQEPAYTLYSLIQPSRKSGSRKRNHSPSFNSTIYEVIGKSQPKAQNPARLSRKELENFDVYSSTSRVKFSRSADAPAYQQGQNQLYNELNLGRREEYDVLDKRRGRDPEMGGKPQRRKNPQEGLYNELQKDKMAEAYSEIGMKGERRRGKGHDGLYQGLSTATKDTYDALHMQALPPRRAKRSGSGATNFSLLKQAGDVEENPGPMDWIWRILFLVGAATGAHSGPEVQLVESGGGLVQAGGSLRLSCAASGRTFTMGWFRQAPGKEREFVAAISLSPTLAYYADSVKGRFTISRDNAKNTVVLQMNSLKPEDTALYYCAADRKSVMSIRPDYWGQGTQVTVSSGSGGGGSGGGGSGGGGSFEQVQLQQPGAELVKPGASVKMSCKASGYAFSSYWINWMKQKPGQGLEWIGQIYPGDGDTNYNGKFKGRATLTADTSSSTAYMQLSSLTSEDSAVYFCARSITTVVGCAMDYWGQGTSVTVSSTRIQNPDPAVYQLRDSKSSDKSVCLFTDFDSQTNVSQSKDSDVYITDKTVLDMRSMDFKSNSAVAWSNKSDFACANAFNNSIIPEDTFFPSPESSCGTAKPTTTPAPRPPTPAPTIASQPLSLRPEACRPAAGGAVHTRGLDFACDSNLFVASWIAVMIIFRIGMAVAIFCCFFFPSWRRKRKEKQSETSPKEFLTIYEDVKDLKTRRNHEQEQTFPGGGSTIYSMIQSQSSAPTSQEPAYTLYSLIQPSRKSGSRKRNHSPSFNSTIYEVIGKSQPKAQNPARLSRKELENFDVYSSSRRVKFSRSADAPAYQQGQNQLYNELNLGRREEYDVLDKRRGRDPEMGGKPQRRKNPQEGLYNELQKDKMAEAYSEIGMKGERRRGKGHDGLYQGLSTATKDTYDALHMQALPPRRAKRSGSGVKQTLNFDLLKLAGDVESNPGPGHMTEYKPTVRLATRDDVPRAVRTLAAAFADYPATRHTVDPDRHIERVTELQELFLTRVGLDIGKVWVADDGAAVAVWTTPESVEAGAVFAEIGPRMAELSGSRLAAQQQMEGLLAPHRPKEPAWFLATVGVSPDHQGKGLGSAVVLPGVEAAERAGVPAFLETSAPRNLPFYERLGFTVTADVEVPEGPRTWCMTRKPGA

SEQ ID NO: 4612 - protein, 1398 aa, Artificial Sequence
  Synthetic Polypeptide
MALPVTALLLPLALLLHAARPEVQLVESGGGLVQAGGSLRLSCAASGRTFSMGWFRQAPGKEREFVAAITYSGGSPYYADSVKGRFTISRDNAKNTVYLQMNSLKPEDTAVYYCAANPTYGSDWNAENWGQGTQVTVSSLEDLKNVFPPEVAVFEPSEAEISHTQKATLVCLATGFYPDHVELSWWVNGKEVHSGVSTDPQPLKEQPALNDSRYCLSSRLRVSATFWQNPRNHFRCQVQFYGLSENDEWTQDRAKPVTQIVSAEAWGRADCGSAKPTTTPAPRPPTPAPTIASQPLSLRPEACRPAAGGAVHTRGLDFACDSNLFVASWIAVMIIFRIGMAVAIFCCFFFPSWRRKRKEKQSETSPKEFLTIYEDVKDLKTRRNHEQEQTFPGGGSTIYSMIQSQSSAPTSQEPAYTLYSLIQPSRKSGSRKRNHSPSFNSTIYEVIGKSQPKAQNPARLSRKELENFDVYSSTSRVKFSRSADAPAYQQGQNQLYNELNLGRREEYDVLDKRRGRDPEMGGKPQRRKNPQEGLYNELQKDKMAEAYSEIGMKGERRRGKGHDGLYQGLSTATKDTYDALHMQALPPRRAKRSGSGATNFSLLKQAGDVEENPGPMDWIWRILFLVGAATGAHSGPEVQLVESGGGLVQAGGSLRLSCAASGRTFTMGWFRQAPGKEREFVAAISLSPTLAYYADSVKGRFTISRDNAKNTVVLQMNSLKPEDTALYYCAADRKSVMSIRPDYWGQGTQVTVSSTRIQNPDPAVYQLRDSKSSDKSVCLFTDFDSQTNVSQSKDSDVYITDKTVLDMRSMDFKSNSAVAWSNKSDFACANAFNNSIIPEDTFFPSPESSCGTAKPTTTPAPRPPTPAPTIASQPLSLRPEACRPAAGGAVHTRGLDFACDSNLFVASWIAVMIIFRIGMAVAIFCCFFFPSWRRKRKEKQSETSPKEFLTIYEDVKDLKTRRNHEQEQTFPGGGSTIYSMIQSQSSAPTSQEPAYTLYSLIQPSRKSGSRKRNHSPSFNSTIYEVIGKSQPKAQNPARLSRKELENFDVYSSSRRVKFSRSADAPAYQQGQNQLYNELNLGRREEYDVLDKRRGRDPEMGGKPQRRKNPQEGLYNELQKDKMAEAYSEIGMKGERRRGKGHDGLYQGLSTATKDTYDALHMQALPPRRAKRSGSGVKQTLNFDLLKLAGDVESNPGPGHMTEYKPTVRLATRDDVPRAVRTLAAAFADYPATRHTVDPDRHIERVTELQELFLTRVGLDIGKVWVADDGAAVAVWTTPESVEAGAVFAEIGPRMAELSGSRLAAQQQMEGLLAPHRPKEPAWFLATVGVSPDHQGKGLGSAVVLPGVEAAERAGVPAFLETSAPRNLPFYERLGFTVTADVEVPEGPRTWCMTRKPGA

SEQ ID NO: 4613 - protein, 710 aa, Artificial Sequence
  Synthetic Polypeptide
MALPVTALLLPLALLLHAARPACEVQLLESGGGLIQPGGSLRLSCAASGFTFSSHAMTWVRQAPGKGLEWVSAISGSGDYTHYADSVKGRFTISRDNSKNTVYLQMNSLRAEDSAVYYCAKDEDGGSLLGHRGQGTLVTVSSGTGGGGSGGGGSGGGGSEFGSLEAKPTTTPAPRPPTPAPTIASQPLSLRPEACRPAAGGAVHTRGLDFACDSNLFVASWIAVMIIFRIGMAVAIFCCFFFPSWRRKRKEKQSETSPKEFLTIYEDVKDLKTRRNHEQEQTFPGGGSTIYSMIQSQSSAPTSQEPAYTLYSLIQPSRKSGSRKRNHSPSFNSTIYEVIGKSQPKAQNPARLSRKELENFDVYSSTSRVKFSRSADAPAYQQGQNQLYNELNLGRREEYDVLDKRRGRDPEMGGKPQRRKNPQEGLYNELQKDKMAEAYSEIGMKGERRRGKGHDGLYQGLSTATKDTYDALHMQALPPRRAKRSGSGATNFSLLKQAGDVEENPGPTRGHMTEYKPTVRLATRDDVPRAVRTLAAAFADYPATRHTVDPDRHIERVTELQELFLTRVGLDIGKVWVADDGAAVAVWTTPESVEAGAVFAEIGPRMAELSGSRLAAQQQMEGLLAPHRPKEPAWFLATVGVSPDHQGKGLGSAVVLPGVEAAERAGVPAFLETSAPRNLPFYERLGFTVTADVEVPEGPRTWCMTRKPGA

SEQ ID NO: 4614 - protein, 1038 aa, Artificial Sequence
  Synthetic Polypeptide
MALPVTALLLPLALLLHAARPDIQMTQSPSSLSASVGDRVTITCKASDHINNWLAWYQQKPGQAPKLLIYGATTLETGVPSRFSGSGSGTDYTLTISSLQPEDFATYYCQQSWNTPWTFGQGTKLEIKRLETTPGERSSLPAFYPGTSGSCSGCGSLSLPLLAGLVAADAVASLLIVGAVFLCARPRRSPAQEDGKVYINMPGRGSTSRVKFSRSADAPAYQQGQNQLYNELNLGRREEYDVLDKRRGRDPEMGGKPQRRKNPQEGLYNELQKDKMAEAYSEIGMKGERRRGKGHDGLYQGLSTATKDTYDALHMQALPPRRAKRSGSGATNFSLLKQAGDVEENPGPMDWIWRILFLVGAATGAHSFEQVQLQQPGAELVKPGASVKMSCKASGYAFSSYWINWMKQKPGQGLEWIGQIYPGDGDTNYNGKFKGRATLTADTSSSTAYMQLSSLTSEDSAVYFCARSITTVVGCAMDYWGQGTSVTVSSTRAKPTTTPAPRPPTPAPTIASQPLSLRPEAARPAAGGAVHTRGLDFACDSNLFVASWIAVMIIFRIGMAVAIFCCFFFPSWRRKRKEKQSETSPKEFLTIYEDVKDLKTRRNHEQEQTFPGGGSTIYSMIQSQSSAPTSQEPAYTLYSLIQPSRKSGSRKRNHSPSFNSTIYEVIGKSQPKAQNPARLSRKELENFDVYSSSRRVKFSRSADAPAYQQGQNQLYNELNLGRREEYDVLDKRRGRDPEMGGKPQRRKNPQEGLYNELQKDKMAEAYSEIGMKGERRRGKGHDGLYQGLSTATKDTYDALHMQALPPRRAKRSGSGVKQTLNFDLLKLAGDVESNPGPGHMTEYKPTVRLATRDDVPRAVRTLAAAFADYPATRHTVDPDRHIERVTELQELFLTRVGLDIGKVWVADDGAAVAVWTTPESVEAGAVFAEIGPRMAELSGSRLAAQQQMEGLLAPHRPKEPAWFLATVGVSPDHQGKGLGSAVVLPGVEAAERAGVPAFLETSAPRNLPFYERLGFTVTADVEVPEGPRTWCMTRKPGA

SEQ ID NO: 4615 - protein, 1090 aa, Artificial Sequence
  Synthetic Polypeptide
MALPVTALLLPLALLLHAARPACEVQLLESGGGLIQPGGSLRLSCAASGFTFSSHAMTWVRQAPGKGLEWVSAISGSGDYTHYADSVKGRFTISRDNSKNTVYLQMNSLRAEDSAVYYCAKDEDGGSLLGHRGQGTLVTVSSGTGGGGSGGGGSGGGGSEFGSLETTPGERSSLPAFYPGTSGSCSGCGSLSLPLLAGLVAADAVASLLIVGAVFLCARPRRSPAQEDGKVYINMPGRGSTSRVKFSRSADAPAYQQGQNQLYNELNLGRREEYDVLDKRRGRDPEMGGKPQRRKNPQEGLYNELQKDKMAEAYSEIGMKGERRRGKGHDGLYQGLSTATKDTYDALHMQALPPRRAKRSGSGATNFSLLKQAGDVEENPGPMDWIWRILFLVGAATGAHSGPEVQLVESGGGLVQAGGSLRLSCAASGRTFSMGWFRQAPGKEREFVAAITYSGGSPYYADSVKGRFTISRDNAKNTVYLQMNSLKPEDTAVYYCAANPTYGSDWNAENWGQGTQVTVSSGSGGGGSGGGGSGGGGSFEGSTRAKPTTTPAPRPPTPAPTIASQPLSLRPEAARPAAGGAVHTRGLDFACDSNLFVASWIAVMIIFRIGMAVAIFCCFFFPSWRRKRKEKQSETSPKEFLTIYEDVKDLKTRRNHEQEQTFPGGGSTIYSMIQSQSSAPTSQEPAYTLYSLIQPSRKSGSRKRNHSPSFNSTIYEVIGKSQPKAQNPARLSRKELENFDVYSSSRRVKFSRSADAPAYQQGQNQLYNELNLGRREEYDVLDKRRGRDPEMGGKPQRRKNPQEGLYNELQKDKMAEAYSEIGMKGERRRGKGHDGLYQGLSTATKDTYDALHMQALPPRRAKRSGSGVKQTLNFDLLKLAGDVESNPGPGHMTEYKPTVRLATRDDVPRAVRTLAAAFADYPATRHTVDPDRHIERVTELQELFLTRVGLDIGKVWVADDGAAVAVWTTPESVEAGAVFAEIGPRMAELSGSRLAAQQQMEGLLAPHRPKEPAWFLATVGVSPDHQGKGLGSAVVLPGVEAAERAGVPAFLETSAPRNLPFYERLGFTVTADVEVPEGPRTWCMTRKPGA

SEQ ID NO: 4616 - protein, 1240 aa, Artificial Sequence
  Synthetic Polypeptide
MALPVTALLLPLALLLHAARPDIQMTQSPSSLSASVGDRVTITCKASDHINNWLAWYQQKPGQAPKLLIYGATTLETGVPSRFSGSGSGTDYTLTISSLQPEDFATYYCQQSWNTPWTFGQGTKLEIKRLEGQPKANPTVTLFPPSSEELQANKATLVCLISDFYPGAVTVAWKADGSPVKAGVETTKPSKQSNNKYAASSYLSLTPEQWKSHRSYSCQVTHEGSTVEKTVAPTECSGSTTPGERSSLPAFYPGTSGSCSGCGSLSLPLLAGLVAADAVASLLIVGAVFLCARPRRSPAQEDGKVYINMPGRGSTSRVKFSRSADAPAYQQGQNQLYNELNLGRREEYDVLDKRRGRDPEMGGKPQRRKNPQEGLYNELQKDKMAEAYSEIGMKGERRRGKGHDGLYQGLSTATKDTYDALHMQALPPRRAKRSGSGATNFSLLKQAGDVEENPGPMDWIWRILFLVGAATGAHSFEQVQLQQPGAELVKPGASVKMSCKASGYAFSSYWINWMKQKPGQGLEWIGQIYPGDGDTNYNGKFKGRATLTADTSSSTAYMQLSSLTSEDSAVYFCARSITTVVGCAMDYWGQGTSVTVSSTRASTKGPSVFPLAPSSKSTSGGTAALGCLVKDYFPEPVTVSWNSGALTSGVHTFPAVLQSSGLYSLSSVVTVPSSSLGTQTYICNVNHKPSNTKVDKRVEPKSCGTAKPTTTPAPRPPTPAPTIASQPLSLRPEAARPAAGGAVHTRGLDFACDSNLFVASWIAVMIIFRIGMAVAIFCCFFFPSWRRKRKEKQSETSPKEFLTIYEDVKDLKTRRNHEQEQTFPGGGSTIYSMIQSQSSAPTSQEPAYTLYSLIQPSRKSGSRKRNHSPSFNSTIYEVIGKSQPKAQNPARLSRKELENFDVYSSSRRVKFSRSADAPAYQQGQNQLYNELNLGRREEYDVLDKRRGRDPEMGGKPQRRKNPQEGLYNELQKDKMAEAYSEIGMKGERRRGKGHDGLYQGLSTATKDTYDALHMQALPPRRAKRSGSGVKQTLNFDLLKLAGDVESNPGPGHMATYEVLCEVARKLGTDDREVVLFLLNVFIPQPTLAQLIGALRALKEEGRLTFPLLAECLFRAGRRDLLRDLLHLDPRFLERHLAGTMSYFSPYQLTVLHVDGELCARDIRSLIFLSKDTIGSRSTPQTFLHWVYCMENLDLLGPTDVDALMSMLRSLSRVDLQRQVQTLMGLHLSGPSHSQHYRHTP

SEQ ID NO: 4617 - protein, 1293 aa, Artificial Sequence
  Synthetic Polypeptide
MALPVTALLLPLALLLHAARPDIQMTQSPSSLSASVGDRVTITCKASDHINNWLAWYQQKPGQAPKLLIYGATTLETGVPSRFSGSGSGTDYTLTISSLQPEDFATYYCQQSWNTPWTFGQGTKLEIKRLEGQPKANPTVTLFPPSSEELQANKATLVCLISDFYPGAVTVAWKADGSPVKAGVETTKPSKQSNNKYAASSYLSLTPEQWKSHRSYSCQVTHEGSTVEKTVAPTECSGSTTPGERSSLPAFYPGTSGSCSGCGSLSLPLLAGLVAADAVASLLIVGAVFLCARPRRSPAQEDGKVYINMPGRGSTSRVKFSRSADAPAYQQGQNQLYNELNLGRREEYDVLDKRRGRDPEMGGKPQRRKNPQEGLYNELQKDKMAEAYSEIGMKGERRRGKGHDGLYQGLSTATKDTYDALHMQALPPRRAKRSGSGATNFSLLKQAGDVEENPGPMDWIWRILFLVGAATGAHSFEQVQLQQPGAELVKPGASVKMSCKASGYAFSSYWINWMKQKPGQGLEWIGQIYPGDGDTNYNGKFKGRATLTADTSSSTAYMQLSSLTSEDSAVYFCARSITTVVGCAMDYWGQGTSVTVSSTRASTKGPSVFPLAPSSKSTSGGTAALGCLVKDYFPEPVTVSWNSGALTSGVHTFPAVLQSSGLYSLSSVVTVPSSSLGTQTYICNVNHKPSNTKVDKRVEPKSCGTAKPTTTPAPRPPTPAPTIASQPLSLRPEAARPAAGGAVHTRGLDFACDSNLFVASWIAVMIIFRIGMAVAIFCCFFFPSWRRKRKEKQSETSPKEFLTIYEDVKDLKTRRNHEQEQTFPGGGSTIYSMIQSQSSAPTSQEPAYTLYSLIQPSRKSGSRKRNHSPSFNSTIYEVIGKSQPKAQNPARLSRKELENFDVYSSSRRVKFSRSADAPAYQQGQNQLYNELNLGRREEYDVLDKRRGRDPEMGGKPQRRKNPQEGLYNELQKDKMAEAYSEIGMKGERRRGKGHDGLYQGLSTATKDTYDALHMQALPPRRAKRSGSGVKQTLNFDLLKLAGDVESNPGPGHMSDSKEVPSLPFLRHLLEELDSHEDSLLLFLCHDAAPGCTTVTQALCSLSQQRKLTLAALVEMLYVLQRMDLLKSRFGLSKEGAEQLLGTSFLTRYRKLMVCVGEELDSSELRALRLFACNLNPSLSTALSESSRFVELVLALENVGLVSPSSVSVLADMLRTLRRLDLCQQLVEYEQQEQARYRYCYAASPSLPVRTLRRGHGASEHEQLCMPVQESSDSPELLRTPVQESSSDSPEQTT

SEQ ID NO: 4618 - protein, 1251 aa, Artificial Sequence
  Synthetic Polypeptide
MALPVTALLLPLALLLHAARPDIQMTQSPSSLSASVGDRVTITCKASDHINNWLAWYQQKPGQAPKLLIYGATTLETGVPSRFSGSGSGTDYTLTISSLQPEDFATYYCQQSWNTPWTFGQGTKLEIKRLEGQPKANPTVTLFPPSSEELQANKATLVCLISDFYPGAVTVAWKADGSPVKAGVETTKPSKQSNNKYAASSYLSLTPEQWKSHRSYSCQVTHEGSTVEKTVAPTECSGSTTPGERSSLPAFYPGTSGSCSGCGSLSLPLLAGLVAADAVASLLIVGAVFLCARPRRSPAQEDGKVYINMPGRGSTSRVKFSRSADAPAYQQGQNQLYNELNLGRREEYDVLDKRRGRDPEMGGKPQRRKNPQEGLYNELQKDKMAEAYSEIGMKGERRRGKGHDGLYQGLSTATKDTYDALHMQALPPRRAKRSGSGATNFSLLKQAGDVEENPGPMDWIWRILFLVGAATGAHSFEQVQLQQPGAELVKPGASVKMSCKASGYAFSSYWINWMKQKPGQGLEWIGQIYPGDGDTNYNGKFKGRATLTADTSSSTAYMQLSSLTSEDSAVYFCARSITTVVGCAMDYWGQGTSVTVSSTRASTKGPSVFPLAPSSKSTSGGTAALGCLVKDYFPEPVTVSWNSGALTSGVHTFPAVLQSSGLYSLSSVVTVPSSSLGTQTYICNVNHKPSNTKVDKRVEPKSCGTAKPTTTPAPRPPTPAPTIASQPLSLRPEAARPAAGGAVHTRGLDFACDSNLFVASWIAVMIIFRIGMAVAIFCCFFFPSWRRKRKEKQSETSPKEFLTIYEDVKDLKTRRNHEQEQTFPGGGSTIYSMIQSQSSAPTSQEPAYTLYSLIQPSRKSGSRKRNHSPSFNSTIYEVIGKSQPKAQNPARLSRKELENFDVYSSSRRVKFSRSADAPAYQQGQNQLYNELNLGRREEYDVLDKRRGRDPEMGGKPQRRKNPQEGLYNELQKDKMAEAYSEIGMKGERRRGKGHDGLYQGLSTATKDTYDALHMQALPPRRAKRSGSGVKQTLNFDLLKLAGDVESNPGPGHMTEYKPTVRLATRDDVPRAVRTLAAAFADYPATRHTVDPDRHIERVTELQELFLTRVGLDIGKVWVADDGAAVAVWTTPESVEAGAVFAEIGPRMAELSGSRLAAQQQMEGLLAPHRPKEPAWFLATVGVSPDHQGKGLGSAVVLPGVEAAERAGVPAFLETSAPRNLPFYERLGFTVTADVEVPEGPRTWCMTRKPGA

SEQ ID NO: 4619 - protein, 1388 aa, Artificial Sequence
  Synthetic Polypeptide
MALPVTALLLPLALLLHAARPEVQLVESGGGLVQAGGSLRLSCAASGRTFSMGWFRQAPGKEREFVAAITYSGGSPYYADSVKGRFTISRDNAKNTVYLQMNSLKPEDTAVYYCAANPTYGSDWNAENWGQGTQVTVSSGTGGGGSGGGGSGGGGSEFDIQMTQSPSSLSASVGDRVTITCKASDHINNWLAWYQQKPGQAPKLLIYGATTLETGVPSRFSGSGSGTDYTLTISSLQPEDFATYYCQQSWNTPWTFGQGTKLEIKRLEGQPKANPTVTLFPPSSEELQANKATLVCLISDFYPGAVTVAWKADGSPVKAGVETTKPSKQSNNKYAASSYLSLTPEQWKSHRSYSCQVTHEGSTVEKTVAPTECSGSTTPGERSSLPAFYPGTSGSCSGCGSLSLPLLAGLVAADAVASLLIVGAVFLCARPRRSPAQEDGKVYINMPGRGSTSRVKFSRSADAPAYQQGQNQLYNELNLGRREEYDVLDKRRGRDPEMGGKPQRRKNPQEGLYNELQKDKMAEAYSEIGMKGERRRGKGHDGLYQGLSTATKDTYDALHMQALPPRRAKRSGSGATNFSLLKQAGDVEENPGPMDWIWRILFLVGAATGAHSFEQVQLQQPGAELVKPGASVKMSCKASGYAFSSYWINWMKQKPGQGLEWIGQIYPGDGDTNYNGKFKGRATLTADTSSSTAYMQLSSLTSEDSAVYFCARSITTVVGCAMDYWGQGTSVTVSSTRASTKGPSVFPLAPSSKSTSGGTAALGCLVKDYFPEPVTVSWNSGALTSGVHTFPAVLQSSGLYSLSSVVTVPSSSLGTQTYICNVNHKPSNTKVDKRVEPKSCGTAKPTTTPAPRPPTPAPTIASQPLSLRPEAARPAAGGAVHTRGLDFACDSNLFVASWIAVMIIFRIGMAVAIFCCFFFPSWRRKRKEKQSETSPKEFLTIYEDVKDLKTRRNHEQEQTFPGGGSTIYSMIQSQSSAPTSQEPAYTLYSLIQPSRKSGSRKRNHSPSFNSTIYEVIGKSQPKAQNPARLSRKELENFDVYSSSRRVKFSRSADAPAYQQGQNQLYNELNLGRREEYDVLDKRRGRDPEMGGKPQRRKNPQEGLYNELQKDKMAEAYSEIGMKGERRRGKGHDGLYQGLSTATKDTYDALHMQALPPRRAKRSGSGVKQTLNFDLLKLAGDVESNPGPGHMTEYKPTVRLATRDDVPRAVRTLAAAFADYPATRHTVDPDRHIERVTELQELFLTRVGLDIGKVWVADDGAAVAVWTTPESVEAGAVFAEIGPRMAELSGSRLAAQQQMEGLLAPHRPKEPAWFLATVGVSPDHQGKGLGSAVVLPGVEAAERAGVPAFLETSAPRNLPFYERLGFTVTADVEVPEGPRTWCMTRKPGA

SEQ ID NO: 4620 - protein, 1525 aa, Artificial Sequence
  Synthetic Polypeptide
MALPVTALLLPLALLLHAARPEVQLVESGGGLVQAGGSLRLSCAASGRTFSMGWFRQAPGKEREFVAAITYSGGSPYYADSVKGRFTISRDNAKNTVYLQMNSLKPEDTAVYYCAANPTYGSDWNAENWGQGTQVTVSSGTGGGGSGGGGSGGGGSEFDIQMTQSPSSLSASVGDRVTITCKASDHINNWLAWYQQKPGQAPKLLIYGATTLETGVPSRFSGSGSGTDYTLTISSLQPEDFATYYCQQSWNTPWTFGQGTKLEIKRLEGQPKANPTVTLFPPSSEELQANKATLVCLISDFYPGAVTVAWKADGSPVKAGVETTKPSKQSNNKYAASSYLSLTPEQWKSHRSYSCQVTHEGSTVEKTVAPTECSGSTTPGERSSLPAFYPGTSGSCSGCGSLSLPLLAGLVAADAVASLLIVGAVFLCARPRRSPAQEDGKVYINMPGRGSTSRVKFSRSADAPAYQQGQNQLYNELNLGRREEYDVLDKRRGRDPEMGGKPQRRKNPQEGLYNELQKDKMAEAYSEIGMKGERRRGKGHDGLYQGLSTATKDTYDALHMQALPPRRAKRSGSGATNFSLLKQAGDVEENPGPMDWIWRILFLVGAATGAHSGPEVQLVESGGGLVQAGGSLRLSCAASGRTFTMGWFRQAPGKEREFVAAISLSPTLAYYADSVKGRFTISRDNAKNTVVLQMNSLKPEDTALYYCAADRKSVMSIRPDYWGQGTQVTVSSGSGGGGSGGGGSGGGGSFEQVQLQQPGAELVKPGASVKMSCKASGYAFSSYWINWMKQKPGQGLEWIGQIYPGDGDTNYNGKFKGRATLTADTSSSTAYMQLSSLTSEDSAVYFCARSITTVVGCAMDYWGQGTSVTVSSTRASTKGPSVFPLAPSSKSTSGGTAALGCLVKDYFPEPVTVSWNSGALTSGVHTFPAVLQSSGLYSLSSVVTVPSSSLGTQTYICNVNHKPSNTKVDKRVEPKSCGTAKPTTTPAPRPPTPAPTIASQPLSLRPEAARPAAGGAVHTRGLDFACDSNLFVASWIAVMIIFRIGMAVAIFCCFFFPSWRRKRKEKQSETSPKEFLTIYEDVKDLKTRRNHEQEQTFPGGGSTIYSMIQSQSSAPTSQEPAYTLYSLIQPSRKSGSRKRNHSPSFNSTIYEVIGKSQPKAQNPARLSRKELENFDVYSSSRRVKFSRSADAPAYQQGQNQLYNELNLGRREEYDVLDKRRGRDPEMGGKPQRRKNPQEGLYNELQKDKMAEAYSEIGMKGERRRGKGHDGLYQGLSTATKDTYDALHMQALPPRRAKRSGSGVKQTLNFDLLKLAGDVESNPGPGHMTEYKPTVRLATRDDVPRAVRTLAAAFADYPATRHTVDPDRHIERVTELQELFLTRVGLDIGKVWVADDGAAVAVWTTPESVEAGAVFAEIGPRMAELSGSRLAAQQQMEGLLAPHRPKEPAWFLATVGVSPDHQGKGLGSAVVLPGVEAAERAGVPAFLETSAPRNLPFYERLGFTVTADVEVPEGPRTWCMTRKPGA

SEQ ID NO: 4621 - protein, 1258 aa, Artificial Sequence
  Synthetic Polypeptide
MALPVTALLLPLALLLHAARPEVQLVESGGGLVQAGGSLRLSCAASGRTFSMGWFRQAPGKEREFVAAITYSGGSPYYADSVKGRFTISRDNAKNTVYLQMNSLKPEDTAVYYCAANPTYGSDWNAENWGQGTQVTVSSLEGQPKANPTVTLFPPSSEELQANKATLVCLISDFYPGAVTVAWKADGSPVKAGVETTKPSKQSNNKYAASSYLSLTPEQWKSHRSYSCQVTHEGSTVEKTVAPTECSGSTTPGERSSLPAFYPGTSGSCSGCGSLSLPLLAGLVAADAVASLLIVGAVFLCARPRRSPAQEDGKVYINMPGRGSTSRVKFSRSADAPAYQQGQNQLYNELNLGRREEYDVLDKRRGRDPEMGGKPQRRKNPQEGLYNELQKDKMAEAYSEIGMKGERRRGKGHDGLYQGLSTATKDTYDALHMQALPPRRAKRSGSGATNFSLLKQAGDVEENPGPMDWIWRILFLVGAATGAHSGPEVQLVESGGGLVQAGGSLRLSCAASGRTFTMGWFRQAPGKEREFVAAISLSPTLAYYADSVKGRFTISRDNAKNTVVLQMNSLKPEDTALYYCAADRKSVMSIRPDYWGQGTQVTVSSTRASTKGPSVFPLAPSSKSTSGGTAALGCLVKDYFPEPVTVSWNSGALTSGVHTFPAVLQSSGLYSLSSVVTVPSSSLGTQTYICNVNHKPSNTKVDKRVEPKSCGTAKPTTTPAPRPPTPAPTIASQPLSLRPEAARPAAGGAVHTRGLDFACDSNLFVASWIAVMIIFRIGMAVAIFCCFFFPSWRRKRKEKQSETSPKEFLTIYEDVKDLKTRRNHEQEQTFPGGGSTIYSMIQSQSSAPTSQEPAYTLYSLIQPSRKSGSRKRNHSPSFNSTIYEVIGKSQPKAQNPARLSRKELENFDVYSSSRRVKFSRSADAPAYQQGQNQLYNELNLGRREEYDVLDKRRGRDPEMGGKPQRRKNPQEGLYNELQKDKMAEAYSEIGMKGERRRGKGHDGLYQGLSTATKDTYDALHMQALPPRRAKRSGSGVKQTLNFDLLKLAGDVESNPGPGHMTEYKPTVRLATRDDVPRAVRTLAAAFADYPATRHTVDPDRHIERVTELQELFLTRVGLDIGKVWVADDGAAVAVWTTPESVEAGAVFAEIGPRMAELSGSRLAAQQQMEGLLAPHRPKEPAWFLATVGVSPDHQGKGLGSAVVLPGVEAAERAGVPAFLETSAPRNLPFYERLGFTVTADVEVPEGPRTWCMTRKPGA

SEQ ID NO: 4622 - protein, 1266 aa, Artificial Sequence
  Synthetic Polypeptide
MALPVTALLLPLALLLHAARPDIQMTQSPSSLSASVGDRVTITCKASDHINNWLAWYQQKPGQAPKLLIYGATTLETGVPSRFSGSGSGTDYTLTISSLQPEDFATYYCQQSWNTPWTFGQGTKLEIKRLEDLKNVFPPEVAVFEPSEAEISHTQKATLVCLATGFYPDHVELSWWVNGKEVHSGVSTDPQPLKEQPALNDSRYCLSSRLRVSATFWQNPRNHFRCQVQFYGLSENDEWTQDRAKPVTQIVSAEAWGRADCGSTTPGERSSLPAFYPGTSGSCSGCGSLSLPLLAGLVAADAVASLLIVGAVFLCARPRRSPAQEDGKVYINMPGRGSTSRVKFSRSADAPAYQQGQNQLYNELNLGRREEYDVLDKRRGRDPEMGGKPQRRKNPQEGLYNELQKDKMAEAYSEIGMKGERRRGKGHDGLYQGLSTATKDTYDALHMQALPPRRAKRSGSGATNFSLLKQAGDVEENPGPMDWIWRILFLVGAATGAHSFEQVQLQQPGAELVKPGASVKMSCKASGYAFSSYWINWMKQKPGQGLEWIGQIYPGDGDTNYNGKFKGRATLTADTSSSTAYMQLSSLTSEDSAVYFCARSITTVVGCAMDYWGQGTSVTVSSTRIQNPDPAVYQLRDSKSSDKSVCLFTDFDSQTNVSQSKDSDVYITDKTVLDMRSMDFKSNSAVAWSNKSDFACANAFNNSIIPEDTFFPSPESSCGTAKPTTTPAPRPPTPAPTIASQPLSLRPEAARPAAGGAVHTRGLDFACDSNLFVASWIAVMIIFRIGMAVAIFCCFFFPSWRRKRKEKQSETSPKEFLTIYEDVKDLKTRRNHEQEQTFPGGGSTIYSMIQSQSSAPTSQEPAYTLYSLIQPSRKSGSRKRNHSPSFNSTIYEVIGKSQPKAQNPARLSRKELENFDVYSSSRRVKFSRSADAPAYQQGQNQLYNELNLGRREEYDVLDKRRGRDPEMGGKPQRRKNPQEGLYNELQKDKMAEAYSEIGMKGERRRGKGHDGLYQGLSTATKDTYDALHMQALPPRRAKRSGSGVKQTLNFDLLKLAGDVESNPGPGHMTEYKPTVRLATRDDVPRAVRTLAAAFADYPATRHTVDPDRHIERVTELQELFLTRVGLDIGKVWVADDGAAVAVWTTPESVEAGAVFAEIGPRMAELSGSRLAAQQQMEGLLAPHRPKEPAWFLATVGVSPDHQGKGLGSAVVLPGVEAAERAGVPAFLETSAPRNLPFYERLGFTVTADVEVPEGPRTWCMTRKPGA

SEQ ID NO: 4623 - protein, 1403 aa, Artificial Sequence
  Synthetic Polypeptide
MALPVTALLLPLALLLHAARPEVQLVESGGGLVQAGGSLRLSCAASGRTFSMGWFRQAPGKEREFVAAITYSGGSPYYADSVKGRFTISRDNAKNTVYLQMNSLKPEDTAVYYCAANPTYGSDWNAENWGQGTQVTVSSGTGGGGSGGGGSGGGGSEFDIQMTQSPSSLSASVGDRVTITCKASDHINNWLAWYQQKPGQAPKLLIYGATTLETGVPSRFSGSGSGTDYTLTISSLQPEDFATYYCQQSWNTPWTFGQGTKLEIKRLEDLKNVFPPEVAVFEPSEAEISHTQKATLVCLATGFYPDHVELSWWVNGKEVHSGVSTDPQPLKEQPALNDSRYCLSSRLRVSATFWQNPRNHFRCQVQFYGLSENDEWTQDRAKPVTQIVSAEAWGRADCGSTTPGERSSLPAFYPGTSGSCSGCGSLSLPLLAGLVAADAVASLLIVGAVFLCARPRRSPAQEDGKVYINMPGRGSTSRVKFSRSADAPAYQQGQNQLYNELNLGRREEYDVLDKRRGRDPEMGGKPQRRKNPQEGLYNELQKDKMAEAYSEIGMKGERRRGKGHDGLYQGLSTATKDTYDALHMQALPPRRAKRSGSGATNFSLLKQAGDVEENPGPMDWIWRILFLVGAATGAHSFEQVQLQQPGAELVKPGASVKMSCKASGYAFSSYWINWMKQKPGQGLEWIGQIYPGDGDTNYNGKFKGRATLTADTSSSTAYMQLSSLTSEDSAVYFCARSITTVVGCAMDYWGQGTSVTVSSTRIQNPDPAVYQLRDSKSSDKSVCLFTDFDSQTNVSQSKDSDVYITDKTVLDMRSMDFKSNSAVAWSNKSDFACANAFNNSIIPEDTFFPSPESSCGTAKPTTTPAPRPPTPAPTIASQPLSLRPEAARPAAGGAVHTRGLDFACDSNLFVASWIAVMIIFRIGMAVAIFCCFFFPSWRRKRKEKQSETSPKEFLTIYEDVKDLKTRRNHEQEQTFPGGGSTIYSMIQSQSSAPTSQEPAYTLYSLIQPSRKSGSRKRNHSPSFNSTIYEVIGKSQPKAQNPARLSRKELENFDVYSSSRRVKFSRSADAPAYQQGQNQLYNELNLGRREEYDVLDKRRGRDPEMGGKPQRRKNPQEGLYNELQKDKMAEAYSEIGMKGERRRGKGHDGLYQGLSTATKDTYDALHMQALPPRRAKRSGSGVKQTLNFDLLKLAGDVESNPGPGHMTEYKPTVRLATRDDVPRAVRTLAAAFADYPATRHTVDPDRHIERVTELQELFLTRVGLDIGKVWVADDGAAVAVWTTPESVEAGAVFAEIGPRMAELSGSRLAAQQQMEGLLAPHRPKEPAWFLATVGVSPDHQGKGLGSAVVLPGVEAAERAGVPAFLETSAPRNLPFYERLGFTVTADVEVPEGPRTWCMTRKPGA

SEQ ID NO: 4624 - protein, 1540 aa, Artificial Sequence
  Synthetic Polypeptide
MALPVTALLLPLALLLHAARPEVQLVESGGGLVQAGGSLRLSCAASGRTFSMGWFRQAPGKEREFVAAITYSGGSPYYADSVKGRFTISRDNAKNTVYLQMNSLKPEDTAVYYCAANPTYGSDWNAENWGQGTQVTVSSGTGGGGSGGGGSGGGGSEFDIQMTQSPSSLSASVGDRVTITCKASDHINNWLAWYQQKPGQAPKLLIYGATTLETGVPSRFSGSGSGTDYTLTISSLQPEDFATYYCQQSWNTPWTFGQGTKLEIKRLEDLKNVFPPEVAVFEPSEAEISHTQKATLVCLATGFYPDHVELSWWVNGKEVHSGVSTDPQPLKEQPALNDSRYCLSSRLRVSATFWQNPRNHFRCQVQFYGLSENDEWTQDRAKPVTQIVSAEAWGRADCGSTTPGERSSLPAFYPGTSGSCSGCGSLSLPLLAGLVAADAVASLLIVGAVFLCARPRRSPAQEDGKVYINMPGRGSTSRVKFSRSADAPAYQQGQNQLYNELNLGRREEYDVLDKRRGRDPEMGGKPQRRKNPQEGLYNELQKDKMAEAYSEIGMKGERRRGKGHDGLYQGLSTATKDTYDALHMQALPPRRAKRSGSGATNFSLLKQAGDVEENPGPMDWIWRILFLVGAATGAHSGPEVQLVESGGGLVQAGGSLRLSCAASGRTFTMGWFRQAPGKEREFVAAISLSPTLAYYADSVKGRFTISRDNAKNTVVLQMNSLKPEDTALYYCAADRKSVMSIRPDYWGQGTQVTVSSGSGGGGSGGGGSGGGGSFEQVQLQQPGAELVKPGASVKMSCKASGYAFSSYWINWMKQKPGQGLEWIGQIYPGDGDTNYNGKFKGRATLTADTSSSTAYMQLSSLTSEDSAVYFCARSITTVVGCAMDYWGQGTSVTVSSTRIQNPDPAVYQLRDSKSSDKSVCLFTDFDSQTNVSQSKDSDVYITDKTVLDMRSMDFKSNSAVAWSNKSDFACANAFNNSIIPEDTFFPSPESSCGTAKPTTTPAPRPPTPAPTIASQPLSLRPEAARPAAGGAVHTRGLDFACDSNLFVASWIAVMIIFRIGMAVAIFCCFFFPSWRRKRKEKQSETSPKEFLTIYEDVKDLKTRRNHEQEQTFPGGGSTIYSMIQSQSSAPTSQEPAYTLYSLIQPSRKSGSRKRNHSPSFNSTIYEVIGKSQPKAQNPARLSRKELENFDVYSSSRRVKFSRSADAPAYQQGQNQLYNELNLGRREEYDVLDKRRGRDPEMGGKPQRRKNPQEGLYNELQKDKMAEAYSEIGMKGERRRGKGHDGLYQGLSTATKDTYDALHMQALPPRRAKRSGSGVKQTLNFDLLKLAGDVESNPGPGHMTEYKPTVRLATRDDVPRAVRTLAAAFADYPATRHTVDPDRHIERVTELQELFLTRVGLDIGKVWVADDGAAVAVWTTPESVEAGAVFAEIGPRMAELSGSRLAAQQQMEGLLAPHRPKEPAWFLATVGVSPDHQGKGLGSAVVLPGVEAAERAGVPAFLETSAPRNLPFYERLGFTVTADVEVPEGPRTWCMTRKPGA

SEQ ID NO: 4625 - protein, 1273 aa, Artificial Sequence
  Synthetic Polypeptide
MALPVTALLLPLALLLHAARPEVQLVESGGGLVQAGGSLRLSCAASGRTFSMGWFRQAPGKEREFVAAITYSGGSPYYADSVKGRFTISRDNAKNTVYLQMNSLKPEDTAVYYCAANPTYGSDWNAENWGQGTQVTVSSLEDLKNVFPPEVAVFEPSEAEISHTQKATLVCLATGFYPDHVELSWWVNGKEVHSGVSTDPQPLKEQPALNDSRYCLSSRLRVSATFWQNPRNHFRCQVQFYGLSENDEWTQDRAKPVTQIVSAEAWGRADCGSTTPGERSSLPAFYPGTSGSCSGCGSLSLPLLAGLVAADAVASLLIVGAVFLCARPRRSPAQEDGKVYINMPGRGSTSRVKFSRSADAPAYQQGQNQLYNELNLGRREEYDVLDKRRGRDPEMGGKPQRRKNPQEGLYNELQKDKMAEAYSEIGMKGERRRGKGHDGLYQGLSTATKDTYDALHMQALPPRRAKRSGSGATNFSLLKQAGDVEENPGPMDWIWRILFLVGAATGAHSGPEVQLVESGGGLVQAGGSLRLSCAASGRTFTMGWFRQAPGKEREFVAAISLSPTLAYYADSVKGRFTISRDNAKNTVVLQMNSLKPEDTALYYCAADRKSVMSIRPDYWGQGTQVTVSSTRIQNPDPAVYQLRDSKSSDKSVCLFTDFDSQTNVSQSKDSDVYITDKTVLDMRSMDFKSNSAVAWSNKSDFACANAFNNSIIPEDTFFPSPESSCGTAKPTTTPAPRPPTPAPTIASQPLSLRPEAARPAAGGAVHTRGLDFACDSNLFVASWIAVMIIFRIGMAVAIFCCFFFPSWRRKRKEKQSETSPKEFLTIYEDVKDLKTRRNHEQEQTFPGGGSTIYSMIQSQSSAPTSQEPAYTLYSLIQPSRKSGSRKRNHSPSFNSTIYEVIGKSQPKAQNPARLSRKELENFDVYSSSRRVKFSRSADAPAYQQGQNQLYNELNLGRREEYDVLDKRRGRDPEMGGKPQRRKNPQEGLYNELQKDKMAEAYSEIGMKGERRRGKGHDGLYQGLSTATKDTYDALHMQALPPRRAKRSGSGVKQTLNFDLLKLAGDVESNPGPGHMTEYKPTVRLATRDDVPRAVRTLAAAFADYPATRHTVDPDRHIERVTELQELFLTRVGLDIGKVWVADDGAAVAVWTTPESVEAGAVFAEIGPRMAELSGSRLAAQQQMEGLLAPHRPKEPAWFLATVGVSPDHQGKGLGSAVVLPGVEAAERAGVPAFLETSAPRNLPFYERLGFTVTADVEVPEGPRTWCMTRKPGA

SEQ ID NO: 4626 - protein, 585 aa, Artificial Sequence; identical to SEQ ID NO: 4431
  Synthetic Polypeptide

SEQ ID NO: 4627 - protein, 1163 aa, Artificial Sequence
  Synthetic Polypeptide
MALPVTALLLPLALLLHAARPDIQMTQSPSSLSASVGDRVTITCKASDHINNWLAWYQQKPGQAPKLLIYGATTLETGVPSRFSGSGSGTDYTLTISSLQPEDFATYYCQQSWNTPWTFGQGTKLEIKRLEAKPTTTPAPRPPTPAPTIASQPLSLRPEAARPAAGGAVHTRGLDFACDSNLFVASWIAVMIIFRIGMAVAIFCCFFFPSWRRKRKEKQSETSPKEFLTIYEDVKDLKTRRNHEQEQTFPGGGSTIYSMIQSQSSAPTSQEPAYTLYSLIQPSRKSGSRKRNHSPSFNSTIYEVIGKSQPKAQNPARLSRKELENFDVYSSTSRVKFSRSADAPAYQQGQNQLYNELNLGRREEYDVLDKRRGRDPEMGGKPQRRKNPQEGLYNELQKDKMAEAYSEIGMKGERRRGKGHDGLYQGLSTATKDTYDALHMQALPPRRAKRSGSGATNFSLLKQAGDVEENPGPMDWIWRILFLVGAATGAHSFEQVQLQQPGAELVKPGASVKMSCKASGYAFSSYWINWMKQKPGQGLEWIGQIYPGDGDTNYNGKFKGRATLTADTSSSTAYMQLSSLTSEDSAVYFCARSITTVVGCAMDYWGQGTSVTVSSTRAKPTTTPAPRPPTPAPTIASQPLSLRPEAARPAAGGAVHTRGLDFACDSNLFVASWIAVMIIFRIGMAVAIFCCFFFPSWRRKRKEKQSETSPKEFLTIYEDVKDLKTRRNHEQEQTFPGGGSTIYSMIQSQSSAPTSQEPAYTLYSLIQPSRKSGSRKRNHSPSFNSTIYEVIGKSQPKAQNPARLSRKELENFDVYSSSRRVKFSRSADAPAYQQGQNQLYNELNLGRREEYDVLDKRRGRDPEMGGKPQRRKNPQEGLYNELQKDKMAEAYSEIGMKGERRRGKGHDGLYQGLSTATKDTYDALHMQALPPRRAKRSGSGVKQTLNFDLLKLAGDVESNPGPGHMTEYKPTVRLATRDDVPRAVRTLAAAFADYPATRHTVDPDRHIERVTELQELFLTRVGLDIGKVWVADDGAAVAVWTTPESVEAGAVFAEIGPRMAELSGSRLAAQQQMEGLLAPHRPKEPAWFLATVGVSPDHQGKGLGSAVVLPGVEAAERAGVPAFLETSAPRNLPFYERLGFTVTADVEVPEGPRTWCMTRKPGA

SEQ ID NO: 4628 - protein, 1215 aa, Artificial Sequence
  Synthetic Polypeptide
MALPVTALLLPLALLLHAARPACEVQLLESGGGLIQPGGSLRLSCAASGFTFSSHAMTWVRQAPGKGLEWVSAISGSGDYTHYADSVKGRFTISRDNSKNTVYLQMNSLRAEDSAVYYCAKDEDGGSLLGHRGQGTLVTVSSGTGGGGSGGGGSGGGGSEFGSLEAKPTTTPAPRPPTPAPTIASQPLSLRPEAARPAAGGAVHTRGLDFACDSNLFVASWIAVMIIFRIGMAVAIFCCFFFPSWRRKRKEKQSETSPKEFLTIYEDVKDLKTRRNHEQEQTFPGGGSTIYSMIQSQSSAPTSQEPAYTLYSLIQPSRKSGSRKRNHSPSFNSTIYEVIGKSQPKAQNPARLSRKELENFDVYSSTSRVKFSRSADAPAYQQGQNQLYNELNLGRREEYDVLDKRRGRDPEMGGKPQRRKNPQEGLYNELQKDKMAEAYSEIGMKGERRRGKGHDGLYQGLSTATKDTYDALHMQALPPRRAKRSGSGATNFSLLKQAGDVEENPGPMDWIWRILFLVGAATGAHSGPEVQLVESGGGLVQAGGSLRLSCAASGRTFSMGWFRQAPGKEREFVAAITYSGGSPYYADSVKGRFTISRDNAKNTVYLQMNSLKPEDTAVYYCAANPTYGSDWNAENWGQGTQVTVSSGSGGGGSGGGGSGGGGSFEGSTRAKPTTTPAPRPPTPAPTIASQPLSLRPEAARPAAGGAVHTRGLDFACDSNLFVASWIAVMIIFRIGMAVAIFCCFFFPSWRRKRKEKQSETSPKEFLTIYEDVKDLKTRRNHEQEQTFPGGGSTIYSMIQSQSSAPTSQEPAYTLYSLIQPSRKSGSRKRNHSPSFNSTIYEVIGKSQPKAQNPARLSRKELENFDVYSSSRRVKFSRSADAPAYQQGQNQLYNELNLGRREEYDVLDKRRGRDPEMGGKPQRRKNPQEGLYNELQKDKMAEAYSEIGMKGERRRGKGHDGLYQGLSTATKDTYDALHMQALPPRRAKRSGSGVKQTLNFDLLKLAGDVESNPGPGHMTEYKPTVRLATRDDVPRAVRTLAAAFADYPATRHTVDPDRHIERVTELQELFLTRVGLDIGKVWVADDGAAVAVWTTPESVEAGAVFAEIGPRMAELSGSRLAAQQQMEGLLAPHRPKEPAWFLATVGVSPDHQGKGLGSAVVLPGVEAAERAGVPAFLETSAPRNLPFYERLGFTVTADVEVPEGPRTWCMTRKPGA

SEQ ID NO: 4629 - protein, 1365 aa, Artificial Sequence
  Synthetic Polypeptide
MALPVTALLLPLALLLHAARPDIQMTQSPSSLSASVGDRVTITCKASDHINNWLAWYQQKPGQAPKLLIYGATTLETGVPSRFSGSGSGTDYTLTISSLQPEDFATYYCQQSWNTPWTFGQGTKLEIKRLEGQPKANPTVTLFPPSSEELQANKATLVCLISDFYPGAVTVAWKADGSPVKAGVETTKPSKQSNNKYAASSYLSLTPEQWKSHRSYSCQVTHEGSTVEKTVAPTECSGSAKPTTTPAPRPPTPAPTIASQPLSLRPEAARPAAGGAVHTRGLDFACDSNLFVASWIAVMIIFRIGMAVAIFCCFFFPSWRRKRKEKQSETSPKEFLTIYEDVKDLKTRRNHEQEQTFPGGGSTIYSMIQSQSSAPTSQEPAYTLYSLIQPSRKSGSRKRNHSPSFNSTIYEVIGKSQPKAQNPARLSRKELENFDVYSSTSRVKFSRSADAPAYQQGQNQLYNELNLGRREEYDVLDKRRGRDPEMGGKPQRRKNPQEGLYNELQKDKMAEAYSEIGMKGERRRGKGHDGLYQGLSTATKDTYDALHMQALPPRRAKRSGSGATNFSLLKQAGDVEENPGPMDWIWRILFLVGAATGAHSFEQVQLQQPGAELVKPGASVKMSCKASGYAFSSYWINWMKQKPGQGLEWIGQIYPGDGDTNYNGKFKGRATLTADTSSSTAYMQLSSLTSEDSAVYFCARSITTVVGCAMDYWGQGTSVTVSSTRASTKGPSVFPLAPSSKSTSGGTAALGCLVKDYFPEPVTVSWNSGALTSGVHTFPAVLQSSGLYSLSSVVTVPSSSLGTQTYICNVNHKPSNTKVDKRVEPKSCGTAKPTTTPAPRPPTPAPTIASQPLSLRPEAARPAAGGAVHTRGLDFACDSNLFVASWIAVMIIFRIGMAVAIFCCFFFPSWRRKRKEKQSETSPKEFLTIYEDVKDLKTRRNHEQEQTFPGGGSTIYSMIQSQSSAPTSQEPAYTLYSLIQPSRKSGSRKRNHSPSFNSTIYEVIGKSQPKAQNPARLSRKELENFDVYSSSRRVKFSRSADAPAYQQGQNQLYNELNLGRREEYDVLDKRRGRDPEMGGKPQRRKNPQEGLYNELQKDKMAEAYSEIGMKGERRRGKGHDGLYQGLSTATKDTYDALHMQALPPRRAKRSGSGVKQTLNFDLLKLAGDVESNPGPGHMATYEVLCEVARKLGTDDREVVLFLLNVFIPQPTLAQLIGALRALKEEGRLTFPLLAECLFRAGRRDLLRDLLHLDPRFLERHLAGTMSYFSPYQLTVLHVDGELCARDIRSLIFLSKDTIGSRSTPQTFLHWVYCMENLDLLGPTDVDALMSMLRSLSRVDLQRQVQTLMGLHLSGPSHSQHYRHTP

SEQ ID NO: 4630 - protein, 1418 aa, Artificial Sequence
  Synthetic Polypeptide
MALPVTALLLPLALLLHAARPDIQMTQSPSSLSASVGDRVTITCKASDHINNWLAWYQQKPGQAPKLLIYGATTLETGVPSRFSGSGSGTDYTLTISSLQPEDFATYYCQQSWNTPWTFGQGTKLEIKRLEGQPKANPTVTLFPPSSEELQANKATLVCLISDFYPGAVTVAWKADGSPVKAGVETTKPSKQSNNKYAASSYLSLTPEQWKSHRSYSCQVTHEGSTVEKTVAPTECSGSAKPTTTPAPRPPTPAPTIASQPLSLRPEAARPAAGGAVHTRGLDFACDSNLFVASWIAVMIIFRIGMAVAIFCCFFFPSWRRKRKEKQSETSPKEFLTIYEDVKDLKTRRNHEQEQTFPGGGSTIYSMIQSQSSAPTSQEPAYTLYSLIQPSRKSGSRKRNHSPSFNSTIYEVIGKSQPKAQNPARLSRKELENFDVYSSTSRVKFSRSADAPAYQQGQNQLYNELNLGRREEYDVLDKRRGRDPEMGGKPQRRKNPQEGLYNELQKDKMAEAYSEIGMKGERRRGKGHDGLYQGLSTATKDTYDALHMQALPPRRAKRSGSGATNFSLLKQAGDVEENPGPMDWIWRILFLVGAATGAHSFEQVQLQQPGAELVKPGASVKMSCKASGYAFSSYWINWMKQKPGQGLEWIGQIYPGDGDTNYNGKFKGRATLTADTSSSTAYMQLSSLTSEDSAVYFCARSITTVVGCAMDYWGQGTSVTVSSTRASTKGPSVFPLAPSSKSTSGGTAALGCLVKDYFPEPVTVSWNSGALTSGVHTFPAVLQSSGLYSLSSVVTVPSSSLGTQTYICNVNHKPSNTKVDKRVEPKSCGTAKPTTTPAPRPPTPAPTIASQPLSLRPEAARPAAGGAVHTRGLDFACDSNLFVASWIAVMIIFRIGMAVAIFCCFFFPSWRRKRKEKQSETSPKEFLTIYEDVKDLKTRRNHEQEQTFPGGGSTIYSMIQSQSSAPTSQEPAYTLYSLIQPSRKSGSRKRNHSPSFNSTIYEVIGKSQPKAQNPARLSRKELENFDVYSSSRRVKFSRSADAPAYQQGQNQLYNELNLGRREEYDVLDKRRGRDPEMGGKPQRRKNPQEGLYNELQKDKMAEAYSEIGMKGERRRGKGHDGLYQGLSTATKDTYDALHMQALPPRRAKRSGSGVKQTLNFDLLKLAGDVESNPGPGHMSDSKEVPSLPFLRHLLEELDSHEDSLLLFLCHDAAPGCTTVTQALCSLSQQRKLTLAALVEMLYVLQRMDLLKSRFGLSKEGAEQLLGTSFLTRYRKLMVCVGEELDSSELRALRLFACNLNPSLSTALSESSRFVELVLALENVGLVSPSSVSVLADMLRTLRRLDLCQQLVEYEQQEQARYRYCYAASPSLPVRTLRRGHGASEHEQLCMPVQESSDSPELLRTPVQESSSDSPEQTT

SEQ ID NO: 4631 - protein, 1376 aa, Artificial Sequence
  Synthetic Polypeptide
MALPVTALLLPLALLLHAARPDIQMTQSPSSLSASVGDRVTITCKASDHINNWLAWYQQKPGQAPKLLIYGATTLETGVPSRFSGSGSGTDYTLTISSLQPEDFATYYCQQSWNTPWTFGQGTKLEIKRLEGQPKANPTVTLFPPSSEELQANKATLVCLISDFYPGAVTVAWKADGSPVKAGVETTKPSKQSNNKYAASSYLSLTPEQWKSHRSYSCQVTHEGSTVEKTVAPTECSGSAKPTTTPAPRPPTPAPTIASQPLSLRPEAARPAAGGAVHTRGLDFACDSNLFVASWIAVMIIFRIGMAVAIFCCFFFPSWRRKRKEKQSETSPKEFLTIYEDVKDLKTRRNHEQEQTFPGGGSTIYSMIQSQSSAPTSQEPAYTLYSLIQPSRKSGSRKRNHSPSFNSTIYEVIGKSQPKAQNPARLSRKELENFDVYSSTSRVKFSRSADAPAYQQGQNQLYNELNLGRREEYDVLDKRRGRDPEMGGKPQRRKNPQEGLYNELQKDKMAEAYSEIGMKGERRRGKGHDGLYQGLSTATKDTYDALHMQALPPRRAKRSGSGATNFSLLKQAGDVEENPGPMDWIWRILFLVGAATGAHSFEQVQLQQPGAELVKPGASVKMSCKASGYAFSSYWINWMKQKPGQGLEWIGQIYPGDGDTNYNGKFKGRATLTADTSSSTAYMQLSSLTSEDSAVYFCARSITTVVGCAMDYWGQGTSVTVSSTRASTKGPSVFPLAPSSKSTSGGTAALGCLVKDYFPEPVTVSWNSGALTSGVHTFPAVLQSSGLYSLSSVVTVPSSSLGTQTYICNVNHKPSNTKVDKRVEPKSCGTAKPTTTPAPRPPTPAPTIASQPLSLRPEAARPAAGGAVHTRGLDFACDSNLFVASWIAVMIIFRIGMAVAIFCCFFFPSWRRKRKEKQSETSPKEFLTIYEDVKDLKTRRNHEQEQTFPGGGSTIYSMIQSQSSAPTSQEPAYTLYSLIQPSRKSGSRKRNHSPSFNSTIYEVIGKSQPKAQNPARLSRKELENFDVYSSSRRVKFSRSADAPAYQQGQNQLYNELNLGRREEYDVLDKRRGRDPEMGGKPQRRKNPQEGLYNELQKDKMAEAYSEIGMKGERRRGKGHDGLYQGLSTATKDTYDALHMQALPPRRAKRSGSGVKQTLNFDLLKLAGDVESNPGPGHMTEYKPTVRLATRDDVPRAVRTLAAAFADYPATRHTVDPDRHIERVTELQELFLTRVGLDIGKVWVADDGAAVAVWTTPESVEAGAVFAEIGPRMAELSGSRLAAQQQMEGLLAPHRPKEPAWFLATVGVSPDHQGKGLGSAVVLPGVEAAERAGVPAFLETSAPRNLPFYERLGFTVTADVEVPEGPRTWCMTRKPGA

SEQ ID NO: 4632 - protein, 1513 aa, Artificial Sequence
  Synthetic Polypeptide
MALPVTALLLPLALLLHAARPEVQLVESGGGLVQAGGSLRLSCAASGRTFSMGWFRQAPGKEREFVAAITYSGGSPYYADSVKGRFTISRDNAKNTVYLQMNSLKPEDTAVYYCAANPTYGSDWNAENWGQGTQVTVSSGTGGGGSGGGGSGGGGSEFDIQMTQSPSSLSASVGDRVTITCKASDHINNWLAWYQQKPGQAPKLLIYGATTLETGVPSRFSGSGSGTDYTLTISSLQPEDFATYYCQQSWNTPWTFGQGTKLEIKRLEGQPKANPTVTLFPPSSEELQANKATLVCLISDFYPGAVTVAWKADGSPVKAGVETTKPSKQSNNKYAASSYLSLTPEQWKSHRSYSCQVTHEGSTVEKTVAPTECSGSAKPTTTPAPRPPTPAPTIASQPLSLRPEAARPAAGGAVHTRGLDFACDSNLFVASWIAVMIIFRIGMAVAIFCCFFFPSWRRKRKEKQSETSPKEFLTIYEDVKDLKTRRNHEQEQTFPGGGSTIYSMIQSQSSAPTSQEPAYTLYSLIQPSRKSGSRKRNHSPSFNSTIYEVIGKSQPKAQNPARLSRKELENFDVYSSTSRVKFSRSADAPAYQQGQNQLYNELNLGRREEYDVLDKRRGRDPEMGGKPQRRKNPQEGLYNELQKDKMAEAYSEIGMKGERRRGKGHDGLYQGLSTATKDTYDALHMQALPPRRAKRSGSGATNFSLLKQAGDVEENPGPMDWIWRILFLVGAATGAHSFEQVQLQQPGAELVKPGASVKMSCKASGYAFSSYWINWMKQKPGQGLEWIGQIYPGDGDTNYNGKFKGRATLTADTSSSTAYMQLSSLTSEDSAVYFCARSITTVVGCAMDYWGQGTSVTVSSTRASTKGPSVFPLAPSSKSTSGGTAALGCLVKDYFPEPVTVSWNSGALTSGVHTFPAVLQSSGLYSLSSVVTVPSSSLGTQTYICNVNHKPSNTKVDKRVEPKSCGTAKPTTTPAPRPPTPAPTIASQPLSLRPEAARPAAGGAVHTRGLDFACDSNLFVASWIAVMIIFRIGMAVAIFCCFFFPSWRRKRKEKQSETSPKEFLTIYEDVKDLKTRRNHEQEQTFPGGGSTIYSMIQSQSSAPTSQEPAYTLYSLIQPSRKSGSRKRNHSPSFNSTIYEVIGKSQPKAQNPARLSRKELENFDVYSSSRRVKFSRSADAPAYQQGQNQLYNELNLGRREEYDVLDKRRGRDPEMGGKPQRRKNPQEGLYNELQKDKMAEAYSEIGMKGERRRGKGHDGLYQGLSTATKDTYDALHMQALPPRRAKRSGSGVKQTLNFDLLKLAGDVESNPGPGHMTEYKPTVRLATRDDVPRAVRTLAAAFADYPATRHTVDPDRHIERVTELQELFLTRVGLDIGKVWVADDGAAVAVWTTPESVEAGAVFAEIGPRMAELSGSRLAAQQQMEGLLAPHRPKEPAWFLATVGVSPDHQGKGLGSAVVLPGVEAAERAGVPAFLETSAPRNLPFYERLGFTVTADVEVPEGPRTWCMTRKPGA

SEQ ID NO: 4633 - protein, 1650 aa, Artificial Sequence
  Synthetic Polypeptide
MALPVTALLLPLALLLHAARPEVQLVESGGGLVQAGGSLRLSCAASGRTFSMGWFRQAPGKEREFVAAITYSGGSPYYADSVKGRFTISRDNAKNTVYLQMNSLKPEDTAVYYCAANPTYGSDWNAENWGQGTQVTVSSGTGGGGSGGGGSGGGGSEFDIQMTQSPSSLSASVGDRVTITCKASDHINNWLAWYQQKPGQAPKLLIYGATTLETGVPSRFSGSGSGTDYTLTISSLQPEDFATYYCQQSWNTPWTFGQGTKLEIKRLEGQPKANPTVTLFPPSSEELQANKATLVCLISDFYPGAVTVAWKADGSPVKAGVETTKPSKQSNNKYAASSYLSLTPEQWKSHRSYSCQVTHEGSTVEKTVAPTECSGSAKPTTTPAPRPPTPAPTIASQPLSLRPEAARPAAGGAVHTRGLDFACDSNLFVASWIAVMIIFRIGMAVAIFCCFFFPSWRRKRKEKQSETSPKEFLTIYEDVKDLKTRRNHEQEQTFPGGGSTIYSMIQSQSSAPTSQEPAYTLYSLIQPSRKSGSRKRNHSPSFNSTIYEVIGKSQPKAQNPARLSRKELENFDVYSSTSRVKFSRSADAPAYQQGQNQLYNELNLGRREEYDVLDKRRGRDPEMGGKPQRRKNPQEGLYNELQKDKMAEAYSEIGMKGERRRGKGHDGLYQGLSTATKDTYDALHMQALPPRRAKRSGSGATNFSLLKQAGDVEENPGPMDWIWRILFLVGAATGAHSGPEVQLVESGGGLVQAGGSLRLSCAASGRTFTMGWFRQAPGKEREFVAAISLSPTLAYYADSVKGRFTISRDNAKNTVVLQMNSLKPEDTALYYCAADRKSVMSIRPDYWGQGTQVTVSSGSGGGGSGGGGSGGGGSFEQVQLQQPGAELVKPGASVKMSCKASGYAFSSYWINWMKQKPGQGLEWIGQIYPGDGDTNYNGKFKGRATLTADTSSSTAYMQLSSLTSEDSAVYFCARSITTVVGCAMDYWGQGTSVTVSSTRASTKGPSVFPLAPSSKSTSGGTAALGCLVKDYFPEPVTVSWNSGALTSGVHTFPAVLQSSGLYSLSSVVTVPSSSLGTQTYICNVNHKPSNTKVDKRVEPKSCGTAKPTTTPAPRPPTPAPTIASQPLSLRPEAARPAAGGAVHTRGLDFACDSNLFVASWIAVMIIFRIGMAVAIFCCFFFPSWRRKRKEKQSETSPKEFLTIYEDVKDLKTRRNHEQEQTFPGGGSTIYSMIQSQSSAPTSQEPAYTLYSLIQPSRKSGSRKRNHSPSFNSTIYEVIGKSQPKAQNPARLSRKELENFDVYSSSRRVKFSRSADAPAYQQGQNQLYNELNLGRREEYDVLDKRRGRDPEMGGKPQRRKNPQEGLYNELQKDKMAEAYSEIGMKGERRRGKGHDGLYQGLSTATKDTYDALHMQALPPRRAKRSGSGVKQTLNFDLLKLAGDVESNPGPGHMTEYKPTVRLATRDDVPRAVRTLAAAFADYPATRHTVDPDRHIERVTELQELFLTRVGLDIGKVWVADDGAAVAVWTTPESVEAGAVFAEIGPRMAELSGSRLAAQQQMEGLLAPHRPKEPAWFLATVGVSPDHQGKGLGSAVVLPGVEAAERAGVPAFLETSAPRNLPFYERLGFTVTADVEVPEGPRTWCMTRKPGA

SEQ ID NO: 4634 - protein, 1383 aa, Artificial Sequence
  Synthetic Polypeptide
MALPVTALLLPLALLLHAARPEVQLVESGGGLVQAGGSLRLSCAASGRTFSMGWFRQAPGKEREFVAAITYSGGSPYYADSVKGRFTISRDNAKNTVYLQMNSLKPEDTAVYYCAANPTYGSDWNAENWGQGTQVTVSSLEGQPKANPTVTLFPPSSEELQANKATLVCLISDFYPGAVTVAWKADGSPVKAGVETTKPSKQSNNKYAASSYLSLTPEQWKSHRSYSCQVTHEGSTVEKTVAPTECSGSAKPTTTPAPRPPTPAPTIASQPLSLRPEAARPAAGGAVHTRGLDFACDSNLFVASWIAVMIIFRIGMAVAIFCCFFFPSWRRKRKEKQSETSPKEFLTIYEDVKDLKTRRNHEQEQTFPGGGSTIYSMIQSQSSAPTSQEPAYTLYSLIQPSRKSGSRKRNHSPSFNSTIYEVIGKSQPKAQNPARLSRKELENFDVYSSTSRVKFSRSADAPAYQQGQNQLYNELNLGRREEYDVLDKRRGRDPEMGGKPQRRKNPQEGLYNELQKDKMAEAYSEIGMKGERRRGKGHDGLYQGLSTATKDTYDALHMQALPPRRAKRSGSGATNFSLLKQAGDVEENPGPMDWIWRILFLVGAATGAHSGPEVQLVESGGGLVQAGGSLRLSCAASGRTFTMGWFRQAPGKEREFVAAISLSPTLAYYADSVKGRFTISRDNAKNTVVLQMNSLKPEDTALYYCAADRKSVMSIRPDYWGQGTQVTVSSTRASTKGPSVFPLAPSSKSTSGGTAALGCLVKDYFPEPVTVSWNSGALTSGVHTFPAVLQSSGLYSLSSVVTVPSSSLGTQTYICNVNHKPSNTKVDKRVEPKSCGTAKPTTTPAPRPPTPAPTIASQPLSLRPEAARPAAGGAVHTRGLDFACDSNLFVASWIAVMIIFRIGMAVAIFCCFFFPSWRRKRKEKQSETSPKEFLTIYEDVKDLKTRRNHEQEQTFPGGGSTIYSMIQSQSSAPTSQEPAYTLYSLIQPSRKSGSRKRNHSPSFNSTIYEVIGKSQPKAQNPARLSRKELENFDVYSSSRRVKFSRSADAPAYQQGQNQLYNELNLGRREEYDVLDKRRGRDPEMGGKPQRRKNPQEGLYNELQKDKMAEAYSEIGMKGERRRGKGHDGLYQGLSTATKDTYDALHMQALPPRRAKRSGSGVKQTLNFDLLKLAGDVESNPGPGHMTEYKPTVRLATRDDVPRAVRTLAAAFADYPATRHTVDPDRHIERVTELQELFLTRVGLDIGKVWVADDGAAVAVWTTPESVEAGAVFAEIGPRMAELSGSRLAAQQQMEGLLAPHRPKEPAWFLATVGVSPDHQGKGLGSAVVLPGVEAAERAGVPAFLETSAPRNLPFYERLGFTVTADVEVPEGPRTWCMTRKPGA

SEQ ID NO: 4635 - protein, 1391 aa, Artificial Sequence
  Synthetic Polypeptide
MALPVTALLLPLALLLHAARPDIQMTQSPSSLSASVGDRVTITCKASDHINNWLAWYQQKPGQAPKLLIYGATTLETGVPSRFSGSGSGTDYTLTISSLQPEDFATYYCQQSWNTPWTFGQGTKLEIKRLEDLKNVFPPEVAVFEPSEAEISHTQKATLVCLATGFYPDHVELSWWVNGKEVHSGVSTDPQPLKEQPALNDSRYCLSSRLRVSATFWQNPRNHFRCQVQFYGLSENDEWTQDRAKPVTQIVSAEAWGRADCGSAKPTTTPAPRPPTPAPTIASQPLSLRPEAARPAAGGAVHTRGLDFACDSNLFVASWIAVMIIFRIGMAVAIFCCFFFPSWRRKRKEKQSETSPKEFLTIYEDVKDLKTRRNHEQEQTFPGGGSTIYSMIQSQSSAPTSQEPAYTLYSLIQPSRKSGSRKRNHSPSFNSTIYEVIGKSQPKAQNPARLSRKELENFDVYSSTSRVKFSRSADAPAYQQGQNQLYNELNLGRREEYDVLDKRRGRDPEMGGKPQRRKNPQEGLYNELQKDKMAEAYSEIGMKGERRRGKGHDGLYQGLSTATKDTYDALHMQALPPRRAKRSGSGATNFSLLKQAGDVEENPGPMDWIWRILFLVGAATGAHSFEQVQLQQPGAELVKPGASVKMSCKASGYAFSSYWINWMKQKPGQGLEWIGQIYPGDGDTNYNGKFKGRATLTADTSSSTAYMQLSSLTSEDSAVYFCARSITTVVGCAMDYWGQGTSVTVSSTRIQNPDPAVYQLRDSKSSDKSVCLFTDFDSQTNVSQSKDSDVYITDKTVLDMRSMDFKSNSAVAWSNKSDFACANAFNNSIIPEDTFFPSPESSCGTAKPTTTPAPRPPTPAPTIASQPLSLRPEAARPAAGGAVHTRGLDFACDSNLFVASWIAVMIIFRIGMAVAIFCCFFFPSWRRKRKEKQSETSPKEFLTIYEDVKDLKTRRNHEQEQTFPGGGSTIYSMIQSQSSAPTSQEPAYTLYSLIQPSRKSGSRKRNHSPSFNSTIYEVIGKSQPKAQNPARLSRKELENFDVYSSSRRVKFSRSADAPAYQQGQNQLYNELNLGRREEYDVLDKRRGRDPEMGGKPQRRKNPQEGLYNELQKDKMAEAYSEIGMKGERRRGKGHDGLYQGLSTATKDTYDALHMQALPPRRAKRSGSGVKQTLNFDLLKLAGDVESNPGPGHMTEYKPTVRLATRDDVPRAVRTLAAAFADYPATRHTVDPDRHIERVTELQELFLTRVGLDIGKVWVADDGAAVAVWTTPESVEAGAVFAEIGPRMAELSGSRLAAQQQMEGLLAPHRPKEPAWFLATVGVSPDHQGKGLGSAVVLPGVEAAERAGVPAFLETSAPRNLPFYERLGFTVTADVEVPEGPRTWCMTRKPGA

SEQ ID NO: 4636 - protein, 1528 aa, Artificial Sequence
  Synthetic Polypeptide
MALPVTALLLPLALLLHAARPEVQLVESGGGLVQAGGSLRLSCAASGRTFSMGWFRQAPGKEREFVAAITYSGGSPYYADSVKGRFTISRDNAKNTVYLQMNSLKPEDTAVYYCAANPTYGSDWNAENWGQGTQVTVSSGTGGGGSGGGGSGGGGSEFDIQMTQSPSSLSASVGDRVTITCKASDHINNWLAWYQQKPGQAPKLLIYGATTLETGVPSRFSGSGSGTDYTLTISSLQPEDFATYYCQQSWNTPWTFGQGTKLEIKRLEDLKNVFPPEVAVFEPSEAEISHTQKATLVCLATGFYPDHVELSWWVNGKEVHSGVSTDPQPLKEQPALNDSRYCLSSRLRVSATFWQNPRNHFRCQVQFYGLSENDEWTQDRAKPVTQIVSAEAWGRADCGSAKPTTTPAPRPPTPAPTIASQPLSLRPEAARPAAGGAVHTRGLDFACDSNLFVASWIAVMIIFRIGMAVAIFCCFFFPSWRRKRKEKQSETSPKEFLTIYEDVKDLKTRRNHEQEQTFPGGGSTIYSMIQSQSSAPTSQEPAYTLYSLIQPSRKSGSRKRNHSPSFNSTIYEVIGKSQPKAQNPARLSRKELENFDVYSSTSRVKFSRSADAPAYQQGQNQLYNELNLGRREEYDVLDKRRGRDPEMGGKPQRRKNPQEGLYNELQKDKMAEAYSEIGMKGERRRGKGHDGLYQGLSTATKDTYDALHMQALPPRRAKRSGSGATNFSLLKQAGDVEENPGPMDWIWRILFLVGAATGAHSFEQVQLQQPGAELVKPGASVKMSCKASGYAFSSYWINWMKQKPGQGLEWIGQIYPGDGDTNYNGKFKGRATLTADTSSSTAYMQLSSLTSEDSAVYFCARSITTVVGCAMDYWGQGTSVTVSSTRIQNPDPAVYQLRDSKSSDKSVCLFTDFDSQTNVSQSKDSDVYITDKTVLDMRSMDFKSNSAVAWSNKSDFACANAFNNSIIPEDTFFPSPESSCGTAKPTTTPAPRPPTPAPTIASQPLSLRPEAARPAAGGAVHTRGLDFACDSNLFVASWIAVMIIFRIGMAVAIFCCFFFPSWRRKRKEKQSETSPKEFLTIYEDVKDLKTRRNHEQEQTFPGGGSTIYSMIQSQSSAPTSQEPAYTLYSLIQPSRKSGSRKRNHSPSFNSTIYEVIGKSQPKAQNPARLSRKELENFDVYSSSRRVKFSRSADAPAYQQGQNQLYNELNLGRREEYDVLDKRRGRDPEMGGKPQRRKNPQEGLYNELQKDKMAEAYSEIGMKGERRRGKGHDGLYQGLSTATKDTYDALHMQALPPRRAKRSGSGVKQTLNFDLLKLAGDVESNPGPGHMTEYKPTVRLATRDDVPRAVRTLAAAFADYPATRHTVDPDRHIERVTELQELFLTRVGLDIGKVWVADDGAAVAVWTTPESVEAGAVFAEIGPRMAELSGSRLAAQQQMEGLLAPHRPKEPAWFLATVGVSPDHQGKGLGSAVVLPGVEAAERAGVPAFLETSAPRNLPFYERLGFTVTADVEVPEGPRTWCMTRKPGA

SEQ ID NO: 4637 - protein, 1665 aa, Artificial Sequence
  Synthetic Polypeptide
MALPVTALLLPLALLLHAARPEVQLVESGGGLVQAGGSLRLSCAASGRTFSMGWFRQAPGKEREFVAAITYSGGSPYYADSVKGRFTISRDNAKNTVYLQMNSLKPEDTAVYYCAANPTYGSDWNAENWGQGTQVTVSSGTGGGGSGGGGSGGGGSEFDIQMTQSPSSLSASVGDRVTITCKASDHINNWLAWYQQKPGQAPKLLIYGATTLETGVPSRFSGSGSGTDYTLTISSLQPEDFATYYCQQSWNTPWTFGQGTKLEIKRLEDLKNVFPPEVAVFEPSEAEISHTQKATLVCLATGFYPDHVELSWWVNGKEVHSGVSTDPQPLKEQPALNDSRYCLSSRLRVSATFWQNPRNHFRCQVQFYGLSENDEWTQDRAKPVTQIVSAEAWGRADCGSAKPTTTPAPRPPTPAPTIASQPLSLRPEAARPAAGGAVHTRGLDFACDSNLFVASWIAVMIIFRIGMAVAIFCCFFFPSWRRKRKEKQSETSPKEFLTIYEDVKDLKTRRNHEQEQTFPGGGSTIYSMIQSQSSAPTSQEPAYTLYSLIQPSRKSGSRKRNHSPSFNSTIYEVIGKSQPKAQNPARLSRKELENFDVYSSTSRVKFSRSADAPAYQQGQNQLYNELNLGRREEYDVLDKRRGRDPEMGGKPQRRKNPQEGLYNELQKDKMAEAYSEIGMKGERRRGKGHDGLYQGLSTATKDTYDALHMQALPPRRAKRSGSGATNFSLLKQAGDVEENPGPMDWIWRILFLVGAATGAHSGPEVQLVESGGGLVQAGGSLRLSCAASGRTFTMGWFRQAPGKEREFVAAISLSPTLAYYADSVKGRFTISRDNAKNTVVLQMNSLKPEDTALYYCAADRKSVMSIRPDYWGQGTQVTVSSGSGGGGSGGGGSGGGGSFEQVQLQQPGAELVKPGASVKMSCKASGYAFSSYWINWMKQKPGQGLEWIGQIYPGDGDTNYNGKFKGRATLTADTSSSTAYMQLSSLTSEDSAVYFCARSITTVVGCAMDYWGQGTSVTVSSTRIQNPDPAVYQLRDSKSSDKSVCLFTDFDSQTNVSQSKDSDVYITDKTVLDMRSMDFKSNSAVAWSNKSDFACANAFNNSIIPEDTFFPSPESSCGTAKPTTTPAPRPPTPAPTIASQPLSLRPEAARPAAGGAVHTRGLDFACDSNLFVASWIAVMIIFRIGMAVAIFCCFFFPSWRRKRKEKQSETSPKEFLTIYEDVKDLKTRRNHEQEQTFPGGGSTIYSMIQSQSSAPTSQEPAYTLYSLIQPSRKSGSRKRNHSPSFNSTIYEVIGKSQPKAQNPARLSRKELENFDVYSSSRRVKFSRSADAPAYQQGQNQLYNELNLGRREEYDVLDKRRGRDPEMGGKPQRRKNPQEGLYNELQKDKMAEAYSEIGMKGERRRGKGHDGLYQGLSTATKDTYDALHMQALPPRRAKRSGSGVKQTLNFDLLKLAGDVESNPGPGHMTEYKPTVRLATRDDVPRAVRTLAAAFADYPATRHTVDPDRHIERVTELQELFLTRVGLDIGKVWVADDGAAVAVWTTPESVEAGAVFAEIGPRMAELSGSRLAAQQQMEGLLAPHRPKEPAWFLATVGVSPDHQGKGLGSAVVLPGVEAAERAGVPAFLETSAPRNLPFYERLGFTVTADVEVPEGPRTWCMTRKPGA

SEQ ID NO: 4638 - protein, 1398 aa, Artificial Sequence
  Synthetic Polypeptide
MALPVTALLLPLALLLHAARPEVQLVESGGGLVQAGGSLRLSCAASGRTFSMGWFRQAPGKEREFVAAITYSGGSPYYADSVKGRFTISRDNAKNTVYLQMNSLKPEDTAVYYCAANPTYGSDWNAENWGQGTQVTVSSLEDLKNVFPPEVAVFEPSEAEISHTQKATLVCLATGFYPDHVELSWWVNGKEVHSGVSTDPQPLKEQPALNDSRYCLSSRLRVSATFWQNPRNHFRCQVQFYGLSENDEWTQDRAKPVTQIVSAEAWGRADCGSAKPTTTPAPRPPTPAPTIASQPLSLRPEAARPAAGGAVHTRGLDFACDSNLFVASWIAVMIIFRIGMAVAIFCCFFFPSWRRKRKEKQSETSPKEFLTIYEDVKDLKTRRNHEQEQTFPGGGSTIYSMIQSQSSAPTSQEPAYTLYSLIQPSRKSGSRKRNHSPSFNSTIYEVIGKSQPKAQNPARLSRKELENFDVYSSTSRVKFSRSADAPAYQQGQNQLYNELNLGRREEYDVLDKRRGRDPEMGGKPQRRKNPQEGLYNELQKDKMAEAYSEIGMKGERRRGKGHDGLYQGLSTATKDTYDALHMQALPPRRAKRSGSGATNFSLLKQAGDVEENPGPMDWIWRILFLVGAATGAHSGPEVQLVESGGGLVQAGGSLRLSCAASGRTFTMGWFRQAPGKEREFVAAISLSPTLAYYADSVKGRFTISRDNAKNTVVLQMNSLKPEDTALYYCAADRKSVMSIRPDYWGQGTQVTVSSTRIQNPDPAVYQLRDSKSSDKSVCLFTDFDSQTNVSQSKDSDVYITDKTVLDMRSMDFKSNSAVAWSNKSDFACANAFNNSIIPEDTFFPSPESSCGTAKPTTTPAPRPPTPAPTIASQPLSLRPEAARPAAGGAVHTRGLDFACDSNLFVASWIAVMIIFRIGMAVAIFCCFFFPSWRRKRKEKQSETSPKEFLTIYEDVKDLKTRRNHEQEQTFPGGGSTIYSMIQSQSSAPTSQEPAYTLYSLIQPSRKSGSRKRNHSPSFNSTIYEVIGKSQPKAQNPARLSRKELENFDVYSSSRRVKFSRSADAPAYQQGQNQLYNELNLGRREEYDVLDKRRGRDPEMGGKPQRRKNPQEGLYNELQKDKMAEAYSEIGMKGERRRGKGHDGLYQGLSTATKDTYDALHMQALPPRRAKRSGSGVKQTLNFDLLKLAGDVESNPGPGHMTEYKPTVRLATRDDVPRAVRTLAAAFADYPATRHTVDPDRHIERVTELQELFLTRVGLDIGKVWVADDGAAVAVWTTPESVEAGAVFAEIGPRMAELSGSRLAAQQQMEGLLAPHRPKEPAWFLATVGVSPDHQGKGLGSAVVLPGVEAAERAGVPAFLETSAPRNLPFYERLGFTVTADVEVPEGPRTWCMTRKPGA

SEQ ID NO: 4639 - protein, 710 aa, Artificial Sequence
  Synthetic Polypeptide
MALPVTALLLPLALLLHAARPACEVQLLESGGGLIQPGGSLRLSCAASGFTFSSHAMTWVRQAPGKGLEWVSAISGSGDYTHYADSVKGRFTISRDNSKNTVYLQMNSLRAEDSAVYYCAKDEDGGSLLGHRGQGTLVTVSSGTGGGGSGGGGSGGGGSEFGSLEAKPTTTPAPRPPTPAPTIASQPLSLRPEAARPAAGGAVHTRGLDFACDSNLFVASWIAVMIIFRIGMAVAIFCCFFFPSWRRKRKEKQSETSPKEFLTIYEDVKDLKTRRNHEQEQTFPGGGSTIYSMIQSQSSAPTSQEPAYTLYSLIQPSRKSGSRKRNHSPSFNSTIYEVIGKSQPKAQNPARLSRKELENFDVYSSTSRVKFSRSADAPAYQQGQNQLYNELNLGRREEYDVLDKRRGRDPEMGGKPQRRKNPQEGLYNELQKDKMAEAYSEIGMKGERRRGKGHDGLYQGLSTATKDTYDALHMQALPPRRAKRSGSGATNFSLLKQAGDVEENPGPTRGHMTEYKPTVRLATRDDVPRAVRTLAAAFADYPATRHTVDPDRHIERVTELQELFLTRVGLDIGKVWVADDGAAVAVWTTPESVEAGAVFAEIGPRMAELSGSRLAAQQQMEGLLAPHRPKEPAWFLATVGVSPDHQGKGLGSAVVLPGVEAAERAGVPAFLETSAPRNLPFYERLGFTVTADVEVPEGPRTWCMTRKPGA

SEQ ID NO: 4640 - protein, 17 aa, Artificial Sequence
  Synthetic Polypeptide
GGGGGGGGGGGGGGGGG

SEQ ID NO: 4641 - protein, 17 aa, Artificial Sequence
  Synthetic Polypeptide
GGGGGGGGGGGGGGGGG

SEQ ID NO: 4642 - protein, 17 aa, Artificial Sequence
  Synthetic Polypeptide
GGGGGGGGGGGGGGGGG

SEQ ID NO: 4643 - protein, 17 aa, Artificial Sequence
  Synthetic Polypeptide
GGGGGGGGGGGGGGGGG

SEQ ID NO: 4644 - protein, 17 aa, Artificial Sequence
  Synthetic Polypeptide
GGGGGGGGGGGGGGGGG

SEQ ID NO: 4645 - protein, 17 aa, Artificial Sequence
  Synthetic Polypeptide
GGGGGGGGGGGGGGGGG

SEQ ID NO: 4646 - protein, 17 aa, Artificial Sequence
  Synthetic Polypeptide
GGGGGGGGGGGGGGGGG

SEQ ID NO: 4647 - protein, 17 aa, Artificial Sequence
  Synthetic Polypeptide
GGGGGGGGGGGGGGGGG

SEQ ID NO: 4648 - protein, 17 aa, Artificial Sequence
  Synthetic Polypeptide
GGGGGGGGGGGGGGGGG

SEQ ID NO: 4649 - protein, 17 aa, Artificial Sequence
  Synthetic Polypeptide
GGGGGGGGGGGGGGGGG

SEQ ID NO: 4650 - protein, 17 aa, Artificial Sequence
  Synthetic Polypeptide
GGGGGGGGGGGGGGGGG

SEQ ID NO: 4651 - protein, 17 aa, Artificial Sequence
  Synthetic Polypeptide
GGGGGGGGGGGGGGGGG

SEQ ID NO: 4652 - protein, 17 aa, Artificial Sequence
  Synthetic Polypeptide
GGGGGGGGGGGGGGGGG

SEQ ID NO: 4653 - protein, 17 aa, Artificial Sequence
  Synthetic Polypeptide
GGGGGGGGGGGGGGGGG

SEQ ID NO: 4654 - protein, 17 aa, Artificial Sequence
  Synthetic Polypeptide
GGGGGGGGGGGGGGGGG

SEQ ID NO: 4655 - protein, 17 aa, Artificial Sequence
  Synthetic Polypeptide
GGGGGGGGGGGGGGGGG

SEQ ID NO: 4656 - protein, 17 aa, Artificial Sequence
  Synthetic Polypeptide
GGGGGGGGGGGGGGGGG

SEQ ID NO: 4657 - protein, 17 aa, Artificial Sequence
  Synthetic Polypeptide
GGGGGGGGGGGGGGGGG

SEQ ID NO: 4658 - protein, 17 aa, Artificial Sequence
  Synthetic Polypeptide
GGGGGGGGGGGGGGGGG

SEQ ID NO: 4659 - protein, 17 aa, Artificial Sequence
  Synthetic Polypeptide
GGGGGGGGGGGGGGGGG

SEQ ID NO: 4660 - protein, 17 aa, Artificial Sequence
  Synthetic Polypeptide
GGGGGGGGGGGGGGGGG

SEQ ID NO: 4661 - protein, 17 aa, Artificial Sequence
  Synthetic Polypeptide
GGGGGGGGGGGGGGGGG

SEQ ID NO: 4662 - protein, 17 aa, Artificial Sequence
  Synthetic Polypeptide
GGGGGGGGGGGGGGGGG

SEQ ID NO: 4663 - protein, 17 aa, Artificial Sequence
  Synthetic Polypeptide
GGGGGGGGGGGGGGGGG

SEQ ID NO: 4664 - protein, 17 aa, Artificial Sequence
  Synthetic Polypeptide
GGGGGGGGGGGGGGGGG

SEQ ID NO: 4665 - protein, 17 aa, Artificial Sequence
  Synthetic Polypeptide
GGGGGGGGGGGGGGGGG

SEQ ID NO: 4666 - protein, 17 aa, Artificial Sequence
  Synthetic Polypeptide
GGGGGGGGGGGGGGGGG

SEQ ID NO: 4667 - protein, 17 aa, Artificial Sequence
  Synthetic Polypeptide
GGGGGGGGGGGGGGGGG

SEQ ID NO: 4668 - protein, 17 aa, Artificial Sequence
  Synthetic Polypeptide
GGGGGGGGGGGGGGGGG

SEQ ID NO: 4669 - protein, 894 aa, Artificial Sequence
  Synthetic Polypeptide
MALPVTALLLPLALLLHAARPDIQMTQSPSSLSASVGDRVTITCKASDHINNWLAWYQQKPGQAPKLLIYGATTLETGVPSRFSGSGSGTDYTLTISSLQPEDFATYYCQQSWNTPWTFGQGTKLEIKRLEGQPKANPTVTLFPPSSEELQANKATLVCLISDFYPGAVTVAWKADGSPVKAGVETTKPSKQSNNKYAASSYLSLTPEQWKSHRSYSCQVTHEGSTVEKTVAPTECSTTPGERSSLPAFYPGTSGSCSGCGSLSLPLLAGLVAADAVASLLIVGAVFLCARPRRSPAQEDGKVYINMPGRGRAKRSGSGATNFSLLKQAGDVEENPGPTSMDWIWRILFLVGAATGAHSFEQVQLQQPGAELVKPGASVKMSCKASGYAFSSYWINWMKQKPGQGLEWIGQIYPGDGDTNYNGKFKGRATLTADTSSSTAYMQLSSLTSEDSAVYFCARSITTVVGCAMDYWGQGTSVTVSSTRASTKGPSVFPLAPSSKSTSGGTAALGCLVKDYFPEPVTVSWNSGALTSGVHTFPAVLQSSGLYSLSSVVTVPSSSLGTQTYICNVNHKPSNTKVDKRVEPKSCTTPGERSSLPAFYPGTSGSCSGCGSLSLPLLAGLVAADAVASLLIVGAVFLCARPRRSPAQEDGKVYINMPGRGRAKRSGSGVKQTLNFDLLKLAGDVESNPGPSRGHMTEYKPTVRLATRDDVPRAVRTLAAAFADYPATRHTVDPDRHIERVTELQELFLTRVGLDIGKVWVADDGAAVAVWTTPESVEAGAVFAEIGPRMAELSGSRLAAQQQMEGLLAPHRPKEPAWFLATVGVSPDHQGKGLGSAVVLPGVEAAERAGVPAFLETSAPRNLPFYERLGFTVTADVEVPEGPRTWCMTRKPGA

SEQ ID NO: 4670 - protein, 960 aa, Artificial Sequence
  Synthetic Polypeptide
MALPVTALLLPLALLLHAARPLPVLTQPPSVSVAPGKTARITCGGNNIGSKSVHWYQQKPGQAPVLVVYDDSDRPSGIPERFSGSNSGNTATLTISRVEAGDEADYYCQVWDSSSDYVVFGGGTKLTVLGQPKANPTVTLFPPSSEELQANKATLVCLISDFYPGAVTVAWKADGSPVKAGVETTKPSKQSNNKYAASSYLSLTPEQWKSHRSYSCQVTHEGSTVEKTVAPTECSGSQSFGLLDPKLCYLLDGILFIYGVILTALFLRVKFSRSADAPAYQQGQNQLYNELNLGRREEYDVLDKRRGRDPEMGGKPQRRKNPQEGLYNELQKDKMAEAYSEIGMKGERRRGKGHDGLYQGLSTATKDTYDALHMQALPPRRAKRSGSGATNFSLLKQAGDVEENPGPTSMDWIWRILFLVGAATGAHSFEEVQLVQSGAEVKKPGESLKISCKGSGYSFTSYWIGWVRQMPGKGLEWMGIIYPGDSDTRYSPSFQGQVTISADKSISTAYLQWSSLKASDTAMYYCARQVWGWQGGMYPRSNWWYNLDSWGQGTLVTVSSASTKGPSVFPLAPSSKSTSGGTAALGCLVKDYFPEPVTVSWNSGALTSGVHTFPAVLQSSGLYSLSSVVTVPSSSLGTQTYICNVNHKPSNTKVDKRVEPKSCGTITQGLAVSTISSFFPPGYQVSFCLVMVLLFAVDTGLYFSVKTNIRSSTRDWKDHKFKWRKDPQDKRAKRSGSGATNFSLLKQAGDVEENPGPSRGHMTEYKPTVRLATRDDVPRAVRTLAAAFADYPATRHTVDPDRHIERVTELQELFLTRVGLDIGKVWVADDGAAVAVWTTPESVEAGAVFAEIGPRMAELSGSRLAAQQQMEGLLAPHRPKEPAWFLATVGVSPDHQGKGLGSAVVLPGVEAAERAGVPAFLETSAPRNLPFYERLGFTVTADVEVPEGPRTWCMTRKPGA

SEQ ID NO: 4671 - protein, 1041 aa, Artificial Sequence
  Synthetic Polypeptide
MALPVTALLLPLALLLHAARPLPVLTQPPSVSVAPGKTARITCGGNNIGSKSVHWYQQKPGQAPVLVVYDDSDRPSGIPERFSGSNSGNTATLTISRVEAGDEADYYCQVWDSSSDYVVFGGGTKLTVLGQPKANPTVTLFPPSSEELQANKATLVCLISDFYPGAVTVAWKADGSPVKAGVETTKPSKQSNNKYAASSYLSLTPEQWKSHRSYSCQVTHEGSTVEKTVAPTECSGSQSFGLLDPKLCYLLDGILFIYGVILTALFLRVKFSRSADAPAYQQGQNQLYNELNLGRREEYDVLDKRRGRDPEMGGKPQRRKNPQEGLYNELQKDKMAEAYSEIGMKGERRRGKGHDGLYQGLSTATKDTYDALHMQALPPRRAKRSGSGATNFSLLKQAGDVEENPGPTSMDWIWRILFLVGAATGAHSFEEVQLVQSGAEVKKPGESLKISCKGSGYSFTSYWIGWVRQMPGKGLEWMGIIYPGDSDTRYSPSFQGQVTISADKSISTAYLQWSSLKASDTAMYYCARQVWGWQGGMYPRSNWWYNLDSWGQGTLVTVSSASTKGPSVFPLAPSSKSTSGGTAALGCLVKDYFPEPVTVSWNSGALTSGVHTFPAVLQSSGLYSLSSVVTVPSSSLGTQTYICNVNHKPSNTKVDKRVEPKSCGTQSFGLLDPKLCYLLDGILFIYGVILTALFLRVKFSRSADAPAYQQGQNQLYNELNLGRREEYDVLDKRRGRDPEMGGKPQRRKNPQEGLYNELQKDKMAEAYSEIGMKGERRRGKGHDGLYQGLSTATKDTYDALHMQALPPRRAKRSGSGVKQTLNFDLLKLAGDVESNPGPSRGHMTEYKPTVRLATRDDVPRAVRTLAAAFADYPATRHTVDPDRHIERVTELQELFLTRVGLDIGKVWVADDGAAVAVWTTPESVEAGAVFAEIGPRMAELSGSRLAAQQQMEGLLAPHRPKEPAWFLATVGVSPDHQGKGLGSAVVLPGVEAAERAGVPAFLETSAPRNLPFYERLGFTVTADVEVPEGPRTWCMTRKPGA

SEQ ID NO: 4672 - protein, 931 aa, Artificial Sequence
  Synthetic Polypeptide
MALPVTALLLPLALLLHAARPDIQMTQSPSSLSASVGDRVTITCKASDHINNWLAWYQQKPGQAPKLLIYGATTLETGVPSRFSGSGSGTDYTLTISSLQPEDFATYYCQQSWNTPWTFGQGTKLEIKRLEGQPKANPTVTLFPPSSEELQANKATLVCLISDFYPGAVTVAWKADGSPVKAGVETTKPSKQSNNKYAASSYLSLTPEQWKSHRSYSCQVTHEGSTVEKTVAPTECSGTLPIQVEQNFLSNLFVASWIAVMIIFRIGMAVAIFCCFFFPSANERCKSKVVPCRQKQWRTSFDSKKLDLNYNHFESMEWSHRSRRGRIWGRAKRSGSGATNFSLLKQAGDVEENPGPTSMDWIWRILFLVGAATGAHSFEQVQLQQPGAELVKPGASVKMSCKASGYAFSSYWINWMKQKPGQGLEWIGQIYPGDGDTNYNGKFKGRATLTADTSSSTAYMQLSSLTSEDSAVYFCARSITTVVGCAMDYWGQGTSVTVSSTRASTKGPSVFPLAPSSKSTSGGTAALGCLVKDYFPEPVTVSWNSGALTSGVHTFPAVLQSSGLYSLSSVVTVPSSSLGTQTYICNVNHKPSNTKVDKRVEPKSCGSTLPIQVEQNFLSNLFVASWIAVMIIFRIGMAVAIFCCFFFPSANERCKSKVVPCRQKQWRTSFDSKKLDLNYNHFESMEWSHRSRRGRIWGRAKRSGSGVKQTLNFDLLKLAGDVESNPGPSRGHMTEYKPTVRLATRDDVPRAVRTLAAAFADYPATRHTVDPDRHIERVTELQELFLTRVGLDIGKVWVADDGAAVAVWTTPESVEAGAVFAEIGPRMAELSGSRLAAQQQMEGLLAPHRPKEPAWFLATVGVSPDHQGKGLGSAVVLPGVEAAERAGVPAFLETSAPRNLPFYERLGFTVTADVEVPEGPRTWCMTRKPGA

SEQ ID NO: 4673 - protein, 1037 aa, Artificial Sequence
  Synthetic Polypeptide
MALPVTALLLPLALLLHAARPDIQMTQSPSSLSASVGDRVTITCKASDHINNWLAWYQQKPGQAPKLLIYGATTLETGVPSRFSGSGSGTDYTLTISSLQPEDFATYYCQQSWNTPWTFGQGTKLEIKRGGGGSGGGGSGGGGSQVQLQQPGAELVKPGASVKMSCKASGYAFSSYWINWMKQKPGQGLEWIGQIYPGDGDTNYNGKFKGRATLTADTSSSTAYMQLSSLTSEDSAVYFCARSITTVVGCAMDYWGQGTSVTVSSTRAKPTTTPAPRPPTPAPTIASQPLSLRPEACRPAAGGAVHTRGLDFACDSNLFVASWIAVMIIFRIGMAVAIFCCFFFPSWRRKRKEKQSETSPKEFLTIYEDVKDLKTRRNHEQEQTFPGGGSTIYSMIQSQSSAPTSQEPAYTLYSLIQPSRKSGSRKRNHSPSFNSTIYEVIGKSQPKAQNPARLSRKELENFDVYSRVKFSRSADAPAYQQGQNQLYNELNLGRREEYDVLDKRRGRDPEMGGKPRRKNPQEGLYNELQKDKMAEAYSEIGMKGERRRGKGHDGLYQGLSTATKDTYDALHMQALPPRSRAKRSGSGATNFSLLKQAGDVEENPGPGIHTMATYEVLCEVARKLGTDDREVVLFLLNVFIPQPTLAQLIGALRALKEEGRLTFPLLAECLFRAGRRDLLRDLLHLDPRFLERHLAGTMSYFSPYQLTVLHVDGELCARDIRSLIFLSKDTIGSRSTPQTFLHWVYCMENLDLLGPTDVDALMSMLRSLSRVDLQRQVQTLMGLHLSGPSHSQHYRHTPLEDYKDDDDKTSRAKRSGSGATNFSLLKQAGDVEENPGPHMTEYKPTVRLATRDDVPRAVRTLAAAFADYPATRHTVDPDRHIERVTELQELFLTRVGLDIGKVWVADDGAAVAVWTTPESVEAGAVFAEIGPRMAELSGSRLAAQQQMEGLLAPHRPKEPAWFLATVGVSPDHQGKGLGSAVVLPGVEAAERAGVPAFLETSAPRNLPFYERLGFTVTADVEVPEGPRTWCMTRKPGA

SEQ ID NO: 4674 - protein, 828 aa, Artificial Sequence
  Synthetic Polypeptide
MALPVTALLLPLALLLHAARPDIQMTQSPSSLSASVGDRVTITCKASDHINNWLAWYQQKPGQAPKLLIYGATTLETGVPSRFSGSGSGTDYTLTISSLQPEDFATYYCQQSWNTPWTFGQGTKLEIKRLEGQPKANPTVTLFPPSSEELQANKATLVCLISDFYPGAVTVAWKADGSPVKAGVETTKPSKQSNNKYAASSYLSLTPEQWKSHRSYSCQVTHEGSTVEKTVAPTECSGTLPIQVEQNFLSNLFVASWIAVMIIFRIGMAVAIFCCFFFPSANERCKSKVVPCRQKQWRTSFDSKKLDLNYNHFESMEWSHRSRRGRIWGRAKRSGSGATNFSLLKQAGDVEENPGPTSMDWIWRILFLVGAATGAHSFEQVQLQQPGAELVKPGASVKMSCKASGYAFSSYWINWMKQKPGQGLEWIGQIYPGDGDTNYNGKFKGRATLTADTSSSTAYMQLSSLTSEDSAVYFCARSITTVVGCAMDYWGQGTSVTVSSTRGDIENTSLAPEDPTFPADTWGTYLLTTETGLQKDHALWDHTAQNLLRMGLAFLVLVALVWFLVEDWLSRKRTRERASRASTWEGRRRLNTQTLRAKRSGSGVKQTLNFDLLKLAGDVESNPGPSRGHMTEYKPTVRLATRDDVPRAVRTLAAAFADYPATRHTVDPDRHIERVTELQELFLTRVGLDIGKVWVADDGAAVAVWTTPESVEAGAVFAEIGPRMAELSGSRLAAQQQMEGLLAPHRPKEPAWFLATVGVSPDHQGKGLGSAVVLPGVEAAERAGVPAFLETSAPRNLPFYERLGFTVTADVEVPEGPRTWCMTRKPGA

SEQ ID NO: 4675 - protein, 723 aa, Artificial Sequence; identical to SEQ ID NO: 4254
  Synthetic Polypeptide

SEQ ID NO: 4676 - protein, 667 aa, Artificial Sequence
  Synthetic Polypeptide
MALPVTALLLPLALLLHAARPDIQMTQSPSSLSASVGDRVTITCKASDHINNWLAWYQQKPGQAPKLLIYGATTLETGVPSRFSGSGSGTDYTLTISSLQPEDFATYYCQQSWNTPWTFGQGTKLEIKRLEITQGLAVSTISSFFPPGYQVSFCLVMVLLFAVDTGLYFSVKTNIRSSTRDWKDHKFKWRKDPQDKRAKRSGSGATNFSLLKQAGDVEENPGPTSMDWIWRILFLVGAATGAHSFEQVQLQQPGAELVKPGASVKMSCKASGYAFSSYWINWMKQKPGQGLEWIGQIYPGDGDTNYNGKFKGRATLTADTSSSTAYMQLSSLTSEDSAVYFCARSITTVVGCAMDYWGQGTSVTVSSTRITQGLAVSTISSFFPPGYQVSFCLVMVLLFAVDTGLYFSVKTNIRSSTRDWKDHKFKWRKDPQDKRAKRSGSGVKQTLNFDLLKLAGDVESNPGPSRGHMTEYKPTVRLATRDDVPRAVRTLAAAFADYPATRHTVDPDRHIERVTELQELFLTRVGLDIGKVWVADDGAAVAVWTTPESVEAGAVFAEIGPRMAELSGSRLAAQQQMEGLLAPHRPKEPAWFLATVGVSPDHQGKGLGSAVVLPGVEAAERAGVPAFLETSAPRNLPFYERLGFTVTADVEVPEGPRTWCMTRKPGA

SEQ ID NO: 4677 - protein, 1059 aa, Artificial Sequence
  Synthetic Polypeptide
MALPVTALLLPLALLLHAARPACEVQLLESGGGLIQPGGSLRLSCAASGFTFSSHAMTWVRQAPGKGLEWVSAISGSGDYTHYADSVKGRFTISRDNSKNTVYLQMNSLRAEDSAVYYCAKDEDGGSLLGHRGQGTLVTVSSGTGGGGSGGGGSGGGGSEFGMRTEDLPKAVVFLEPQWYRVLEKDSVTLKCQGAYSPEDNSTQWFHNESLISSQASSYFIDAATVDDSGEYRCQTNLSTLSDPVQLEVHIGWLLLQAPRWVFKEEDPIHLRCHSWKNTALHKVTYLQNGKGRKYFHHNSDFYIPKATLKDSGSYFCRGLVGSKNVSSETVNITITQGLAVSTISSFFPPGYQVSFCLVMVLLFAVDTGLYFSVKTNIRSSTRDWKDHKFKWRKDPQDKRAKRSGSGATNFSLLKQAGDVEENPGPTSATMDWIWRILFLVGAATGAHSGPEVQLVESGGGLVQAGGSLRLSCAASGRTFSMGWFRQAPGKEREFVAAITYSGGSPYYADSVKGRFTISRDNAKNTVYLQMNSLKPEDTAVYYCAANPTYGSDWNAENWGQGTQVTVSSGSGGGGSGGGGSGGGGSFEGMRTEDLPKAVVFLEPQWYRVLEKDSVTLKCQGAYSPEDNSTQWFHNESLISSQASSYFIDAATVDDSGEYRCQTNLSTLSDPVQLEVHIGWLLLQAPRWVFKEEDPIHLRCHSWKNTALHKVTYLQNGKGRKYFHHNSDFYIPKATLKDSGSYFCRGLVGSKNVSSETVNITITQGLAVSTISSFFPPGYQVSFCLVMVLLFAVDTGLYFSVKTNIRSSTRDWKDHKFKWRKDPQDKRAKRSGSGVKQTLNFDLLKLAGDVESNPGPSRGHMTEYKPTVRLATRDDVPRAVRTLAAAFADYPATRHTVDPDRHIERVTELQELFLTRVGLDIGKVWVADDGAAVAVWTTPESVEAGAVFAEIGPRMAELSGSRLAAQQQMEGLLAPHRPKEPAWFLATVGVSPDHQGKGLGSAVVLPGVEAAERAGVPAFLETSAPRNLPFYERLGFTVTADVEVPEGPRTWCMTRKPGA

SEQ ID NO: 4678-4680 - skipped (3 entries)

SEQ ID NO: 4681 - protein, 1051 aa, Artificial Sequence
  Synthetic Polypeptide
MALPVTALLLPLALLLHAARPDIQMTQSPSSLSASVGDRVTITCKASDHINNWLAWYQQKPGQAPKLLIYGATTLETGVPSRFSGSGSGTDYTLTISSLQPEDFATYYCQQSWNTPWTFGQGTKLEIKRLEDLKNVFPPEVAVFEPSEAEISHTQKATLVCLATGFYPDHVELSWWVNGKEVHSGVSTDPQPLKEQPALNDSRYCLSSRLRVSATFWQNPRNHFRCQVQFYGLSENDEWTQDRAKPVTQIVSAEAWGRADCGSQSFGLLDPKLCYLLDGILFIYGVILTALFLRVKFSRSADAPAYQQGQNQLYNELNLGRREEYDVLDKRRGRDPEMGGKPQRRKNPQEGLYNELQKDKMAEAYSEIGMKGERRRGKGHDGLYQGLSTATKDTYDALHMQALPPRRAKRSGSGATNFSLLKQAGDVEENPGPTSMDWIWRILFLVGAATGAHSFEQVQLQQPGAELVKPGASVKMSCKASGYAFSSYWINWMKQKPGQGLEWIGQIYPGDGDTNYNGKFKGRATLTADTSSSTAYMQLSSLTSEDSAVYFCARSITTVVGCAMDYWGQGTSVTVSSTRIQNPDPAVYQLRDSKSSDKSVCLFTDFDSQTNVSQSKDSDVYITDKTVLDMRSMDFKSNSAVAWSNKSDFACANAFNNSIIPEDTFFPSPESSCGTQSFGLLDPKLCYLLDGILFIYGVILTALFLRVKFSRSADAPAYQQGQNQLYNELNLGRREEYDVLDKRRGRDPEMGGKPQRRKNPQEGLYNELQKDKMAEAYSEIGMKGERRRGKGHDGLYQGLSTATKDTYDALHMQALPPRRAKRSGSGVKQTLNFDLLKLAGDVESNPGPSRGHMTEYKPTVRLATRDDVPRAVRTLAAAFADYPATRHTVDPDRHIERVTELQELFLTRVGLDIGKVWVADDGAAVAVWTTPESVEAGAVFAEIGPRMAELSGSRLAAQQQMEGLLAPHRPKEPAWFLATVGVSPDHQGKGLGSAVVLPGVEAAERAGVPAFLETSAPRNLPFYERLGFTVTADVEVPEGPRTWCMTRKPGA

SEQ ID NO: 4682 - protein, 823 aa, Artificial Sequence
  Synthetic Polypeptide
MALPVTALLLPLALLLHAARPDIQMTQSPSSLSASVGDRVTITCKASDHINNWLAWYQQKPGQAPKLLIYGATTLETGVPSRFSGSGSGTDYTLTISSLQPEDFATYYCQQSWNTPWTFGQGTKLEIKRLEQSFGLLDPKLCYLLDGILFIYGVILTALFLRVKFSRSADAPAYQQGQNQLYNELNLGRREEYDVLDKRRGRDPEMGGKPQRRKNPQEGLYNELQKDKMAEAYSEIGMKGERRRGKGHDGLYQGLSTATKDTYDALHMQALPPRRAKRSGSGATNFSLLKQAGDVEENPGPTSMDWIWRILFLVGAATGAHSFEQVQLQQPGAELVKPGASVKMSCKASGYAFSSYWINWMKQKPGQGLEWIGQIYPGDGDTNYNGKFKGRATLTADTSSSTAYMQLSSLTSEDSAVYFCARSITTVVGCAMDYWGQGTSVTVSSTRQSFGLLDPKLCYLLDGILFIYGVILTALFLRVKFSRSADAPAYQQGQNQLYNELNLGRREEYDVLDKRRGRDPEMGGKPQRRKNPQEGLYNELQKDKMAEAYSEIGMKGERRRGKGHDGLYQGLSTATKDTYDALHMQALPPRRAKRSGSGVKQTLNFDLLKLAGDVESNPGPSRGHMTEYKPTVRLATRDDVPRAVRTLAAAFADYPATRHTVDPDRHIERVTELQELFLTRVGLDIGKVWVADDGAAVAVWTTPESVEAGAVFAEIGPRMAELSGSRLAAQQQMEGLLAPHRPKEPAWFLATVGVSPDHQGKGLGSAVVLPGVEAAERAGVPAFLETSAPRNLPFYERLGFTVTADVEVPEGPRTWCMTRKPGA

SEQ ID NO: 4683 - protein, 1036 aa, Artificial Sequence
  Synthetic Polypeptide
MALPVTALLLPLALLLHAARPDIQMTQSPSSLSASVGDRVTITCKASDHINNWLAWYQQKPGQAPKLLIYGATTLETGVPSRFSGSGSGTDYTLTISSLQPEDFATYYCQQSWNTPWTFGQGTKLEIKRLEGQPKANPTVTLFPPSSEELQANKATLVCLISDFYPGAVTVAWKADGSPVKAGVETTKPSKQSNNKYAASSYLSLTPEQWKSHRSYSCQVTHEGSTVEKTVAPTECSGSQSFGLLDPKLCYLLDGILFIYGVILTALFLRVKFSRSADAPAYQQGQNQLYNELNLGRREEYDVLDKRRGRDPEMGGKPQRRKNPQEGLYNELQKDKMAEAYSEIGMKGERRRGKGHDGLYQGLSTATKDTYDALHMQALPPRRAKRSGSGATNFSLLKQAGDVEENPGPTSMDWIWRILFLVGAATGAHSFEQVQLQQPGAELVKPGASVKMSCKASGYAFSSYWINWMKQKPGQGLEWIGQIYPGDGDTNYNGKFKGRATLTADTSSSTAYMQLSSLTSEDSAVYFCARSITTVVGCAMDYWGQGTSVTVSSTRASTKGPSVFPLAPSSKSTSGGTAALGCLVKDYFPEPVTVSWNSGALTSGVHTFPAVLQSSGLYSLSSVVTVPSSSLGTQTYICNVNHKPSNTKVDKRVEPKSCGTQSFGLLDPKLCYLLDGILFIYGVILTALFLRVKFSRSADAPAYQQGQNQLYNELNLGRREEYDVLDKRRGRDPEMGGKPQRRKNPQEGLYNELQKDKMAEAYSEIGMKGERRRGKGHDGLYQGLSTATKDTYDALHMQALPPRRAKRSGSGVKQTLNFDLLKLAGDVESNPGPSRGHMTEYKPTVRLATRDDVPRAVRTLAAAFADYPATRHTVDPDRHIERVTELQELFLTRVGLDIGKVWVADDGAAVAVWTTPESVEAGAVFAEIGPRMAELSGSRLAAQQQMEGLLAPHRPKEPAWFLATVGVSPDHQGKGLGSAVVLPGVEAAERAGVPAFLETSAPRNLPFYERLGFTVTADVEVPEGPRTWCMTRKPGA

SEQ ID NO: 4684 - protein, 1041 aa, Artificial Sequence; identical to SEQ ID NO: 4671
  Synthetic Polypeptide

SEQ ID NO: 4685 - protein, 1041 aa, Artificial Sequence
  Synthetic Polypeptide
MALPVTALLLPLALLLHAARPLPVLTQPPSVSVAPGKTARITCGGNNIGSKSVHWYQQKPGQAPVLVVYDDSDRPSGIPERFSGSNSGNTATLTISRVEAGDEADYYCQVWDSSSDYVVFGGGTKLTVLGQPKANPTVTLFPPSSEELQANKATLVCLISDFYPGAVTVAWKADGSPVKAGVETTKPSKQSNNKYAASSYLSLTPEQWKSHRSYSCQVTHEGSTVEKTVAPTECSLEQSFGLLDPKLCYLLDGILFIYGVILTALFLRVKFSRSADAPAYQQGQNQLYNELNLGRREEYDVLDKRRGRDPEMGGKPQRRKNPQEGLYNELQKDKMAEAYSEIGMKGERRRGKGHDGLYQGLSTATKDTYDALHMQALPPRRAKRSGSGATNFSLLKQAGDVEENPGPTSMDWIWRILFLVGAATGAHSFEEVQLVQSGAEVKKPGESLKISCKGSGYSFTSYWIGWVRQMPGKGLEWMGIIYPGDSDTRYSPSFQGQVTISADKSISTAYLQWSSLKASDTAMYYCARQVWGWQGGMYPRSNWWYNLDSWGQGTLVTVSSASTKGPSVFPLAPSSKSTSGGTAALGCLVKDYFPEPVTVSWNSGALTSGVHTFPAVLQSSGLYSLSSVVTVPSSSLGTQTYICNVNHKPSNTKVDKRVEPKSCTRQSFGLLDPKLCYLLDGILFIYGVILTALFLRVKFSRSADAPAYQQGQNQLYNELNLGRREEYDVLDKRRGRDPEMGGKPQRRKNPQEGLYNELQKDKMAEAYSEIGMKGERRRGKGHDGLYQGLSTATKDTYDALHMQALPPRRAKRSGSGVKQTLNFDLLKLAGDVESNPGPSRGHMTEYKPTVRLATRDDVPRAVRTLAAAFADYPATRHTVDPDRHIERVTELQELFLTRVGLDIGKVWVADDGAAVAVWTTPESVEAGAVFAEIGPRMAELSGSRLAAQQQMEGLLAPHRPKEPAWFLATVGVSPDHQGKGLGSAVVLPGVEAAERAGVPAFLETSAPRNLPFYERLGFTVTADVEVPEGPRTWCMTRKPGA

SEQ ID NO: 4686 - protein, 1121 aa, Artificial Sequence
  Synthetic Polypeptide
MALPVTALLLPLALLLHAARPLPVLTQPPSVSVAPGKTARITCGGNNIGSKSVHWYQQKPGQAPVLVVYDDSDRPSGIPERFSGSNSGNTATLTISRVEAGDEADYYCQVWDSSSDYVVFGGGTKLTVLGQPKANPTVTLFPPSSEELQANKATLVCLISDFYPGAVTVAWKADGSPVKAGVETTKPSKQSNNKYAASSYLSLTPEQWKSHRSYSCQVTHEGSTVEKTVAPTECSLELWVSQPPEIRTLEGSSAFLPCSFNASQGRLAIGSVTWFRDEVVPGKEVRNGTPEFRGRLAPLASSRFLHDHQAELHIRDVRGHDASIYVCRVEVLGLGVGTGNGTRLVVEKEHPQLGAGTVLLLRAGFYAVSFLSVAVGSTVYYQGKCLTWKGPRRQLPAVVPAPLPPPCGSSAHLLPPVPGGRAKRSGSGATNFSLLKQAGDVEENPGPTSMDWIWRILFLVGAATGAHSFEEVQLVQSGAEVKKPGESLKISCKGSGYSFTSYWIGWVRQMPGKGLEWMGIIYPGDSDTRYSPSFQGQVTISADKSISTAYLQWSSLKASDTAMYYCARQVWGWQGGMYPRSNWWYNLDSWGQGTLVTVSSASTKGPSVFPLAPSSKSTSGGTAALGCLVKDYFPEPVTVSWNSGALTSGVHTFPAVLQSSGLYSLSSVVTVPSSSLGTQTYICNVNHKPSNTKVDKRVEPKSCTRLWVSQPPEIRTLEGSSAFLPCSFNASQGRLAIGSVTWFRDEVVPGKEVRNGTPEFRGRLAPLASSRFLHDHQAELHIRDVRGHDASIYVCRVEVLGLGVGTGNGTRLVVEKEHPQLGAGTVLLLRAGFYAVSFLSVAVGSTVYYQGKCLTWKGPRRQLPAVVPAPLPPPCGSSAHLLPPVPGGRAKRSGSGVKQTLNFDLLKLAGDVESNPGPSRGHMTEYKPTVRLATRDDVPRAVRTLAAAFADYPATRHTVDPDRHIERVTELQELFLTRVGLDIGKVWVADDGAAVAVWTTPESVEAGAVFAEIGPRMAELSGSRLAAQQQMEGLLAPHRPKEPAWFLATVGVSPDHQGKGLGSAVVLPGVEAAERAGVPAFLETSAPRNLPFYERLGFTVTADVEVPEGPRTWCMTRKPGA

SEQ ID NO: 4687 - protein, 903 aa, Artificial Sequence; identical to SEQ ID NO: 3994
  Synthetic Polypeptide

SEQ ID NO: 4688-4689 - skipped (2 entries)

SEQ ID NO: 4690 - protein, 895 aa, Artificial Sequence
  Synthetic Polypeptide
MALPVTALLLPLALLLHAARPACEVQLLESGGGLIQPGGSLRLSCAASGFTFSSHAMTWVRQAPGKGLEWVSAISGSGDYTHYADSVKGRFTISRDNSKNTVYLQMNSLRAEDSAVYYCAKDEDGGSLLGHRGQGTLVTVSSGTGGGGSGGGGSGGGGSEFKSVRFYLVVSPASASTQTSWTPRDLVSSQTQTQSCVPPTAGARQAPESPSTIPVPSQPQNSTLRPGPAAPIALVPVFCGLLVAKSLVLSALLVWWGDIWWKTMMELRSLDTQKATCHLQQVTDLPWTSVSSPVEREILYHTVARTKISDDDDEHTLRAKRSGSGATNFSLLKQAGDVEENPGPTSATMDWIWRILFLVGAATGAHSGPEVQLVESGGGLVQAGGSLRLSCAASGRTFSMGWFRQAPGKEREFVAAITYSGGSPYYADSVKGRFTISRDNAKNTVYLQMNSLKPEDTAVYYCAANPTYGSDWNAENWGQGTQVTVSSGSGGGGSGGGGSGGGGSFEKSVRFYLVVSPASASTQTSWTPRDLVSSQTQTQSCVPPTAGARQAPESPSTIPVPSQPQNSTLRPGPAAPIALVPVFCGLLVAKSLVLSALLVWWGDIWWKTMMELRSLDTQKATCHLQQVTDLPWTSVSSPVEREILYHTVARTKISDDDDEHTLRAKRSGSGVKQTLNFDLLKLAGDVESNPGPSRGHMTEYKPTVRLATRDDVPRAVRTLAAAFADYPATRHTVDPDRHIERVTELQELFLTRVGLDIGKVWVADDGAAVAVWTTPESVEAGAVFAEIGPRMAELSGSRLAAQQQMEGLLAPHRPKEPAWFLATVGVSPDHQGKGLGSAVVLPGVEAAERAGVPAFLETSAPRNLPFYERLGFTVTADVEVPEGPRTWCMTRKPGA

SEQ ID NO: 4691 - protein, 957 aa, Artificial Sequence; identical to SEQ ID NO: 3995
  Synthetic Polypeptide

SEQ ID NO: 4692 - protein, 1265 aa, Artificial Sequence
  Synthetic Polypeptide
MALPVTALLLPLALLLHAARPLPVLTQPPSVSVAPGKTARITCGGNNIGSKSVHWYQQKPGQAPVLVVYDDSDRPSGIPERFSGSNSGNTATLTISRVEAGDEADYYCQVWDSSSDYVVFGGGTKLTVLGQPKANPTVTLFPPSSEELQANKATLVCLISDFYPGAVTVAWKADGSPVKAGVETTKPSKQSNNKYAASSYLSLTPEQWKSHRSYSCQVTHEGSTVEKTVAPTECSLEQSKAQVLQSVAGQTLTVRCQYPPTGSLYEKKGWCKEASALVCIRLVTSSKPRTMAWTSRFTIWDDPDAGFFTVTMTDLREEDSGHYWCRIYRPSDNSVSKSVRFYLVVSPASASTQTSWTPRDLVSSQTQTQSCVPPTAGARQAPESPSTIPVPSQPQNSTLRPGPAAPIALVPVFCGLLVAKSLVLSALLVWWGDIWWKTMMELRSLDTQKATCHLQQVTDLPWTSVSSPVEREILYHTVARTKISDDDDEHTLRAKRSGSGATNFSLLKQAGDVEENPGPTSMDWIWRILFLVGAATGAHSFEEVQLVQSGAEVKKPGESLKISCKGSGYSFTSYWIGWVRQMPGKGLEWMGIIYPGDSDTRYSPSFQGQVTISADKSISTAYLQWSSLKASDTAMYYCARQVWGWQGGMYPRSNWWYNLDSWGQGTLVTVSSASTKGPSVFPLAPSSKSTSGGTAALGCLVKDYFPEPVTVSWNSGALTSGVHTFPAVLQSSGLYSLSSVVTVPSSSLGTQTYICNVNHKPSNTKVDKRVEPKSCTRQSKAQVLQSVAGQTLTVRCQYPPTGSLYEKKGWCKEASALVCIRLVTSSKPRTMAWTSRFTIWDDPDAGFFTVTMTDLREEDSGHYWCRIYRPSDNSVSKSVRFYLVVSPASASTQTSWTPRDLVSSQTQTQSCVPPTAGARQAPESPSTIPVPSQPQNSTLRPGPAAPIALVPVFCGLLVAKSLVLSALLVWWGDIWWKTMMELRSLDTQKATCHLQQVTDLPWTSVSSPVEREILYHTVARTKISDDDDEHTLRAKRSGSGVKQTLNFDLLKLAGDVESNPGPSRGHMTEYKPTVRLATRDDVPRAVRTLAAAFADYPATRHTVDPDRHIERVTELQELFLTRVGLDIGKVWVADDGAAVAVWTTPESVEAGAVFAEIGPRMAELSGSRLAAQQQMEGLLAPHRPKEPAWFLATVGVSPDHQGKGLGSAVVLPGVEAAERAGVPAFLETSAPRNLPFYERLGFTVTADVEVPEGPRTWCMTRKPGA

SEQ ID NO: 4693 - protein, 1047 aa, Artificial Sequence; identical to SEQ ID NO: 4124
  Synthetic Polypeptide

SEQ ID NO: 4694 - protein, 849 aa, Artificial Sequence; identical to SEQ ID NO: 4150
  Synthetic Polypeptide

SEQ ID NO: 4695 - protein, 1076 aa, Artificial Sequence
  Synthetic Polypeptide
MALPVTALLLPLALLLHAARPDIQMTQSPSSLSASVGDRVTITCKASDHINNWLAWYQQKPGQAPKLLIYGATTLETGVPSRFSGSGSGTDYTLTISSLQPEDFATYYCQQSWNTPWTFGQGTKLEIKRLEGQPKANPTVTLFPPSSEELQANKATLVCLISDFYPGAVTVAWKADGSPVKAGVETTKPSKQSNNKYAASSYLSLTPEQWKSHRSYSCQVTHEGSTVEKTVAPTECSGSLWVSQPPEIRTLEGSSAFLPCSFNASQGRLAIGSVTWFRDEVVPGKEVRNGTPEFRGRLAPLASSRFLHDHQAELHIRDVRGHDASIYVCRVEVLGLGVGTGNGTRLVVEKEHPQLGAGTVLLLRAGFYAVSFLSVAVGSTVYYQGKCLTWKGPRRQLPAVVPAPLPPPCGSSAHLLPPVPGGRAKRSGSGATNFSLLKQAGDVEENPGPTSMDWIWRILFLVGAATGAHSFEQVQLQQPGAELVKPGASVKMSCKASGYAFSSYWINWMKQKPGQGLEWIGQIYPGDGDTNYNGKFKGRATLTADTSSSTAYMQLSSLTSEDSAVYFCARSITTVVGCAMDYWGQGTSVTVSSTRASTKGPSVFPLAPSSKSTSGGTAALGCLVKDYFPEPVTVSWNSGALTSGVHTFPAVLQSSGLYSLSSVVTVPSSSLGTQTYICNVNHKPSNTKVDKRVEPKSCGTQSFGLLDPKLCYLLDGILFIYGVILTALFLRVKFSRSADAPAYQQGQNQLYNELNLGRREEYDVLDKRRGRDPEMGGKPQRRKNPQEGLYNELQKDKMAEAYSEIGMKGERRRGKGHDGLYQGLSTATKDTYDALHMQALPPRRAKRSGSGVKQTLNFDLLKLAGDVESNPGPSRGHMTEYKPTVRLATRDDVPRAVRTLAAAFADYPATRHTVDPDRHIERVTELQELFLTRVGLDIGKVWVADDGAAVAVWTTPESVEAGAVFAEIGPRMAELSGSRLAAQQQMEGLLAPHRPKEPAWFLATVGVSPDHQGKGLGSAVVLPGVEAAERAGVPAFLETSAPRNLPFYERLGFTVTADVEVPEGPRTWCMTRKPGA

SEQ ID NO: 4696 - protein, 1116 aa, Artificial Sequence; identical to SEQ ID NO: 3998
  Synthetic Polypeptide

SEQ ID NO: 4697 - protein, 497 aa, Artificial Sequence
  Synthetic Polypeptide
MALPVTALLLPLALLLHAARPDIQMTQSPSSLSASVGDRVTITCKASDHINNWLAWYQQKPGQAPKLLIYGATTLETGVPSRFSGSGSGTDYTLTISSLQPEDFATYYCQQSWNTPWTFGQGTKLEIKRGGGGSGGGGSGGGGSQVQLQQPGAELVKPGASVKMSCKASGYAFSSYWINWMKQKPGQGLEWIGQIYPGDGDTNYNGKFKGRATLTADTSSSTAYMQLSSLTSEDSAVYFCARSITTVVGCAMDYWGQGTSVTVSSTREQKLISEEDLKIEVMYPPPYLDNEKSNGTIIHVKGKHLCPSPLFPGPSKPFWVLVVVGGVLACYSLLVTVAFIIFWVRSKRSRLLHSDYMNMTPRRPGPTRKHYQPYAPPRDFAAYRSRVKFSRSADAPAYQQGQNQLYNELNLGRREEYDVLDKRRGRDPEMGGKPRRKNPQEGLYNELQKDKMAEAYSEIGMKGERRRGKGHDGLYQGLSTATKDTYDALHMQALPPR

SEQ ID NO: 4698 - protein, 503 aa, Artificial Sequence
  Synthetic Polypeptide
MALPVTALLLPLALLLHAARPDIQMTQSPSSLSASVGDRVTITCKASDHINNWLAWYQQKPGQAPKLLIYGATTLETGVPSRFSGSGSGTDYTLTISSLQPEDFATYYCQQSWNTPWTFGQGTKLEIKRGGGGSGGGGSGGGGSQVQLQQPGAELVKPGASVKMSCKASGYAFSSYWINWMKQKPGQGLEWIGQIYPGDGDTNYNGKFKGRATLTADTSSSTAYMQLSSLTSEDSAVYFCARSITTVVGCAMDYWGQGTSVTVSSTREQKLISEEDLAKPTTTPAPRPPTPAPTIASQPLSLRPEACRPAAGGAVHTRGLDFACDIYIWAPLAGTCGVLLLSLVITLYCKRGRKKLLYIFKQPFMRPVQTTQEEDGCSCRFPEEEEGGCELRVKFSRSADAPAYQQGQNQLYNELNLGRREEYDVLDKRRGRDPEMGGKPRRKNPQEGLYNELQKDKMAEAYSEIGMKGERRRGKGHDGLYQGLSTATKDTYDALHMQALPPR

SEQ ID NO: 4699 - protein, 622 aa, Artificial Sequence
  Synthetic Polypeptide
MALPVTALLLPLALLLHAARPDIQMTQSPSSLSASVGDRVTITCKASDHINNWLAWYQQKPGQAPKLLIYGATTLETGVPSRFSGSGSGTDYTLTISSLQPEDFATYYCQQSWNTPWTFGQGTKLEIKRLEDLKNVFPPEVAVFEPSEAEISHTQKATLVCLATGFYPDHVELSWWVNGKEVHSGVCTDPQPLKEQPALNDSRYCLSSRLRVSATFWQNPRNHFRCQVQFYGLSENDEWTQDRAKPVTQIVSAEAWGRADCGFTSESYQQGVLSATILYEILLGKATLYAVLVSALVLMAMVKRKDSRGRAKRSGSGATNFSLLKQAGDVEENPGPTSMDWIWRILFLVGAATGAHSFEQVQLQQPGAELVKPGASVKMSCKASGYAFSSYWINWMKQKPGQGLEWIGQIYPGDGDTNYNGKFKGRATLTADTSSSTAYMQLSSLTSEDSAVYFCARSITTVVGCAMDYWGQGTSVTVSSTRIQNPDPAVYQLRDSKSSDKSVCLFTDFDSQTNVSQSKDSDVYITDKCVLDMRSMDFKSNSAVAWSNKSDFACANAFNNSIIPEDTFFPSPESSCDVKLVEKSFETDTNLNFQNLSVIGFRILLLKVAGFNLLMTLRLWSS

SEQ ID NO: 4700 - protein, 799 aa, Artificial Sequence
  Synthetic Polypeptide
MALPVTALLLPLALLLHAARPDIQMTQSPSSLSASVGDRVTITCKASDHINNWLAWYQQKPGQAPKLLIYGATTLETGVPSRFSGSGSGTDYTLTISSLQPEDFATYYCQQSWNTPWTFGQGTKLEIKRGQPKANPTVTLFPPSSEELQANKATLVCLISDFYPGAVTVAWKADGSPVKAGVETTKPSKQSNNKYAASSYLSLTPEQWKSHRSYSCQVTHEGSTVEKTVAPTECSGSQSFGLLDPKLCYLLDGILFIYGVILTALFLRVKFSRSADAPAYQQGQNQLYNELNLGRREEYDVLDKRRGRDPEMGGKPQRRKNPQEGLYNELQKDKMAEAYSEIGMKGERRRGKGHDGLYQGLSTATKDTYDALHMQALPPRRAKRSGSGATNFSLLKQAGDVEENPGPTSMDWIWRILFLVGAATGAHSFEQVQLQQPGAELVKPGASVKMSCKASGYAFSSYWINWMKQKPGQGLEWIGQIYPGDGDTNYNGKFKGRATLTADTSSSTAYMQLSSLTSEDSAVYFCARSITTVVGCAMDYWGQGTSVTVSSASTKGPSVFPLAPSSKSTSGGTAALGCLVKDYFPEPVTVSWNSGALTSGVHTFPAVLQSSGLYSLSSVVTVPSSSLGTQTYICNVNHKPSNTKVDKRVEPKSCGTQSFGLLDPKLCYLLDGILFIYGVILTALFLRVKFSRSADAPAYQQGQNQLYNELNLGRREEYDVLDKRRGRDPEMGGKPQRRKNPQEGLYNELQKDKMAEAYSEIGMKGERRRGKGHDGLYQGLSTATKDTYDALHMQALPPR

SEQ ID NO: 4701 - protein, 565 aa, Artificial Sequence
  Synthetic Polypeptide
MALPVTALLLPLALLLHAARPDIQMTQSPSSLSASVGDRVTITCKASDHINNWLAWYQQKPGQAPKLLIYGATTLETGVPSRFSGSGSGTDYTLTISSLQPEDFATYYCQQSWNTPWTFGQGTKLEIKRLEQSFGLLDPKLCYLLDGILFIYGVILTALFLRVKFSRSADAPAYQQGQNQLYNELNLGRREEYDVLDKRRGRDPEMGGKPQRRKNPQEGLYNELQKDKMAEAYSEIGMKGERRRGKGHDGLYQGLSTATKDTYDALHMQALPPRRAKRSGSGATNFSLLKQAGDVEENPGPTSMDWIWRILFLVGAATGAHSFEQVQLQQPGAELVKPGASVKMSCKASGYAFSSYWINWMKQKPGQGLEWIGQIYPGDGDTNYNGKFKGRATLTADTSSSTAYMQLSSLTSEDSAVYFCARSITTVVGCAMDYWGQGTSVTVSSTRQSFGLLDPKLCYLLDGILFIYGVILTALFLRVKFSRSADAPAYQQGQNQLYNELNLGRREEYDVLDKRRGRDPEMGGKPQRRKNPQEGLYNELQKDKMAEAYSEIGMKGERRRGKGHD

SEQ ID NO: 4702 - protein, 818 aa, Artificial Sequence
  Synthetic Polypeptide
MALPVTALLLPLALLLHAARPDIQMTQSPSSLSASVGDRVTITCKASDHINNWLAWYQQKPGQAPKLLIYGATTLETGVPSRFSGSGSGTDYTLTISSLQPEDFATYYCQQSWNTPWTFGQGTKLEIKRLEDLKNVFPPEVAVFEPSEAEISHTQKATLVCLATGFYPDHVELSWWVNGKEVHSGVSTDPQPLKEQPALNDSRYCLSSRLRVSATFWQNPRNHFRCQVQFYGLSENDEWTQDRAKPVTQIVSAEAWGRADCGSQSFGLLDPKLCYLLDGILFIYGVILTALFLRVKFSRSADAPAYQQGQNQLYNELNLGRREEYDVLDKRRGRDPEMGGKPQRRKNPQEGLYNELQKDKMAEAYSEIGMKGERRRGKGHDGLYQGLSTATKDTYDALHMQALPPRRAKRSGSGATNFSLLKQAGDVEENPGPTSMDWIWRILFLVGAATGAHSFEQVQLQQPGAELVKPGASVKMSCKASGYAFSSYWINWMKQKPGQGLEWIGQIYPGDGDTNYNGKFKGRATLTADTSSSTAYMQLSSLTSEDSAVYFCARSITTVVGCAMDYWGQGTSVTVSSTRIQNPDPAVYQLRDSKSSDKSVCLFTDFDSQTNVSQSKDSDVYITDKTVLDMRSMDFKSNSAVAWSNKSDFACANAFNNSIIPEDTFFPSPESSCGTQSFGLLDPKLCYLLDGILFIYGVILTALFLRVKFSRSADAPAYQQGQNQLYNELNLGRREEYDVLDKRRGRDPEMGGKPQRRKNPQEGLYNELQKDKMAEAYSEIGMKGERRRGKGHDGLYQGLSTATKDTYDALHMQALPPR

SEQ ID NO: 4703 - protein, 648 aa, Artificial Sequence
  Synthetic Polypeptide
MALPVTALLLPLALLLHAARPDIQMTQSPSSLSASVGDRVTITCKASDHINNWLAWYQQKPGQAPKLLIYGATTLETGVPSRFSGSGSGTDYTLTISSLQPEDFATYYCQQSWNTPWTFGQGTKLEIKRLEGQPKANPTVTLFPPSSEELQANKATLVCLISDFYPGAVTVAWKADGSPVKAGVETTKPSKQSNNKYAASSYLSLTPEQWKSHRSYSCQVTHEGSTVEKTVAPTECSPIKTDVITMDPKDNCSKDANDTLLLQLTNTSAYYMYLLLLLKSVVYFAIITCCLLRRTAFCCNGEKSRAKRSGSGATNFSLLKQAGDVEENPGPTSMDWIWRILFLVGAATGAHSFEQVQLQQPGAELVKPGASVKMSCKASGYAFSSYWINWMKQKPGQGLEWIGQIYPGDGDTNYNGKFKGRATLTADTSSSTAYMQLSSLTSEDSAVYFCARSITTVVGCAMDYWGQGTSVTVSSTRASTKGPSVFPLAPSSKSTSGGTAALGCLVKDYFPEPVTVSWNSGALTSGVHTFPAVLQSSGLYSLSSVVTVPSSSLGTQTYICNVNHKPSNTKVDKRVEPKSCEVKTDSTDHVKPKETENTKQPSKSCHKPKAIVHTEKVNMMSLTVLGLRMLFAKTVAVNFLLTAKLFFL

SEQ ID NO: 4704 - protein, 626 aa, Artificial Sequence
  Synthetic Polypeptide
MALPVTALLLPLALLLHAARPDIQMTQSPSSLSASVGDRVTITCKASDHINNWLAWYQQKPGQAPKLLIYGATTLETGVPSRFSGSGSGTDYTLTISSLQPEDFATYYCQQSWNTPWTFGQGTKLEIKRLEGQPKANPTVTLFPPSSEELQANKATLVCLISDFYPGAVTVAWKADGSPVKAGVETTKPSKQSNNKYAASSYLSLTPEQWKSHRSYSCQVTHEGSTVEKTVAPTECSGRADCGFTSESYQQGVLSATILYEILLGKATLYAVLVSALVLMAMVKRKDSRGRAKRSGSGATNFSLLKQAGDVEENPGPTSMDWIWRILFLVGAATGAHSFEQVQLQQPGAELVKPGASVKMSCKASGYAFSSYWINWMKQKPGQGLEWIGQIYPGDGDTNYNGKFKGRATLTADTSSSTAYMQLSSLTSEDSAVYFCARSITTVVGCAMDYWGQGTSVTVSSTRASTKGPSVFPLAPSSKSTSGGTAALGCLVKDYFPEPVTVSWNSGALTSGVHTFPAVLQSSGLYSLSSVVTVPSSSLGTQTYICNVNHKPSNTKVDKRVEPKSCIPEDTFFPSPESSCDVKLVEKSFETDTNLNFQNLSVIGFRILLLKVAGFNLLMTLRLWSS

SEQ ID NO: 4705 - protein, 452 aa, Artificial Sequence
  Synthetic Polypeptide
MALPVTALLLPLALLLHAARPDIQMTQSPSSLSASVGDRVTITCKASDHINNWLAWYQQKPGQAPKLLIYGATTLETGVPSRFSGSGSGTDYTLTISSLQPEDFATYYCQQSWNTPWTFGQGTKLEIKRGGGGSGGGGSGGGGSQVQLQQPGAELVKPGASVKMSCKASGYAFSSYWINWMKQKPGQGLEWIGQIYPGDGDTNYNGKFKGRATLTADTSSSTAYMQLSSLTSEDSAVYFCARSITTVVGCAMDYWGQGTSVTVSSTRDGNEEMGGITQTPYKVSISGTTVILTCPQYPGSEILWQHNDKNIGGDEDDKNIGSDEDHLSLKEFSELEQSGYYVCYPRGSKPEDANFYLYLRARVCENCMEMDVMSVATIVIVDICITGGLLLLVYYWSKNRKAKAKPVTRGAGAGGRQRGQNKERPPPVPNPDYEPIRKGQRDLYSGLNQRRI

SEQ ID NO: 4706 - protein, 941 aa, Artificial Sequence
  Synthetic Polypeptide
MALPVTALLLPLALLLHAARPLPVLTQPPSVSVAPGKTARITCGGNNIGSKSVHWYQQKPGQAPVLVVYDDSDRPSGIPERFSGSNSGNTATLTISRVEAGDEADYYCQVWDSSSDYVVFGGGTKLTVLGQPKANPTVTLFPPSSEELQANKATLVCLISDFYPGAVTVAWKADGSPVKAGVETTKPSKQSNNKYAASSYLSLTPEQWKSHRSYSCQVTHEGSTVEKTVAPTECSGSGDIENTSLAPEDPTFPADTWGTYLLTTETGLQKDHALWDHTAQNLLRMGLAFLVLVALVWFLVEDWLSRKRTRERASRASTWEGRRRLNTQTLRAKRSGSGVKQTLNFDLLKLAGDVESNPGPTSMDWIWRILFLVGAATGAHSFEEVQLVQSGAEVKKPGESLKISCKGSGYSFTSYWIGWVRQMPGKGLEWMGIIYPGDSDTRYSPSFQGQVTISADKSISTAYLQWSSLKASDTAMYYCARQVWGWQGGMYPRSNWWYNLDSWGQGTLVTVSSASTKGPSVFPLAPSSKSTSGGTAALGCLVKDYFPEPVTVSWNSGALTSGVHTFPAVLQSSGLYSLSSVVTVPSSSLGTQTYICNVNHKPSNTKVDKRVEPKSCGTGDIENTSLAPEDPTFPADTWGTYLLTTETGLQKDHALWDHTAQNLLRMGLAFLVLVALVWFLVEDWLSRKRTRERASRASTWEGRRRLNTQTLRAKRSGSGATNFSLLKQAGDVEENPGPSRGHMTEYKPTVRLATRDDVPRAVRTLAAAFADYPATRHTVDPDRHIERVTELQELFLTRVGLDIGKVWVADDGAAVAVWTTPESVEAGAVFAEIGPRMAELSGSRLAAQQQMEGLLAPHRPKEPAWFLATVGVSPDHQGKGLGSAVVLPGVEAAERAGVPAFLETSAPRNLPFYERLGFTVTADVEVPEGPRTWCMTRKPGA

SEQ ID NO: 4707 - protein, 1131 aa, Artificial Sequence
  Synthetic Polypeptide
MALPVTALLLPLALLLHAARPLPVLTQPPSVSVAPGKTARITCGGNNIGSKSVHWYQQKPGQAPVLVVYDDSDRPSGIPERFSGSNSGNTATLTISRVEAGDEADYYCQVWDSSSDYVVFGGGTKLTVLGQPKANPTVTLFPPSSEELQANKATLVCLISDFYPGAVTVAWKADGSPVKAGVETTKPSKQSNNKYAASSYLSLTPEQWKSHRSYSCQVTHEGSTVEKTVAPTECSGSTTPGERSSLPAFYPGTSGSCSGCGSLSLPLLAGLVAADAVASLLIVGAVFLCARPRRSPAQEDGKVYINMPGRGSTSRVKFSRSADAPAYQQGQNQLYNELNLGRREEYDVLDKRRGRDPEMGGKPQRRKNPQEGLYNELQKDKMAEAYSEIGMKGERRRGKGHDGLYQGLSTATKDTYDALHMQALPPRRAKRSGSGATNFSLLKQAGDVEENPGPMDWIWRILFLVGAATGAHSFEEVQLVQSGAEVKKPGESLKISCKGSGYSFTSYWIGWVRQMPGKGLEWMGIIYPGDSDTRYSPSFQGQVTISADKSISTAYLQWSSLKASDTAMYYCARQVWGWQGGMYPRSNWWYNLDSWGQGTLVTVSSASTKGPSVFPLAPSSKSTSGGTAALGCLVKDYFPEPVTVSWNSGALTSGVHTFPAVLQSSGLYSLSSVVTVPSSSLGTQTYICNVNHKPSNTKVDKRVEPKSCGTTTPGERSSLPAFYPGTSGSCSGCGSLSLPLLAGLVAADAVASLLIVGAVFLCARPRRSPAQEDGKVYINMPGRGSSRRVKFSRSADAPAYQQGQNQLYNELNLGRREEYDVLDKRRGRDPEMGGKPQRRKNPQEGLYNELQKDKMAEAYSEIGMKGERRRGKGHDGLYQGLSTATKDTYDALHMQALPPRRAKRSGSGVKQTLNFDLLKLAGDVESNPGPGHMTEYKPTVRLATRDDVPRAVRTLAAAFADYPATRHTVDPDRHIERVTELQELFLTRVGLDIGKVWVADDGAAVAVWTTPESVEAGAVFAEIGPRMAELSGSRLAAQQQMEGLLAPHRPKEPAWFLATVGVSPDHQGKGLGSAVVLPGVEAAERAGVPAFLETSAPRNLPFYERLGFTVTADVEVPEGPRTWCMTRKPGA

SEQ ID NO: 4708 - protein, 1084 aa, Artificial Sequence
  Synthetic Polypeptide
MALPVTALLLPLALLLHAARPACEVQLLESGGGLIQPGGSLRLSCAASGFTFSSHAMTWVRQAPGKGLEWVSAISGSGDYTHYADSVKGRFTISRDNSKNTVYLQMNSLRAEDSAVYYCAKDEDGGSLLGHRGQGTLVTVSSGTGGGGSGGGGSGGGGSEFGMRTEDLPKAVVFLEPQWYRVLEKDSVTLKCQGAYSPEDNSTQWFHNESLISSQASSYFIDAATVDDSGEYRCQTNLSTLSDPVQLEVHIGWLLLQAPRWVFKEEDPIHLRCHSWKNTALHKVTYLQNGKGRKYFHHNSDFYIPKATLKDSGSYFCRGLVGSKNVSSETVNITITQGLAVSTISSFFPPGYQVSFCLVMVLLFAVDTGLYFSVKTNIRSSTRDWKDHKFKWRKDPQDKRAKRSGSGATNFSLLKQAGDVEENPGPTSATMDWIWRILFLVGAATGAHSGPEVQLVESGGGLVQAGGSLRLSCAASGRTFSMGWFRQAPGKEREFVAAITYSGGSPYYADSVKGRFTISRDNAKNTVYLQMNSLKPEDTAVYYCAANPTYGSDWNAENWGQGTQVTVSSGSGGGGSGGGGSGGGGSFEQVQLQQPGAELVKPGASVKMSCKASGYAFSSYWINWMKQKPGQGLEWIGQIYPGDGDTNYNGKFKGRATLTADTSSSTAYMQLSSLTSEDSAVYFCARSITTVVGCAMDYWGQGTSVTVSSTRIQNPDPAVYQLRDSKSSDKSVCLFTDFDSQTNVSQSKDSDVYITDKCVLDMRSMDFKSNSAVAWSNKSDFACANAFNNSIIPEDTFFPSPESSCDVKLVEKSFETDTNLNFQNLSVIGFRILLLKVAGFNLLMTLRLWSSRAKRSGSGVKQTLNFDLLKLAGDVESNPGPSRGHMTEYKPTVRLATRDDVPRAVRTLAAAFADYPATRHTVDPDRHIERVTELQELFLTRVGLDIGKVWVADDGAAVAVWTTPESVEAGAVFAEIGPRMAELSGSRLAAQQQMEGLLAPHRPKEPAWFLATVGVSPDHQGKGLGSAVVLPGVEAAERAGVPAFLETSAPRNLPFYERLGFTVTADVEVPEGPRTWCMTRKPGA

SEQ ID NO: 4709 - protein, 995 aa, Artificial Sequence
  Synthetic Polypeptide
MALPVTALLLPLALLLHAARPACEVQLLESGGGLIQPGGSLRLSCAASGFTFSSHAMTWVRQAPGKGLEWVSAISGSGDYTHYADSVKGRFTISRDNSKNTVYLQMNSLRAEDSAVYYCAKDEDGGSLLGHRGQGTLVTVSSGTGGGGSGGGGSGGGGSEFIGWLLLQAPRWVFKEEDPIHLRCHSWKNTALHKVTYLQNGKGRKYFHHNSDFYIPKATLKDSGSYFCRGLVGSKNVSSETVNITITQGLAVSTISSFFPPGYQVSFCLVMVLLFAVDTGLYFSVKTNIRSSTRDWKDHKFKWRKDPQDKRAKRSGSGATNFSLLKQAGDVEENPGPTSATMDWIWRILFLVGAATGAHSGPEVQLVESGGGLVQAGGSLRLSCAASGRTFSMGWFRQAPGKEREFVAAITYSGGSPYYADSVKGRFTISRDNAKNTVYLQMNSLKPEDTAVYYCAANPTYGSDWNAENWGQGTQVTVSSGSGGGGSGGGGSGGGGSFEQVQLQQPGAELVKPGASVKMSCKASGYAFSSYWINWMKQKPGQGLEWIGQIYPGDGDTNYNGKFKGRATLTADTSSSTAYMQLSSLTSEDSAVYFCARSITTVVGCAMDYWGQGTSVTVSSTRIQNPDPAVYQLRDSKSSDKSVCLFTDFDSQTNVSQSKDSDVYITDKCVLDMRSMDFKSNSAVAWSNKSDFACANAFNNSIIPEDTFFPSPESSCDVKLVEKSFETDTNLNFQNLSVIGFRILLLKVAGFNLLMTLRLWSSRAKRSGSGVKQTLNFDLLKLAGDVESNPGPSRGHMTEYKPTVRLATRDDVPRAVRTLAAAFADYPATRHTVDPDRHIERVTELQELFLTRVGLDIGKVWVADDGAAVAVWTTPESVEAGAVFAEIGPRMAELSGSRLAAQQQMEGLLAPHRPKEPAWFLATVGVSPDHQGKGLGSAVVLPGVEAAERAGVPAFLETSAPRNLPFYERLGFTVTADVEVPEGPRTWCMTRKPGA

SEQ ID NO: 4710 - protein, 978 aa, Artificial Sequence
  Synthetic Polypeptide
MALPVTALLLPLALLLHAARPACEVQLLESGGGLIQPGGSLRLSCAASGFTFSSHAMTWVRQAPGKGLEWVSAISGSGDYTHYADSVKGRFTISRDNSKNTVYLQMNSLRAEDSAVYYCAKDEDGGSLLGHRGQGTLVTVSSGTIGWLLLQAPRWVFKEEDPIHLRCHSWKNTALHKVTYLQNGKGRKYFHHNSDFYIPKATLKDSGSYFCRGLVGSKNVSSETVNITITQGLAVSTISSFFPPGYQVSFCLVMVLLFAVDTGLYFSVKTNIRSSTRDWKDHKFKWRKDPQDKRAKRSGSGATNFSLLKQAGDVEENPGPTSATMDWIWRILFLVGAATGAHSGPEVQLVESGGGLVQAGGSLRLSCAASGRTFSMGWFRQAPGKEREFVAAITYSGGSPYYADSVKGRFTISRDNAKNTVYLQMNSLKPEDTAVYYCAANPTYGSDWNAENWGQGTQVTVSSGSGGGGSGGGGSGGGGSFEQVQLQQPGAELVKPGASVKMSCKASGYAFSSYWINWMKQKPGQGLEWIGQIYPGDGDTNYNGKFKGRATLTADTSSSTAYMQLSSLTSEDSAVYFCARSITTVVGCAMDYWGQGTSVTVSSTRIQNPDPAVYQLRDSKSSDKSVCLFTDFDSQTNVSQSKDSDVYITDKCVLDMRSMDFKSNSAVAWSNKSDFACANAFNNSIIPEDTFFPSPESSCDVKLVEKSFETDTNLNFQNLSVIGFRILLLKVAGFNLLMTLRLWSSRAKRSGSGVKQTLNFDLLKLAGDVESNPGPSRGHMTEYKPTVRLATRDDVPRAVRTLAAAFADYPATRHTVDPDRHIERVTELQELFLTRVGLDIGKVWVADDGAAVAVWTTPESVEAGAVFAEIGPRMAELSGSRLAAQQQMEGLLAPHRPKEPAWFLATVGVSPDHQGKGLGSAVVLPGVEAAERAGVPAFLETSAPRNLPFYERLGFTVTADVEVPEGPRTWCMTRKPGA

SEQ ID NO: 4711 - protein, 540 aa, Artificial Sequence
  Synthetic Polypeptide
MALPVTALLLPLALLLHAARPACEVQLLESGGGLIQPGGSLRLSCAASGFTFSSHAMTWVRQAPGKGLEWVSAISGSGDYTHYADSVKGRFTISRDNSKNTVYLQMNSLRAEDSAVYYCAKDEDGGSLLGHRGQGTLVTVSSGTGGGGSGGGGSGGGGSEFIGWLLLQAPRWVFKEEDPIHLRCHSWKNTALHKVTYLQNGKGRKYFHHNSDFYIPKATLKDSGSYFCRGLVGSKNVSSETVNITITQGLAVSTISSFFPPGYQVSFCLVMVLLFAVDTGLYFSVKTNIRSSTRDWKDHKFKWRKDPQDKRAKRSGSGATNFSLLKQAGDVEENPGPTRGHMTEYKPTVRLATRDDVPRAVRTLAAAFADYPATRHTVDPDRHIERVTELQELFLTRVGLDIGKVWVADDGAAVAVWTTPESVEAGAVFAEIGPRMAELSGSRLAAQQQMEGLLAPHRPKEPAWFLATVGVSPDHQGKGLGSAVVLPGVEAAERAGVPAFLETSAPRNLPFYERLGFTVTADVEVPEGPRTWCMTRKPGA

SEQ ID NO: 4712 - protein, 629 aa, Artificial Sequence
  Synthetic Polypeptide
MDWIWRILFLVGAATGAHSGPEVQLVESGGGLVQAGGSLRLSCAASGRTFSMGWFRQAPGKEREFVAAITYSGGSPYYADSVKGRFTISRDNAKNTVYLQMNSLKPEDTAVYYCAANPTYGSDWNAENWGQGTQVTVSSGSGGGGSGGGGSGGGGSFEGMRTEDLPKAVVFLEPQWYRVLEKDSVTLKCQGAYSPEDNSTQWFHNESLISSQASSYFIDAATVDDSGEYRCQTNLSTLSDPVQLEVHIGWLLLQAPRWVFKEEDPIHLRCHSWKNTALHKVTYLQNGKGRKYFHHNSDFYIPKATLKDSGSYFCRGLVGSKNVSSETVNITITQGLAVSTISSFFPPGYQVSFCLVMVLLFAVDTGLYFSVKTNIRSSTRDWKDHKFKWRKDPQDKRAKRSGSGVKQTLNFDLLKLAGDVESNPGPSRGHMTEYKPTVRLATRDDVPRAVRTLAAAFADYPATRHTVDPDRHIERVTELQELFLTRVGLDIGKVWVADDGAAVAVWTTPESVEAGAVFAEIGPRMAELSGSRLAAQQQMEGLLAPHRPKEPAWFLATVGVSPDHQGKGLGSAVVLPGVEAAERAGVPAFLETSAPRNLPFYERLGFTVTADVEVPEGPRTWCMTRKPGA

SEQ ID NO: 4713 - protein, 813 aa, Artificial Sequence
  Synthetic Polypeptide
MALPVTALLLPLALLLHAARPDIQMTQSPSSLSASVGDRVTITCKASDHINNWLAWYQQKPGQAPKLLIYGATTLETGVPSRFSGSGSGTDYTLTISSLQPEDFATYYCQQSWNTPWTFGQGTKLEIKRLELWVSQPPEIRTLEGSSAFLPCSFNASQGRLAIGSVTWFRDEVVPGKEVRNGTPEFRGRLAPLASSRFLHDHQAELHIRDVRGHDASIYVCRVEVLGLGVGTGNGTRLVVEKEHPQLGAGTVLLLRAGFYAVSFLSVAVGSTVYYQGKCLTWKGPRRQLPAVVPAPLPPPCGSSAHLLPPVPGGRAKRSGSGATNFSLLKQAGDVEENPGPTSMDWIWRILFLVGAATGAHSFEQVQLQQPGAELVKPGASVKMSCKASGYAFSSYWINWMKQKPGQGLEWIGQIYPGDGDTNYNGKFKGRATLTADTSSSTAYMQLSSLTSEDSAVYFCARSITTVVGCAMDYWGQGTSVTVSSTRGDIENTSLAPEDPTFPADTWGTYLLTTETGLQKDHALWDHTAQNLLRMGLAFLVLVALVWFLVEDWLSRKRTRERASRASTWEGRRRLNTQTLRAKRSGSGVKQTLNFDLLKLAGDVESNPGPSRGHMTEYKPTVRLATRDDVPRAVRTLAAAFADYPATRHTVDPDRHIERVTELQELFLTRVGLDIGKVWVADDGAAVAVWTTPESVEAGAVFAEIGPRMAELSGSRLAAQQQMEGLLAPHRPKEPAWFLATVGVSPDHQGKGLGSAVVLPGVEAAERAGVPAFLETSAPRNLPFYERLGFTVTADVEVPEGPRTWCMTRKPGA

SEQ ID NO: 4714 - protein, 981 aa, Artificial Sequence
  Synthetic Polypeptide
MALPVTALLLPLALLLHAARPACEVQLLESGGGLIQPGGSLRLSCAASGFTFSSHAMTWVRQAPGKGLEWVSAISGSGDYTHYADSVKGRFTISRDNSKNTVYLQMNSLRAEDSAVYYCAKDEDGGSLLGHRGQGTLVTVSSGTGGGGSGGGGSGGGGSEFGSLEKSVRFYLVVSPASASTQTSWTPRDLVSSQTQTQSCVPPTAGARQAPESPSTIPVPSQPQNSTLRPGPAAPIALVPVFCGLLVAKSLVLSALLVWWGDIWWKTMMELRSLDTQKATCHLQQVTDLPWTSVSSPVEREILYHTVARTKISDDDDEHTLRAKRSGSGATNFSLLKQAGDVEENPGPTSATMDWIWRILFLVGAATGAHSGPEVQLVESGGGLVQAGGSLRLSCAASGRTFSMGWFRQAPGKEREFVAAITYSGGSPYYADSVKGRFTISRDNAKNTVYLQMNSLKPEDTAVYYCAANPTYGSDWNAENWGQGTQVTVSSGSGGGGSGGGGSGGGGSFEGMRTEDLPKAVVFLEPQWYRVLEKDSVTLKCQGAYSPEDNSTQWFHNESLISSQASSYFIDAATVDDSGEYRCQTNLSTLSDPVQLEVHIGWLLLQAPRWVFKEEDPIHLRCHSWKNTALHKVTYLQNGKGRKYFHHNSDFYIPKATLKDSGSYFCRGLVGSKNVSSETVNITITQGLAVSTISSFFPPGYQVSFCLVMVLLFAVDTGLYFSVKTNIRSSTRDWKDHKFKWRKDPQDKRAKRSGSGVKQTLNFDLLKLAGDVESNPGPSRGHMTEYKPTVRLATRDDVPRAVRTLAAAFADYPATRHTVDPDRHIERVTELQELFLTRVGLDIGKVWVADDGAAVAVWTTPESVEAGAVFAEIGPRMAELSGSRLAAQQQMEGLLAPHRPKEPAWFLATVGVSPDHQGKGLGSAVVLPGVEAAERAGVPAFLETSAPRNLPFYERLGFTVTADVEVPEGPRTWCMTRKPGA

SEQ ID NO: 4715 - protein, 1153 aa, Artificial Sequence
  Synthetic Polypeptide
MALPVTALLLPLALLLHAARPLPVLTQPPSVSVAPGKTARITCGGNNIGSKSVHWYQQKPGQAPVLVVYDDSDRPSGIPERFSGSNSGNTATLTISRVEAGDEADYYCQVWDSSSDYVVFGGGTKLTVLGQPKANPTVTLFPPSSEELQANKATLVCLISDFYPGAVTVAWKADGSPVKAGVETTKPSKQSNNKYAASSYLSLTPEQWKSHRSYSCQVTHEGSTVEKTVAPTECSLEQSKAQVLQSVAGQTLTVRCQYPPTGSLYEKKGWCKEASALVCIRLVTSSKPRTMAWTSRFTIWDDPDAGFFTVTMTDLREEDSGHYWCRIYRPSDNSVSKSVRFYLVVSPASASTQTSWTPRDLVSSQTQTQSCVPPTAGARQAPESPSTIPVPSQPQNSTLRPGPAAPIALVPVFCGLLVAKSLVLSALLVWWGDIWWKTMMELRSLDTQKATCHLQQVTDLPWTSVSSPVEREILYHTVARTKISDDDDEHTLRAKRSGSGATNFSLLKQAGDVEENPGPTSMDWIWRILFLVGAATGAHSFEEVQLVQSGAEVKKPGESLKISCKGSGYSFTSYWIGWVRQMPGKGLEWMGIIYPGDSDTRYSPSFQGQVTISADKSISTAYLQWSSLKASDTAMYYCARQVWGWQGGMYPRSNWWYNLDSWGQGTLVTVSSASTKGPSVFPLAPSSKSTSGGTAALGCLVKDYFPEPVTVSWNSGALTSGVHTFPAVLQSSGLYSLSSVVTVPSSSLGTQTYICNVNHKPSNTKVDKRVEPKSCTRQSFGLLDPKLCYLLDGILFIYGVILTALFLRVKFSRSADAPAYQQGQNQLYNELNLGRREEYDVLDKRRGRDPEMGGKPQRRKNPQEGLYNELQKDKMAEAYSEIGMKGERRRGKGHDGLYQGLSTATKDTYDALHMQALPPRRAKRSGSGVKQTLNFDLLKLAGDVESNPGPSRGHMTEYKPTVRLATRDDVPRAVRTLAAAFADYPATRHTVDPDRHIERVTELQELFLTRVGLDIGKVWVADDGAAVAVWTTPESVEAGAVFAEIGPRMAELSGSRLAAQQQMEGLLAPHRPKEPAWFLATVGVSPDHQGKGLGSAVVLPGVEAAERAGVPAFLETSAPRNLPFYERLGFTVTADVEVPEGPRTWCMTRKPGA

SEQ ID NO: 4716 - protein, 847 aa, Artificial Sequence
  Synthetic Polypeptide
MALPVTALLLPLALLLHAARPACEVQLLESGGGLIQPGGSLRLSCAASGFTFSSHAMTWVRQAPGKGLEWVSAISGSGDYTHYADSVKGRFTISRDNSKNTVYLQMNSLRAEDSAVYYCAKDEDGGSLLGHRGQGTLVTVSSGTIGWLLLQAPRWVFKEEDPIHLRCHSWKNTALHKVTYLQNGKGRKYFHHNSDFYIPKATLKDSGSYFCRGLVGSKNVSSETVNITITQGLAVSTISSFFPPGYQVSFCLVMVLLFAVDTGLYFSVKTNIRSSTRDWKDHKFKWRKDPQDKRAKRSGSGATNFSLLKQAGDVEENPGPTSATMDWIWRILFLVGAATGAHSGPEVQLVESGGGLVQAGGSLRLSCAASGRTFSMGWFRQAPGKEREFVAAITYSGGSPYYADSVKGRFTISRDNAKNTVYLQMNSLKPEDTAVYYCAANPTYGSDWNAENWGQGTQVTVSSGSIGWLLLQAPRWVFKEEDPIHLRCHSWKNTALHKVTYLQNGKGRKYFHHNSDFYIPKATLKDSGSYFCRGLVGSKNVSSETVNITITQGLAVPTISSFFPPGYQVSFCLVMVLLFAVDTGLYFSVKTNIRSSTRDWKDHKFKWRKDPQDKRAKRSGSGVKQTLNFDLLKLAGDVESNPGPSRGHMTEYKPTVRLATRDDVPRAVRTLAAAFADYPATRHTVDPDRHIERVTELQELFLTRVGLDIGKVWVADDGAAVAVWTTPESVEAGAVFAEIGPRMAELSGSRLAAQQQMEGLLAPHRPKEPAWFLATVGVSPDHQGKGLGSAVVLPGVEAAERAGVPAFLETSAPRNLPFYERLGFTVTADVEVPEGPRTWCMTRKPGA

SEQ ID NO: 4717 - protein, 974 aa, Artificial Sequence
  Synthetic Polypeptide
MALPVTALLLPLALLLHAARPLPVLTQPPSVSVAPGKTARITCGGNNIGSKSVHWYQQKPGQAPVLVVYDDSDRPSGIPERFSGSNSGNTATLTISRVEAGDEADYYCQVWDSSSDYVVFGGGTKLTVLGQPKANPTVTLFPPSSEELQANKATLVCLISDFYPGAVTVAWKADGSPVKAGVETTKPSKQSNNKYAASSYLSLTPEQWKSHRSYSCQVTHEGSTVEKTVAPTECSLEVVEKEHPQLGAGTVLLLRAGFYAVSFLSVAVGSTVYYQGKCLTWKGPRRQLPAVVPAPLPPPCGSSAHLLPPVPGGRAKRSGSGATNFSLLKQAGDVEENPGPTSMDWIWRILFLVGAATGAHSFEEVQLVQSGAEVKKPGESLKISCKGSGYSFTSYWIGWVRQMPGKGLEWMGIIYPGDSDTRYSPSFQGQVTISADKSISTAYLQWSSLKASDTAMYYCARQVWGWQGGMYPRSNWWYNLDSWGQGTLVTVSSASTKGPSVFPLAPSSKSTSGGTAALGCLVKDYFPEPVTVSWNSGALTSGVHTFPAVLQSSGLYSLSSVVTVPSSSLGTQTYICNVNHKPSNTKVDKRVEPKSCTRQSFGLLDPKLCYLLDGILFIYGVILTALFLRVKFSRSADAPAYQQGQNQLYNELNLGRREEYDVLDKRRGRDPEMGGKPQRRKNPQEGLYNELQKDKMAEAYSEIGMKGERRRGKGHDGLYQGLSTATKDTYDALHMQALPPRRAKRSGSGVKQTLNFDLLKLAGDVESNPGPSRGHMTEYKPTVRLATRDDVPRAVRTLAAAFADYPATRHTVDPDRHIERVTELQELFLTRVGLDIGKVWVADDGAAVAVWTTPESVEAGAVFAEIGPRMAELSGSRLAAQQQMEGLLAPHRPKEPAWFLATVGVSPDHQGKGLGSAVVLPGVEAAERAGVPAFLETSAPRNLPFYERLGFTVTADVEVPEGPRTWCMTRKPGA

SEQ ID NO: 4718 - protein, 1054 aa, Artificial Sequence
  Synthetic Polypeptide
MALPVTALLLPLALLLHAARPLPVLTQPPSVSVAPGKTARITCGGNNIGSKSVHWYQQKPGQAPVLVVYDDSDRPSGIPERFSGSNSGNTATLTISRVEAGDEADYYCQVWDSSSDYVVFGGGTKLTVLGQPKANPTVTLFPPSSEELQANKATLVCLISDFYPGAVTVAWKADGSPVKAGVETTKPSKQSNNKYAASSYLSLTPEQWKSHRSYSCQVTHEGSTVEKTVAPTECSLEKSVRFYLVVSPASASTQTSWTPRDLVSSQTQTQSCVPPTAGARQAPESPSTIPVPSQPQNSTLRPGPAAPIALVPVFCGLLVAKSLVLSALLVWWGDIWWKTMMELRSLDTQKATCHLQQVTDLPWTSVSSPVEREILYHTVARTKISDDDDEHTLRAKRSGSGATNFSLLKQAGDVEENPGPTSMDWIWRILFLVGAATGAHSFEEVQLVQSGAEVKKPGESLKISCKGSGYSFTSYWIGWVRQMPGKGLEWMGIIYPGDSDTRYSPSFQGQVTISADKSISTAYLQWSSLKASDTAMYYCARQVWGWQGGMYPRSNWWYNLDSWGQGTLVTVSSASTKGPSVFPLAPSSKSTSGGTAALGCLVKDYFPEPVTVSWNSGALTSGVHTFPAVLQSSGLYSLSSVVTVPSSSLGTQTYICNVNHKPSNTKVDKRVEPKSCTRQSFGLLDPKLCYLLDGILFIYGVILTALFLRVKFSRSADAPAYQQGQNQLYNELNLGRREEYDVLDKRRGRDPEMGGKPQRRKNPQEGLYNELQKDKMAEAYSEIGMKGERRRGKGHDGLYQGLSTATKDTYDALHMQALPPRRAKRSGSGVKQTLNFDLLKLAGDVESNPGPSRGHMTEYKPTVRLATRDDVPRAVRTLAAAFADYPATRHTVDPDRHIERVTELQELFLTRVGLDIGKVWVADDGAAVAVWTTPESVEAGAVFAEIGPRMAELSGSRLAAQQQMEGLLAPHRPKEPAWFLATVGVSPDHQGKGLGSAVVLPGVEAAERAGVPAFLETSAPRNLPFYERLGFTVTADVEVPEGPRTWCMTRKPGA

SEQ ID NO: 4719 - protein, 1005 aa, Artificial Sequence
  Synthetic Polypeptide
MALPVTALLLPLALLLHAARPACLWVSQPPEIRTLEGSSAFLPCSFNASQGRLAIGSVTWFRDEVVPGKEVRNGTPEFRGRLAPLASSRFLHDHQAELHIRDVRGHDASIYVCRVEVLGLGVGTGNGTRLVVEKEHPQLGLEDLKNVFPPEVAVFEPSEAEISHTQKATLVCLATGFYPDHVELSWWVNGKEVHSGVCTDPQPLKEQPALNDSRYCLSSRLRVSATFWQNPRNHFRCQVQFYGLSENDEWTQDRAKPVTQIVSAEAWGRADCGFTSESYQQGVLSATILYEILLGKATLYAVLVSALVLMAMVKRKDSRGRAKRSGSGATNFSLLKQAGDVEENPGPTSATMDWIWRILFLVGAATGAHSGPEVQLVESGGGLVQAGGSLRLSCAASGRTFSMGWFRQAPGKEREFVAAITYSGGSPYYADSVKGRFTISRDNAKNTVYLQMNSLKPEDTAVYYCAANPTYGSDWNAENWGQGTQVTVSSGSGGGGSGGGGSGGGGSFEQVQLQQPGAELVKPGASVKMSCKASGYAFSSYWINWMKQKPGQGLEWIGQIYPGDGDTNYNGKFKGRATLTADTSSSTAYMQLSSLTSEDSAVYFCARSITTVVGCAMDYWGQGTSVTVSSTRIQNPDPAVYQLRDSKSSDKSVCLFTDFDSQTNVSQSKDSDVYITDKCVLDMRSMDFKSNSAVAWSNKSDFACANAFNNSIIPEDTFFPSPESSCDVKLVEKSFETDTNLNFQNLSVIGFRILLLKVAGFNLLMTLRLWSSRAKRSGSGVKQTLNFDLLKLAGDVESNPGPSRGHMTEYKPTVRLATRDDVPRAVRTLAAAFADYPATRHTVDPDRHIERVTELQELFLTRVGLDIGKVWVADDGAAVAVWTTPESVEAGAVFAEIGPRMAELSGSRLAAQQQMEGLLAPHRPKEPAWFLATVGVSPDHQGKGLGSAVVLPGVEAAERAGVPAFLETSAPRNLPFYERLGFTVTADVEVPEGPRTWCMTRKPGA

SEQ ID NO: 4720 - protein, 1255 aa, Artificial Sequence
  Synthetic Polypeptide
MALPVTALLLPLALLLHAARPLPVLTQPPSVSVAPGKTARITCGGNNIGSKSVHWYQQKPGQAPVLVVYDDSDRPSGIPERFSGSNSGNTATLTISRVEAGDEADYYCQVWDSSSDYVVFGGGTKLTVLGQPKANPTVTLFPPSSEELQANKATLVCLISDFYPGAVTVAWKADGSPVKAGVETTKPSKQSNNKYAASSYLSLTPEQWKSHRSYSCQVTHEGSTVEKTVAPTECSGSAKPTTTPAPRPPTPAPTIASQPLSLRPEACRPAAGGAVHTRGLDFACDSNLFVASWIAVMIIFRIGMAVAIFCCFFFPSWRRKRKEKQSETSPKEFLTIYEDVKDLKTRRNHEQEQTFPGGGSTIYSMIQSQSSAPTSQEPAYTLYSLIQPSRKSGSRKRNHSPSFNSTIYEVIGKSQPKAQNPARLSRKELENFDVYSTSRVKFSRSADAPAYQQGQNQLYNELNLGRREEYDVLDKRRGRDPEMGGKPQRRKNPQEGLYNELQKDKMAEAYSEIGMKGERRRGKGHDGLYQGLSTATKDTYDALHMQALPPRRAKRSGSGATNFSLLKQAGDVEENPGPMDWIWRILFLVGAATGAHSFEEVQLVQSGAEVKKPGESLKISCKGSGYSFTSYWIGWVRQMPGKGLEWMGIIYPGDSDTRYSPSFQGQVTISADKSISTAYLQWSSLKASDTAMYYCARQVWGWQGGMYPRSNWWYNLDSWGQGTLVTVSSASTKGPSVFPLAPSSKSTSGGTAALGCLVKDYFPEPVTVSWNSGALTSGVHTFPAVLQSSGLYSLSSVVTVPSSSLGTQTYICNVNHKPSNTKVDKRVEPKSCGTTTPGERSSLPAFYPGTSGSCSGCGSLSLPLLAGLVAADAVASLLIVGAVFLCARPRRSPAQEDGKVYINMPGRGSSRRVKFSRSADAPAYQQGQNQLYNELNLGRREEYDVLDKRRGRDPEMGGKPQRRKNPQEGLYNELQKDKMAEAYSEIGMKGERRRGKGHDGLYQGLSTATKDTYDALHMQALPPRRAKRSGSGVKQTLNFDLLKLAGDVESNPGPGHMTEYKPTVRLATRDDVPRAVRTLAAAFADYPATRHTVDPDRHIERVTELQELFLTRVGLDIGKVWVADDGAAVAVWTTPESVEAGAVFAEIGPRMAELSGSRLAAQQQMEGLLAPHRPKEPAWFLATVGVSPDHQGKGLGSAVVLPGVEAAERAGVPAFLETSAPRNLPFYERLGFTVTADVEVPEGPRTWCMTRKPGA

SEQ ID NO: 4721 - protein, 885 aa, Artificial Sequence
  Synthetic Polypeptide
MALPVTALLLPLALLLHAARPDIQMTQSPSSLSASVGDRVTITCKASDHINNWLAWYQQKPGQAPKLLIYGATTLETGVPSRFSGSGSGTDYTLTISSLQPEDFATYYCQQSWNTPWTFGQGTKLEIKRLEQSKAQVLQSVAGQTLTVRCQYPPTGSLYEKKGWCKEASALVCIRLVTSSKPRTMAWTSRFTIWDDPDAGFFTVTMTDLREEDSGHYWCRIYRPSDNSVSKSVRFYLVVSPASASTQTSWTPRDLVSSQTQTQSCVPPTAGARQAPESPSTIPVPSQPQNSTLRPGPAAPIALVPVFCGLLVAKSLVLSALLVWWGDIWWKTMMELRSLDTQKATCHLQQVTDLPWTSVSSPVEREILYHTVARTKISDDDDEHTLRAKRSGSGATNFSLLKQAGDVEENPGPTSMDWIWRILFLVGAATGAHSFEQVQLQQPGAELVKPGASVKMSCKASGYAFSSYWINWMKQKPGQGLEWIGQIYPGDGDTNYNGKFKGRATLTADTSSSTAYMQLSSLTSEDSAVYFCARSITTVVGCAMDYWGQGTSVTVSSTRGDIENTSLAPEDPTFPADTWGTYLLTTETGLQKDHALWDHTAQNLLRMGLAFLVLVALVWFLVEDWLSRKRTRERASRASTWEGRRRLNTQTLRAKRSGSGVKQTLNFDLLKLAGDVESNPGPSRGHMTEYKPTVRLATRDDVPRAVRTLAAAFADYPATRHTVDPDRHIERVTELQELFLTRVGLDIGKVWVADDGAAVAVWTTPESVEAGAVFAEIGPRMAELSGSRLAAQQQMEGLLAPHRPKEPAWFLATVGVSPDHQGKGLGSAVVLPGVEAAERAGVPAFLETSAPRNLPFYERLGFTVTADVEVPEGPRTWCMTRKPGA

SEQ ID NO: 4722 - protein, 1081 aa, Artificial Sequence
  Synthetic Polypeptide
MALPVTALLLPLALLLHAARPLPVLTQPPSVSVAPGKTARITCGGNNIGSKSVHWYQQKPGQAPVLVVYDDSDRPSGIPERFSGSNSGNTATLTISRVEAGDEADYYCQVWDSSSDYVVFGGGTKLTVLGQPKANPTVTLFPPSSEELQANKATLVCLISDFYPGAVTVAWKADGSPVKAGVETTKPSKQSNNKYAASSYLSLTPEQWKSHRSYSCQVTHEGSTVEKTVAPTECSLELWVSQPPEIRTLEGSSAFLPCSFNASQGRLAIGSVTWFRDEVVPGKEVRNGTPEFRGRLAPLASSRFLHDHQAELHIRDVRGHDASIYVCRVEVLGLGVGTGNGTRLVVEKEHPQLGAGTVLLLRAGFYAVSFLSVAVGSTVYYQGKCLTWKGPRRQLPAVVPAPLPPPCGSSAHLLPPVPGGRAKRSGSGATNFSLLKQAGDVEENPGPTSMDWIWRILFLVGAATGAHSFEEVQLVQSGAEVKKPGESLKISCKGSGYSFTSYWIGWVRQMPGKGLEWMGIIYPGDSDTRYSPSFQGQVTISADKSISTAYLQWSSLKASDTAMYYCARQVWGWQGGMYPRSNWWYNLDSWGQGTLVTVSSASTKGPSVFPLAPSSKSTSGGTAALGCLVKDYFPEPVTVSWNSGALTSGVHTFPAVLQSSGLYSLSSVVTVPSSSLGTQTYICNVNHKPSNTKVDKRVEPKSCTRQSFGLLDPKLCYLLDGILFIYGVILTALFLRVKFSRSADAPAYQQGQNQLYNELNLGRREEYDVLDKRRGRDPEMGGKPQRRKNPQEGLYNELQKDKMAEAYSEIGMKGERRRGKGHDGLYQGLSTATKDTYDALHMQALPPRRAKRSGSGVKQTLNFDLLKLAGDVESNPGPSRGHMTEYKPTVRLATRDDVPRAVRTLAAAFADYPATRHTVDPDRHIERVTELQELFLTRVGLDIGKVWVADDGAAVAVWTTPESVEAGAVFAEIGPRMAELSGSRLAAQQQMEGLLAPHRPKEPAWFLATVGVSPDHQGKGLGSAVVLPGVEAAERAGVPAFLETSAPRNLPFYERLGFTVTADVEVPEGPRTWCMTRKPGA

SEQ ID NO: 4723 - protein, 468 aa, Artificial Sequence
  Synthetic Polypeptide
MALPVTALLLPLALLLHAARPEVQLVESGGGLVQAGGSLRLSCAASGRTFSMGWFRQAPGKEREFVAAITYSGGSPYYADSVKGRFTISRDNAKNTVYLQMNSLKPEDTAVYYCAANPTYGSDWNAENWGQGTQVTVSSTRQVVDTTKAVITLQPPWVSVFQEETVTLHCEVLHLPGSSSTQWFLNGTATQTSTPSYRITSASVNDSGEYRCQRGLSGRSDPIQLEIHRGWLLLQVSSRVFTEGEPLALRCHAWKDKLVYNVLYYRNGKAFKFFHWNSNLTILKTNISHNGTYHCSGMGKHRYTSAGISVTVKELFPAPVLNASVTSPLLEGNLVTLSCETKLLLQRPGLQLYFSFYMGSKTLRGRNTSSEYQILTARREDSGLYWCEAATEDGNVLKRSPELELQVLGLQLPTPVWFHVYQVSFCLVMVLLFAVDTGLYFSVKTNIRSSTRDWKDHKFKWRKDPQDK

SEQ ID NO: 4724 - protein, 17 aa, Artificial Sequence
  Synthetic Polypeptide
GGGGGGGGGGGGGGGGG

SEQ ID NO: 4725 - protein, 17 aa, Artificial Sequence
  Synthetic Polypeptide
GGGGGGGGGGGGGGGGG

SEQ ID NO: 4726 - protein, 17 aa, Artificial Sequence
  Synthetic Polypeptide
GGGGGGGGGGGGGGGGG

SEQ ID NO: 4727 - protein, 17 aa, Artificial Sequence
  Synthetic Polypeptide
GGGGGGGGGGGGGGGGG

SEQ ID NO: 4728 - protein, 17 aa, Artificial Sequence
  Synthetic Polypeptide
GGGGGGGGGGGGGGGGG

SEQ ID NO: 4729 - protein, 17 aa, Artificial Sequence
  Synthetic Polypeptide
GGGGGGGGGGGGGGGGG

SEQ ID NO: 4730 - protein, 17 aa, Artificial Sequence
  Synthetic Polypeptide
GGGGGGGGGGGGGGGGG

SEQ ID NO: 4731 - protein, 17 aa, Artificial Sequence
  Synthetic Polypeptide
GGGGGGGGGGGGGGGGG

SEQ ID NO: 4732 - protein, 17 aa, Artificial Sequence
  Synthetic Polypeptide
GGGGGGGGGGGGGGGGG

SEQ ID NO: 4733 - protein, 17 aa, Artificial Sequence
  Synthetic Polypeptide
GGGGGGGGGGGGGGGGG

SEQ ID NO: 4734 - protein, 17 aa, Artificial Sequence
  Synthetic Polypeptide
GGGGGGGGGGGGGGGGG

SEQ ID NO: 4735 - protein, 17 aa, Artificial Sequence
  Synthetic Polypeptide
GGGGGGGGGGGGGGGGG

SEQ ID NO: 4736 - protein, 17 aa, Artificial Sequence
  Synthetic Polypeptide
GGGGGGGGGGGGGGGGG

SEQ ID NO: 4737 - protein, 17 aa, Artificial Sequence
  Synthetic Polypeptide
GGGGGGGGGGGGGGGGG

SEQ ID NO: 4738 - protein, 17 aa, Artificial Sequence
  Synthetic Polypeptide
GGGGGGGGGGGGGGGGG

SEQ ID NO: 4739 - protein, 17 aa, Artificial Sequence
  Synthetic Polypeptide
GGGGGGGGGGGGGGGGG

SEQ ID NO: 4740 - protein, 17 aa, Artificial Sequence
  Synthetic Polypeptide
GGGGGGGGGGGGGGGGG

SEQ ID NO: 4741 - protein, 17 aa, Artificial Sequence
  Synthetic Polypeptide
GGGGGGGGGGGGGGGGG

SEQ ID NO: 4742 - protein, 17 aa, Artificial Sequence
  Synthetic Polypeptide
GGGGGGGGGGGGGGGGG

SEQ ID NO: 4743 - protein, 17 aa, Artificial Sequence
  Synthetic Polypeptide
GGGGGGGGGGGGGGGGG

SEQ ID NO: 4744 - protein, 17 aa, Artificial Sequence
  Synthetic Polypeptide
GGGGGGGGGGGGGGGGG

SEQ ID NO: 4745 - protein, 17 aa, Artificial Sequence
  Synthetic Polypeptide
GGGGGGGGGGGGGGGGG

SEQ ID NO: 4746 - protein, 17 aa, Artificial Sequence
  Synthetic Polypeptide
GGGGGGGGGGGGGGGGG

SEQ ID NO: 4747 - protein, 17 aa, Artificial Sequence
  Synthetic Polypeptide
GGGGGGGGGGGGGGGGG

SEQ ID NO: 4748 - protein, 17 aa, Artificial Sequence
  Synthetic Polypeptide
GGGGGGGGGGGGGGGGG

SEQ ID NO: 4749 - protein, 17 aa, Artificial Sequence
  Synthetic Polypeptide
GGGGGGGGGGGGGGGGG

SEQ ID NO: 4750 - protein, 17 aa, Artificial Sequence
  Synthetic Polypeptide
GGGGGGGGGGGGGGGGG

SEQ ID NO: 4751 - protein, 17 aa, Artificial Sequence
  Synthetic Polypeptide
GGGGGGGGGGGGGGGGG

SEQ ID NO: 4752 - protein, 17 aa, Artificial Sequence
  Synthetic Polypeptide
GGGGGGGGGGGGGGGGG

SEQ ID NO: 4753 - protein, 17 aa, Artificial Sequence
  Synthetic Polypeptide
GGGGGGGGGGGGGGGGG

SEQ ID NO: 4754 - protein, 17 aa, Artificial Sequence
  Synthetic Polypeptide
GGGGGGGGGGGGGGGGG

SEQ ID NO: 4755 - protein, 17 aa, Artificial Sequence
  Synthetic Polypeptide
GGGGGGGGGGGGGGGGG

SEQ ID NO: 4756 - protein, 17 aa, Artificial Sequence
  Synthetic Polypeptide
GGGGGGGGGGGGGGGGG

SEQ ID NO: 4757 - protein, 17 aa, Artificial Sequence
  Synthetic Polypeptide
GGGGGGGGGGGGGGGGG

SEQ ID NO: 4758 - protein, 17 aa, Artificial Sequence
  Synthetic Polypeptide
GGGGGGGGGGGGGGGGG

SEQ ID NO: 4759 - protein, 17 aa, Artificial Sequence
  Synthetic Polypeptide
GGGGGGGGGGGGGGGGG

SEQ ID NO: 4760 - protein, 17 aa, Artificial Sequence
  Synthetic Polypeptide
GGGGGGGGGGGGGGGGG

SEQ ID NO: 4761 - protein, 17 aa, Artificial Sequence
  Synthetic Polypeptide
GGGGGGGGGGGGGGGGG

SEQ ID NO: 4762 - protein, 17 aa, Artificial Sequence
  Synthetic Polypeptide
GGGGGGGGGGGGGGGGG

SEQ ID NO: 4763 - protein, 17 aa, Artificial Sequence
  Synthetic Polypeptide
GGGGGGGGGGGGGGGGG

SEQ ID NO: 4764 - protein, 17 aa, Artificial Sequence
  Synthetic Polypeptide
GGGGGGGGGGGGGGGGG

SEQ ID NO: 4765 - protein, 17 aa, Artificial Sequence
  Synthetic Polypeptide
GGGGGGGGGGGGGGGGG

SEQ ID NO: 4766 - protein, 17 aa, Artificial Sequence
  Synthetic Polypeptide
GGGGGGGGGGGGGGGGG

SEQ ID NO: 4767 - protein, 17 aa, Artificial Sequence
  Synthetic Polypeptide
GGGGGGGGGGGGGGGGG

SEQ ID NO: 4768 - protein, 17 aa, Artificial Sequence
  Synthetic Polypeptide
GGGGGGGGGGGGGGGGG

SEQ ID NO: 4769 - protein, 17 aa, Artificial Sequence
  Synthetic Polypeptide
GGGGGGGGGGGGGGGGG

SEQ ID NO: 4770 - protein, 17 aa, Artificial Sequence
  Synthetic Polypeptide
GGGGGGGGGGGGGGGGG

SEQ ID NO: 4771 - protein, 17 aa, Artificial Sequence
  Synthetic Polypeptide
GGGGGGGGGGGGGGGGG

SEQ ID NO: 4772 - protein, 17 aa, Artificial Sequence
  Synthetic Polypeptide
GGGGGGGGGGGGGGGGG

SEQ ID NO: 4773 - protein, 17 aa, Artificial Sequence
  Synthetic Polypeptide
GGGGGGGGGGGGGGGGG

SEQ ID NO: 4774 - protein, 17 aa, Artificial Sequence
  Synthetic Polypeptide
GGGGGGGGGGGGGGGGG

SEQ ID NO: 4775 - protein, 17 aa, Artificial Sequence
  Synthetic Polypeptide
GGGGGGGGGGGGGGGGG

SEQ ID NO: 4776 - protein, 17 aa, Artificial Sequence
  Synthetic Polypeptide
GGGGGGGGGGGGGGGGG

SEQ ID NO: 4777 - protein, 17 aa, Artificial Sequence
  Synthetic Polypeptide
GGGGGGGGGGGGGGGGG

SEQ ID NO: 4778 - protein, 17 aa, Artificial Sequence
  Synthetic Polypeptide
GGGGGGGGGGGGGGGGG

SEQ ID NO: 4779 - protein, 17 aa, Artificial Sequence
  Synthetic Polypeptide
GGGGGGGGGGGGGGGGG

SEQ ID NO: 4780 - protein, 17 aa, Artificial Sequence
  Synthetic Polypeptide
GGGGGGGGGGGGGGGGG

SEQ ID NO: 4781 - protein, 17 aa, Artificial Sequence
  Synthetic Polypeptide
GGGGGGGGGGGGGGGGG

SEQ ID NO: 4782 - protein, 17 aa, Artificial Sequence
  Synthetic Polypeptide
GGGGGGGGGGGGGGGGG

SEQ ID NO: 4783 - protein, 17 aa, Artificial Sequence
  Synthetic Polypeptide
GGGGGGGGGGGGGGGGG

SEQ ID NO: 4784 - protein, 17 aa, Artificial Sequence
  Synthetic Polypeptide
GGGGGGGGGGGGGGGGG

SEQ ID NO: 4785 - protein, 17 aa, Artificial Sequence
  Synthetic Polypeptide
GGGGGGGGGGGGGGGGG

SEQ ID NO: 4786 - protein, 17 aa, Artificial Sequence
  Synthetic Polypeptide
GGGGGGGGGGGGGGGGG

SEQ ID NO: 4787 - protein, 17 aa, Artificial Sequence
  Synthetic Polypeptide
GGGGGGGGGGGGGGGGG

SEQ ID NO: 4788 - protein, 17 aa, Artificial Sequence
  Synthetic Polypeptide
GGGGGGGGGGGGGGGGG

SEQ ID NO: 4789 - protein, 17 aa, Artificial Sequence
  Synthetic Polypeptide
GGGGGGGGGGGGGGGGG

SEQ ID NO: 4790 - protein, 17 aa, Artificial Sequence
  Synthetic Polypeptide
GGGGGGGGGGGGGGGGG

SEQ ID NO: 4791 - protein, 17 aa, Artificial Sequence
  Synthetic Polypeptide
GGGGGGGGGGGGGGGGG

SEQ ID NO: 4792 - protein, 17 aa, Artificial Sequence
  Synthetic Polypeptide
GGGGGGGGGGGGGGGGG

SEQ ID NO: 4793 - protein, 17 aa, Artificial Sequence
  Synthetic Polypeptide
GGGGGGGGGGGGGGGGG

SEQ ID NO: 4794 - protein, 17 aa, Artificial Sequence
  Synthetic Polypeptide
GGGGGGGGGGGGGGGGG

SEQ ID NO: 4795 - protein, 17 aa, Artificial Sequence
  Synthetic Polypeptide
GGGGGGGGGGGGGGGGG

SEQ ID NO: 4796 - protein, 17 aa, Artificial Sequence
  Synthetic Polypeptide
GGGGGGGGGGGGGGGGG

SEQ ID NO: 4797 - protein, 17 aa, Artificial Sequence
  Synthetic Polypeptide
GGGGGGGGGGGGGGGGG

SEQ ID NO: 4798 - protein, 17 aa, Artificial Sequence
  Synthetic Polypeptide
GGGGGGGGGGGGGGGGG

SEQ ID NO: 4799 - protein, 17 aa, Artificial Sequence
  Synthetic Polypeptide
GGGGGGGGGGGGGGGGG

SEQ ID NO: 4800 - protein, 17 aa, Artificial Sequence
  Synthetic Polypeptide
GGGGGGGGGGGGGGGGG

SEQ ID NO: 4801 - protein, 17 aa, Artificial Sequence
  Synthetic Polypeptide
GGGGGGGGGGGGGGGGG

SEQ ID NO: 4802 - protein, 17 aa, Artificial Sequence
  Synthetic Polypeptide
GGGGGGGGGGGGGGGGG

SEQ ID NO: 4803 - protein, 17 aa, Artificial Sequence
  Synthetic Polypeptide
GGGGGGGGGGGGGGGGG

SEQ ID NO: 4804 - protein, 17 aa, Artificial Sequence
  Synthetic Polypeptide
GGGGGGGGGGGGGGGGG

SEQ ID NO: 4805 - protein, 17 aa, Artificial Sequence
  Synthetic Polypeptide
GGGGGGGGGGGGGGGGG

SEQ ID NO: 4806 - protein, 17 aa, Artificial Sequence
  Synthetic Polypeptide
GGGGGGGGGGGGGGGGG

SEQ ID NO: 4807 - protein, 17 aa, Artificial Sequence
  Synthetic Polypeptide
GGGGGGGGGGGGGGGGG

SEQ ID NO: 4808 - protein, 17 aa, Artificial Sequence
  Synthetic Polypeptide
GGGGGGGGGGGGGGGGG

SEQ ID NO: 4809 - protein, 17 aa, Artificial Sequence
  Synthetic Polypeptide
GGGGGGGGGGGGGGGGG

SEQ ID NO: 4810 - protein, 17 aa, Artificial Sequence
  Synthetic Polypeptide
GGGGGGGGGGGGGGGGG

SEQ ID NO: 4811 - protein, 17 aa, Artificial Sequence
  Synthetic Polypeptide
GGGGGGGGGGGGGGGGG

SEQ ID NO: 4812 - protein, 17 aa, Artificial Sequence
  Synthetic Polypeptide
GGGGGGGGGGGGGGGGG

SEQ ID NO: 4813 - protein, 17 aa, Artificial Sequence
  Synthetic Polypeptide
GGGGGGGGGGGGGGGGG

SEQ ID NO: 4814 - protein, 17 aa, Artificial Sequence
  Synthetic Polypeptide
GGGGGGGGGGGGGGGGG

SEQ ID NO: 4815 - protein, 17 aa, Artificial Sequence
  Synthetic Polypeptide
GGGGGGGGGGGGGGGGG

SEQ ID NO: 4816 - protein, 17 aa, Artificial Sequence
  Synthetic Polypeptide
GGGGGGGGGGGGGGGGG

SEQ ID NO: 4817 - protein, 17 aa, Artificial Sequence
  Synthetic Polypeptide
GGGGGGGGGGGGGGGGG

SEQ ID NO: 4818 - protein, 17 aa, Artificial Sequence
  Synthetic Polypeptide
GGGGGGGGGGGGGGGGG

SEQ ID NO: 4819 - protein, 30 aa, Artificial Sequence
  Synthetic Polypeptide
EVQLVESGGGLVQPGGSLRLSCAASGFNIK

SEQ ID NO: 4820 - protein, 14 aa, Artificial Sequence
  Synthetic Polypeptide
WVRRAPGKGTELVA

SEQ ID NO: 4821 - protein, 32 aa, Artificial Sequence
  Synthetic Polypeptide
RFTISCDTSKNTAYLQMNSLRAEDTAVYYCAS

SEQ ID NO: 4822 - protein, 11 aa, Artificial Sequence
  Synthetic Polypeptide
WGQGTTVTVSS

SEQ ID NO: 4823 - protein, 30 aa, Artificial Sequence
  Synthetic Polypeptide
EVQLVESGGGLVQPGGSLRLSCAASSFNIK

SEQ ID NO: 4824 - protein, 14 aa, Artificial Sequence
  Synthetic Polypeptide
WVRRAPGKGTELVA

SEQ ID NO: 4825 - protein, 32 aa, Artificial Sequence; identical to SEQ ID NO: 4821
  Synthetic Polypeptide

SEQ ID NO: 4826 - protein, 11 aa, Artificial Sequence
  Synthetic Polypeptide
WGQGTTVTVSS

SEQ ID NO: 4827 - protein, 25 aa, Artificial Sequence
  Synthetic Polypeptide
QVQLVESGGGLVQPGGSLRLSCAAS

SEQ ID NO: 4828 - protein, 15 aa, Artificial Sequence
  Synthetic Polypeptide
WVRQAPGKGLELVSS

SEQ ID NO: 4829 - protein, 37 aa, Artificial Sequence
  Synthetic Polypeptide
YYADSVKGRFTISRDISKNTLDLQMNSLRAEDTAVYY

SEQ ID NO: 4830 - protein, 11 aa, Artificial Sequence
  Synthetic Polypeptide
RGQGTLVTVSS

SEQ ID NO: 4831 - protein, 25 aa, Artificial Sequence
  Synthetic Polypeptide
EVQLLESGGGLVQPGGSLRLSCAAS

SEQ ID NO: 4832 - protein, 17 aa, Artificial Sequence
  Synthetic Polypeptide
MSWVRQAPGKGLEWVSS

SEQ ID NO: 4833 - protein, 37 aa, Artificial Sequence
  Synthetic Polypeptide
YYADSVKGRFTISRDISKNTLYLQMNSLRAEDTAVYY

SEQ ID NO: 4834 - protein, 11 aa, Artificial Sequence
  Synthetic Polypeptide
RGQGTLVTVSS

SEQ ID NO: 4835 - protein, 25 aa, Artificial Sequence
  Synthetic Polypeptide
EVQLLESGGGLIQPGGSLRLSCAAS

SEQ ID NO: 4836 - protein, 17 aa, Artificial Sequence
  Synthetic Polypeptide
MTWVRQAPGKGLEWVSA

SEQ ID NO: 4837 - protein, 37 aa, Artificial Sequence
  Synthetic Polypeptide
HYADSVKGRFTISRDNSKNTVYLQMNSLRAEDSAVYY

SEQ ID NO: 4838 - protein, 11 aa, Artificial Sequence
  Synthetic Polypeptide
RGQGTLVTVSS

SEQ ID NO: 4839 - protein, 25 aa, Artificial Sequence
  Synthetic Polypeptide
EVQVLESGGGLVQPGGSLRLSCEAS

SEQ ID NO: 4840 - protein, 17 aa, Artificial Sequence
  Synthetic Polypeptide
MSWVRQAPGKGLEWVST

SEQ ID NO: 4841 - protein, 37 aa, Artificial Sequence
  Synthetic Polypeptide
DYADSVKGRFTISRDNSKKTLYLQMNSLRVEDTAVYY

SEQ ID NO: 4842 - protein, 11 aa, Artificial Sequence
  Synthetic Polypeptide
RGQGTLVTVSS

SEQ ID NO: 4843 - protein, 25 aa, Artificial Sequence [sequence omitted]

SEQ ID NO: 4844 - protein, 17 aa, Artificial Sequence
  Synthetic Polypeptide
MSWVRQAPGKGLEWVAT

SEQ ID NO: 4845 - protein, 37 aa, Artificial Sequence
  Synthetic Polypeptide
DYVDSVKGRFTISRDNAKKSLYLQMNSLRAEDTAVYY

SEQ ID NO: 4846 - protein, 11 aa, Artificial Sequence
  Synthetic Polypeptide
RGQGTLVTVSS

SEQ ID NO: 4847 - protein, 25 aa, Artificial Sequence
  Synthetic Polypeptide
EVQLLESGGGLVQPGGSLRLSCAAS

SEQ ID NO: 4848 - protein, 17 aa, Artificial Sequence
  Synthetic Polypeptide
LSWVRQAPGKGLEWVSS

SEQ ID NO: 4849 - protein, 37 aa, Artificial Sequence
  Synthetic Polypeptide
DYADAVKGRFTISRDNSKNTLYLQMNSLRVEDTAVYY

SEQ ID NO: 4850 - protein, 11 aa, Artificial Sequence
  Synthetic Polypeptide
WGQGTLVTVSS

SEQ ID NO: 4851 - DNA, 1536 bp, Artificial Sequence
  Synthetic Polynucleotide
atggccttaccagtgaccgccttgctcctgccgctggccttgctgctccacgccgccaggccggacgtgcagatgatccagacccccgatagcctggccgtgtccctgggacagagagccaccatctcttgcagagccagcgagagcgtggacaactacggcatcagcttcatgcactggtatcagcagaagcccggccagagccccaagctgctgatctacagagcctccaacctggaaagcggcatccccgccagattttccggcagcggcagcagaaccgacttcaccctgaccatcaaccccgtggaaaccgacgacgtggcaacctactactgccagcagaacaacaaggacccccccacctttggcggaggcaccaagctggaaatcaagggcggaggcggaagtggaggcggaggatctggcggcggaggctctgggggaggcggctctcaggtgcaactccagcagtctggcgctgagcttgtgaagcctggggccagcgtgaagattagctgcaaggccagcggctacgccttcagcagctactggatgaactgggtcaagcagcggcctggcaagggcctggaatggatcggccaaatctaccccggcgacggcgacaccacctacaacggcaagttcaagggcaaggccaccctgacagccgacaagagcagcagcaccgtgtacatgcaactgaacagcctgaccagcgaggacagcgccgtgtacttctgcgtgcggtactactacggcagctccggctacttcgactattggggccagggcaccacactgaccgtgtcctctacgcgtggaatgaggactgaggatcttcccaaagctgtcgtctttctcgaaccccaatggtatcgggtgctcgaaaaagactctgtgacactgaaatgccaaggggcctactctcccgaggacaactccacacagtggtttcataatgagtccctcatcagctctcaggccagctcttatttcattgatgccgctacagtggacgactccggcgagtatcggtgtcagaccaatctgtctacactgtctgaccccgtgcagcttgaggtccacattggatggttgctcttgcaagccccacgctgggttttcaaagaggaagatccaatccatctgcggtgccacagctggaaaaacaccgctctccacaaagtcacatacctgcaaaatggcaaaggacgcaaatacttccatcacaattccgatttttacattccgaaggctaccctgaaagacagcggcagctatttctgccggggactcgtcggctccaagaatgtgtcctccgaaaccgtgaatatcacgattacccaaggactggctgtgcctacaatctctagcttctttccgcctggataccaagtctccttctgtcttgtgatggtcctcctgtttgctgtggacacaggactgtacttttccgtgaaaacgaacatccgcagctccacacgcgattggaaagatcacaagtttaaatggcgcaaagatccccaggacaag

SEQ ID NO: 4852 - DNA, 1509 bp, Artificial Sequence
  Synthetic Polynucleotide
atggccttaccagtgaccgccttgctcctgccgctggccttgctgctccacgccgccaggccggacgtgcagatgatccagacccccagcagcctgtctgccagcctgggcgatagagtgaccatcagctgtcgggccagccaggacatcggcaactacctgaactggtatcagcagaaacccgacggcaccgtgaagctgctgatctactacaccagcagactgcacagcggcgtgcccagcagattttctggcagcggctctggcaccgagtacagcctgaccatctccaacctggaacaggaagatattgctacctacttctgtcagcaaggcagcgccctgccccctacatttggcggcggaacaaagctggaaatcaacggcggaggcggaagtggaggcggaggatctggcggcggaggctctgctctccagctccagcagtctggcgcagaactcgtgcggcctggcgcttctgtgaccctgagctgtaaagccagcggctacaccttcaccgactacgagatgcactgggtcaagcagacccctgtgcacggcctggaatggatcggagccatcgaccctgagacaggcggcaccgcctacaaccagaagttcgagggcaaggccatcctgaccgccgacaagagcagcagcacagcctacatggaactgcggagcctgacctccgaggacagccccgtgtactactgtgccagacggcggtactacggcagcagctccttcgactattggggccagggcaccaccctgaccgtgtctagtacgcgtggaatgaggactgaggatcttcccaaagctgtcgtctttctcgaaccccaatggtatcgggtgctcgaaaaagactctgtgacactgaaatgccaaggggcctactctcccgaggacaactccacacagtggtttcataatgagtccctcatcagctctcaggccagctcttatttcattgatgccgctacagtggacgactccggcgagtatcggtgtcagaccaatctgtctacactgtctgaccccgtgcagcttgaggtccacattggatggttgctcttgcaagccccacgctgggttttcaaagaggaagatccaatccatctgcggtgccacagctggaaaaacaccgctctccacaaagtcacatacctgcaaaatggcaaaggacgcaaatacttccatcacaattccgatttttacattccgaaggctaccctgaaagacagcggcagctatttctgccggggactcgtcggctccaagaatgtgtcctccgaaaccgtgaatatcacgattacccaaggactggctgtgcctacaatctctagcttctttccgcctggataccaagtctccttctgtcttgtgatggtcctcctgtttgctgtggacacaggactgtacttttccgtgaaaacgaacatccgcagctccacacgcgattggaaagatcacaagtttaaatggcgcaaagatccccaggacaag

SEQ ID NO: 4853 - DNA, 1515 bp, Artificial Sequence
  Synthetic Polynucleotide
atggccttaccagtgaccgccttgctcctgccgctggccttgctgctccacgccgccaggccggacatcgtgctgacacagagccctgccaccctgtctctgagccctggcgatagagccaccatcagctgtagagccagcgagagcgtgaccatcctgggcagccacctgatctactggtatcagcagaagcccggccagccccccagactgctgattcagctggcctccaatgtgcagaccggcgtgccagccagattttccggcagcggcagcagaaccgacttcaccctgaccatcagcagcgtggaacccgaggacttcgccgtgtactactgcctccagagccggaccatccccagaacattcggccagggcaccaagctggaaatcaagagaggcggaggcggaagtggaggcggaggatctggcggcggaggctctcaggtgcagctggtgcagtctggccccgaagtgaagaaacccggcgagtccgtgaagatcagctgcaaggccagcggctacaccttccggcactacagcatgaactgggtcaagcaggccccaggccagggcctgaagtggatgggcagaatcaacaccgagagcggcgtgcccatctacgccgacgacttcaagggccggttcagcttcaccgtggacaccagcgccagcaccgcctacctggaaatctccagcctgaccagcgaggataccgccgtgtatttctgctccaacgactacctgtacagcctggatttctggggccagggaaccaccctgacagtgtcctctacgcgtggaatgaggactgaggatcttcccaaagctgtcgtctttctcgaaccccaatggtatcgggtgctcgaaaaagactctgtgacactgaaatgccaaggggcctactctcccgaggacaactccacacagtggtttcataatgagtccctcatcagctctcaggccagctcttatttcattgatgccgctacagtggacgactccggcgagtatcggtgtcagaccaatctgtctacactgtctgaccccgtgcagcttgaggtccacattggatggttgctcttgcaagccccacgctgggttttcaaagaggaagatccaatccatctgcggtgccacagctggaaaaacaccgctctccacaaagtcacatacctgcaaaatggcaaaggacgcaaatacttccatcacaattccgatttttacattccgaaggctaccctgaaagacagcggcagctatttctgccggggactcgtcggctccaagaatgtgtcctccgaaaccgtgaatatcacgattacccaaggactggctgtgcctacaatctctagcttctttccgcctggataccaagtctccttctgtcttgtgatggtcctcctgtttgctgtggacacaggactgtacttttccgtgaaaacgaacatccgcagctccacacgcgattggaaagatcacaagtttaaatggcgcaaagatccccaggacaag

SEQ ID NO: 4854 - DNA, 1515 bp, Artificial Sequence
  Synthetic Polynucleotide
atggccttaccagtgaccgccttgctcctgccgctggccttgctgctccacgccgccaggccggacatccagatgacccagagccctagctcactgagcgccagcgtgggcgacagggtgaccattacctgctccgccagccaggacatcagcaactacctgaactggtaccagcagaagcccggcaaggcccccaagctgctgatctactacacctccaacctgcactccggcgtgcccagcaggttcagcggaagcggcagcggcaccgatttcaccctgaccatctccagcctgcagcccgaggacttcgccacctactactgccagcagtacaggaagctcccctggactttcggccagggcaccaaactggagatcaagcgtggcggaggcggaagtggaggcggaggatctggcggcggaggctctcaggtgcagctggtccagagcggcgccgaagtgaagaagcccggcagctccgtgaaagtgagctgcaaggccagcggcggcaccttcagcaactactggatgcactgggtgaggcaggcccccggacagggcctggagtggatgggcgccacctacaggggccacagcgacacctactacaaccagaagttcaagggccgggtgaccatcaccgccgacaagagcaccagcaccgcctacatggaactgagcagcctcaggagcgaggacaccgctgtgtattactgcgccaggggcgccatctacgacggctacgacgtgctggacaactggggccagggcacactggtgaccgtgtccagcacgcgtggaatgaggactgaggatcttcccaaagctgtcgtctttctcgaaccccaatggtatcgggtgctcgaaaaagactctgtgacactgaaatgccaaggggcctactctcccgaggacaactccacacagtggtttcataatgagtccctcatcagctctcaggccagctcttatttcattgatgccgctacagtggacgactccggcgagtatcggtgtcagaccaatctgtctacactgtctgaccccgtgcagcttgaggtccacattggatggttgctcttgcaagccccacgctgggttttcaaagaggaagatccaatccatctgcggtgccacagctggaaaaacaccgctctccacaaagtcacatacctgcaaaatggcaaaggacgcaaatacttccatcacaattccgatttttacattccgaaggctaccctgaaagacagcggcagctatttctgccggggactcgtcggctccaagaatgtgtcctccgaaaccgtgaatatcacgattacccaaggactggctgtgcctacaatctctagcttctttccgcctggataccaagtctccttctgtcttgtgatggtcctcctgtttgctgtggacacaggactgtacttttccgtgaaaacgaacatccgcagctccacacgcgattggaaagatcacaagtttaaatggcgcaaagatccccaggacaag

SEQ ID NO: 4855 - DNA, 1530 bp, Artificial Sequence
  Synthetic Polynucleotide
atggccttaccagtgaccgccttgctcctgccgctggccttgctgctccacgccgccaggccggacatcgtgatgacccagagccccgatagcctggccgtgtctctgggagagagagccaccatcaactgcgagagcagccagagcctgctgaacagcggcaaccagaagaactacctgacctggtatcagcagaagcccggccagccccccaagcccctgatctattgggccagcaccagagaaagcggcgtgcccgatagattcagcggcagcggaagcggcaccgacttcaccctgaccatcagttctcttcaggccgaggacgtggccgtgtactactgccagaacgactacagctacccctacaccttcggccagggcaccaagctggaaatcaagagaggcggaggcggaagtggaggcggaggatctggcggcggaggctctgaagtgcagctggtgcagtctggggccgaagtgaagaagcctggcgagagcctgaagatcagctgcaagggcagcggctacagcttcaccgactactacatgaagtgggccagacagatgcccggcaagggcctggaatggatgggcgacatcatccccagcaacggggccaccttctacaaccagaaattcaagggccaagtgaccatctccgccgacaagagcatcagcaccacctacctccagtggtccagcctgaaggccagcgacaccgccatgtactattgcgccagaagccatctgctgcgggccagttggttcgcctattggggccagggaacaatggtcacagtgtccagcacgcgtggaatgaggactgaggatcttcccaaagctgtcgtctttctcgaaccccaatggtatcgggtgctcgaaaaagactctgtgacactgaaatgccaaggggcctactctcccgaggacaactccacacagtggtttcataatgagtccctcatcagctctcaggccagctcttatttcattgatgccgctacagtggacgactccggcgagtatcggtgtcagaccaatctgtctacactgtctgaccccgtgcagcttgaggtccacattggatggttgctcttgcaagccccacgctgggttttcaaagaggaagatccaatccatctgcggtgccacagctggaaaaacaccgctctccacaaagtcacatacctgcaaaatggcaaaggacgcaaatacttccatcacaattccgatttttacattccgaaggctaccctgaaagacagcggcagctatttctgccggggactcgtcggctccaagaatgtgtcctccgaaaccgtgaatatcacgattacccaaggactggctgtgcctacaatctctagcttctttccgcctggataccaagtctccttctgtcttgtgatggtcctcctgtttgctgtggacacaggactgtacttttccgtgaaaacgaacatccgcagctccacacgcgattggaaagatcacaagtttaaatggcgcaaagatccccaggacaag

SEQ ID NO: 4856 - DNA, 1515 bp, Artificial Sequence
  Synthetic Polynucleotide
atggccttaccagtgaccgccttgctcctgccgctggccttgctgctccacgccgccaggccggacatccagatgacccagtctaccagttccctgagtgcatccctcggagacagggtgacgatcagttgcagcgcaagccaagggatcaataactatctgaactggtatcagcagaaaccggacggaacagtcgaactcctgatttattacaccagcacccttcagagtggcgtcccttcccggttcagtggctccggaagcgggaccgattactccctgaccatttctaatctggagccagaggacataggaacgtattattgccagcagtatagtaaactgccacgaacttttggaggggggacgaaactggagatcaaaggcggaggcggaagtggaggcggaggatctggcggcggaggctctcaggtgcaactccagcagtccggaagcgagcttatgatgccaggggcatcagtgaagatcagctgcaaggctactggctacaccttctctaattactggatagagtgggttaaacaaaggccagggcacggcctggaatggatcggcgagatcctgcctgggacaggccgaaccatttataacgagaagttcaaaggcaaggctactttcaccgcagatataagctctaatacagtgcaaatgcagctctcttccctgacaagtgaggatagtgccgtgtattattgcgcacgaagagattactatggaaatttttattacgctatggattattggggtcaaggaacaagtgtgaccgttagcagcacgcgtggaatgaggactgaggatcttcccaaagctgtcgtctttctcgaaccccaatggtatcgggtgctcgaaaaagactctgtgacactgaaatgccaaggggcctactctcccgaggacaactccacacagtggtttcataatgagtccctcatcagctctcaggccagctcttatttcattgatgccgctacagtggacgactccggcgagtatcggtgtcagaccaatctgtctacactgtctgaccccgtgcagcttgaggtccacattggatggttgctcttgcaagccccacgctgggttttcaaagaggaagatccaatccatctgcggtgccacagctggaaaaacaccgctctccacaaagtcacatacctgcaaaatggcaaaggacgcaaatacttccatcacaattccgatttttacattccgaaggctaccctgaaagacagcggcagctatttctgccggggactcgtcggctccaagaatgtgtcctccgaaaccgtgaatatcacgattacccaaggactggctgtgcctacaatctctagcttctttccgcctggataccaagtctccttctgtcttgtgatggtcctcctgtttgctgtggacacaggactgtacttttccgtgaaaacgaacatccgcagctccacacgcgattggaaagatcacaagtttaaatggcgcaaagatccccaggacaag

SEQ ID NO: 4857 - DNA, 1500 bp, Artificial Sequence
  Synthetic Polynucleotide
atggccttaccagtgaccgccttgctcctgccgctggccttgctgctccacgccgccaggccggacatccagatgacccagagccctgccagcctgtccgtgtctgtgggcgagacagtgaccatcacctgtcgggccagcgagaacatctacagcaacctggcctggtatcagcagaagcagggcaagagcccccaactgctggtgtacgccgccaccaatctggccgatggcgtgcccagcagattttccggctctggcagcggcacccagtacagcctgaagatcaacagcctccagagcgaggacttcggcagctactactgccagcacttctggggcacctggacctttggaggaggcaccaccctggaaatcaagggcggaggcggaagtggaggcggaggatctggcggcggaggctctgaagtgcaactccagcagagcggccctgagcttgtgaagcctggcgcttccgtgaagatgagctgcaaggccagcggctacaccttcaccgactactacatgaagtggatgaagcagagccacggcaagtccctggaatggatcggcgacatcaaccccaacaacggcggcaccacctacaaccagaagttcaagggcaaggccaccctgaccgtggacaagagcagcagcaccgcctacatgcaactgaacagcctgaccagcgaggacagcgccgtgtactactgcgccagagactacggctacggctatttcgactactggggccagggcacaaccctgacagtgtcctctacgcgtggaatgaggactgaggatcttcccaaagctgtcgtctttctcgaaccccaatggtatcgggtgctcgaaaaagactctgtgacactgaaatgccaaggggcctactctcccgaggacaactccacacagtggtttcataatgagtccctcatcagctctcaggccagctcttatttcattgatgccgctacagtggacgactccggcgagtatcggtgtcagaccaatctgtctacactgtctgaccccgtgcagcttgaggtccacattggatggttgctcttgcaagccccacgctgggttttcaaagaggaagatccaatccatctgcggtgccacagctggaaaaacaccgctctccacaaagtcacatacctgcaaaatggcaaaggacgcaaatacttccatcacaattccgatttttacattccgaaggctaccctgaaagacagcggcagctatttctgccggggactcgtcggctccaagaatgtgtcctccgaaaccgtgaatatcacgattacccaaggactggctgtgcctacaatctctagcttctttccgcctggataccaagtctccttctgtcttgtgatggtcctcctgtttgctgtggacacaggactgtacttttccgtgaaaacgaacatccgcagctccacacgcgattggaaagatcacaagtttaaatggcgcaaagatccccaggacaag

SEQ ID NO: 4858 - DNA, 1512 bp, Artificial Sequence
  Synthetic Polynucleotide
atggccttaccagtgaccgccttgctcctgccgctggccttgctgctccacgccgccaggccggacgagatcgtgctgacacagagccccgccaccctgtcactgtctccaggcgaaagagccaccctgagctgtagcgccagcagcagcgtgtcctacatgcactggtatcagcagaagcccggccaggcccccagactgctgatctacgataccagcaagctggcctccggcatccccgccagattttctggcagcggctccggcaccgacttcaccctgacaatcagcagcctggaacccgaggacgtggccgtgtactactgttttcaaggcagcgtgtaccccttcaccttcggccagggcaccaagctggaaatcaagagaggtggcggtggctcgggcggtggtgggtcgggtggcggcggatctcaggtgcagctccaggaatctggccctggcctcgtgaagcctagccagaccctgagcctgacctgtaccgtgtctggcggcagcatcagcacaagcggcatgggcgtgggctggatcagacagcaccctggcaagggcctggaatggatcggccacatttggtgggacgacgacaagcggtacaaccccgccctgaagtccagagtgaccatcagcgtggacaccagcaagaaccagttcagcctgaagctgagcagcgtgacagccgccgataccgccgtgtattattgcgcccggatggaactgtggtcctactacttcgactactggggccagggaaccctcgtgaccgtgtctagtacgcgtggaatgaggactgaggatcttcccaaagctgtcgtctttctcgaaccccaatggtatcgggtgctcgaaaaagactctgtgacactgaaatgccaaggggcctactctcccgaggacaactccacacagtggtttcataatgagtccctcatcagctctcaggccagctcttatttcattgatgccgctacagtggacgactccggcgagtatcggtgtcagaccaatctgtctacactgtctgaccccgtgcagcttgaggtccacattggatggttgctcttgcaagccccacgctgggttttcaaagaggaagatccaatccatctgcggtgccacagctggaaaaacaccgctctccacaaagtcacatacctgcaaaatggcaaaggacgcaaatacttccatcacaattccgatttttacattccgaaggctaccctgaaagacagcggcagctatttctgccggggactcgtcggctccaagaatgtgtcctccgaaaccgtgaatatcacgattacccaaggactggctgtgcctacaatctctagcttctttccgcctggataccaagtctccttctgtcttgtgatggtcctcctgtttgctgtggacacaggactgtacttttccgtgaaaacgaacatccgcagctccacacgcgattggaaagatcacaagtttaaatggcgcaaagatccccaggacaag

SEQ ID NO: 4859 - DNA, 1509 bp, Artificial Sequence
  Synthetic Polynucleotide
atggccttaccagtgaccgccttgctcctgccgctggccttgctgctccacgccgccaggccggacatccagatgacacagactacatcctccctgtctgcctctctgggagacagagtcaccatcagttgcagggcaagtcaggacattagtaaatatttaaattggtatcagcagaaaccagatggaactgttaaactcctgatctaccatacatcaagattacactcaggagtcccatcaaggttcagtggcagtgggtctggaacagattattctctcaccattagcaacctggagcaagaagatattgccacttacttttgccaacagggtaatacgcttccgtacacgttcggaggggggaccaagctggagatcacaggtggcggtggctcgggcggtggtgggtcgggtggcggcggatctgaggtgaaactgcaggagtcaggacctggcctggtggcgccctcacagagcctgtccgtcacatgcactgtctcaggggtctcattacccgactatggtgtaagctggattcgccagcctccacgaaagggtctggagtggctgggagtaatatggggtagtgaaaccacatactataattcagctctcaaatccagactgaccatcatcaaggacaactccaagagccaagttttcttaaaaatgaacagtctgcaaactgatgacacagccatttactactgtgccaaacattattactacggtggtagctatgctatggactactggggtcaaggaacctcagtcaccgtctcctcaacgcgtggaatgaggactgaggatcttcccaaagctgtcgtctttctcgaaccccaatggtatcgggtgctcgaaaaagactctgtgacactgaaatgccaaggggcctactctcccgaggacaactccacacagtggtttcataatgagtccctcatcagctctcaggccagctcttatttcattgatgccgctacagtggacgactccggcgagtatcggtgtcagaccaatctgtctacactgtctgaccccgtgcagcttgaggtccacattggatggttgctcttgcaagccccacgctgggttttcaaagaggaagatccaatccatctgcggtgccacagctggaaaaacaccgctctccacaaagtcacatacctgcaaaatggcaaaggacgcaaatacttccatcacaattccgatttttacattccgaaggctaccctgaaagacagcggcagctatttctgccggggactcgtcggctccaagaatgtgtcctccgaaaccgtgaatatcacgattacccaaggactggctgtgcctacaatctctagcttctttccgcctggataccaagtctccttctgtcttgtgatggtcctcctgtttgctgtggacacaggactgtacttttccgtgaaaacgaacatccgcagctccacacgcgattggaaagatcacaagtttaaatggcgcaaagatccccaggacaag

SEQ ID NO: 4860 - DNA, 1509 bp, Artificial Sequence
  Synthetic Polynucleotide
atggccttaccagtgaccgccttgctcctgccgctggccttgctgctccacgccgccaggccggagatcgtgatgacccagagccctgccaccctgtctctgagccctggcgaaagagccaccctgagctgtagagccagccaggacatcagcaagtacctgaactggtatcagcagaagcccggccaggcccccagactgctgatctaccacaccagcagactgcacagcggcatccccgccagattttctggctctggcagcggcaccgactacaccctgacaatcagcagcctccagcccgaggacttcgccgtgtacttctgtcagcaaggcaacaccctgccctacaccttcggccagggcaccaagctggaaatcaagggcggaggcggaagtggaggcggaggatctggcggcggaggctctcaggtgcaactccaggaatctggccctggcctcgtgaagcccagcgagacactgagcctgacctgtaccgtgtccggcgtgtccctgcctgactatggcgtgtcctggatcagacagccccctggcaagggcctggaatggatcggagtgatttggggcagcgaaaccacctactacaacagctccctgaagtccagagtgaccatctccaaggacaactccaagaaccaggtgtccctgaagctgagcagcgtgacagccgccgacaccgccgtgtattactgcgccaagcactactactacggcggcagctacgctatggactactggggccagggaaccctcgtgaccgtgtctagtacgcgtggaatgaggactgaggatcttcccaaagctgtcgtctttctcgaaccccaatggtatcgggtgctcgaaaaagactctgtgacactgaaatgccaaggggcctactctcccgaggacaactccacacagtggtttcataatgagtccctcatcagctctcaggccagctcttatttcattgatgccgctacagtggacgactccggcgagtatcggtgtcagaccaatctgtctacactgtctgaccccgtgcagcttgaggtccacattggatggttgctcttgcaagccccacgctgggttttcaaagaggaagatccaatccatctgcggtgccacagctggaaaaacaccgctctccacaaagtcacatacctgcaaaatggcaaaggacgcaaatacttccatcacaattccgatttttacattccgaaggctaccctgaaagacagcggcagctatttctgccggggactcgtcggctccaagaatgtgtcctccgaaaccgtgaatatcacgattacccaaggactggctgtgcctacaatctctagcttctttccgcctggataccaagtctccttctgtcttgtgatggtcctcctgtttgctgtggacacaggactgtacttttccgtgaaaacgaacatccgcagctccacacgcgattggaaagatcacaagtttaaatggcgcaaagatccccaggacaag

SEQ ID NO: 4861 - DNA, 1515 bp, Artificial Sequence
  Synthetic Polynucleotide
atggccttaccagtgaccgccttgctcctgccgctggccttgctgctccacgccgccaggccggagatcgtgctgacacagagccctgccaccctgtctctgagccctggcgaaagagccaccctgagctgtagagccagccagagcgtgtccagctacctggcctggtatcagcagaagcccggccaggctccccggctgctgatctacgatgccagcaatagagccaccggcatccccgccagattttccggctctggcagcggcaccgacttcaccctgaccatcagctccctggaacccgaggacttcgccgtgtactactgccagcagcggagcaactggcccatcacattcggccagggcacccggctggaaatcaaaggcggaggcggaagtggaggcggaggatctggcggcggaggctctgaagtgcagctggtggaatcaggcggcggactggtgcagcctggcagaagcctgagactgagctgtgccgccagcggcttcaccttcaacgactacgccatgcactgggtgcgccaggcccctggaaaaggactggaatgggtgtccacaatcagctggaacagcggcagcatcggctacgccgatagcgtgaagggccggttcaccatcagccgggacaacgccaagaagtccctgtacctccagatgaacagcctgcgggccgaggacacagccctgtactattgcgccaaggacatccagtacggcaactactactacggcatggacgtgtggggccagggaaccaccgtgaccgtgtcatctacgcgtggaatgaggactgaggatcttcccaaagctgtcgtctttctcgaaccccaatggtatcgggtgctcgaaaaagactctgtgacactgaaatgccaaggggcctactctcccgaggacaactccacacagtggtttcataatgagtccctcatcagctctcaggccagctcttatttcattgatgccgctacagtggacgactccggcgagtatcggtgtcagaccaatctgtctacactgtctgaccccgtgcagcttgaggtccacattggatggttgctcttgcaagccccacgctgggttttcaaagaggaagatccaatccatctgcggtgccacagctggaaaaacaccgctctccacaaagtcacatacctgcaaaatggcaaaggacgcaaatacttccatcacaattccgatttttacattccgaaggctaccctgaaagacagcggcagctatttctgccggggactcgtcggctccaagaatgtgtcctccgaaaccgtgaatatcacgattacccaaggactggctgtgcctacaatctctagcttctttccgcctggataccaagtctccttctgtcttgtgatggtcctcctgtttgctgtggacacaggactgtacttttccgtgaaaacgaacatccgcagctccacacgcgattggaaagatcacaagtttaaatggcgcaaagatccccaggacaag

SEQ ID NO: 4862 - DNA, 1524 bp, Artificial Sequence
  Synthetic Polynucleotide
atggccttaccagtgaccgccttgctcctgccgctggccttgctgctccacgccgccaggccggacatcgtgatgacccagacccccctgagcctgcctgtgacacctggcgagcctgccagcatctcctgcagaagcagcaagagcctgctgcacagcaacggcatcacctacctgtactggtatctgcagaaacccggccagagcccccaactgctgatctaccagatgagcaacctggtgtccggcgtgcccgacagattttctggcagcggctccggcaccgacttcaccctgaagatcagccgggtggaagccgaggacgtgggcgtgtactactgcgcccagaacctggaactgccctacacctttggcggcggaacaaaggtggaaatcaagcggggcggaggcggaagtggaggcggaggatctggcggcggaggctctcaggtgcaactggtgcagagcggagccgaagtgaaaaagcccggcagcagcgtgaaggtgtcctgcaaggccagcggctacgccttcagctactcctggatcaactgggtgcgccaggcccctggacagggcctggaatggatgggcagaatcttccccggcgacggcgacaccgactacaacggcaagttcaagggcagagtgaccatcaccgccgacaagagcaccagcaccgcctacatggaactgagcagcctgcggagcgaggataccgccgtgtactattgtgccagaaacgtgttcgacggctactggctggtgtactggggccagggaacacttgtgaccgtgtccagcacgcgtggaatgaggactgaggatcttcccaaagctgtcgtctttctcgaaccccaatggtatcgggtgctcgaaaaagactctgtgacactgaaatgccaaggggcctactctcccgaggacaactccacacagtggtttcataatgagtccctcatcagctctcaggccagctcttatttcattgatgccgctacagtggacgactccggcgagtatcggtgtcagaccaatctgtctacactgtctgaccccgtgcagcttgaggtccacattggatggttgctcttgcaagccccacgctgggttttcaaagaggaagatccaatccatctgcggtgccacagctggaaaaacaccgctctccacaaagtcacatacctgcaaaatggcaaaggacgcaaatacttccatcacaattccgatttttacattccgaaggctaccctgaaagacagcggcagctatttctgccggggactcgtcggctccaagaatgtgtcctccgaaaccgtgaatatcacgattacccaaggactggctgtgcctacaatctctagcttctttccgcctggataccaagtctccttctgtcttgtgatggtcctcctgtttgctgtggacacaggactgtacttttccgtgaaaacgaacatccgcagctccacacgcgattggaaagatcacaagtttaaatggcgcaaagatccccaggacaag

SEQ ID NO: 4863 - DNA, 1527 bp, Artificial Sequence
  Synthetic Polynucleotide
atggccttaccagtgaccgccttgctcctgccgctggccttgctgctccacgccgccaggccggacatccagatgacccagagccccagcagcctgtctgccagcgtgggcgacagagtgaccatcacctgtcggagcagccagagcatcgtgcactccgtgggcaacaccttcctggaatggtatcagcagaagcccggcaaggcccccaagctgctgatctacaaggtgtccaacagattcagcggcgtgcccagcaggtttagcggctctggcagcggcaccgacttcaccctgaccatctctagcctccagcccgaggacttcgccacctactactgttttcaaggcagccagttcccctacaccttcggccagggaacaaaggtggaaatcaagcggggcggaggcggaagtggaggcggaggatctggcggcggaggctctgaagtgcaactggtggaaagcggaggcggcctggtgcagcctggcggatctctgagactgagctgtgccgccagcggctacgagttcagccggtcctggatgaactgggtgcgccaggcccctggcaagggactggaatgggtgggaagaatctaccccggcgacggcgacaccaactacagcggcaagttcaagggccggttcaccatcagcgccgacaccagcaagaacaccgcctacctccagatgaacagcctgcgggccgaggataccgccgtgtactactgtgccagagatggcagctcctgggactggtacttcgacgtgtggggacagggaacccttgtgaccgtgtccagcacgcgtggaatgaggactgaggatcttcccaaagctgtcgtctttctcgaaccccaatggtatcgggtgctcgaaaaagactctgtgacactgaaatgccaaggggcctactctcccgaggacaactccacacagtggtttcataatgagtccctcatcagctctcaggccagctcttatttcattgatgccgctacagtggacgactccggcgagtatcggtgtcagaccaatctgtctacactgtctgaccccgtgcagcttgaggtccacattggatggttgctcttgcaagccccacgctgggttttcaaagaggaagatccaatccatctgcggtgccacagctggaaaaacaccgctctccacaaagtcacatacctgcaaaatggcaaaggacgcaaatacttccatcacaattccgatttttacattccgaaggctaccctgaaagacagcggcagctatttctgccggggactcgtcggctccaagaatgtgtcctccgaaaccgtgaatatcacgattacccaaggactggctgtgcctacaatctctagcttctttccgcctggataccaagtctccttctgtcttgtgatggtcctcctgtttgctgtggacacaggactgtacttttccgtgaaaacgaacatccgcagctccacacgcgattggaaagatcacaagtttaaatggcgcaaagatccccaggacaag

SEQ ID NO: 4864 - DNA, 1509 bp, Artificial Sequence
  Synthetic Polynucleotide
atggccttaccagtgaccgccttgctcctgccgctggccttgctgctccacgccgccaggccggagatcgtgctgacacagagccctggcaccctgagcctgtctccaggcgaaagagccacactgagctgtcgggcctctcagagcgtgggaggctacctggcttggtatcagcagaagccaggccaggcccccagactgctgatctacgacgccagcaatcgggccacaggcatccccgccagattttctggcagcggctccggcaccgacttcaccctgacaatcagcagcctggaacccgaggacttcgccgtgtactactgccagcagcggaacaactggccccccatgtacacattcggccagggcaccaagctggaaatcaagagaggcggaggcggaagtggaggcggaggatctggcggcggaggctctcaggtgcaactggtgcagagcggagccgaagtgaagaaacccggcagcagcgtgaaggtgtcctgcaaggcttccggcggcaccttcagcagctacgccatttcttgggtgcgccaggctcctggacagggcctggaatggatgggcggcatcatccctatcctgggcaccgccaactacgcccagaaattccagggcagagtgaccatcaccgccgacgagagcaccagcaccgcctacatggaactgagcagcctgcggagcgaggacacagccgtgtattattgcgccagatggggcggaggggccttcgacatttggggccagggaacaatggtcaccgtgtccagcacgcgtggaatgaggactgaggatcttcccaaagctgtcgtctttctcgaaccccaatggtatcgggtgctcgaaaaagactctgtgacactgaaatgccaaggggcctactctcccgaggacaactccacacagtggtttcataatgagtccctcatcagctctcaggccagctcttatttcattgatgccgctacagtggacgactccggcgagtatcggtgtcagaccaatctgtctacactgtctgaccccgtgcagcttgaggtccacattggatggttgctcttgcaagccccacgctgggttttcaaagaggaagatccaatccatctgcggtgccacagctggaaaaacaccgctctccacaaagtcacatacctgcaaaatggcaaaggacgcaaatacttccatcacaattccgatttttacattccgaaggctaccctgaaagacagcggcagctatttctgccggggactcgtcggctccaagaatgtgtcctccgaaaccgtgaatatcacgattacccaaggactggctgtgcctacaatctctagcttctttccgcctggataccaagtctccttctgtcttgtgatggtcctcctgtttgctgtggacacaggactgtacttttccgtgaaaacgaacatccgcagctccacacgcgattggaaagatcacaagtttaaatggcgcaaagatccccaggacaag

SEQ ID NO: 4865 - DNA, 1500 bp, Artificial Sequence
  Synthetic Polynucleotide
atggccttaccagtgaccgccttgctcctgccgctggccttgctgctccacgccgccaggccggacatccagatgacccagagccccgccaccatcgagaacacaagcctgtctgccagcgtgggcgacagagtgaccatcacctgtagagccagccagggcatcagctcttggctgacctggtatcagcagaagcccgagaaggcccccaagagcctgatctacgccgccagctctctgcagtctggcgtgcccagcagattttccggcagcggctctggcaccgacttcaccctgacaatcagcagcctgcagcccgaggacttcgccacctactactgccagcagtacgacagctaccccatcaccttcggccagggcacccggctggaaatcaagggcggaggcggaagtggaggcggaggatctggcggcggaggctctcaggtgcaactgcagcagtggggagccggactgctgaagcctagcgagacactgagcctgacctgcgccgtgtacggcggcagcttcagcgcctactattggagctggatcagacagccccctggcaagggcctggaatggatcggcgacatcaatcacggcggaggcaccaactacaaccccagcctgaagtcccgcgtgaccatctccgtggacaccagcaagaaccagttctccctgaagctgaacagcgtgacagccgccgacacagccgtgtactactgtgccagcctgaccgcctattggggccagggatctcttgtgaccgtgtccagcacgcgtggaatgaggactgaggatcttcccaaagctgtcgtctttctcgaaccccaatggtatcgggtgctcgaaaaagactctgtgacactgaaatgccaaggggcctactctcccgaggacaactccacacagtggtttcataatgagtccctcatcagctctcaggccagctcttatttcattgatgccgctacagtggacgactccggcgagtatcggtgtcagaccaatctgtctacactgtctgaccccgtgcagcttgaggtccacattggatggttgctcttgcaagccccacgctgggttttcaaagaggaagatccaatccatctgcggtgccacagctggaaaaacaccgctctccacaaagtcacatacctgcaaaatggcaaaggacgcaaatacttccatcacaattccgatttttacattccgaaggctaccctgaaagacagcggcagctatttctgccggggactcgtcggctccaagaatgtgtcctccgaaaccgtgaatatcacgattacccaaggactggctgtgcctacaatctctagcttctttccgcctggataccaagtctccttctgtcttgtgatggtcctcctgtttgctgtggacacaggactgtacttttccgtgaaaacgaacatccgcagctccacacgcgattggaaagatcacaagtttaaatggcgcaaagatccccaggacaag

SEQ ID NO: 4866 - DNA, 1512 bp, Artificial Sequence
  Synthetic Polynucleotide
atggccttaccagtgaccgccttgctcctgccgctggccttgctgctccacgccgccaggccggagatcgtgctgacccagagccctgatagcctggccgtgtctctgggcgagagagccaccatcaactgcaaggccagccagagcgtggacttcgacggcgacagctacctgaactggtatcagcagaagcccggccagccccccaaggtgctgatctatgccgccagcacactgcagagcggcgtgcccagcagattttctggcagcggctccggcaccgacttcaccctgaccatcaacagcctggaagccgaggacgccgccacctactactgccagcagagcaacgaggacccctggacctttggcggcggaacaaaggtggaaatcaagggcggaggcggaagtggaggcggaggatctggcggcggaggctctcaggtgcaactggtgcagtccggcgctgaagtgaagaaacctggggccagcgtgaaggtgtcctgcaaggtgtccggctacacctttaccgactactacattacctgggtgcgccaggcccctggacaggccctggaatggatgggctggatctaccccggcagcggcaacaccaagtacagccagaagttccagggcagattcgtgttcagcgtggacaccagcgccagcaccgcctacctgcaactgtctagcctgaaggccgaagataccgccgtgtactactgcgccaactacggcaactattggttcgcctattggggccagggaacccttgtgaccgtgtcctctacgcgtggaatgaggactgaggatcttcccaaagctgtcgtctttctcgaaccccaatggtatcgggtgctcgaaaaagactctgtgacactgaaatgccaaggggcctactctcccgaggacaactccacacagtggtttcataatgagtccctcatcagctctcaggccagctcttatttcattgatgccgctacagtggacgactccggcgagtatcggtgtcagaccaatctgtctacactgtctgaccccgtgcagcttgaggtccacattggatggttgctcttgcaagccccacgctgggttttcaaagaggaagatccaatccatctgcggtgccacagctggaaaaacaccgctctccacaaagtcacatacctgcaaaatggcaaaggacgcaaatacttccatcacaattccgatttttacattccgaaggctaccctgaaagacagcggcagctatttctgccggggactcgtcggctccaagaatgtgtcctccgaaaccgtgaatatcacgattacccaaggactggctgtgcctacaatctctagcttctttccgcctggataccaagtctccttctgtcttgtgatggtcctcctgtttgctgtggacacaggactgtacttttccgtgaaaacgaacatccgcagctccacacgcgattggaaagatcacaagtttaaatggcgcaaagatccccaggacaag

SEQ ID NO: 4867 - DNA, 1506 bp, Artificial Sequence
  Synthetic Polynucleotide
atggccttaccagtgaccgccttgctcctgccgctggccttgctgctccacgccgccaggccggacatccagatgacccagagccccagcagcctgtctgccagcgtgggcgacagagtgaccatcacctgtagagccagccagggcatcagctcttggctggcctggtatcagcagaagcccgagaaggcccccaagagcctgatctacgccgcctctagtctccagagcggcgtgcccagcagattttctggcagcggctccggcaccgacttcaccctgacaatcagctccctccagcccgaggacttcgccacctactactgccagcagtacaacagctaccctcccacctttggcggaggcaccaaggtggaaatcaagggcggaggcggaagtggaggcggaggatctggcggcggaggctctgaagtgcaactggtgcagtctggcggagggctggtgcatcctgggggaagcctgagactgagctgtgccggctctggcttcgccttcagcagcagcaccatgcactggatcagacaggcccctggcaagggcctggaatggatcagcctgatcggaagcggagggggcatctactacggcgacagcgtgaagggccggttcaccatcagccgggacaacgccaagaacagcctgtacctccagatgaactccctgcgggccgaggacatggccgtgtactattgtgtgcggggctacttcgactgggtggactacttcgattactggggccagggcaccctcgtgaccgtgtcatctacgcgtggaatgaggactgaggatcttcccaaagctgtcgtctttctcgaaccccaatggtatcgggtgctcgaaaaagactctgtgacactgaaatgccaaggggcctactctcccgaggacaactccacacagtggtttcataatgagtccctcatcagctctcaggccagctcttatttcattgatgccgctacagtggacgactccggcgagtatcggtgtcagaccaatctgtctacactgtctgaccccgtgcagcttgaggtccacattggatggttgctcttgcaagccccacgctgggttttcaaagaggaagatccaatccatctgcggtgccacagctggaaaaacaccgctctccacaaagtcacatacctgcaaaatggcaaaggacgcaaatacttccatcacaattccgatttttacattccgaaggctaccctgaaagacagcggcagctatttctgccggggactcgtcggctccaagaatgtgtcctccgaaaccgtgaatatcacgattacccaaggactggctgtgcctacaatctctagcttctttccgcctggataccaagtctccttctgtcttgtgatggtcctcctgtttgctgtggacacaggactgtacttttccgtgaaaacgaacatccgcagctccacacgcgattggaaagatcacaagtttaaatggcgcaaagatccccaggacaag

SEQ ID NO: 4868 - DNA, 1524 bp, Artificial Sequence
  Synthetic Polynucleotide
atggccttaccagtgaccgccttgctcctgccgctggccttgctgctccacgccgccaggccggacgtcgtgatgacccagagccctctgagcctgcctgtgacactgggacagcctgccagcatctcctgtcggagcagccagagcatcgtgcacagcgacggcaacacctacctggaatggtatcagcagcggccaggccagagccccagacggctgatctacaaggtgtccaacagattcagcggcgtgcccgacagattctccggcagcggctctggcaccgacttcaccctgaagatcagcagagtggaagccgaggacgtgggcgtgtactactgttttcaaggcagccacgccccctggacctttggcggaggaacaaaggtggaaatcaagggcggaggcggaagtggaggcggaggatctggcggcggaggctctgaagtgcaactggtggaatcaggcggcggactggtgcagcctggcggatctctgagactgagctgtgccgccagcggcttcaccttcagcagctacggaatgcactgggtgcgccaggcccctggcaaaggactggaatgggtggcctacatcaccaccagaagcagcaccatctactacgccgacagcgtgaagggccggttcaccatctccagagacaacgccaagaacagcctgtacctccagatgaactccctgcgggccgaggacaccgccgtgtactattgcaccagagagcccctgaccggctactacgctatggactattggggccagggcaccagcgtgaccgtgtctagtacgcgtggaatgaggactgaggatcttcccaaagctgtcgtctttctcgaaccccaatggtatcgggtgctcgaaaaagactctgtgacactgaaatgccaaggggcctactctcccgaggacaactccacacagtggtttcataatgagtccctcatcagctctcaggccagctcttatttcattgatgccgctacagtggacgactccggcgagtatcggtgtcagaccaatctgtctacactgtctgaccccgtgcagcttgaggtccacattggatggttgctcttgcaagccccacgctgggttttcaaagaggaagatccaatccatctgcggtgccacagctggaaaaacaccgctctccacaaagtcacatacctgcaaaatggcaaaggacgcaaatacttccatcacaattccgatttttacattccgaaggctaccctgaaagacagcggcagctatttctgccggggactcgtcggctccaagaatgtgtcctccgaaaccgtgaatatcacgattacccaaggactggctgtgcctacaatctctagcttctttccgcctggataccaagtctccttctgtcttgtgatggtcctcctgtttgctgtggacacaggactgtacttttccgtgaaaacgaacatccgcagctccacacgcgattggaaagatcacaagtttaaatggcgcaaagatccccaggacaag

SEQ ID NO: 4869 - DNA, 1494 bp, Artificial Sequence
  Synthetic Polynucleotide
atggccttaccagtgaccgccttgctcctgccgctggccttgctgctccacgccgccaggccgcagatcgtgctgacacagagccctgccctgatgagcgccagccctggcgagaaagtgaccatgacctgtagcgccagcagcagcgtgcgctacatgtactggtatcagcagaagcccagaagcagccccaagccctggattcacctgaccagcaatctggcctctggcgtgcccgctagattttccggctctggcagcggcaccagctacagcctgaccatcagcagcatggaagccgaggacgccgccacctactactgccagcagtggtccagccaccccttcacatttggctccggcaccaagctggaaatcaagggcggaggcggaagtggaggcggaggatctggcggcggaggctctgatgtgcaactccaggaaagcggccctggccttgtgaagcctagccagagcctgtccctgacctgtaccgtgaccggcttcagcatcaccagcgactactcttggaactggatcagacagttccctggcaacaaactggaatggatgggctacatcagctactccggccacacctcctacaaccccagcctggaaagccggatctccatcaccagagacaccagcaagaaccagttcttcttgcaactgaacagcgtgaccaccgaggataccgccacatattactgtaccagaggcaactgggacgtggtgtactggggccagggcacacttgtgaccgtgtctgctacgcgtggaatgaggactgaggatcttcccaaagctgtcgtctttctcgaaccccaatggtatcgggtgctcgaaaaagactctgtgacactgaaatgccaaggggcctactctcccgaggacaactccacacagtggtttcataatgagtccctcatcagctctcaggccagctcttatttcattgatgccgctacagtggacgactccggcgagtatcggtgtcagaccaatctgtctacactgtctgaccccgtgcagcttgaggtccacattggatggttgctcttgcaagccccacgctgggttttcaaagaggaagatccaatccatctgcggtgccacagctggaaaaacaccgctctccacaaagtcacatacctgcaaaatggcaaaggacgcaaatacttccatcacaattccgatttttacattccgaaggctaccctgaaagacagcggcagctatttctgccggggactcgtcggctccaagaatgtgtcctccgaaaccgtgaatatcacgattacccaaggactggctgtgcctacaatctctagcttctttccgcctggataccaagtctccttctgtcttgtgatggtcctcctgtttgctgtggacacaggactgtacttttccgtgaaaacgaacatccgcagctccacacgcgattggaaagatcacaagtttaaatggcgcaaagatccccaggacaag

SEQ ID NO: 4870 - DNA, 1521 bp, Artificial Sequence
  Synthetic Polynucleotide
atggccttaccagtgaccgccttgctcctgccgctggccttgctgctccacgccgccaggccggagatcgtgctgacacagagccctggaagcctggccgtgtctcctggcgagcgcgtgacaatgagctgcaagagcagccagagcgtgttcttcagcagctcccagaagaactacctggcctggtatcagcagatccccggccagagccccagactgctgatctactgggccagcaccagagaaagcggcgtgcccgatagattcaccggcagcggctctggcaccgacttcaccctgacaatcagcagcgtgcagcccgaggacctggctatctactactgccaccagtacctgagcagccggaccttcggccagggcaccaagctggaaatcaagagaggcggaggcggaagtggaggcggaggatctggcggcggaggctctcaggtgcaactgcagcagcctggcgctgaggtcgtgaagccaggcgcttccgtgaagatgtcctgcaaggccagcggctacaccttcaccagctactacatccactggatcaagcagacccctggacagggcctggaatgggtgggagtgatctaccccggcaacgacgacatcagctacaaccagaagttccagggcaaggccaccctgaccgccgacaagtctagcaccaccgcctacatgcaactgtccagcctgaccagcgaggacagcgccgtgtactactgcgccagagaagtgcggctgcggtacttcgatgtgtggggccagggaaccaccgtgaccgtgtcatctacgcgtggaatgaggactgaggatcttcccaaagctgtcgtctttctcgaaccccaatggtatcgggtgctcgaaaaagactctgtgacactgaaatgccaaggggcctactctcccgaggacaactccacacagtggtttcataatgagtccctcatcagctctcaggccagctcttatttcattgatgccgctacagtggacgactccggcgagtatcggtgtcagaccaatctgtctacactgtctgaccccgtgcagcttgaggtccacattggatggttgctcttgcaagccccacgctgggttttcaaagaggaagatccaatccatctgcggtgccacagctggaaaaacaccgctctccacaaagtcacatacctgcaaaatggcaaaggacgcaaatacttccatcacaattccgatttttacattccgaaggctaccctgaaagacagcggcagctatttctgccggggactcgtcggctccaagaatgtgtcctccgaaaccgtgaatatcacgattacccaaggactggctgtgcctacaatctctagcttctttccgcctggataccaagtctccttctgtcttgtgatggtcctcctgtttgctgtggacacaggactgtacttttccgtgaaaacgaacatccgcagctccacacgcgattggaaagatcacaagtttaaatggcgcaaagatccccaggacaag

SEQ ID NO: 4871 - DNA, 1533 bp, Artificial Sequence
  Synthetic Polynucleotide
atggccttaccagtgaccgccttgctcctgccgctggccttgctgctccacgccgccaggccggacatcgtgatgacacagtcaccagatagcctcaccgtctccctgggggagcggaccaccattaattgtaaatccagccaaagcgtgctggactcaagcaagaacaagaatagcctcgcctggtatcagcagaagcccggtcagcctccaaagctgctgctttcttgggcctccaccagagagtccgggattcctgataggtttagtggttcaggctccggcacagattttactctgaccattgattctctccagccagaggattctgcaacttattactgccagcaaagcgcccactttcctataacttttggccagggaacccgacttgaaatcaagggcggaggcggaagtggaggcggaggatctggcggcggaggctctcaggtgcagctggtgcagagcggtgccgaagtgaagaaaccaggtgcatccgttaaagtttcatgtaaggctagtggatataccttcaccaattacggaatgaactgggtgaaacaggcccctggccagggactgaagtggatggggtggattaacacctacaccggggagccgacttatgcagacgactttaaggggcgggtcacgatgacctccgacacctccaccagtaccgcctacctggagctgcacaaccttaggtcagacgataccgccgtgtattactgtgcccgatggtcttggtccgacggatactatgtctacttcgactattggggccaggggaccacagttaccgtgtcctctacgcgtggaatgaggactgaggatcttcccaaagctgtcgtctttctcgaaccccaatggtatcgggtgctcgaaaaagactctgtgacactgaaatgccaaggggcctactctcccgaggacaactccacacagtggtttcataatgagtccctcatcagctctcaggccagctcttatttcattgatgccgctacagtggacgactccggcgagtatcggtgtcagaccaatctgtctacactgtctgaccccgtgcagcttgaggtccacattggatggttgctcttgcaagccccacgctgggttttcaaagaggaagatccaatccatctgcggtgccacagctggaaaaacaccgctctccacaaagtcacatacctgcaaaatggcaaaggacgcaaatacttccatcacaattccgatttttacattccgaaggctaccctgaaagacagcggcagctatttctgccggggactcgtcggctccaagaatgtgtcctccgaaaccgtgaatatcacgattacccaaggactggctgtgcctacaatctctagcttctttccgcctggataccaagtctccttctgtcttgtgatggtcctcctgtttgctgtggacacaggactgtacttttccgtgaaaacgaacatccgcagctccacacgcgattggaaagatcacaagtttaaatggcgcaaagatccccaggacaag

SEQ ID NO: 4872 - DNA, 1533 bp, Artificial Sequence
  Synthetic Polynucleotide
atggccttaccagtgaccgccttgctcctgccgctggccttgctgctccacgccgccaggccggatgtgctgctgacccagagccctctgagcctgcctgtgacactgggacagcctgccagcatctcctgtcggagcagccagaccatcgtgcacagcaacggcaacacctacctggaatggttccagcagcggccaggccagagccccagactgctgatctaccaggtgtccaacagattcagcggcgtgcccgacagattctccggcagcggctctggcaccgacttcaccctgaagatcagccgggtggaagccgaggacgtgggcgtgtactactgttttcaaggcagccacgtgccccggacctttggcggaggaacaaaggtggaaatcaagagaggcggaggcggaagtggaggcggaggatctggcggcggaggctctcagatccaactggtgcagagcggcagcgagctgaagaaacctggggccagcgtgaaggtgtcctgcaaggccagcggctacacctttaccaactacggcatgaactgggtgcgccaggcccctggacagggcctgaaatggatgggctggatcaacaccaacaccggcgagcctaagtacgccgaagagttcaagggcagattcgccctgagcctggacaccagcgtgtccacagcctacctccagatcaacagcctgaaggccgaggataccgccgtgtacttctgcgccagaggctacggcaactacgccagaggggcttggctggcctattggggccagggaacactcgtgaccgtgtcctctacgcgtggaatgaggactgaggatcttcccaaagctgtcgtctttctcgaaccccaatggtatcgggtgctcgaaaaagactctgtgacactgaaatgccaaggggcctactctcccgaggacaactccacacagtggtttcataatgagtccctcatcagctctcaggccagctcttatttcattgatgccgctacagtggacgactccggcgagtatcggtgtcagaccaatctgtctacactgtctgaccccgtgcagcttgaggtccacattggatggttgctcttgcaagccccacgctgggttttcaaagaggaagatccaatccatctgcggtgccacagctggaaaaacaccgctctccacaaagtcacatacctgcaaaatggcaaaggacgcaaatacttccatcacaattccgatttttacattccgaaggctaccctgaaagacagcggcagctatttctgccggggactcgtcggctccaagaatgtgtcctccgaaaccgtgaatatcacgattacccaaggactggctgtgcctacaatctctagcttctttccgcctggataccaagtctccttctgtcttgtgatggtcctcctgtttgctgtggacacaggactgtacttttccgtgaaaacgaacatccgcagctccacacgcgattggaaagatcacaagtttaaatggcgcaaagatccccaggacaag

SEQ ID NO: 4873 - DNA, 1518 bp, Artificial Sequence
  Synthetic Polynucleotide
atggccttaccagtgaccgccttgctcctgccgctggccttgctgctccacgccgccaggccggaccacatcgtgctgacccagagccctagcagcctgtctgccagcctgggcgacagagtgaccatcagctgtagagccagccaggacatcagcacctacctgaactggtatcagcagaaacccgacggcaccgtgaagctgctgatcttctacaccagcagactgcacgccggggtgcccagcagattttctggcagcggctctggcacccaccacagcctgaccatctccaacctggaacaggaagatattgctacctacttctgtcagcaaggcaacagcctgcccttcaccttcggcagcggcaccaagctggaaatcaagagaggcggaggcggaagtggaggcggaggatctggcggcggaggctctcaggtgcagctgaaagagagcggccctgagctggaaaagcctggggccagcgtgaagattagctgcaaggccagcggctacagcttcaccgcctacagcatgaactgggtcaagcagaacaacggcatgagcctggaatggatcggcagcatcgacccctactacggcgacaccaaatacgcccagaagttcaagggcaaggccaccctgaccgtggataaggccagcagcaccgcctacctccagctgaagtctctgaccagcgaggacagcgccgtgtactactgcgccagacggatgattaccaccggcgactggtacttcgacgtgtggggagccggaaccaccgtgacagtgtctagcacgcgtggaatgaggactgaggatcttcccaaagctgtcgtctttctcgaaccccaatggtatcgggtgctcgaaaaagactctgtgacactgaaatgccaaggggcctactctcccgaggacaactccacacagtggtttcataatgagtccctcatcagctctcaggccagctcttatttcattgatgccgctacagtggacgactccggcgagtatcggtgtcagaccaatctgtctacactgtctgaccccgtgcagcttgaggtccacattggatggttgctcttgcaagccccacgctgggttttcaaagaggaagatccaatccatctgcggtgccacagctggaaaaacaccgctctccacaaagtcacatacctgcaaaatggcaaaggacgcaaatacttccatcacaattccgatttttacattccgaaggctaccctgaaagacagcggcagctatttctgccggggactcgtcggctccaagaatgtgtcctccgaaaccgtgaatatcacgattacccaaggactggctgtgcctacaatctctagcttctttccgcctggataccaagtctccttctgtcttgtgatggtcctcctgtttgctgtggacacaggactgtacttttccgtgaaaacgaacatccgcagctccacacgcgattggaaagatcacaagtttaaatggcgcaaagatccccaggacaag

SEQ ID NO: 4874 - DNA, 1518 bp, Artificial Sequence; identical to SEQ ID NO: 4873
  Synthetic Polynucleotide

SEQ ID NO: 4875 - DNA, 1518 bp, Artificial Sequence
  Synthetic Polynucleotide
atggccttaccagtgaccgccttgctcctgccgctggccttgctgctccacgccgccaggccggacatcgtgatgacccagagccccgatagcctggccgtgtctctgggagagagagccaccatcaactgccgggccagcaagagcgtgtccaccagcggctacagcttcatgcactggtatcagcagaagcccggccagccccccaagctgctgatctacctggcctccaacctggaaagcggcgtgcccgatagattcagcggcagcggctctggcaccgacttcaccctgaccatcagttctcttcaggccgaggacgtggccgtgtactactgccagcacagcagagaggtgccctggacattcggccagggcacaaaggtggaaatcaagcggggcggaggcggaagtggaggcggaggatctggcggcggaggctctcaggtgcagctggtgcagtctggggccgaagtgaagaaacctggggccagcgtgaaggtgtcctgcaaggccagcggatacacctttaccaactacggcatgaactgggtgcgccaggcccctggacagggcctggaatggatgggctggatcaacacctacaccggcgagcccacatacgccgacgccttcaagggcagattcgccttcagcctggacaccagcacctccaccgcctacctccagatcaacagcctgcggagcgacgacaccgccgtgtattattgcgccagagattacggcgactacgggatggactattggggccagggaaccaccgtgaccgtgtcctctacgcgtggaatgaggactgaggatcttcccaaagctgtcgtctttctcgaaccccaatggtatcgggtgctcgaaaaagactctgtgacactgaaatgccaaggggcctactctcccgaggacaactccacacagtggtttcataatgagtccctcatcagctctcaggccagctcttatttcattgatgccgctacagtggacgactccggcgagtatcggtgtcagaccaatctgtctacactgtctgaccccgtgcagcttgaggtccacattggatggttgctcttgcaagccccacgctgggttttcaaagaggaagatccaatccatctgcggtgccacagctggaaaaacaccgctctccacaaagtcacatacctgcaaaatggcaaaggacgcaaatacttccatcacaattccgatttttacattccgaaggctaccctgaaagacagcggcagctatttctgccggggactcgtcggctccaagaatgtgtcctccgaaaccgtgaatatcacgattacccaaggactggctgtgcctacaatctctagcttctttccgcctggataccaagtctccttctgtcttgtgatggtcctcctgtttgctgtggacacaggactgtacttttccgtgaaaacgaacatccgcagctccacacgcgattggaaagatcacaagtttaaatggcgcaaagatccccaggacaag

SEQ ID NO: 4876 - DNA, 1506 bp, Artificial Sequence
  Synthetic Polynucleotide
atggccttaccagtgaccgccttgctcctgccgctggccttgctgctccacgccgccaggccggacatcgtgatgacccagacccccctgaccctgagcgtgacaatcggacagcctgccagcatctcctgcaagagcagccagagcctgctggacagcgacggcaagacctacctgaactggctgctgcagaggccaggccagagccccgagagactgatctacctggtgtccaagctggactccggcgtgcccgatagattcacaggcagcggctccggcaccgacttcaccctgaagatcagccgggtggaagccgaggacctgggcgtgtactgttgttggcagggcacccacttcccttacaccttcggcggagggaccaaggtggaaatcaagggcggcggaggcggaagtggaggcggaggatctggcggcggaggctctcaggtgcaactgcagcagcctggcgctgaacttgtgcggccaggcgcctctgtgaagctgagctgtaaagccagcggctacaccttcaccagctactggatgaactgggtcaagcagcgcccaggccagggcctggaatggatcggaatgatcgaccccagcgacagcgagacacactacaaccacatcttcaaggacaaggccaccctgaccgtggacaagtccagcagcacagcctacctgcaactgtccagcctgaccagcgaggacagcgccgtgtactactgcgcccggaacctgtatctgtggggccagggaacaagcgtgaccgtgtctagcacgcgtggaatgaggactgaggatcttcccaaagctgtcgtctttctcgaaccccaatggtatcgggtgctcgaaaaagactctgtgacactgaaatgccaaggggcctactctcccgaggacaactccacacagtggtttcataatgagtccctcatcagctctcaggccagctcttatttcattgatgccgctacagtggacgactccggcgagtatcggtgtcagaccaatctgtctacactgtctgaccccgtgcagcttgaggtccacattggatggttgctcttgcaagccccacgctgggttttcaaagaggaagatccaatccatctgcggtgccacagctggaaaaacaccgctctccacaaagtcacatacctgcaaaatggcaaaggacgcaaatacttccatcacaattccgatttttacattccgaaggctaccctgaaagacagcggcagctatttctgccggggactcgtcggctccaagaatgtgtcctccgaaaccgtgaatatcacgattacccaaggactggctgtgcctacaatctctagcttctttccgcctggataccaagtctccttctgtcttgtgatggtcctcctgtttgctgtggacacaggactgtacttttccgtgaaaacgaacatccgcagctccacacgcgattggaaagatcacaagtttaaatggcgcaaagatccccaggacaag

SEQ ID NO: 4877 - DNA, 1515 bp, Artificial Sequence
  Synthetic Polynucleotide
atggccttaccagtgaccgccttgctcctgccgctggccttgctgctccacgccgccaggccggacatccagttgacccagtcccccagctcactcagcgccagtgtgggggaccgggtgaccattacctgtaaagccagtcagagtgtggactatgagggggatagcttcctgaattggtatcagcagaagcctggcaaagccccaaagctgctgatctacgctgcatctaatctggagtcaggcgtgccttctaggttctccggtagtgggtctgggaccgatttcacattgaccatttcatccctccaacccgaggatttcgctacatattactgtcagcagtccaatgaggaccctctcacctttggccagggcaccaaagttgaaattaagagaggcggaggcggaagtggaggcggaggatctggcggcggaggctctgaagtccaacttgtggagtctggagggggcctggtgcagcccggcggctctctcagactgtcttgtgcggcaagcggctacaccttcagctcttactggatagaatgggtgaggcaggcacctggaaagggactggagtggattggagagattctgccaggagggggagatacaaattacaatgaaatcttcaaggggcgggccaccttttcagcggataccagcaagaatacagcttacctgcagatgaatagcctccgggcagaagataccgctgtttattattgcacgagacgggtgccaataagactggactattgggggcaagggactcttgtcaccgtcagttcaacgcgtggaatgaggactgaggatcttcccaaagctgtcgtctttctcgaaccccaatggtatcgggtgctcgaaaaagactctgtgacactgaaatgccaaggggcctactctcccgaggacaactccacacagtggtttcataatgagtccctcatcagctctcaggccagctcttatttcattgatgccgctacagtggacgactccggcgagtatcggtgtcagaccaatctgtctacactgtctgaccccgtgcagcttgaggtccacattggatggttgctcttgcaagccccacgctgggttttcaaagaggaagatccaatccatctgcggtgccacagctggaaaaacaccgctctccacaaagtcacatacctgcaaaatggcaaaggacgcaaatacttccatcacaattccgatttttacattccgaaggctaccctgaaagacagcggcagctatttctgccggggactcgtcggctccaagaatgtgtcctccgaaaccgtgaatatcacgattacccaaggactggctgtgcctacaatctctagcttctttccgcctggataccaagtctccttctgtcttgtgatggtcctcctgtttgctgtggacacaggactgtacttttccgtgaaaacgaacatccgcagctccacacgcgattggaaagatcacaagtttaaatggcgcaaagatccccaggacaag

SEQ ID NO: 4878 - DNA, 1539 bp, Artificial Sequence
  Synthetic Polynucleotide
atggccttaccagtgaccgccttgctcctgccgctggccttgctgctccacgccgccaggccggacatcgtgatgagccagagccctagcagcctggccgtgtccgtgggcgagaaagtgaccatgagctgcaagagcagccagtccctgctgcacagcagcaaccagaagaactacctggcctggtatcagcagaagcccggccagtcccccaaggtgctgatctactgggccagcaccagagaaagcggcgtgcccgatagattcaccggcagcggctctggcaccgacttcaccctgaccatcaccagcgtgaagtccgaggacctggctgtgtactactgccagcagtattacagctacccctggaccttcggcggaggcacccggctggaaatcaaaagaggcggaggcggaagtggaggcggaggatctggcggcggaggctctgaagtgcaactccagcagagcgtggccgagcttgtgaagcctggcgcttccgtgaagatgtcctgcaaggtgtccggctacaccctgacagaccacaccatccactggatgaagcagcggcctgagcagggcctggaatggatcggctacatctaccccagggacggcatcaccggctacaacgagaagttcaagggcaaggccacactgaccgccgacaccagcagcagcacagcctacatgcaactgaacagcctgaccagcgaggacagcgccgtgtacttctgtgccagatggggctacagctacagaaactacgcctactactacgactactggggccagggcacaaccctgaccgtgtctagtacgcgtggaatgaggactgaggatcttcccaaagctgtcgtctttctcgaaccccaatggtatcgggtgctcgaaaaagactctgtgacactgaaatgccaaggggcctactctcccgaggacaactccacacagtggtttcataatgagtccctcatcagctctcaggccagctcttatttcattgatgccgctacagtggacgactccggcgagtatcggtgtcagaccaatctgtctacactgtctgaccccgtgcagcttgaggtccacattggatggttgctcttgcaagccccacgctgggttttcaaagaggaagatccaatccatctgcggtgccacagctggaaaaacaccgctctccacaaagtcacatacctgcaaaatggcaaaggacgcaaatacttccatcacaattccgatttttacattccgaaggctaccctgaaagacagcggcagctatttctgccggggactcgtcggctccaagaatgtgtcctccgaaaccgtgaatatcacgattacccaaggactggctgtgcctacaatctctagcttctttccgcctggataccaagtctccttctgtcttgtgatggtcctcctgtttgctgtggacacaggactgtacttttccgtgaaaacgaacatccgcagctccacacgcgattggaaagatcacaagtttaaatggcgcaaagatccccaggacaag

SEQ ID NO: 4879 - DNA, 1530 bp, Artificial Sequence
  Synthetic Polynucleotide
atggccttaccagtgaccgccttgctcctgccgctggccttgctgctccacgccgccaggccggagatcgtgctgacacagagccctggcaccctgagcctgtctccaggcgaaagagccacactgagctgtcgggccagccagagcgtgtccagctcttacctggcctggtatcagcagaagcccggccaggctccccggctgctgatctacggaacaagcagcagagccaccggcatccccgacagattttctggcagcggctccggcaccgacttcaccctgacaatcagcagactggaacccgaggacttcgccgtgtactactgccagcagtacggcagcagccccttcacctttggcggaggcaccaaggtggaaatcaagagaggcggaggcggaagtggaggcggaggatctggcggcggaggctctcaggtgcaactccaggaatctggccccggactggctaagcccagcgagacactgagcctgacctgtaccgtgtccggcgacagcatcaccagctactactggtcctggatcagacagccccctggcaagggcctggaatggatcggctacatctactacagcggcagcaccaactacaaccccagcctgaagtccagagtgaccatcagcgtggacaccagcaagaaccagttctccctgaagctgagcagcgtgacagccgccgacaccgccgtgtattattgcgccagagatcagcggagaatcgccgctgccggcacccacttttacggcatggatgtgtggggccagggcaccaccgtgaccgtgtcatctacgcgtggaatgaggactgaggatcttcccaaagctgtcgtctttctcgaaccccaatggtatcgggtgctcgaaaaagactctgtgacactgaaatgccaaggggcctactctcccgaggacaactccacacagtggtttcataatgagtccctcatcagctctcaggccagctcttatttcattgatgccgctacagtggacgactccggcgagtatcggtgtcagaccaatctgtctacactgtctgaccccgtgcagcttgaggtccacattggatggttgctcttgcaagccccacgctgggttttcaaagaggaagatccaatccatctgcggtgccacagctggaaaaacaccgctctccacaaagtcacatacctgcaaaatggcaaaggacgcaaatacttccatcacaattccgatttttacattccgaaggctaccctgaaagacagcggcagctatttctgccggggactcgtcggctccaagaatgtgtcctccgaaaccgtgaatatcacgattacccaaggactggctgtgcctacaatctctagcttctttccgcctggataccaagtctccttctgtcttgtgatggtcctcctgtttgctgtggacacaggactgtacttttccgtgaaaacgaacatccgcagctccacacgcgattggaaagatcacaagtttaaatggcgcaaagatccccaggacaag

SEQ ID NO: 4880 - DNA, 1500 bp, Artificial Sequence
  Synthetic Polynucleotide
atggccttaccagtgaccgccttgctcctgccgctggccttgctgctccacgccgccaggccggacatccagatgacccagagccccagcagcctgtctgccagcgtgggcgacagagtgaccatcacctgtagagccagccagagcatcagcctgtggctgaactggtatcagcagaagcccggcaaggcccccaagctgctgatctacgccgccagcacactccagagcggcgtgccaagcagattttccggcagcggctccggcaccgacttcaccctgacaatcagctccctccagcccgaggacttcgccacctactactgccagcagtactacaccagcccctacaccttcggccagggcaccaaggtggaaatcaagagaggcggaggcggaagtggaggcggaggatctggcggcggaggctctcaggtgcaactgctggaatctggcggcggactggtgcagcctggcggatctctgagactgagctgtgccgccagcggcttcaccttcagcagctacgccatgagctgggtgcgccaggcccctggaaaaggactggaatgggtgtccgtgatccggtccagcggcagcagcacctattacgccgatagcgtgaagggccggttcaccatcagccgggacaacagcaagaacaccctgtacctccagatgaacagcctgcgggccgaggacaccgccgtgtactattgtgctaggggaggcggctacttcgactactggggccagggaacactcgtgaccgtgtcctctacgcgtggaatgaggactgaggatcttcccaaagctgtcgtctttctcgaaccccaatggtatcgggtgctcgaaaaagactctgtgacactgaaatgccaaggggcctactctcccgaggacaactccacacagtggtttcataatgagtccctcatcagctctcaggccagctcttatttcattgatgccgctacagtggacgactccggcgagtatcggtgtcagaccaatctgtctacactgtctgaccccgtgcagcttgaggtccacattggatggttgctcttgcaagccccacgctgggttttcaaagaggaagatccaatccatctgcggtgccacagctggaaaaacaccgctctccacaaagtcacatacctgcaaaatggcaaaggacgcaaatacttccatcacaattccgatttttacattccgaaggctaccctgaaagacagcggcagctatttctgccggggactcgtcggctccaagaatgtgtcctccgaaaccgtgaatatcacgattacccaaggactggctgtgcctacaatctctagcttctttccgcctggataccaagtctccttctgtcttgtgatggtcctcctgtttgctgtggacacaggactgtacttttccgtgaaaacgaacatccgcagctccacacgcgattggaaagatcacaagtttaaatggcgcaaagatccccaggacaag

SEQ ID NO: 4881 - DNA, 1509 bp, Artificial Sequence
  Synthetic Polynucleotide
atggccttaccagtgaccgccttgctcctgccgctggccttgctgctccacgccgccaggccggacatccagatgacccagagccccagcagcctgtctgccagcgtgggcgacagagtgaccatcacctgtagagccagccagagcatcagcagctacctgaactggtatcagcagaagcccggcaaggcccccaaactgctgatctacgccgtgtccacactccagagcggcgtgcccagcagattttctggcagcggctccggcaccgacttcaccctgacaatcagctccctccagcccgaggacttcgccacctactactgtcagcagagcggcaccttccctcccaccacatttggacagggcaccaaggtggaaatcaagagaggcggaggcggaagtggaggcggaggatctggcggcggaggctctcaggtgcaactgctggaatctggcggcggactggtgcagcctggcggatctctgagactgagctgtgccgccagcggcttcaccttcagcagccacggaatgcactgggtgcgccaggcccctggaaagggactggaatgggtgtccgtgatctccggcagcggcagcaataccggctacgccgatagcgtgaagggccggttcaccatcagccgggacaacagcaagaacaccctgtacctccagatgaacagcctgcgggccgaggacaccgccgtgtactattgtgccagacagtggggcagctacgccttcgattcttggggccagggcaccctcgtgaccgtgtcatctacgcgtggaatgaggactgaggatcttcccaaagctgtcgtctttctcgaaccccaatggtatcgggtgctcgaaaaagactctgtgacactgaaatgccaaggggcctactctcccgaggacaactccacacagtggtttcataatgagtccctcatcagctctcaggccagctcttatttcattgatgccgctacagtggacgactccggcgagtatcggtgtcagaccaatctgtctacactgtctgaccccgtgcagcttgaggtccacattggatggttgctcttgcaagccccacgctgggttttcaaagaggaagatccaatccatctgcggtgccacagctggaaaaacaccgctctccacaaagtcacatacctgcaaaatggcaaaggacgcaaatacttccatcacaattccgatttttacattccgaaggctaccctgaaagacagcggcagctatttctgccggggactcgtcggctccaagaatgtgtcctccgaaaccgtgaatatcacgattacccaaggactggctgtgcctacaatctctagcttctttccgcctggataccaagtctccttctgtcttgtgatggtcctcctgtttgctgtggacacaggactgtacttttccgtgaaaacgaacatccgcagctccacacgcgattggaaagatcacaagtttaaatggcgcaaagatccccaggacaag

SEQ ID NO: 4882 - DNA, 1485 bp, Artificial Sequence
  Synthetic Polynucleotide
atggccttaccagtgaccgccttgctcctgccgctggccttgctgctccacgccgccaggccgatgacccagagccccaagttcctgctggtgtctgccggcgacagagtgaccctgacatgcaaggccagccagagcgtgaacaacgacgtgtactggtatcagcaggaacccggccagtcccccaagctgctgatctactgggccagcaccagagaaagcggcgtgcccgatagattcaccggcagcggctctggcaccgacttcaccctgacaatcagcagcgtgcaggccgaggacctggccgtgtactactgcaagcagagctacaacctgtacaccttcggcggaggcaccaagctggaaatcaagagaggcggcggaggatctggcggaggcggatctgggggcggaggctctgaatctggaagaggactggtgcagcctggcggcagcagaaagctgtcttgtgccgccagcggcttcaccttcagcaccagcggaatgcactgggtgcgccaggcccctgagaagggactggaatgggtggcctacatcagctccggcagcaccaccatctaccacgccgataccgtgaagggccggttcaccatcagccgggacaaccccaagaataccctgttcctccagatgaccagcctgcggagcgaggacaccgccatgtactattgctgcgccagaagcggccagttcggcaactacttcgactactggggccagggcaccaccctgaccgtgtcatctacgcgtggaatgaggactgaggatcttcccaaagctgtcgtctttctcgaaccccaatggtatcgggtgctcgaaaaagactctgtgacactgaaatgccaaggggcctactctcccgaggacaactccacacagtggtttcataatgagtccctcatcagctctcaggccagctcttatttcattgatgccgctacagtggacgactccggcgagtatcggtgtcagaccaatctgtctacactgtctgaccccgtgcagcttgaggtccacattggatggttgctcttgcaagccccacgctgggttttcaaagaggaagatccaatccatctgcggtgccacagctggaaaaacaccgctctccacaaagtcacatacctgcaaaatggcaaaggacgcaaatacttccatcacaattccgatttttacattccgaaggctaccctgaaagacagcggcagctatttctgccggggactcgtcggctccaagaatgtgtcctccgaaaccgtgaatatcacgattacccaaggactggctgtgcctacaatctctagcttctttccgcctggataccaagtctccttctgtcttgtgatggtcctcctgtttgctgtggacacaggactgtacttttccgtgaaaacgaacatccgcagctccacacgcgattggaaagatcacaagtttaaatggcgcaaagatccccaggacaag

SEQ ID NO: 4883 - DNA, 1500 bp, Artificial Sequence
  Synthetic Polynucleotide
atggccttaccagtgaccgccttgctcctgccgctggccttgctgctccacgccgccaggccgcagagcccatctagcctggctgtgtctgccggcgagaaagtgaccatgagctgcaagagcagccagagcctgctgaacagccggacccggaagaactacctggcctggtatcagcagaagcccggccagagccccaagctgctgatctactgggccagcaccagagaaagcggcgtgcccgatagattcaccggctctggcagcggcaccgacttcaccctgacaatcagcagcgtgcaggccgaggacctggccgtgtactactgcaagcagagcaacctgtacaccttcggcggaggcaccaagctggaaatcaagggcggaggcggaagtggaggcggaggatctggcggcggaggctctcaggtgcagctggaagagtctggacccgagcttgtgaagcctggggccagcgtgaagctgtcctgtaaagccagcggctacaccttcaccgagtacatcatccactgggtcaagcagcggagcggccagggcctggaatggatcggctggttttaccctggctccggcagcatcaagtacaacgagaagttcaaggacaaggccaccctgaccgccgacaagtccagcagcaccgtgtacatggaactgagcggcctgaccagcgaggacagcgccgtgtatttctgcgccagacacgacggctacagctacttcgactattggggccagggcaccacactgaccgtgtcctctacgcgtggaatgaggactgaggatcttcccaaagctgtcgtctttctcgaaccccaatggtatcgggtgctcgaaaaagactctgtgacactgaaatgccaaggggcctactctcccgaggacaactccacacagtggtttcataatgagtccctcatcagctctcaggccagctcttatttcattgatgccgctacagtggacgactccggcgagtatcggtgtcagaccaatctgtctacactgtctgaccccgtgcagcttgaggtccacattggatggttgctcttgcaagccccacgctgggttttcaaagaggaagatccaatccatctgcggtgccacagctggaaaaacaccgctctccacaaagtcacatacctgcaaaatggcaaaggacgcaaatacttccatcacaattccgatttttacattccgaaggctaccctgaaagacagcggcagctatttctgccggggactcgtcggctccaagaatgtgtcctccgaaaccgtgaatatcacgattacccaaggactggctgtgcctacaatctctagcttctttccgcctggataccaagtctccttctgtcttgtgatggtcctcctgtttgctgtggacacaggactgtacttttccgtgaaaacgaacatccgcagctccacacgcgattggaaagatcacaagtttaaatggcgcaaagatccccaggacaag

SEQ ID NO: 4884 - DNA, 1509 bp, Artificial Sequence
  Synthetic Polynucleotide
atggccttaccagtgaccgccttgctcctgccgctggccttgctgctccacgccgccaggccggacatccagatgacccagagccccagcagcctgtctgcctctctgggcgagagagtgtccctgacctgtcgggccacacaggaactgagcggctacctgtcttggctgcagcagaagcccgacggcaccatcaagcggctgatctacgccgccagcaccctggatagcggcgtgcccaagagattcagcggcaacagaagcggcagcgactacagcctgaccatcagctccctggaaagcgaggacttcgccgactactactgcctgcagtacgccatctacccctacaccttcggcggaggcaccaagctggaaatcaagggcggaggcggaagtggaggcggaggatctggcggcggaggctctgaggtgcaactgcagcagtctggccccgagcttgtgaagcctggcgcctccgtgaagatgagctgcaaggccagcggctacacctttaccagctacttcatccactgggtcaagcagaaacccggccagggcctggaatggatcggcttcatcaacccttacaacgacggcagcaagtacaacgagaagttcaagggcaaggccaccctgaccagcgacaagagcagcagcaccgcctacatggaactgtccagcctgacatccgaggacagcgccgtgtactactgcaccagggacgacggctactacggctacgccatggactactggggccagggaacaagcgtcaccgtgtcctctacgcgtggaatgaggactgaggatcttcccaaagctgtcgtctttctcgaaccccaatggtatcgggtgctcgaaaaagactctgtgacactgaaatgccaaggggcctactctcccgaggacaactccacacagtggtttcataatgagtccctcatcagctctcaggccagctcttatttcattgatgccgctacagtggacgactccggcgagtatcggtgtcagaccaatctgtctacactgtctgaccccgtgcagcttgaggtccacattggatggttgctcttgcaagccccacgctgggttttcaaagaggaagatccaatccatctgcggtgccacagctggaaaaacaccgctctccacaaagtcacatacctgcaaaatggcaaaggacgcaaatacttccatcacaattccgatttttacattccgaaggctaccctgaaagacagcggcagctatttctgccggggactcgtcggctccaagaatgtgtcctccgaaaccgtgaatatcacgattacccaaggactggctgtgcctacaatctctagcttctttccgcctggataccaagtctccttctgtcttgtgatggtcctcctgtttgctgtggacacaggactgtacttttccgtgaaaacgaacatccgcagctccacacgcgattggaaagatcacaagtttaaatggcgcaaagatccccaggacaag

SEQ ID NO: 4885 - DNA, 1524 bp, Artificial Sequence
  Synthetic Polynucleotide
atggccttaccagtgaccgccttgctcctgccgctggccttgctgctccacgccgccaggccggacaccatcgtgctgacacagagccctgcttccctggccgtgtccctgggacagagagccaccatctcttgcagagccagcgagagcgtggacagctacggcaacagcttcatgcactggtatcagcagaagcccggccagccccccaagctgctgatctacctggcctccaacctggaaagcggcgtgcccgccagattttctggcagcggcagcagaaccgacttcaccctgaccatcgaccccgtggaagccgatgatgccgccacctactactgccagcagaacaactacgacccctggaccttcggcggaggcaccaagctggaaatcaagggcggaggcggaagtggaggcggaggatctggcggcggaggctctgaagtgcaactccagcagagcggccctgagcttgtgaagcctggcgcttccgtgaagatgagctgcaaggccagcggctacaccttcaccagctacgtgatgcactgggtcaagcagaaacctggacagggcctggaatggatcggctacatcaacccctacaacgacggcaccaagtacaacgagaagttcaagggcaaggccaccctgacaagcgacaccagcagcagcaccgcctacatggaactgaacagcctgaccagcgaggacagcgccgtgtacttctgcgccagacccatctacttcgacaacgactacttcgattactggggccagggcaccaccctgaaggtgtcctctacgcgtggaatgaggactgaggatcttcccaaagctgtcgtctttctcgaaccccaatggtatcgggtgctcgaaaaagactctgtgacactgaaatgccaaggggcctactctcccgaggacaactccacacagtggtttcataatgagtccctcatcagctctcaggccagctcttatttcattgatgccgctacagtggacgactccggcgagtatcggtgtcagaccaatctgtctacactgtctgaccccgtgcagcttgaggtccacattggatggttgctcttgcaagccccacgctgggttttcaaagaggaagatccaatccatctgcggtgccacagctggaaaaacaccgctctccacaaagtcacatacctgcaaaatggcaaaggacgcaaatacttccatcacaattccgatttttacattccgaaggctaccctgaaagacagcggcagctatttctgccggggactcgtcggctccaagaatgtgtcctccgaaaccgtgaatatcacgattacccaaggactggctgtgcctacaatctctagcttctttccgcctggataccaagtctccttctgtcttgtgatggtcctcctgtttgctgtggacacaggactgtacttttccgtgaaaacgaacatccgcagctccacacgcgattggaaagatcacaagtttaaatggcgcaaagatccccaggacaag

SEQ ID NO: 4886 - DNA, 1506 bp, Artificial Sequence
  Synthetic Polynucleotide
atggccttaccagtgaccgccttgctcctgccgctggccttgctgctccacgccgccaggccggacatccagatgacccagagccccagcagcctgtctgccagcgtgggcgacagagtgaccatcacatgcaaggccagccaggacgtgggaatcgccgtggcctggtatcagcagaaacccggcaaggtgcccaagctgctgatctactgggccagcaccagacacaccggcgtgcccgatagattttccggcagcggctccggcaccgacttcaccctgacaatcagctccctccagcccgaggacgtggcaacctactactgccagcagtacagcagctacccctacaccttcggccagggcaccaaggtggaaatcaagggcggaggcggaagtggaggcggaggatctggcggcggaggctctgaagtgcaactggtggaatcaggcggcggactggtgcagcctggcggatctctgagactgagctgtgccgccagcggcttcgacttcagccggtactggatgagctgggtgcgccaggcccctggcaaaggactggaatggatcggcgagatcaaccccgacagcagcaccatcaactacgcccccagcctgaaggacaagttcatcatcagccgggacaacgccaagaacagcctgtacctccagatgaactccctgcgggccgaggacaccgccgtgtactattgcgccagacccgacggcaactactggtacttcgacgtgtggggccagggaaccctcgtgaccgtgtcatctacgcgtggaatgaggactgaggatcttcccaaagctgtcgtctttctcgaaccccaatggtatcgggtgctcgaaaaagactctgtgacactgaaatgccaaggggcctactctcccgaggacaactccacacagtggtttcataatgagtccctcatcagctctcaggccagctcttatttcattgatgccgctacagtggacgactccggcgagtatcggtgtcagaccaatctgtctacactgtctgaccccgtgcagcttgaggtccacattggatggttgctcttgcaagccccacgctgggttttcaaagaggaagatccaatccatctgcggtgccacagctggaaaaacaccgctctccacaaagtcacatacctgcaaaatggcaaaggacgcaaatacttccatcacaattccgatttttacattccgaaggctaccctgaaagacagcggcagctatttctgccggggactcgtcggctccaagaatgtgtcctccgaaaccgtgaatatcacgattacccaaggactggctgtgcctacaatctctagcttctttccgcctggataccaagtctccttctgtcttgtgatggtcctcctgtttgctgtggacacaggactgtacttttccgtgaaaacgaacatccgcagctccacacgcgattggaaagatcacaagtttaaatggcgcaaagatccccaggacaag

SEQ ID NO: 4887 - DNA, 1509 bp, Artificial Sequence
  Synthetic Polynucleotide
atggccttaccagtgaccgccttgctcctgccgctggccttgctgctccacgccgccaggccggacatcgtgatgacccagagccagaagagcatgagcaccagcgtgggcgacagagtgagcatcacctgcaaggccagccaggacgtgatcaccggcgtggcctggtaccagcagaagcccggccagagccccaagctgctgatctacagcgccagctacagatacaccggcgtgcccgacagattcaccggcagcggcagcggcaccgacttcaccttcaccatcagcaacgtgcaggccgaggacctggccgtgtactactgccagcagcactacagcacccccctgaccttcggcgccggcaccaagctggagctgaagggcggaggcggaagtggaggcggaggatctggcggcggaggctctcaggtgcagctgcagcagcccggcgccgagctggtgagacccggcgccagcgtgaagctgagctgcaaggccagcggctacagcttcaccacctactggatgaactgggtgaagcagagacccggccagggcctggagtggatcggcatgatccaccccagcgacagcgagaccagactgaaccagaagttcaaggacaaggccaccctgaccgtggacaagagcagcagcaccgcctacatgcagctgagcagccccaccagcgaggacagcgccgtgtactactgcgccagaagcaccatgatcgccaccagagccatggactactggggccagggcaccagcgtgaccgtgagcagcacgcgtggaatgaggactgaggatcttcccaaagctgtcgtctttctcgaaccccaatggtatcgggtgctcgaaaaagactctgtgacactgaaatgccaaggggcctactctcccgaggacaactccacacagtggtttcataatgagtccctcatcagctctcaggccagctcttatttcattgatgccgctacagtggacgactccggcgagtatcggtgtcagaccaatctgtctacactgtctgaccccgtgcagcttgaggtccacattggatggttgctcttgcaagccccacgctgggttttcaaagaggaagatccaatccatctgcggtgccacagctggaaaaacaccgctctccacaaagtcacatacctgcaaaatggcaaaggacgcaaatacttccatcacaattccgatttttacattccgaaggctaccctgaaagacagcggcagctatttctgccggggactcgtcggctccaagaatgtgtcctccgaaaccgtgaatatcacgattacccaaggactggctgtgcctacaatctctagcttctttccgcctggataccaagtctccttctgtcttgtgatggtcctcctgtttgctgtggacacaggactgtacttttccgtgaaaacgaacatccgcagctccacacgcgattggaaagatcacaagtttaaatggcgcaaagatccccaggacaag

SEQ ID NO: 4888 - DNA, 1527 bp, Artificial Sequence
  Synthetic Polynucleotide
atggccttaccagtgaccgccttgctcctgccgctggccttgctgctccacgccgccaggccgcagagcgtgctgacacagcctccatccgtgtctggcgctccaggccagagagtgaccatctcctgtaccggcagcggcagcaacatcggagccccctacgacgtgtcctggtatcagcaactgcctggcaccgcccccaagctgctgatctaccacaacaacaagcggcccagcggcgtgcccgatagattcagcggctctaagagcggcaccagcgccagcctggctatcactggactccaggccgaggacgaggccgactactactgtgccacagtggaagccggcctgagcggctctgtgtttggcggcggaacaaagctgaccgtgctgggagctggcggaggcggaagtggaggcggaggatctggcggcggaggctctcaggtgcaactggtgcagagcggagccgaagtgaagaaacctggggccagcgtgaaggtgtcctgcaaggtgtccggctacaccctgaccgagctgagcattcactgggtgcgccaggcccctggcaagggactggaatggatgggcggcttcgaccccgaagagaacgagatcgtgtacgcccagcggttccagggcagagtgacaatgaccgaggacaccagcaccgacaccgcctacatggaactgagcagcctgcggagcgaggataccgccgtgtactactgcgccatcgtgggcagcttcagccctctgacactgggcctgtggggccagggaactatggtcaccgtgtccagcacgcgtggaatgaggactgaggatcttcccaaagctgtcgtctttctcgaaccccaatggtatcgggtgctcgaaaaagactctgtgacactgaaatgccaaggggcctactctcccgaggacaactccacacagtggtttcataatgagtccctcatcagctctcaggccagctcttatttcattgatgccgctacagtggacgactccggcgagtatcggtgtcagaccaatctgtctacactgtctgaccccgtgcagcttgaggtccacattggatggttgctcttgcaagccccacgctgggttttcaaagaggaagatccaatccatctgcggtgccacagctggaaaaacaccgctctccacaaagtcacatacctgcaaaatggcaaaggacgcaaatacttccatcacaattccgatttttacattccgaaggctaccctgaaagacagcggcagctatttctgccggggactcgtcggctccaagaatgtgtcctccgaaaccgtgaatatcacgattacccaaggactggctgtgcctacaatctctagcttctttccgcctggataccaagtctccttctgtcttgtgatggtcctcctgtttgctgtggacacaggactgtacttttccgtgaaaacgaacatccgcagctccacacgcgattggaaagatcacaagtttaaatggcgcaaagatccccaggacaag

SEQ ID NO: 4889 - DNA, 1527 bp, Artificial Sequence
  Synthetic Polynucleotide
atggccttaccagtgaccgccttgctcctgccgctggccttgctgctccacgccgccaggccgcagagcgtgctgacacagcctccatccgtgtctggcgctccaggccagagagtgaccatctcctgtaccggcagcggcagcaacatcggagccccctacgacgtgtcctggtatcagcaactgcctggcaccgcccccaagctgctgatctaccacaacaacaagcggcccagcggcgtgcccgatagattcagcggctctaagagcggcaccagcgccagcctggctatcactggactccaggccgaggacgaggccgactactactgccagagctacgacagcagcagcatcagcaccatcttcggcggaggcaccaagctgacagtgctgggagctggcggaggcggaagtggaggcggaggatctggcggcggaggctctcaggtgcaactggtgcagagcggagccgaagtgaagaaacctggggccagcgtgaaggtgtcctgcaaggtgtccggctacaccctgaccgagctgagcattcactgggtgcgccaggcccctggcaagggactggaatggatgggcggcttcgaccccgaagagaacgagatcgtgtacgcccagcggttccagggcagagtgacaatgaccgaggacaccagcaccgacaccgcctacatggaactgagcagcctgcggagcgaggataccgccgtgtactactgtgccatcgtgggcagcttcagcggaatcgcctacagaccttggggccagggcacaatggtcaccgtgtctagcacgcgtggaatgaggactgaggatcttcccaaagctgtcgtctttctcgaaccccaatggtatcgggtgctcgaaaaagactctgtgacactgaaatgccaaggggcctactctcccgaggacaactccacacagtggtttcataatgagtccctcatcagctctcaggccagctcttatttcattgatgccgctacagtggacgactccggcgagtatcggtgtcagaccaatctgtctacactgtctgaccccgtgcagcttgaggtccacattggatggttgctcttgcaagccccacgctgggttttcaaagaggaagatccaatccatctgcggtgccacagctggaaaaacaccgctctccacaaagtcacatacctgcaaaatggcaaaggacgcaaatacttccatcacaattccgatttttacattccgaaggctaccctgaaagacagcggcagctatttctgccggggactcgtcggctccaagaatgtgtcctccgaaaccgtgaatatcacgattacccaaggactggctgtgcctacaatctctagcttctttccgcctggataccaagtctccttctgtcttgtgatggtcctcctgtttgctgtggacacaggactgtacttttccgtgaaaacgaacatccgcagctccacacgcgattggaaagatcacaagtttaaatggcgcaaagatccccaggacaag

SEQ ID NO: 4890 - DNA, 1521 bp, Artificial Sequence
  Synthetic Polynucleotide
atggccttaccagtgaccgccttgctcctgccgctggccttgctgctccacgccgccaggccggacatccagatgacccagagccccagcagcctgtctgccagcgtgggcgacagagtgaccatcacctgtagcgccagcagcagcgtgtcctacatgtactggtatcagcagaagcccggcaaggcccccaagctgctgatctacctgaccagcaatctggcctccggcgtgcccagcagattttctggcagcggctccggcaccgacttcaccctgacaatcagctccctccagcccgaggacttcgccacctactactgtcagcagtggcggagcaaccccttcaccttcggccagggcaccaagctggaaatcaagagaggcggaggcggaagtggaggcggaggatctggcggcggaggctctcagatcaccctgaaagagtccggccccaccctcgtgaagcctacccagaccctgacactgacctgcaccttcagcggcttcagcctgagcacaagcggcatgggcgtgggctggatcagacagcctcctggaaaggccctggaatggctggcccacatttggtgggacgacgtgaagcggtacagccccagcctgaagtcccggctgaccattaccaaggacaccagcaagaaccaggtggtgctgaccatgacaaacatggaccccgtggacaccgccacatattactgcgcccggatcgtgtccttcgacaacgacgtggtgtccgctatggactactggggccagggaaccctcgtgaccgtgtctagtacgcgtggaatgaggactgaggatcttcccaaagctgtcgtctttctcgaaccccaatggtatcgggtgctcgaaaaagactctgtgacactgaaatgccaaggggcctactctcccgaggacaactccacacagtggtttcataatgagtccctcatcagctctcaggccagctcttatttcattgatgccgctacagtggacgactccggcgagtatcggtgtcagaccaatctgtctacactgtctgaccccgtgcagcttgaggtccacattggatggttgctcttgcaagccccacgctgggttttcaaagaggaagatccaatccatctgcggtgccacagctggaaaaacaccgctctccacaaagtcacatacctgcaaaatggcaaaggacgcaaatacttccatcacaattccgatttttacattccgaaggctaccctgaaagacagcggcagctatttctgccggggactcgtcggctccaagaatgtgtcctccgaaaccgtgaatatcacgattacccaaggactggctgtgcctacaatctctagcttctttccgcctggataccaagtctccttctgtcttgtgatggtcctcctgtttgctgtggacacaggactgtacttttccgtgaaaacgaacatccgcagctccacacgcgattggaaagatcacaagtttaaatggcgcaaagatccccaggacaag

SEQ ID NO: 4891 - DNA, 1506 bp, Artificial Sequence
  Synthetic Polynucleotide
atggccttaccagtgaccgccttgctcctgccgctggccttgctgctccacgccgccaggccggagatcgtgatgacccagagccctgccaccctgtccgtgtctccaggcgaaagagccaccctgagctgcaaggcttcccagagcgtgtccaacgacgtcgtgtggtatcagcagaagcccggccaggcccccagactgctgatctactacgccagcaacagatacaccggcatccccgccagattcagcggctctggcagcggcaccgagttcaccctgacaatcagcagcctccagagcgaggacttcgccgtgtactactgtcagcaggactacaccagcccctggaccttcggccagggcaccaagctggaaatcaagagaggcggaggcggaagtggaggcggaggatctggcggcggaggctctcaggtgcaactggtgcagagcggagccgaagtgaagaaacctggggccagcgtgaaggtgtcctgcaaggccagcggctacacctttaccaactacggcatgaactgggtgcgccaggctcctggacagggcctggaatggatgggctggatcaacacctacaccggcgagcccacctacgccgacgacttcaagggcagagtgaccatgaccaccgacaccagcacctccaccgcctacatggaactgcggagcctgagaagcgacgacaccgccgtgtattattgcgcccggatcggcgacagcagccccagcgattattggggccagggaaccctcgtgaccgtgtcctctacgcgtggaatgaggactgaggatcttcccaaagctgtcgtctttctcgaaccccaatggtatcgggtgctcgaaaaagactctgtgacactgaaatgccaaggggcctactctcccgaggacaactccacacagtggtttcataatgagtccctcatcagctctcaggccagctcttatttcattgatgccgctacagtggacgactccggcgagtatcggtgtcagaccaatctgtctacactgtctgaccccgtgcagcttgaggtccacattggatggttgctcttgcaagccccacgctgggttttcaaagaggaagatccaatccatctgcggtgccacagctggaaaaacaccgctctccacaaagtcacatacctgcaaaatggcaaaggacgcaaatacttccatcacaattccgatttttacattccgaaggctaccctgaaagacagcggcagctatttctgccggggactcgtcggctccaagaatgtgtcctccgaaaccgtgaatatcacgattacccaaggactggctgtgcctacaatctctagcttctttccgcctggataccaagtctccttctgtcttgtgatggtcctcctgtttgctgtggacacaggactgtacttttccgtgaaaacgaacatccgcagctccacacgcgattggaaagatcacaagtttaaatggcgcaaagatccccaggacaag

SEQ ID NO: 4892 - DNA, 1506 bp, Artificial Sequence
  Synthetic Polynucleotide
atggccttaccagtgaccgccttgctcctgccgctggccttgctgctccacgccgccaggccggacatcctgctgacccagagccccgtgatcctgtccgtgtctcctggcgagagagtgtccttcagctgtcgggccagccagagcatcggcaccaacatccactggtatcagcagcggaccaacggcagccccagactgctgattaagtacgccagcgagtccatcagcggcatccccagcagattttccggcagcggctccggcaccgacttcaccctgagcatcaacagcgtggaaagcgaggacattgccgactactactgccagcagaacaacaactggcccaccaccttcggagccggcaccaagctggaactgaagggcggaggcggaagtggaggcggaggatctggcggcggaggctctcaggtgcagctgaagcagagcggacctggcctggtgcagcctagccagagcctgtccatcacctgtaccgtgtccggcttcagcctgaccaactacggcgtgcactgggtgcgccagagccctggaaaaggactggaatggctgggagtgatttggagcggcggcaacaccgactacaacacccccttcaccagcagactgtctatcaacaaggacaacagcaagagccaggtgttcttcaagatgaacagcctccagagcaacgacaccgccatctactactgtgctagagccctgacctactatgactacgagttcgcctactggggccagggcacactcgtgacagtgtctgctacgcgtggaatgaggactgaggatcttcccaaagctgtcgtctttctcgaaccccaatggtatcgggtgctcgaaaaagactctgtgacactgaaatgccaaggggcctactctcccgaggacaactccacacagtggtttcataatgagtccctcatcagctctcaggccagctcttatttcattgatgccgctacagtggacgactccggcgagtatcggtgtcagaccaatctgtctacactgtctgaccccgtgcagcttgaggtccacattggatggttgctcttgcaagccccacgctgggttttcaaagaggaagatccaatccatctgcggtgccacagctggaaaaacaccgctctccacaaagtcacatacctgcaaaatggcaaaggacgcaaatacttccatcacaattccgatttttacattccgaaggctaccctgaaagacagcggcagctatttctgccggggactcgtcggctccaagaatgtgtcctccgaaaccgtgaatatcacgattacccaaggactggctgtgcctacaatctctagcttctttccgcctggataccaagtctccttctgtcttgtgatggtcctcctgtttgctgtggacacaggactgtacttttccgtgaaaacgaacatccgcagctccacacgcgattggaaagatcacaagtttaaatggcgcaaagatccccaggacaag

SEQ ID NO: 4893 - DNA, 1506 bp, Artificial Sequence
  Synthetic Polynucleotide
atggccttaccagtgaccgccttgctcctgccgctggccttgctgctccacgccgccaggccggagatccagctggtgcagagcggagccgaagtgaagaagcctggcgagagcctgcggatcagctgcaagggcagcggcttcaacatcgaggactactacatccactgggtgcgccagatgcccggcaagggcctggaatggatgggcagaatcgaccccgagaacgacgagactaagtacggccccatcttccagggccacgtgaccatcagcgccgacaccagcatcaacaccgtgtacctccagtggtccagcctgaaggccagcgacaccgccatgtactactgcgcctttagaggcggcgtgtactggggccagggcaccacagtgacagtgtctagcggcggaggcggaagtggaggcggaggatctggcggcggaggctctgatgtcgtgatgacccagagccccgacagcctggctgtgtctctgggagagagagccaccatcaactgcaagtccagccagtccctgctggacagcgacggcaagacctacctgaactggctccagcagaagcccggccagccccccaagagactgatctccctggtgtccaagctggactccggcgtgcccgatagattttccggctctggcagcggcaccgacttcaccctgacaatcagctcccttcaggccgaggacgtggccgtgtactattgctggcagggcacacacttccccggcacctttggcggaggcaccaaggtggaaatcaagacgcgtggaatgaggactgaggatcttcccaaagctgtcgtctttctcgaaccccaatggtatcgggtgctcgaaaaagactctgtgacactgaaatgccaaggggcctactctcccgaggacaactccacacagtggtttcataatgagtccctcatcagctctcaggccagctcttatttcattgatgccgctacagtggacgactccggcgagtatcggtgtcagaccaatctgtctacactgtctgaccccgtgcagcttgaggtccacattggatggttgctcttgcaagccccacgctgggttttcaaagaggaagatccaatccatctgcggtgccacagctggaaaaacaccgctctccacaaagtcacatacctgcaaaatggcaaaggacgcaaatacttccatcacaattccgatttttacattccgaaggctaccctgaaagacagcggcagctatttctgccggggactcgtcggctccaagaatgtgtcctccgaaaccgtgaatatcacgattacccaaggactggctgtgcctacaatctctagcttctttccgcctggataccaagtctccttctgtcttgtgatggtcctcctgtttgctgtggacacaggactgtacttttccgtgaaaacgaacatccgcagctccacacgcgattggaaagatcacaagtttaaatggcgcaaagatccccaggacaag

SEQ ID NO: 4894 - DNA, 1530 bp, Artificial Sequence
  Synthetic Polynucleotide
atggccttaccagtgaccgccttgctcctgccgctggccttgctgctccacgccgccaggccggagctgcagatgacccagagccctagcagcctgtctgccagcgtgggcgacagagtgaccatcacctgtagagccagccagagcatcagcagctacctgaactggtatcagcagaagcccggccagccccccaaactgctgatctactgggccagcaccagagaaagcggcgtgcccgatagattcagcggcagcgagagcggcaccaactacaccctgaccatcagctccctgcagcccgaggacttcgccacctacttttgccagcagagcgacagcctgcccatcacctttggacagggcacccggctggacattcagggcggaggcggaagtggaggcggaggatctggcggcggaggctctgaggtgcaactgctggaatctgggggcggagtggtgcagcctggcagaagcctgagactgagctgtgccgccagcggcttcaccttcagctcctacggaatgcactgggtgcgccaggcccctggcaaaggactggaatgggtggccgtgatctcctacgacggcagcaacaagtactacgccgacagcgtgaagggccggttcaccatcagccgggacaacagcaagaacaccctgtacctgcagatgaacagcctgcgggccgaggacaccgccgtgtactactgcgccaaggatatgggctggggcagcggctggcggccttactactactacggcatggacgtgtggggccagggcaccaccgtgacagtgtcatctacgcgtggaatgaggactgaggatcttcccaaagctgtcgtctttctcgaaccccaatggtatcgggtgctcgaaaaagactctgtgacactgaaatgccaaggggcctactctcccgaggacaactccacacagtggtttcataatgagtccctcatcagctctcaggccagctcttatttcattgatgccgctacagtggacgactccggcgagtatcggtgtcagaccaatctgtctacactgtctgaccccgtgcagcttgaggtccacattggatggttgctcttgcaagccccacgctgggttttcaaagaggaagatccaatccatctgcggtgccacagctggaaaaacaccgctctccacaaagtcacatacctgcaaaatggcaaaggacgcaaatacttccatcacaattccgatttttacattccgaaggctaccctgaaagacagcggcagctatttctgccggggactcgtcggctccaagaatgtgtcctccgaaaccgtgaatatcacgattacccaaggactggctgtgcctacaatctctagcttctttccgcctggataccaagtctccttctgtcttgtgatggtcctcctgtttgctgtggacacaggactgtacttttccgtgaaaacgaacatccgcagctccacacgcgattggaaagatcacaagtttaaatggcgcaaagatccccaggacaag

SEQ ID NO: 4895 - DNA, 1527 bp, Artificial Sequence
  Synthetic Polynucleotide
atggccttaccagtgaccgccttgctcctgccgctggccttgctgctccacgccgccaggccggagcttgtgatgacccagagccccagcagcctgacagtgacagccggcgagaaagtgaccatgagctgcaagagcagccagagcctgctgaacagcggcaaccagaagaactacctgacctggtatcagcagaagcccggccagccccccaagctgctgatctactgggccagcaccagagaaagcggcgtgcccgatagattcaccggctctggcagcggcaccgacttcaccctgacaatcagcagcgtgcaggccgaggacctggccgtgtactactgccagaacgactacagctaccccctgaccttcggagccggcaccaagctggaaatcaagggcggaggcggaagtggaggcggaggatctggcggcggaggctctgaagtgcagctgctggaacagtctggcgccgaacttgtgcggcctggcaccagcgtgaagatcagctgtaaagccagcggctacgccttcaccaactactggctgggctgggtcaagcagaggcctggacacggcctggaatggatcggcgacatctttcccggctccggcaacatccactacaacgagaagttcaagggcaaggccaccctgaccgccgacaagtctagcagcaccgcctacatgcagctgtccagcctgacctttgaggacagcgccgtgtatttctgtgcccggctgcggaactgggacgagcccatggattattggggccagggcaccaccgtgaccgtgtctagtacgcgtggaatgaggactgaggatcttcccaaagctgtcgtctttctcgaaccccaatggtatcgggtgctcgaaaaagactctgtgacactgaaatgccaaggggcctactctcccgaggacaactccacacagtggtttcataatgagtccctcatcagctctcaggccagctcttatttcattgatgccgctacagtggacgactccggcgagtatcggtgtcagaccaatctgtctacactgtctgaccccgtgcagcttgaggtccacattggatggttgctcttgcaagccccacgctgggttttcaaagaggaagatccaatccatctgcggtgccacagctggaaaaacaccgctctccacaaagtcacatacctgcaaaatggcaaaggacgcaaatacttccatcacaattccgatttttacattccgaaggctaccctgaaagacagcggcagctatttctgccggggactcgtcggctccaagaatgtgtcctccgaaaccgtgaatatcacgattacccaaggactggctgtgcctacaatctctagcttctttccgcctggataccaagtctccttctgtcttgtgatggtcctcctgtttgctgtggacacaggactgtacttttccgtgaaaacgaacatccgcagctccacacgcgattggaaagatcacaagtttaaatggcgcaaagatccccaggacaag

SEQ ID NO: 4896 - DNA, 1521 bp, Artificial Sequence
  Synthetic Polynucleotide
atggccttaccagtgaccgccttgctcctgccgctggccttgctgctccacgccgccaggccggacatccaaatgacacagagtccttctagtttgagtgcgagcgtgggggacagggtgaccattacctgcagggccagccagagcataagctcataccttaattggtaccagcaaaaaccaggtaaggcccctaagctcctgatctacgcggcctcttcacttcaatctggggtcccttcccgcttcagtggctccggcagcggcaccgacttcacgctcactatatcaagtctgcagcctgaggatctcgccacctattactgtcaacaaagttattccacccctttcacctttggaccgggcacgaaagtggatattaagggcggaggcggaagtggaggcggaggatctggcggcggaggctctgtgcacgaggtccagcttgtgcagtccggggcagaggtcaagaagcctggttctagcgtaaaagtgagttgcaaagcctcaggtgggacattttcatcctacgcgatcagttgggttagacaggctcctggtcaagggctggaatggatgggcggaattattccaatcttcggaacagcgaattacgcgcagaagttccagggtagagtaaccatcactgctgacaagtccacctccaccgcatacatggaattgtctagtctccggagcgaggatacggcggtgtattattgtgctacgttcgccctgtttggcttccgcgaacaggctttcgacatctgggggcagggcacgacagtcacggttagtagtacgcgtggaatgaggactgaggatcttcccaaagctgtcgtctttctcgaaccccaatggtatcgggtgctcgaaaaagactctgtgacactgaaatgccaaggggcctactctcccgaggacaactccacacagtggtttcataatgagtccctcatcagctctcaggccagctcttatttcattgatgccgctacagtggacgactccggcgagtatcggtgtcagaccaatctgtctacactgtctgaccccgtgcagcttgaggtccacattggatggttgctcttgcaagccccacgctgggttttcaaagaggaagatccaatccatctgcggtgccacagctggaaaaacaccgctctccacaaagtcacatacctgcaaaatggcaaaggacgcaaatacttccatcacaattccgatttttacattccgaaggctaccctgaaagacagcggcagctatttctgccggggactcgtcggctccaagaatgtgtcctccgaaaccgtgaatatcacgattacccaaggactggctgtgcctacaatctctagcttctttccgcctggataccaagtctccttctgtcttgtgatggtcctcctgtttgctgtggacacaggactgtacttttccgtgaaaacgaacatccgcagctccacacgcgattggaaagatcacaagtttaaatggcgcaaagatccccaggacaag

SEQ ID NO: 4897 - DNA, 1503 bp, Artificial Sequence
  Synthetic Polynucleotide
atggccttaccagtgaccgccttgctcctgccgctggccttgctgctccacgccgccaggccgtacatccacgtgacacagagccctagcagcctgtccgtgtccatcggcgatagagtgaccatcaactgccagacctctcaaggcgtgggcagcgacctgcactggtatcagcacaaacctggcagagcccctaagctgctgatccaccatgccagctctgtggaagatggcgtgcccagcagattttccggcaccggatttcacaccagcttcaacctgacaatcaacgacctccaggccgacgacatcggcacctactactgtcaagtgctccagagcttcggcagaggcagcagactggatacaaaaggcggaggcggaagtggaggcggaggatctggcggcggaggctctagggcacacctggtgcagtctggcaccgccatgaagaaacctggcgcttccgtcagagtgtcctgtcagacaagcggctacaccttcacagcccacatcctgttctggttcagacaggccccaggcagaggactggaatgggtcggatggatcaagccccagtacggggccgtgaatttcggcggaggcttcagagacagagtgaccctgaccagggacgtgtaccgggaaatcgcctacatggacatccggggcctgaagcctgatgacaccgccgtgtactactgcgccagggatagaagctacggcgacagctcttgggctctcgatgcttggggacagggcacaacagtggtggtgtctgctacgcgtggaatgaggactgaggatcttcccaaagctgtcgtctttctcgaaccccaatggtatcgggtgctcgaaaaagactctgtgacactgaaatgccaaggggcctactctcccgaggacaactccacacagtggtttcataatgagtccctcatcagctctcaggccagctcttatttcattgatgccgctacagtggacgactccggcgagtatcggtgtcagaccaatctgtctacactgtctgaccccgtgcagcttgaggtccacattggatggttgctcttgcaagccccacgctgggttttcaaagaggaagatccaatccatctgcggtgccacagctggaaaaacaccgctctccacaaagtcacatacctgcaaaatggcaaaggacgcaaatacttccatcacaattccgatttttacattccgaaggctaccctgaaagacagcggcagctatttctgccggggactcgtcggctccaagaatgtgtcctccgaaaccgtgaatatcacgattacccaaggactggctgtgcctacaatctctagcttctttccgcctggataccaagtctccttctgtcttgtgatggtcctcctgtttgctgtggacacaggactgtacttttccgtgaaaacgaacatccgcagctccacacgcgattggaaagatcacaagtttaaatggcgcaaagatccccaggacaag

SEQ ID NO: 4898 - DNA, 1518 bp, Artificial Sequence
  Synthetic Polynucleotide
atggccttaccagtgaccgccttgctcctgccgctggccttgctgctccacgccgccaggccggacatcgtgctgacccagagccctctgagcctggccgtgtctctgggacagcctgccatcatcagctgcaaggccagccagagcgtgtcctttgccggcacctctctgatgcactggtatcaccagaagcccggccagcagcccagactgctgatctacagagccagcaacctggaagccggcgtgcccgatagattttccggcagcggcagcaagaccgacttcaccctgaccatcagccccgtggaagccgaagatgccgccacctactactgccagcagagcagagagtacccctacaccttcggcggaggcaccaagctggaaatcaagaggggcggaggcggaagtggaggcggaggatctggcggcggaggctctcaggtccaactggtgcagagcggagccgaggtcgtgaagcctggcgcttccgtgaagattagctgcaaagccagcggctacacctttaccggctactttatgaactgggtcaagcagagccctggccagagcctggaatggatcggcagaatccacccctacgacggcgacaccttctacaaccagaagttccagggcaaggccaccctgacagtggacaagagcagcaacaccgcccacatggaactgctgagcctgaccagcgaggacttcgccgtgtactactgcaccagatacgacggcagccgggctatggactattggggccagggcaccaccgtgaccgtgtctagtacgcgtggaatgaggactgaggatcttcccaaagctgtcgtctttctcgaaccccaatggtatcgggtgctcgaaaaagactctgtgacactgaaatgccaaggggcctactctcccgaggacaactccacacagtggtttcataatgagtccctcatcagctctcaggccagctcttatttcattgatgccgctacagtggacgactccggcgagtatcggtgtcagaccaatctgtctacactgtctgaccccgtgcagcttgaggtccacattggatggttgctcttgcaagccccacgctgggttttcaaagaggaagatccaatccatctgcggtgccacagctggaaaaacaccgctctccacaaagtcacatacctgcaaaatggcaaaggacgcaaatacttccatcacaattccgatttttacattccgaaggctaccctgaaagacagcggcagctatttctgccggggactcgtcggctccaagaatgtgtcctccgaaaccgtgaatatcacgattacccaaggactggctgtgcctacaatctctagcttctttccgcctggataccaagtctccttctgtcttgtgatggtcctcctgtttgctgtggacacaggactgtacttttccgtgaaaacgaacatccgcagctccacacgcgattggaaagatcacaagtttaaatggcgcaaagatccccaggacaag

SEQ ID NO: 4899 - DNA, 1506 bp, Artificial Sequence
  Synthetic Polynucleotide
atggccttaccagtgaccgccttgctcctgccgctggccttgctgctccacgccgccaggccggacgttgtgatgacccagacccccctgagcctgcctgtgacacctggcgaacctgccagcatcagctgtcggagcagccagagcctggtgcacagaaacggcaacacctacctgcactggtatctccagaagcccggccagagccccaagctgctgatccacaaggtgtccaacagattcagcggcgtgcccgacagattctccggcagcggctctggcaccgacttcaccctgaagatcagccgggtggaagccgaggacctgggcgtgtacttctgtagccagagcacccatgtgccccccctgacatttggagccggcaccaagctggaactgaagggcggaggcggaagtggaggcggaggatctggcggcggaggctctgaagtgcagctggtgcagtctggcgctgaggtggaaaagcctggggccagcgtgaagattagctgcaaggccagcggcagcagcttcaccggctacaacatgaactgggtgcgccagaacatcggcaagagcctggaatggatcggagccatcgacccctactacggcggcaccagctacaaccagaagttcaagggcagagccaccctgaccgtggacaagagcaccagcaccgcctacatgcacctgaagtccctgcggagcgaggacaccgccgtgtactactgtgtgtccggcatggaatattggggccagggcaccagcgtgaccgtgtctagtacgcgtggaatgaggactgaggatcttcccaaagctgtcgtctttctcgaaccccaatggtatcgggtgctcgaaaaagactctgtgacactgaaatgccaaggggcctactctcccgaggacaactccacacagtggtttcataatgagtccctcatcagctctcaggccagctcttatttcattgatgccgctacagtggacgactccggcgagtatcggtgtcagaccaatctgtctacactgtctgaccccgtgcagcttgaggtccacattggatggttgctcttgcaagccccacgctgggttttcaaagaggaagatccaatccatctgcggtgccacagctggaaaaacaccgctctccacaaagtcacatacctgcaaaatggcaaaggacgcaaatacttccatcacaattccgatttttacattccgaaggctaccctgaaagacagcggcagctatttctgccggggactcgtcggctccaagaatgtgtcctccgaaaccgtgaatatcacgattacccaaggactggctgtgcctacaatctctagcttctttccgcctggataccaagtctccttctgtcttgtgatggtcctcctgtttgctgtggacacaggactgtacttttccgtgaaaacgaacatccgcagctccacacgcgattggaaagatcacaagtttaaatggcgcaaagatccccaggacaag

SEQ ID NO: 4900 - DNA, 1500 bp, Artificial Sequence
  Synthetic Polynucleotide
atggccttaccagtgaccgccttgctcctgccgctggccttgctgctccacgccgccaggccggagatcgtgatgacccagacccctgccaccctgtctgtgtctgccggcgagagagtgaccattacctgcaaggccagccagagcgtgtccaacgacgtgacctggtatcagcagaagcccggccaggcccccagactgctgatctacagcgccagcaacagatacagcggcgtgcccgccagattttccggcagcggctacggcaccgagttcaccttcaccatcagcagcgtgcagagcgaggacttcgccgtgtacttctgtcagcaagactacagcagcttcggccagggcaccaagctggaaatcaagaggggcggaggcggaagtggaggcggaggatctggcggcggaggctctcaggtgcagctggtggaatctggacctggcgtggtgcagcctggcagaagcctgagaatcagctgtgccgtgtccggcttcagcgtgaccaactacggcgtgcactgggtgcgccagccacctggaaaaggactggaatggctgggcgtgatctgggctggcggcatcaccaactacaacagcgccttcatgtcccggctgaccatctccaaggacaacagcaagaacaccgtgtacctccagatgaacagcctgcgggccgaggacaccgccatgtactactgtgcttccagaggcggccactacggctacgccctggattattggggccagggaaccctcgtgaccgtgtcctctacgcgtggaatgaggactgaggatcttcccaaagctgtcgtctttctcgaaccccaatggtatcgggtgctcgaaaaagactctgtgacactgaaatgccaaggggcctactctcccgaggacaactccacacagtggtttcataatgagtccctcatcagctctcaggccagctcttatttcattgatgccgctacagtggacgactccggcgagtatcggtgtcagaccaatctgtctacactgtctgaccccgtgcagcttgaggtccacattggatggttgctcttgcaagccccacgctgggttttcaaagaggaagatccaatccatctgcggtgccacagctggaaaaacaccgctctccacaaagtcacatacctgcaaaatggcaaaggacgcaaatacttccatcacaattccgatttttacattccgaaggctaccctgaaagacagcggcagctatttctgccggggactcgtcggctccaagaatgtgtcctccgaaaccgtgaatatcacgattacccaaggactggctgtgcctacaatctctagcttctttccgcctggataccaagtctccttctgtcttgtgatggtcctcctgtttgctgtggacacaggactgtacttttccgtgaaaacgaacatccgcagctccacacgcgattggaaagatcacaagtttaaatggcgcaaagatccccaggacaag

SEQ ID NO: 4901 - DNA, 1509 bp, Artificial Sequence
  Synthetic Polynucleotide
atggccttaccagtgaccgccttgctcctgccgctggccttgctgctccacgccgccaggccggacatccagatgacccagaccgccagcagcctgcctgcctctctgggcgacagagtgaccatctcctgtagcgccagccaggacatcagcaactacctgaactggtatcagcagaaacccgacggcaccgtgaagctgctgatcttctacagcagcaacctgcacagcggcgtgcccagcagattttctggcggcggaagcggcaccgactacagcctgaccatcagcaatctggaacccgaggacattgccacctacttttgccaccagtacagcaagctgccctggacctttggcggaggcaccaagctggaaatcaagagaggcggaggcggaagtggaggcggaggatctggcggcggaggctctgaagtgaccctggtggaaagcggcggagacttcgtgaagcctggcggctctctgaaggtgtcctgtgccgccagcggcttcgcctttagccactacgccatgagctgggtgcgccagacccctgccaagagactggaatgggtggcctacatcagcagcggcggctccggcacctactactccgatagcgtgaagggccggttcaccatcagccgggacaacgccaagaacaccctgtacctccagatgcggagcctgcggagcgaggacagcgccatgtatttctgcaccagagtgaagctgggcacctattacttcgactcttggggccagggcaccaccctgaccgtgtcatctacgcgtggaatgaggactgaggatcttcccaaagctgtcgtctttctcgaaccccaatggtatcgggtgctcgaaaaagactctgtgacactgaaatgccaaggggcctactctcccgaggacaactccacacagtggtttcataatgagtccctcatcagctctcaggccagctcttatttcattgatgccgctacagtggacgactccggcgagtatcggtgtcagaccaatctgtctacactgtctgaccccgtgcagcttgaggtccacattggatggttgctcttgcaagccccacgctgggttttcaaagaggaagatccaatccatctgcggtgccacagctggaaaaacaccgctctccacaaagtcacatacctgcaaaatggcaaaggacgcaaatacttccatcacaattccgatttttacattccgaaggctaccctgaaagacagcggcagctatttctgccggggactcgtcggctccaagaatgtgtcctccgaaaccgtgaatatcacgattacccaaggactggctgtgcctacaatctctagcttctttccgcctggataccaagtctccttctgtcttgtgatggtcctcctgtttgctgtggacacaggactgtacttttccgtgaaaacgaacatccgcagctccacacgcgattggaaagatcacaagtttaaatggcgcaaagatccccaggacaag

SEQ ID NO: 4902 - DNA, 1515 bp, Artificial Sequence
  Synthetic Polynucleotide
atggccttaccagtgaccgccttgctcctgccgctggccttgctgctccacgccgccaggccgcagttcgtgctgacccagagcccttctgcctctgctgccctgggagcctctgccaagctgacctgtacactgagcagcgcccacaagacctacaccatcgactggtatcagcagcagaagggaaaggcccccagatacctgatccaagtgaagtccgacggcacctacacaaaggccaccggcgtgcccgatagattcagcggcagtagcagcggagccgatagatacctgattatccccagcgtgcaggccgacgacgaggccgattactactgcggcaccgattacaccggcggctacgtgttcggcggaggcacacaactgaccgtgacaggcggaggcggaagtggaggcggaggatctggcggcggaggctctgagcaactgaaagagtctggcggcggactgttcaagcccaccgataccctgaccctgacctgcaccgtgtccggcttcagcctgagctactacggcgtgaactgggtgcgccaggcccctggcaatggcctggaatggatcggcacaatcggcggcagcggcgacacctactatgcctcttgggccaagtccagaagcaccatcatcagaaacaccaacgagaacaccgtgaccctgaagatgaccagcctgacagccgccgacaccgccacctacttttgcgtcagatacgccaacatcggctacgagtatttcaacgtgtggggacccggcaccctcgtgaccgtgtcatctacgcgtggaatgaggactgaggatcttcccaaagctgtcgtctttctcgaaccccaatggtatcgggtgctcgaaaaagactctgtgacactgaaatgccaaggggcctactctcccgaggacaactccacacagtggtttcataatgagtccctcatcagctctcaggccagctcttatttcattgatgccgctacagtggacgactccggcgagtatcggtgtcagaccaatctgtctacactgtctgaccccgtgcagcttgaggtccacattggatggttgctcttgcaagccccacgctgggttttcaaagaggaagatccaatccatctgcggtgccacagctggaaaaacaccgctctccacaaagtcacatacctgcaaaatggcaaaggacgcaaatacttccatcacaattccgatttttacattccgaaggctaccctgaaagacagcggcagctatttctgccggggactcgtcggctccaagaatgtgtcctccgaaaccgtgaatatcacgattacccaaggactggctgtgcctacaatctctagcttctttccgcctggataccaagtctccttctgtcttgtgatggtcctcctgtttgctgtggacacaggactgtacttttccgtgaaaacgaacatccgcagctccacacgcgattggaaagatcacaagtttaaatggcgcaaagatccccaggacaag

SEQ ID NO: 4903 - DNA, 1512 bp, Artificial Sequence
  Synthetic Polynucleotide
atggccttaccagtgaccgccttgctcctgccgctggccttgctgctccacgccgccaggccggacatccagatgacccagagccccagcagcctgtctgccagcgtgggcgacagagtgaccatcacctgtagagccagccagggcatcagctcttggctggcctggtatcagcagaagcccgagaaggcccccaagagcctgatctacgccgcctctagtctccagagcggcgtgcccagcagattttctggcagcggctccggcaccgacttcaccctgacaatcagctccctccagcccgaggacttcgccacctactactgccagcagtacaacagctacccccccacctttggcggaggcaccaaggtggaaatcaagggcggaggcggaagtggaggcggaggatctggcggcggaggctctgaagtgcaactggtggaatcaggcggcggactggtgcagcctggcgagtctctgagactgagctgtgtggcctccggcttcaccttcagccggtacaagatgaactgggtgcgccaggcccctggcaagggactggaatgggtgtcctacatcagccgcagcggcagagacatctactacgccgacagcgtgaagggccggttcaccatcagcagagacaacgccaagaacagcctgtacctccagatgaactccctgcgggacgaggacaccgccgtgtactactgtgccggaaccgtgaccacctattactacttcggcatggacgtgtggggccacggcaccaccgtgacagtgtcatctacgcgtggaatgaggactgaggatcttcccaaagctgtcgtctttctcgaaccccaatggtatcgggtgctcgaaaaagactctgtgacactgaaatgccaaggggcctactctcccgaggacaactccacacagtggtttcataatgagtccctcatcagctctcaggccagctcttatttcattgatgccgctacagtggacgactccggcgagtatcggtgtcagaccaatctgtctacactgtctgaccccgtgcagcttgaggtccacattggatggttgctcttgcaagccccacgctgggttttcaaagaggaagatccaatccatctgcggtgccacagctggaaaaacaccgctctccacaaagtcacatacctgcaaaatggcaaaggacgcaaatacttccatcacaattccgatttttacattccgaaggctaccctgaaagacagcggcagctatttctgccggggactcgtcggctccaagaatgtgtcctccgaaaccgtgaatatcacgattacccaaggactggctgtgcctacaatctctagcttctttccgcctggataccaagtctccttctgtcttgtgatggtcctcctgtttgctgtggacacaggactgtacttttccgtgaaaacgaacatccgcagctccacacgcgattggaaagatcacaagtttaaatggcgcaaagatccccaggacaag

SEQ ID NO: 4904 - DNA, 1509 bp, Artificial Sequence
  Synthetic Polynucleotide
atggccttaccagtgaccgccttgctcctgccgctggccttgctgctccacgccgccaggccgcagtctgtggtcacacagccacctagcatgtctgccgctccaggccagcaagtgaccatctcttgtagcggcggcaacagcaacatcgagcggaactacgtgtcctggtatctgcaactgcctggcacagcccctaagctggtcatcttcgacaacgacagacggcccagcggcatccccgatagattttctggcagcaagagcggcaccagcgccacactgggaattaccggacttcagacaggcgacgaggccgactactactgtggcacatgggactctagcctgagaggctgggttttcggcggaggcacaaagctgacagtgcttggtggcggaggcggaagtggaggcggaggatctggcggcggaggctctgaagtgcagctcgttgagtctggcggcggactgattcaacctggcggaagcctgagactgagctgtgccgcttccggcttcaccttcagcaactacgccatgaactgggttcgacaggcccctggcaaaggactggaatgggtgtccaccatcaacggcagaggcagcagcaccatctacgccgattctgtgaagggcagattcaccatcagccgggacaacagcaagaacaccctgtacctccagatgaactccctgagagccgaggacaccgccacctattactgtgcccggtacatcagcagaggactgggcgattcttggggccagggcacactggttacagtgacgcgtggaatgaggactgaggatcttcccaaagctgtcgtctttctcgaaccccaatggtatcgggtgctcgaaaaagactctgtgacactgaaatgccaaggggcctactctcccgaggacaactccacacagtggtttcataatgagtccctcatcagctctcaggccagctcttatttcattgatgccgctacagtggacgactccggcgagtatcggtgtcagaccaatctgtctacactgtctgaccccgtgcagcttgaggtccacattggatggttgctcttgcaagccccacgctgggttttcaaagaggaagatccaatccatctgcggtgccacagctggaaaaacaccgctctccacaaagtcacatacctgcaaaatggcaaaggacgcaaatacttccatcacaattccgatttttacattccgaaggctaccctgaaagacagcggcagctatttctgccggggactcgtcggctccaagaatgtgtcctccgaaaccgtgaatatcacgattacccaaggactggctgtgcctacaatctctagcttctttccgcctggataccaagtctccttctgtcttgtgatggtcctcctgtttgctgtggacacaggactgtacttttccgtgaaaacgaacatccgcagctccacacgcgattggaaagatcacaagtttaaatggcgcaaagatccccaggacaag

SEQ ID NO: 4905 - DNA, 1512 bp, Artificial Sequence
  Synthetic Polynucleotide
atggccttaccagtgaccgccttgctcctgccgctggccttgctgctccacgccgccaggccgcagtctgtgctgacacagcctccatctgcctctggcacacctggacagagagtgaccatcagctgtagcggcagcagaagcaacgtcggcggcaactacgtgttctggtatcagcaggtcccaggcgctacccctaagctgctgatctacagaagcaatcagcggcctagcggcgtgcccgatagatttgccggaagcaagagcggcagctctgccagccttgccatctctggactgagaagcgaggacgaggccgactactactgtgccacctgggatgatagcctgagcggcttcgtgtttggcaccggcaccaaagtgacagtgcttggtggcggaggcggaagtggaggcggaggatctggcggcggaggctctgaagttcagctggttgaatctggcggcggactggttaagcctggcggatctctgagactgtcttgtgccgccagcggcttcaccttcagcgattactacatgagctggatcagacaggcccctggcaaaggactggaatgggtgtcctacatcagcagcagcggctccaccatctactacgccgatagcgtgaagggcagattcaccatcagccgggacaacgccaagaacagcctgtacctccagatgaactccctgagagccgaggacaccgccgtgtactattgcgccagaggctacggcaaagcctacgatcaatggggccagggcacactggtcaccgtttcttctacgcgtggaatgaggactgaggatcttcccaaagctgtcgtctttctcgaaccccaatggtatcgggtgctcgaaaaagactctgtgacactgaaatgccaaggggcctactctcccgaggacaactccacacagtggtttcataatgagtccctcatcagctctcaggccagctcttatttcattgatgccgctacagtggacgactccggcgagtatcggtgtcagaccaatctgtctacactgtctgaccccgtgcagcttgaggtccacattggatggttgctcttgcaagccccacgctgggttttcaaagaggaagatccaatccatctgcggtgccacagctggaaaaacaccgctctccacaaagtcacatacctgcaaaatggcaaaggacgcaaatacttccatcacaattccgatttttacattccgaaggctaccctgaaagacagcggcagctatttctgccggggactcgtcggctccaagaatgtgtcctccgaaaccgtgaatatcacgattacccaaggactggctgtgcctacaatctctagcttctttccgcctggataccaagtctccttctgtcttgtgatggtcctcctgtttgctgtggacacaggactgtacttttccgtgaaaacgaacatccgcagctccacacgcgattggaaagatcacaagtttaaatggcgcaaagatccccaggacaag

SEQ ID NO: 4906 - DNA, 1509 bp, Artificial Sequence
  Synthetic Polynucleotide
atggccttaccagtgaccgccttgctcctgccgctggccttgctgctccacgccgccaggccggacatccagatgacccagagccccagcagcctgtctgccagcgtgggcgacagagtgaccatcacctgtagagccagccaggacgtgaacaccgccgtggcctggtatcagcagaagcctggcaaggcccccaagctgctgatctacagcgccagcttcctggaaagcggcgtgcccagcagattcagcggaagcagaagcggcaccgacttcaccctgaccatcagctccctccagcccgaggacttcgccacctactactgccagcagcactacaccacccctcccaccttcggccagaccaaggtggaaatcaagagaggcggaggcggaagtggaggcggaggatctggcggcggaggctctgaagtgcaactggtggaatctggcggcggactggtgcagcctggcggatctctgagactgagctgtgccgccagcggcttcaacatcaaggacacctacatccactgggtgcgccaggcccctggaaagggactggaatgggtggcccggatctaccccaccaacggctacaccagatacgccgacagcgtgaagggccggttcaccatcagcgccgacaccagcaagaataccgcctacctccagatgaacagcctgcgggccgaggataccgccgtgtactactgctcaagatggggaggcgacggcttctacgctatggacgtgtggggccagggcacccttgtgaccgtgtcatctacgcgtggaatgaggactgaggatcttcccaaagctgtcgtctttctcgaaccccaatggtatcgggtgctcgaaaaagactctgtgacactgaaatgccaaggggcctactctcccgaggacaactccacacagtggtttcataatgagtccctcatcagctctcaggccagctcttatttcattgatgccgctacagtggacgactccggcgagtatcggtgtcagaccaatctgtctacactgtctgaccccgtgcagcttgaggtccacattggatggttgctcttgcaagccccacgctgggttttcaaagaggaagatccaatccatctgcggtgccacagctggaaaaacaccgctctccacaaagtcacatacctgcaaaatggcaaaggacgcaaatacttccatcacaattccgatttttacattccgaaggctaccctgaaagacagcggcagctatttctgccggggactcgtcggctccaagaatgtgtcctccgaaaccgtgaatatcacgattacccaaggactggctgtgcctacaatctctagcttctttccgcctggataccaagtctccttctgtcttgtgatggtcctcctgtttgctgtggacacaggactgtacttttccgtgaaaacgaacatccgcagctccacacgcgattggaaagatcacaagtttaaatggcgcaaagatccccaggacaag

SEQ ID NO: 4907 - DNA, 1548 bp, Artificial Sequence
  Synthetic Polynucleotide
atggccttaccagtgaccgccttgctcctgccgctggccttgctgctccacgccgccaggccgcagtctgccctgacacagcctcctagcgcctctggctctcccggccagagcatcaccatcagctgtaccggcaccagcaacaacttcgtgtcctggtatcagcagcacgccggcaaggcccccaagctcgtgatctacgacgtgaacaagcggcccagcggcgtgcccgatagattcagcggcagcaagagcggcaacaccgccagcctgacagtgtctggcctccagaccgatgacgaggccgtgtactactgcggcagcctcgtgggcaactgggacgtgatctttggcggaggcaccaagctgaccgtgctgggcggaggcggaagtggaggcggaggatctggcggcggaggctctcagccccagctccaggaatctggccccacactggtggaagccagcgagacactgagcctgacctgtgccgtgtccggcgattctaccgccgcctgcaatagcttctggggctgggtgcgccagcctcctggaaagggactggaatgggtgggaagcctgagccactgcgccagctattggaaccggggctggacctaccacaaccccagcctgaagtccagactgaccctggccctggacacccccaagaacctggtgttcctgaagctgaacagcgtgacagccgccgacaccgccacctactactgtgccagatttggcggcgaggtgctgcggtacaccgactggcctaaacctgcctgggtggacctgtggggcagaggaacactcgtgaccgtgtccagcacgcgtggaatgaggactgaggatcttcccaaagctgtcgtctttctcgaaccccaatggtatcgggtgctcgaaaaagactctgtgacactgaaatgccaaggggcctactctcccgaggacaactccacacagtggtttcataatgagtccctcatcagctctcaggccagctcttatttcattgatgccgctacagtggacgactccggcgagtatcggtgtcagaccaatctgtctacactgtctgaccccgtgcagcttgaggtccacattggatggttgctcttgcaagccccacgctgggttttcaaagaggaagatccaatccatctgcggtgccacagctggaaaaacaccgctctccacaaagtcacatacctgcaaaatggcaaaggacgcaaatacttccatcacaattccgatttttacattccgaaggctaccctgaaagacagcggcagctatttctgccggggactcgtcggctccaagaatgtgtcctccgaaaccgtgaatatcacgattacccaaggactggctgtgcctacaatctctagcttctttccgcctggataccaagtctccttctgtcttgtgatggtcctcctgtttgctgtggacacaggactgtacttttccgtgaaaacgaacatccgcagctccacacgcgattggaaagatcacaagtttaaatggcgcaaagatccccaggacaag

SEQ ID NO: 4908 - DNA, 1533 bp, Artificial Sequence
  Synthetic Polynucleotide
atggccttaccagtgaccgccttgctcctgccgctggccttgctgctccacgccgccaggccggagctggtgctgacacagagccctggcaccctgtctctgtctgccggcgaaagagccaccctgagctgtagagccagccagagcgtgtcctctggcagcctggcttggtatcagcagaagccaggccaggcccccagactgctgatctacggcgcttctaccagagccaccggcatccccgatagattcagcggctctggctccggcaccgacttcaccctgacaatcggcagactggaacccgaggacctggccgtgtactactgccagcagtacggcaccagcccctacacattcggccagggcaccaagctggaaatcggcggaggcggaagtggaggcggaggatctggcggcggaggctctctggaacagagcggagccgaagtgaagaaacccggcagcagcgtgcaggtgtcctgcaaagcaagcggcggcaccttctctatgtacggcttcaactgggtgcgccaggctcctggacacggcctggaatggatgggcggcatcatccccatcttcggcacctccaactacgcccagaaattccggggcagagtgaccttcaccgccgaccaggccacaagcaccgcctacatggaactgaccaacctgcggagcgacgacaccgccgtgtattattgcgccagagacttcggccccgactgggaggatggcgacagctacgatggcagcggcagaggcttcttcgacttctggggccagggaacccttgtgaccgtgtcctcaacgcgtggaatgaggactgaggatcttcccaaagctgtcgtctttctcgaaccccaatggtatcgggtgctcgaaaaagactctgtgacactgaaatgccaaggggcctactctcccgaggacaactccacacagtggtttcataatgagtccctcatcagctctcaggccagctcttatttcattgatgccgctacagtggacgactccggcgagtatcggtgtcagaccaatctgtctacactgtctgaccccgtgcagcttgaggtccacattggatggttgctcttgcaagccccacgctgggttttcaaagaggaagatccaatccatctgcggtgccacagctggaaaaacaccgctctccacaaagtcacatacctgcaaaatggcaaaggacgcaaatacttccatcacaattccgatttttacattccgaaggctaccctgaaagacagcggcagctatttctgccggggactcgtcggctccaagaatgtgtcctccgaaaccgtgaatatcacgattacccaaggactggctgtgcctacaatctctagcttctttccgcctggataccaagtctccttctgtcttgtgatggtcctcctgtttgctgtggacacaggactgtacttttccgtgaaaacgaacatccgcagctccacacgcgattggaaagatcacaagtttaaatggcgcaaagatccccaggacaag

SEQ ID NO: 4909 - DNA, 1473 bp, Artificial Sequence
  Synthetic Polynucleotide
atggccttaccagtgaccgccttgctcctgccgctggccttgctgctccacgccgccaggccggacatccagatgacccagagccccagcagcctgtctgccagcgtgggcgacagagtgaccatcacctgtcaggccagccaggacatcaacaactacctgaactggtatcagcagaagcccggcaaggcccccaagctgctgatctacgacgccagcaatctgcagaccggcgtgcccagcagattttccggctctggcagcggcaccgacttcaccttcaccatcgaggacattgccacctactactgccagcagtacaccttcggccctggcaccaaggtggacatcaaaggcggaggcggaagtggaggcggaggatctggcggcggaggctctgaagtgcaactgctggaatctggcggcggactggtgcagcctggcggatctctgagactgagctgtgccgccagcggcttcacctttagctggtacagcatgacctgggtgcgccaggcccctggcaaaggactggaatgggtgtccagcatcgtgccctggggcgatttcacccagtacgccgatagcgtgaagggccggttcaccatcagccgggacaacagcaagaacaccctgtacctgcagatgaacagcctgcgggccgaggacaccgccgtgtactattgtgccaagggacctggctggggcagcttcgatctgtggggcagaggaacccttgtgaccgtgtccagcacgcgtggaatgaggactgaggatcttcccaaagctgtcgtctttctcgaaccccaatggtatcgggtgctcgaaaaagactctgtgacactgaaatgccaaggggcctactctcccgaggacaactccacacagtggtttcataatgagtccctcatcagctctcaggccagctcttatttcattgatgccgctacagtggacgactccggcgagtatcggtgtcagaccaatctgtctacactgtctgaccccgtgcagcttgaggtccacattggatggttgctcttgcaagccccacgctgggttttcaaagaggaagatccaatccatctgcggtgccacagctggaaaaacaccgctctccacaaagtcacatacctgcaaaatggcaaaggacgcaaatacttccatcacaattccgatttttacattccgaaggctaccctgaaagacagcggcagctatttctgccggggactcgtcggctccaagaatgtgtcctccgaaaccgtgaatatcacgattacccaaggactggctgtgcctacaatctctagcttctttccgcctggataccaagtctccttctgtcttgtgatggtcctcctgtttgctgtggacacaggactgtacttttccgtgaaaacgaacatccgcagctccacacgcgattggaaagatcacaagtttaaatggcgcaaagatccccaggacaag

SEQ ID NO: 4910 - DNA, 1503 bp, Artificial Sequence
  Synthetic Polynucleotide
atggccttaccagtgaccgccttgctcctgccgctggccttgctgctccacgccgccaggccggacatccagatgacccagagccccagcagcctgtctgccagcgtgggcgacagagtgaccatcacctgtaccgccagcctgagcgtgtccagcacctacctgcactggtatcagcagaagcccggcagcagccccaagctgtggatctacagcaccagcaacctggcctccggcgtgcccagcagattttctggcagcggctctggcaccagctacaccctgaccatcagctccctccagcccgaggacttcgccacctactactgccaccagtaccacagaagccccctgacctttggcggaggcaccaaggtggaaatcaagagaggcggaggcggaagtggaggcggaggatctggcggcggaggctctgaagtgcaactggtggaatctggcggcggactggtgcagcctggcggatctctgagactgagctgtgccgccagcggcttcagcctgaccaaatacggcgtgcactgggtgcgccaggcccctggaaaaggactggaatgggtgggagtgaagtgggctggcggctccaccgactacaacagcgccctgatgagccggttcaccatcagcaaggacaacgccaagaacagcctgtacctccagatgaactccctgcgggccgaggacaccgccgtgtactactgtgccagagatcaccgggacgctatggactactggggccagggaacactcgtgaccgtgtcctctacgcgtggaatgaggactgaggatcttcccaaagctgtcgtctttctcgaaccccaatggtatcgggtgctcgaaaaagactctgtgacactgaaatgccaaggggcctactctcccgaggacaactccacacagtggtttcataatgagtccctcatcagctctcaggccagctcttatttcattgatgccgctacagtggacgactccggcgagtatcggtgtcagaccaatctgtctacactgtctgaccccgtgcagcttgaggtccacattggatggttgctcttgcaagccccacgctgggttttcaaagaggaagatccaatccatctgcggtgccacagctggaaaaacaccgctctccacaaagtcacatacctgcaaaatggcaaaggacgcaaatacttccatcacaattccgatttttacattccgaaggctaccctgaaagacagcggcagctatttctgccggggactcgtcggctccaagaatgtgtcctccgaaaccgtgaatatcacgattacccaaggactggctgtgcctacaatctctagcttctttccgcctggataccaagtctccttctgtcttgtgatggtcctcctgtttgctgtggacacaggactgtacttttccgtgaaaacgaacatccgcagctccacacgcgattggaaagatcacaagtttaaatggcgcaaagatccccaggacaag

SEQ ID NO: 4911 - DNA, 1515 bp, Artificial Sequence
  Synthetic Polynucleotide
atggccttaccagtgaccgccttgctcctgccgctggccttgctgctccacgccgccaggccggacatccagatgacccagagccccagcagcctgtctgccagcgtgggcgacagagtgaccatcacatgcaaggccagccaggacgtgggaacagccgtggcctggtatcagcagaagcctggcaaggcccccaagctgctgatctacagcgccagctacagatccaccggcgtgcccagcagattttccggctctggcagcggcaccgacttcaccctgaccatctctagcctccagcccgaggacttcgccacctactactgccagcaccactactccgccccctggacatttggcggaggcaccaaggtggaaatcaagggcggaggcggaagtggaggcggaggatctggcggcggaggctctgaagtgcaactggtggaatcaggcggcggactggtgcagcctggcggatctctgagactgagctgtgccgccagcggcttcaccttcagcagaaacggcatgagctgggtgcgccaggcccctggaaaaggactggaatgggtggcaaccgtgtccagcggcggcagctacatctactacgccgacagcgtgaagggccggttcaccatctccagagacaacgccaagaacagcctgtacctccagatgaactccctgcgggccgaggacaccgccgtgtactattgtgccagacagggcaccaccgccctggctaccagattcttcgatgtgtggggccagggcaccctcgtgaccgtgtcatctacgcgtggaatgaggactgaggatcttcccaaagctgtcgtctttctcgaaccccaatggtatcgggtgctcgaaaaagactctgtgacactgaaatgccaaggggcctactctcccgaggacaactccacacagtggtttcataatgagtccctcatcagctctcaggccagctcttatttcattgatgccgctacagtggacgactccggcgagtatcggtgtcagaccaatctgtctacactgtctgaccccgtgcagcttgaggtccacattggatggttgctcttgcaagccccacgctgggttttcaaagaggaagatccaatccatctgcggtgccacagctggaaaaacaccgctctccacaaagtcacatacctgcaaaatggcaaaggacgcaaatacttccatcacaattccgatttttacattccgaaggctaccctgaaagacagcggcagctatttctgccggggactcgtcggctccaagaatgtgtcctccgaaaccgtgaatatcacgattacccaaggactggctgtgcctacaatctctagcttctttccgcctggataccaagtctccttctgtcttgtgatggtcctcctgtttgctgtggacacaggactgtacttttccgtgaaaacgaacatccgcagctccacacgcgattggaaagatcacaagtttaaatggcgcaaagatccccaggacaag

SEQ ID NO: 4912 - DNA, 1503 bp, Artificial Sequence
  Synthetic Polynucleotide
atggccttaccagtgaccgccttgctcctgccgctggccttgctgctccacgccgccaggccggacatccagatgacccagagcttcagcagcctgagcgccagcgtgggcgacagagtgaccatcacctgtagagccagccaggacatcagcaactacctgaactggtatcagcagaagcccggcaaggcccccaagctgctgatctactacaccagcagactgcacagcggcgtgcccagcagattttctggcagcggctccggcaccgactacaccctgacaatcagctccctgcagcccgaggacttcgctacctacttctgtcagcaaggcaacaccctgccctggacctttggcggaggcaccaagctggaaatcaagagaggcggaggcggaagtggaggcggaggatctggcggcggaggctctgaagtgcaactggtgcagtccggcggagggctggtgcagagcggaggatctctgagactgagctgcagagccagcggctacaccttcacccggtactggatgctgtgggtgcgccagaggccaggcaagggactggaatgggtggccgagatcaacccccggaacgaccggaccaactacaacgagaagttcaagacccggttcaccatcagcgtggacagaagcaagaacaccctgtacctgcagatggacagcctgcgggccgaggataccgccgtgtacttttgtgctctgggaggcggctacgctatggactactggggccagggaacccttgtgaccgtgtcctctacgcgtggaatgaggactgaggatcttcccaaagctgtcgtctttctcgaaccccaatggtatcgggtgctcgaaaaagactctgtgacactgaaatgccaaggggcctactctcccgaggacaactccacacagtggtttcataatgagtccctcatcagctctcaggccagctcttatttcattgatgccgctacagtggacgactccggcgagtatcggtgtcagaccaatctgtctacactgtctgaccccgtgcagcttgaggtccacattggatggttgctcttgcaagccccacgctgggttttcaaagaggaagatccaatccatctgcggtgccacagctggaaaaacaccgctctccacaaagtcacatacctgcaaaatggcaaaggacgcaaatacttccatcacaattccgatttttacattccgaaggctaccctgaaagacagcggcagctatttctgccggggactcgtcggctccaagaatgtgtcctccgaaaccgtgaatatcacgattacccaaggactggctgtgcctacaatctctagcttctttccgcctggataccaagtctccttctgtcttgtgatggtcctcctgtttgctgtggacacaggactgtacttttccgtgaaaacgaacatccgcagctccacacgcgattggaaagatcacaagtttaaatggcgcaaagatccccaggacaag

SEQ ID NO: 4913 - DNA, 1503 bp, Artificial Sequence
  Synthetic Polynucleotide
atggccttaccagtgaccgccttgctcctgccgctggccttgctgctccacgccgccaggccggacatccagatgacccagagcccccctagcctgtctgcctctgtgggcggcaaagtgaccatcacatgcaaggccagccaggacatcgaccgctacatggcctggtatcaggacaagcccggcaagggacccaagctgctgatccacgataccagcaccctccagcccggcatccccagcagattttctggcagcggctccggcagagactacagcttcagcatcagcaacctggaacccgaggacattgccacctactactgcctccagtacgacaacctgtggaccttcggcggaggcaccaagctggaaatcaagagaggcggaggcggaagtggaggcggaggatctggcggcggaggctctcaggtgcaactggtgcagagcggagccgagcttgtgaagcctggcgcttccgtgaagatgagctgcaaagccagcggctacatcttcaccaactacaacatccactgggtcaagaagtccccaggccagggcctggaatggatcggagccatctaccccggaaacggcgacgccccttacagccagaagttccaggacagagccaccctgaccgccgacaccagcagcagcaccacctacatggaactgagcagcctgaccagcgaggacagcgccgtgtactattgcgtgcgggccaactgggatgtggccttcgcctattggggccagggcacactggtgtccgtgtcctctacgcgtggaatgaggactgaggatcttcccaaagctgtcgtctttctcgaaccccaatggtatcgggtgctcgaaaaagactctgtgacactgaaatgccaaggggcctactctcccgaggacaactccacacagtggtttcataatgagtccctcatcagctctcaggccagctcttatttcattgatgccgctacagtggacgactccggcgagtatcggtgtcagaccaatctgtctacactgtctgaccccgtgcagcttgaggtccacattggatggttgctcttgcaagccccacgctgggttttcaaagaggaagatccaatccatctgcggtgccacagctggaaaaacaccgctctccacaaagtcacatacctgcaaaatggcaaaggacgcaaatacttccatcacaattccgatttttacattccgaaggctaccctgaaagacagcggcagctatttctgccggggactcgtcggctccaagaatgtgtcctccgaaaccgtgaatatcacgattacccaaggactggctgtgcctacaatctctagcttctttccgcctggataccaagtctccttctgtcttgtgatggtcctcctgtttgctgtggacacaggactgtacttttccgtgaaaacgaacatccgcagctccacacgcgattggaaagatcacaagtttaaatggcgcaaagatccccaggacaag

SEQ ID NO: 4914 - DNA, 1506 bp, Artificial Sequence
  Synthetic Polynucleotide
atggccttaccagtgaccgccttgctcctgccgctggccttgctgctccacgccgccaggccggacatccagatgacccagagccctgccagcctgtctgcctctgtgggcgagacagtgaccatcacctgtcgggtgtccggcaacatccacaactacctggcctggtatcagcagaagcagggcaagagcccccaactgctggtgtacaacgccaagaccctggccgatggcgtgcccagcagattttctggctctggcagcggcacccagtacagcctgaagatcaacagcctccagcccgaggacttcggcagctactactgccagcacttctggtccaacccctacaccttcggcggaggcaccaagctggaaatcaagggcggaggcggaagtggaggcggaggatctggcggcggaggctctcaggtgcaactccagcagtctggcgcttccgtgaaggtgtcctgcaaggccagcgaactcgtgcggcctggcacaggctacgccttcaccaattacctgatcgagtgggtcaagcagaggcccggacagggcctggaatggatcggagtgattaacccaggcagcggcggcaccaactacaacgagaagttcaagggcaaggccaccctgaccgccgacaagagcagcagcacagcctacatgcaactgagcagcctgaccagcgacgacagcgccgtgtacttctgcgcccggtacagaagctacgactggtacttcgacgtgtggggagccggcaccaccgtgacagtgtcatctacgcgtggaatgaggactgaggatcttcccaaagctgtcgtctttctcgaaccccaatggtatcgggtgctcgaaaaagactctgtgacactgaaatgccaaggggcctactctcccgaggacaactccacacagtggtttcataatgagtccctcatcagctctcaggccagctcttatttcattgatgccgctacagtggacgactccggcgagtatcggtgtcagaccaatctgtctacactgtctgaccccgtgcagcttgaggtccacattggatggttgctcttgcaagccccacgctgggttttcaaagaggaagatccaatccatctgcggtgccacagctggaaaaacaccgctctccacaaagtcacatacctgcaaaatggcaaaggacgcaaatacttccatcacaattccgatttttacattccgaaggctaccctgaaagacagcggcagctatttctgccggggactcgtcggctccaagaatgtgtcctccgaaaccgtgaatatcacgattacccaaggactggctgtgcctacaatctctagcttctttccgcctggataccaagtctccttctgtcttgtgatggtcctcctgtttgctgtggacacaggactgtacttttccgtgaaaacgaacatccgcagctccacacgcgattggaaagatcacaagtttaaatggcgcaaagatccccaggacaag

SEQ ID NO: 4915 - DNA, 1506 bp, Artificial Sequence
  Synthetic Polynucleotide
atggccttaccagtgaccgccttgctcctgccgctggccttgctgctccacgccgccaggccggacatccagatgacacagtctccggcgtcactgtccgcctccgtgggggagactgtgactattatttgtagggcatcagttaacatctactcttatttggcctggtaccagcagaagcaaggcaagagtcctcagctgctggtgtataatgcgaagatcctggcagagggcgtgccgagccggttctccggcagcggctcaggtacccaattttccctcaagatcaattcactgcagccagaggactttggcagttactattgtcaacaccactacggcacattcactttcgggtccggtacaaaattggagattaagcgaggcggaggcggaagtggaggcggaggatctggcggcggaggctctcaggtacagttgaaagaaagcgggcctggactggtagcgccttcccaatctctctccatcacgtgcaccatctctggcttctccctgacttcctatggagttcactgggtgaggcagccccccggcaagggactggaatggctggtcgtcatctggtccgacgggtccacaacctacaactccgctctgaaaagtcggctctctatttctaaagataatagcaagagccaggtgtttctgaaaatgaactctctgcagaccgatgatacggccatttactactgcgcttcacactatggctcaaccttggcattcgcttcctggggccacggaacactggtgaccgtttccgcagccacgcgtggaatgaggactgaggatcttcccaaagctgtcgtctttctcgaaccccaatggtatcgggtgctcgaaaaagactctgtgacactgaaatgccaaggggcctactctcccgaggacaactccacacagtggtttcataatgagtccctcatcagctctcaggccagctcttatttcattgatgccgctacagtggacgactccggcgagtatcggtgtcagaccaatctgtctacactgtctgaccccgtgcagcttgaggtccacattggatggttgctcttgcaagccccacgctgggttttcaaagaggaagatccaatccatctgcggtgccacagctggaaaaacaccgctctccacaaagtcacatacctgcaaaatggcaaaggacgcaaatacttccatcacaattccgatttttacattccgaaggctaccctgaaagacagcggcagctatttctgccggggactcgtcggctccaagaatgtgtcctccgaaaccgtgaatatcacgattacccaaggactggctgtgcctacaatctctagcttctttccgcctggataccaagtctccttctgtcttgtgatggtcctcctgtttgctgtggacacaggactgtacttttccgtgaaaacgaacatccgcagctccacacgcgattggaaagatcacaagtttaaatggcgcaaagatccccaggacaag

SEQ ID NO: 4916 - DNA, 1530 bp, Artificial Sequence
  Synthetic Polynucleotide
atggccttaccagtgaccgccttgctcctgccgctggccttgctgctccacgccgccaggccggacattgtgatgacccagtctcacaaattcatgtccacatcagtaggagacagggtcagcgtcacctgcaaggccagtcagaatgtgggtaataatgtagcctggtatcaacagaaaccagggcaatctcctaaagtactgatttactcggcatcctaccggtacagtggagtccctgatcgcttcacaggcagtggatctgggacagatttcactctcaccatcagtaatgtgcagtctgaagacttggcagagtatttctgtcagcaatataacacctatccattcacgttcggctcggggacaaagttggaaataaaaggcggaggcggaagtggaggcggaggatctggcggcggaggctctgaggtacagctggaggaaagcggtggaggactggtgcaacctggagggtctatgaagctctcttgcgtagcttctgggttcacgttctccaattactggatgaactgggtgcggcagtcccccgagaaaggcctggaatgggtagcagaaattcggttcaagtcccataactatgctacacactttgccgagtctgtcaaaggccggttcactattagtcgagacgacagcaagtcttcagtctacctgcagatgaataacttgcgggcagaggacacaggtatctactactgcaccaggagaatcggcaactccgactatgactggtggtactttgacgtctggggagcaggcaccagcgtgacggtgagttcagcctcaacgcgtggaatgaggactgaggatcttcccaaagctgtcgtctttctcgaaccccaatggtatcgggtgctcgaaaaagactctgtgacactgaaatgccaaggggcctactctcccgaggacaactccacacagtggtttcataatgagtccctcatcagctctcaggccagctcttatttcattgatgccgctacagtggacgactccggcgagtatcggtgtcagaccaatctgtctacactgtctgaccccgtgcagcttgaggtccacattggatggttgctcttgcaagccccacgctgggttttcaaagaggaagatccaatccatctgcggtgccacagctggaaaaacaccgctctccacaaagtcacatacctgcaaaatggcaaaggacgcaaatacttccatcacaattccgatttttacattccgaaggctaccctgaaagacagcggcagctatttctgccggggactcgtcggctccaagaatgtgtcctccgaaaccgtgaatatcacgattacccaaggactggctgtgcctacaatctctagcttctttccgcctggataccaagtctccttctgtcttgtgatggtcctcctgtttgctgtggacacaggactgtacttttccgtgaaaacgaacatccgcagctccacacgcgattggaaagatcacaagtttaaatggcgcaaagatccccaggacaag

SEQ ID NO: 4917 - DNA, 1506 bp, Artificial Sequence
  Synthetic Polynucleotide
atggccttaccagtgaccgccttgctcctgccgctggccttgctgctccacgccgccaggccggacatccagatgacccagagcagcagcagcttcagcgtgtccctgggcgacagagtgaccatcacatgcaaggccagcgaggacatctacatccggctggcctggtatcagcagaagcccggcaacgcccccagactgctgattagcgccgccacctctctggaaaccggcatccccagcagattctccggctctggcagcggcgaggactacaccctgacaatcaccagcctccagaccgaggacgtggcaacctactactgccagcagtattggaccaccccctggacctttggcggaggcaccaagctggaaatcaagagaggcggaggcggaagtggaggcggaggatctggcggcggaggctctgatgtgcagctccaggaatctggccccggactcgtgaagcctagccagagcctgagcctgacatgcaccgtgaccggctacagcatcaccatcgactacacctggaactggatcagacagttccccggcaacaaactggaatggatgggctacatcacctacagcggcagcaccgactacaaccccagcctgaagtccagaagctccatcaccagagacacctctatgaaccagttcttcttgcagctgaacagcgtgaccaccgaggacaccgccacctactattgcgccagactgggcagaagatacgccctggactattggggccagggcaccagcgtgacagtgtcctctacgcgtggaatgaggactgaggatcttcccaaagctgtcgtctttctcgaaccccaatggtatcgggtgctcgaaaaagactctgtgacactgaaatgccaaggggcctactctcccgaggacaactccacacagtggtttcataatgagtccctcatcagctctcaggccagctcttatttcattgatgccgctacagtggacgactccggcgagtatcggtgtcagaccaatctgtctacactgtctgaccccgtgcagcttgaggtccacattggatggttgctcttgcaagccccacgctgggttttcaaagaggaagatccaatccatctgcggtgccacagctggaaaaacaccgctctccacaaagtcacatacctgcaaaatggcaaaggacgcaaatacttccatcacaattccgatttttacattccgaaggctaccctgaaagacagcggcagctatttctgccggggactcgtcggctccaagaatgtgtcctccgaaaccgtgaatatcacgattacccaaggactggctgtgcctacaatctctagcttctttccgcctggataccaagtctccttctgtcttgtgatggtcctcctgtttgctgtggacacaggactgtacttttccgtgaaaacgaacatccgcagctccacacgcgattggaaagatcacaagtttaaatggcgcaaagatccccaggacaag

SEQ ID NO: 4918 - DNA, 1503 bp, Artificial Sequence
  Synthetic Polynucleotide
atggccttaccagtgaccgccttgctcctgccgctggccttgctgctccacgccgccaggccggatgtgcagctccaggaaagcggccctggcctcgtgaagcctagccagagcctgagcctgacatgcaccgtgaccggctacagcatcaccagcgactacacctggaactggatcagacagttccccggcaacaagctggaatggatgggctacatcacctacagcggcagcaccagctacaaccccagcctgaagtcccggaactccatcaccagagacaccagcaagaaccagttcttcttgcagctgaacagcgtgaccaccgaggacaccgccacctactactgcgccagactgggcagacggtacaccatggactattggggccagggcacctccgtgaccgtgtctagcggaggcggaggaagtggcggcggaggatctgggggaggcggaagcgatatccagatgacccagtccagcagcagcttcagcgtgtccctgggcgacagagtgaccatcacctgtatggcctccgaggacatctacatccggctggcctggtatcagcagaagcccggcaacgcccccagactgctgattagcgccgccacctctctggaaaccggcgtgccaagcagattcagcggctctggcagcggcaaggactacaccctgagcatcacctccttgcagaccgaggacgtgggcacctactattgccagcagtattggagcagcccctggacctttggcggaggcacaaagctggaaatcaacacgcgtggaatgaggactgaggatcttcccaaagctgtcgtctttctcgaaccccaatggtatcgggtgctcgaaaaagactctgtgacactgaaatgccaaggggcctactctcccgaggacaactccacacagtggtttcataatgagtccctcatcagctctcaggccagctcttatttcattgatgccgctacagtggacgactccggcgagtatcggtgtcagaccaatctgtctacactgtctgaccccgtgcagcttgaggtccacattggatggttgctcttgcaagccccacgctgggttttcaaagaggaagatccaatccatctgcggtgccacagctggaaaaacaccgctctccacaaagtcacatacctgcaaaatggcaaaggacgcaaatacttccatcacaattccgatttttacattccgaaggctaccctgaaagacagcggcagctatttctgccggggactcgtcggctccaagaatgtgtcctccgaaaccgtgaatatcacgattacccaaggactggctgtgcctacaatctctagcttctttccgcctggataccaagtctccttctgtcttgtgatggtcctcctgtttgctgtggacacaggactgtacttttccgtgaaaacgaacatccgcagctccacacgcgattggaaagatcacaagtttaaatggcgcaaagatccccaggacaag

SEQ ID NO: 4919 - DNA, 1503 bp, Artificial Sequence
  Synthetic Polynucleotide
atggccttaccagtgaccgccttgctcctgccgctggccttgctgctccacgccgccaggccggacatccagatgacccagagcagcagcagcttcagcgtgagcctgggcgacagagtgaccatcacctgcatggccagcgaggacatctacatcagactggcctggtaccagcagaagcccggcaacgcccccagactgctgatcagcgccgccaccagcctggagaccggcgtgcccagcagattcagcggcagcggcagcggcaaggactacaccctgagcatcaccagcctgcagaccgaggacgtgggcacctactactgccagcagtactggagcagcccctggaccttcggcggcggcaccaagctggagatcaacggcggaggcggaagtggaggcggaggatctggcggcggaggctctgacgtgcagctgcaggagagcggccccggcctggtgaagcccagccagagcctgagcctgacctgcaccgtgaccggctacagcatcaccagcgactacacctggaactggatcagacagttccccggcaacaagctggagtggatgggctacatcacctacagcggcagcaccagctacaaccccagcctgaagagcagaaacagcatcaccagagacaccagcaagaaccagttcttcctgcagctgaacagcgtgaccaccgaggacaccgccacctactactgcgccagactgggcagaagatacacaatggactactggggccagggcaccagcgtgaccgtgagcagcacgcgtggaatgaggactgaggatcttcccaaagctgtcgtctttctcgaaccccaatggtatcgggtgctcgaaaaagactctgtgacactgaaatgccaaggggcctactctcccgaggacaactccacacagtggtttcataatgagtccctcatcagctctcaggccagctcttatttcattgatgccgctacagtggacgactccggcgagtatcggtgtcagaccaatctgtctacactgtctgaccccgtgcagcttgaggtccacattggatggttgctcttgcaagccccacgctgggttttcaaagaggaagatccaatccatctgcggtgccacagctggaaaaacaccgctctccacaaagtcacatacctgcaaaatggcaaaggacgcaaatacttccatcacaattccgatttttacattccgaaggctaccctgaaagacagcggcagctatttctgccggggactcgtcggctccaagaatgtgtcctccgaaaccgtgaatatcacgattacccaaggactggctgtgcctacaatctctagcttctttccgcctggataccaagtctccttctgtcttgtgatggtcctcctgtttgctgtggacacaggactgtacttttccgtgaaaacgaacatccgcagctccacacgcgattggaaagatcacaagtttaaatggcgcaaagatccccaggacaag

SEQ ID NO: 4920 - DNA, 1509 bp, Artificial Sequence
  Synthetic Polynucleotide
atggccttaccagtgaccgccttgctcctgccgctggccttgctgctccacgccgccaggccggaccagatcgtgctgacccagtcccccgctattatgtccgcatcaccgggcgaaaaagtgacgatctcctgtagcgcttcatctagcgtctcctacatgtattggtatcaacagaaacctgggtctagcccaaagccgtggatctacagaaccagtaaccttgccagtggggtgccagcccgcttcagcggtagtggcagtggaacttcctatagcctcacaataagcaacatggaggctgaagatgccgctgcctattactgccagcagtaccacagttacccaaccacgttcggcgggggaactaagctcgaagtaaaaggcggaggcggaagtggaggcggaggatctggcggcggaggctctgaggtgcagctggtggaatctgggggcggcctggtccaacctaagggatcactcaagctctcttgtgcggccagcggattctctttcaatacctatgctatgaattgggtgagacaggcgcccggaaagggcctcgaatggatagcccatatccggtcaaaatcaaacaatttcgcaacctactatgcggactccgtgaaggaccgattttccatctcccgagatgcctccgagaatattctgttcctgcagatgaataacctcaagacagaggacaccgccatgtactactgtgtgcgccagggcggtgactttcccatggattactgggggcaggggaccagcgtgaccgtgagctctacgcgtggaatgaggactgaggatcttcccaaagctgtcgtctttctcgaaccccaatggtatcgggtgctcgaaaaagactctgtgacactgaaatgccaaggggcctactctcccgaggacaactccacacagtggtttcataatgagtccctcatcagctctcaggccagctcttatttcattgatgccgctacagtggacgactccggcgagtatcggtgtcagaccaatctgtctacactgtctgaccccgtgcagcttgaggtccacattggatggttgctcttgcaagccccacgctgggttttcaaagaggaagatccaatccatctgcggtgccacagctggaaaaacaccgctctccacaaagtcacatacctgcaaaatggcaaaggacgcaaatacttccatcacaattccgatttttacattccgaaggctaccctgaaagacagcggcagctatttctgccggggactcgtcggctccaagaatgtgtcctccgaaaccgtgaatatcacgattacccaaggactggctgtgcctacaatctctagcttctttccgcctggataccaagtctccttctgtcttgtgatggtcctcctgtttgctgtggacacaggactgtacttttccgtgaaaacgaacatccgcagctccacacgcgattggaaagatcacaagtttaaatggcgcaaagatccccaggacaag

SEQ ID NO: 4921 - DNA, 1512 bp, Artificial Sequence
  Synthetic Polynucleotide
atggccttaccagtgaccgccttgctcctgccgctggccttgctgctccacgccgccaggccggacatccagatgacccagagccccagcagcctgtctgccagcgtgggcgacagagtgaccatcacctgtagagccagccagagcatcagcagctacctgaactggtatcagcagaagcccggcaaggcccccaaactgctgatctacgacgccagcaacctggaaaccggcgtgcccagcagattttccggcagcggctctggcaccgacttcaccttcaccatcagctccctccagcccgaggacattgccacctactactgccagcagtacgacaacctgcccctgacctttggcggaggcaccaaggtggacatcaagagaggcggaggcggaagtggaggcggaggatctggcggcggaggctctcaggtgcaactggtggaatctggcggcggagtggtgcagcctggcagaagcctgagactgagctgtgccgccagcggcttcacctttagcagctacgccatgcactgggtgcgccaggcccctggaaaaggcctggaatgggtggccgtgatctcctacgacggctccaacaagtattacgccgacagcgtgaagggccggttcaccatctccagagacaacagcaagaacaccctgtacctccagatgaacagcctgcgggccgaggacaccgccgtgtactattgtgccagggctcacaacagcagctcttggagcttcgactactggggccagggcaccctcgtgaccgtgtcatctacgcgtggaatgaggactgaggatcttcccaaagctgtcgtctttctcgaaccccaatggtatcgggtgctcgaaaaagactctgtgacactgaaatgccaaggggcctactctcccgaggacaactccacacagtggtttcataatgagtccctcatcagctctcaggccagctcttatttcattgatgccgctacagtggacgactccggcgagtatcggtgtcagaccaatctgtctacactgtctgaccccgtgcagcttgaggtccacattggatggttgctcttgcaagccccacgctgggttttcaaagaggaagatccaatccatctgcggtgccacagctggaaaaacaccgctctccacaaagtcacatacctgcaaaatggcaaaggacgcaaatacttccatcacaattccgatttttacattccgaaggctaccctgaaagacagcggcagctatttctgccggggactcgtcggctccaagaatgtgtcctccgaaaccgtgaatatcacgattacccaaggactggctgtgcctacaatctctagcttctttccgcctggataccaagtctccttctgtcttgtgatggtcctcctgtttgctgtggacacaggactgtacttttccgtgaaaacgaacatccgcagctccacacgcgattggaaagatcacaagtttaaatggcgcaaagatccccaggacaag

SEQ ID NO: 4922 - DNA, 1539 bp, Artificial Sequence
  Synthetic Polynucleotide
atggccttaccagtgaccgccttgctcctgccgctggccttgctgctccacgccgccaggccggacgtcgtgatgacccagagccctctgagcctgcctgtgtccctgggcgatcaggccagcatctcctgcagatccagccagagactggtgcacagcaacggcaacacctacctgcactggtatctgcagaagcccggccagagccccaagctgctgatctaccgggtgtccaacagattccccggcgtgcccgatagattcagcggctctggcagcggcaccgacttcaccctgaagatcagccgggtggaagccgaggacctgggcatctatttctgcagccagagcacccacgtgccctacacctttggcggaggcaccaagctggaaatcaagcggggcggaggcggaagtggaggcggaggatctggcggcggaggctctgaagtgcggctgcagcagtctggccccgacctgattaagcctggggccagcgtgaagatgagctgcaaggccagcggctacaccttcaccggctacgtgatgcactgggtcaagcagaggccaggccagggcctggaatggatcggcttcatcaacccctacaacgacgacatccagagcaacgagcggttccggggcaaggccaccctgaccagcgataagagcagcaccaccgcctacatggaactgagcagcctgacctccgaggacagcgccgtgtactactgtgctaggggagccggctacaacttcgacggggcctacagattcttcgacttttggggccagggcaccacactgaccgtgtcctctacgcgtggaatgaggactgaggatcttcccaaagctgtcgtctttctcgaaccccaatggtatcgggtgctcgaaaaagactctgtgacactgaaatgccaaggggcctactctcccgaggacaactccacacagtggtttcataatgagtccctcatcagctctcaggccagctcttatttcattgatgccgctacagtggacgactccggcgagtatcggtgtcagaccaatctgtctacactgtctgaccccgtgcagcttgaggtccacattggatggttgctcttgcaagccccacgctgggttttcaaagaggaagatccaatccatctgcggtgccacagctggaaaaacaccgctctccacaaagtcacatacctgcaaaatggcaaaggacgcaaatacttccatcacaattccgatttttacattccgaaggctaccctgaaagacagcggcagctatttctgccggggactcgtcggctccaagaatgtgtcctccgaaaccgtgaatatcacgattacccaaggactggctgtgcctacaatctctagcttctttccgcctggataccaagtctccttctgtcttgtgatggtcctcctgtttgctgtggacacaggactgtacttttccgtgaaaacgaacatccgcagctccacacgcgattggaaagatcacaagtttaaatggcgcaaagatccccaggacaag

SEQ ID NO: 4923 - DNA, 1512 bp, Artificial Sequence
  Synthetic Polynucleotide
atggccttaccagtgaccgccttgctcctgccgctggccttgctgctccacgccgccaggccgagctacgagctgacccagcctcctagcgtgtccgtgtctcctggacagaccgccaccatctcttgcagcggcgatcaactgggcgggaagtacggccactggtatcagaagaagcccggccagagccccgtgctggtgctgtaccaggacagaaaacggcctgccggcatccccgagagattcagcggaagcagcagcggcaacaccatcaccctgaccatcagcggcacccaggccgtggatgaggccgactactactgccaggcttgggacaccaatctgggcggcgtgttcggcggaggcaccaaagtgacagtgctgggacagggcggaggcggaagtggaggcggaggatctggcggcggaggctctcaggtgcaactggtggaaagcggagccgaagtgaagaaacctggggccagcgtgaaggtgtcctgcaaggccagcggctacacctttaccggctactacatgcactgggtgcgccaggctccaggccagggactggaatggatgggccggatcaaccccaatagcggcggcaccaactacgcccagaaattccagggcagagtgaccatgaccagagacaccagcatcagcaccgcctacatggaactgagccggctgagaagcgacgacaccgccgtgtactactgcgccagccctagaggcagaggcagcgccttcgatatttggggccagggcacactcgtgaccgtgtcctctacgcgtggaatgaggactgaggatcttcccaaagctgtcgtctttctcgaaccccaatggtatcgggtgctcgaaaaagactctgtgacactgaaatgccaaggggcctactctcccgaggacaactccacacagtggtttcataatgagtccctcatcagctctcaggccagctcttatttcattgatgccgctacagtggacgactccggcgagtatcggtgtcagaccaatctgtctacactgtctgaccccgtgcagcttgaggtccacattggatggttgctcttgcaagccccacgctgggttttcaaagaggaagatccaatccatctgcggtgccacagctggaaaaacaccgctctccacaaagtcacatacctgcaaaatggcaaaggacgcaaatacttccatcacaattccgatttttacattccgaaggctaccctgaaagacagcggcagctatttctgccggggactcgtcggctccaagaatgtgtcctccgaaaccgtgaatatcacgattacccaaggactggctgtgcctacaatctctagcttctttccgcctggataccaagtctccttctgtcttgtgatggtcctcctgtttgctgtggacacaggactgtacttttccgtgaaaacgaacatccgcagctccacacgcgattggaaagatcacaagtttaaatggcgcaaagatccccaggacaag

SEQ ID NO: 4924 - DNA, 1521 bp, Artificial Sequence
  Synthetic Polynucleotide
atggccttaccagtgaccgccttgctcctgccgctggccttgctgctccacgccgccaggccgaacttcatgctgacccagccccacagcgtgtccgagagccctggcaagaccgtgaccatctcctgcaccagaagcagcggctctatcgccagcaaatacgtgcagtggtatcagcagaggcccggcagcagccctaccaccgtgatctacgaggacaaccagaggcctagcggcgtgcccgatagattcagcggcagcatcgacaccagcagcaacagcgccagcctgaccatcagcggcctgagaacagaggacgaggccgactactactgccacagctacgacagcaacaaccactccgtgttcggcggaggcaccaaagtgacagtgctgggacagggcggaggcggaagtggaggcggaggatctggcggcggaggctctgaagtgcaactggtggaaagcgggggaggcgtggtgcagccaggcggatctctgagactgagctgtgccgccagcggcttcaccttcagcagctacgccatgagctgggtgcgccaggcccctggaaaaggcctggaatgggtgtccgccatctctggctctggcggcagcacctactacgccgatagcgtgaagggccggttcagcatcagccgggacaacagcaagaacaccctgtacctccagatgaacagcctgcgggccgaggacaccgccgtgtactactgtgccagaaccagaagctccggggccttcgacatctggggccagggaacactcgtgaccgtgtcctctacgcgtggaatgaggactgaggatcttcccaaagctgtcgtctttctcgaaccccaatggtatcgggtgctcgaaaaagactctgtgacactgaaatgccaaggggcctactctcccgaggacaactccacacagtggtttcataatgagtccctcatcagctctcaggccagctcttatttcattgatgccgctacagtggacgactccggcgagtatcggtgtcagaccaatctgtctacactgtctgaccccgtgcagcttgaggtccacattggatggttgctcttgcaagccccacgctgggttttcaaagaggaagatccaatccatctgcggtgccacagctggaaaaacaccgctctccacaaagtcacatacctgcaaaatggcaaaggacgcaaatacttccatcacaattccgatttttacattccgaaggctaccctgaaagacagcggcagctatttctgccggggactcgtcggctccaagaatgtgtcctccgaaaccgtgaatatcacgattacccaaggactggctgtgcctacaatctctagcttctttccgcctggataccaagtctccttctgtcttgtgatggtcctcctgtttgctgtggacacaggactgtacttttccgtgaaaacgaacatccgcagctccacacgcgattggaaagatcacaagtttaaatggcgcaaagatccccaggacaag

SEQ ID NO: 4925 - DNA, 1509 bp, Artificial Sequence
  Synthetic Polynucleotide
atggccttaccagtgaccgccttgctcctgccgctggccttgctgctccacgccgccaggccggacatccagatgaaccagagccccagcagcctgagcgccagcctgggcgataccatcaccatcacctgtcacgccagccagaacatcaacgtgtggctgagctggtatcagcagaagcccggcaacatccccaagctgctgatctacaaggccagcaacctgcacaccggcgtgcccagcagattttctggcagcggctctggcaccggcttcaccattaccatcagctccctccagcccgaggacattgccacctactactgccagcagggccagagctacccctggacatttggcggaggcaccaagctggaaatcaagagaggcggaggcggaagtggaggcggaggatctggcggcggaggctctgaagtgcaactccagcagagcggcccagagcttgtgaagcctggcgcttccgtgaagattagctgcaaagccagcggctacagcttcaccggctacttcatgaactgggtcaagcagagccacggcaagagcctggagtacatcggcagattcaacccctacaacggcgagacactgtacaaccagaagttcaagggcaaggccaccctgaccgtggacaagagcagcagcaccgtgcacatggaactgctgagcgtgaccagcgaggacagcgccgtgtactactgtggcagaagcggcaacgacgacgctatggactattggggccagggcaccagcgtgaccgtgtctagtgctacgcgtggaatgaggactgaggatcttcccaaagctgtcgtctttctcgaaccccaatggtatcgggtgctcgaaaaagactctgtgacactgaaatgccaaggggcctactctcccgaggacaactccacacagtggtttcataatgagtccctcatcagctctcaggccagctcttatttcattgatgccgctacagtggacgactccggcgagtatcggtgtcagaccaatctgtctacactgtctgaccccgtgcagcttgaggtccacattggatggttgctcttgcaagccccacgctgggttttcaaagaggaagatccaatccatctgcggtgccacagctggaaaaacaccgctctccacaaagtcacatacctgcaaaatggcaaaggacgcaaatacttccatcacaattccgatttttacattccgaaggctaccctgaaagacagcggcagctatttctgccggggactcgtcggctccaagaatgtgtcctccgaaaccgtgaatatcacgattacccaaggactggctgtgcctacaatctctagcttctttccgcctggataccaagtctccttctgtcttgtgatggtcctcctgtttgctgtggacacaggactgtacttttccgtgaaaacgaacatccgcagctccacacgcgattggaaagatcacaagtttaaatggcgcaaagatccccaggacaag

SEQ ID NO: 4926 - DNA, 1500 bp, Artificial Sequence
  Synthetic Polynucleotide
atggccttaccagtgaccgccttgctcctgccgctggccttgctgctccacgccgccaggccggacatcctgctgacacagagccccgccatcctgtccgtgtctccaggcgagagagtgtcctttagctgccgggccagccagaacatcggcaccagcatccactggtatcagcagcggaccaacggcagccccagactgctgattaagtacgccagcgagtccgtgtccggcatccccagcagattttctggcagcggctccggcaccgacttcaccctgagcatcaacagcgtggaaagcgaggacattgccgactactactgccagcacaccaatagctggcccaccacctttggcggaggcaccaagctggaaatcaagagaggcggaggcggaagtggaggcggaggatctggcggcggaggctctcaggtgcaactccagcagtccgacgccgagcttgtgaagcctggcgcttccgtgaagattagctgcaaggccagcggctacaccttcaccgaccacgccattcactgggtcaagcagaagcccgagcagggcctggaatggatcggctacttcagccccggcaacggcgacatcaagtacaacgagaagttcaagggcaaggccaccctgaccgccgacaagagcagcagcacagcctacatgcaactgaacagcctgaccagcgaggactccgccgtgtacttctgcaagcggagctacggcaactacgactactggggccagggcaccacactgaccgtgtctagtacgcgtggaatgaggactgaggatcttcccaaagctgtcgtctttctcgaaccccaatggtatcgggtgctcgaaaaagactctgtgacactgaaatgccaaggggcctactctcccgaggacaactccacacagtggtttcataatgagtccctcatcagctctcaggccagctcttatttcattgatgccgctacagtggacgactccggcgagtatcggtgtcagaccaatctgtctacactgtctgaccccgtgcagcttgaggtccacattggatggttgctcttgcaagccccacgctgggttttcaaagaggaagatccaatccatctgcggtgccacagctggaaaaacaccgctctccacaaagtcacatacctgcaaaatggcaaaggacgcaaatacttccatcacaattccgatttttacattccgaaggctaccctgaaagacagcggcagctatttctgccggggactcgtcggctccaagaatgtgtcctccgaaaccgtgaatatcacgattacccaaggactggctgtgcctacaatctctagcttctttccgcctggataccaagtctccttctgtcttgtgatggtcctcctgtttgctgtggacacaggactgtacttttccgtgaaaacgaacatccgcagctccacacgcgattggaaagatcacaagtttaaatggcgcaaagatccccaggacaag

SEQ ID NO: 4927 - DNA, 1515 bp, Artificial Sequence
  Synthetic Polynucleotide
atggccttaccagtgaccgccttgctcctgccgctggccttgctgctccacgccgccaggccggacatcgtgatgacccagagccccgatagcctggccgtgtctctgggagagagagccaccatcaactgcaagagcagccagagcctgctgaacagcggcgaccagaagaactacctgacctggtatcagcagaagcccggccagccccccaagctgctgatctactgggccagcaccagagaaagcggcgtgcccgatagattcagcggcagcggaagtggcaccgacttcaccctgaccatcagttctcttcaggccgaggacgtggccgtgtactactgccagaacgactacagctaccccctgaccttcggccagggcaccaaggtggaaatcaagggcggaggcggaagtggaggcggaggatctggcggcggaggctctcaggtgcagctggtgcagtctggggccgaagtgaagaaaaccggcagcagcgtgaaggtgtcctgcaaggccagcggctacacctttaccgaccacgccattcacgtgtggcggcaggctccaggacaggccctggaatggatgggccacttcagccccggcaacaccgacatcaagtacaacgacaagttcaagggcagagtgaccctgaccgtggaccgcagcatgagcaccgcctacatggaactgagcagcctgcggagcgaggacaccgccatgtactattgcaagaccagcaccttctttttcgactactggggccagggaacaatggtcaccgtgtccagcacgcgtggaatgaggactgaggatcttcccaaagctgtcgtctttctcgaaccccaatggtatcgggtgctcgaaaaagactctgtgacactgaaatgccaaggggcctactctcccgaggacaactccacacagtggtttcataatgagtccctcatcagctctcaggccagctcttatttcattgatgccgctacagtggacgactccggcgagtatcggtgtcagaccaatctgtctacactgtctgaccccgtgcagcttgaggtccacattggatggttgctcttgcaagccccacgctgggttttcaaagaggaagatccaatccatctgcggtgccacagctggaaaaacaccgctctccacaaagtcacatacctgcaaaatggcaaaggacgcaaatacttccatcacaattccgatttttacattccgaaggctaccctgaaagacagcggcagctatttctgccggggactcgtcggctccaagaatgtgtcctccgaaaccgtgaatatcacgattacccaaggactggctgtgcctacaatctctagcttctttccgcctggataccaagtctccttctgtcttgtgatggtcctcctgtttgctgtggacacaggactgtacttttccgtgaaaacgaacatccgcagctccacacgcgattggaaagatcacaagtttaaatggcgcaaagatccccaggacaag

SEQ ID NO: 4928 - DNA, 1512 bp, Artificial Sequence
  Synthetic Polynucleotide
atggccttaccagtgaccgccttgctcctgccgctggccttgctgctccacgccgccaggccggacatccagatgacccagagccccagcagcctgtctgccagcgtgggcgacagagtgaccatcacatgcaaggccagccaggacgtgtccattgccgtggcctggtatcagcagaagcccggcaaggcccccaaggtgctgatctacagcgccagctacagatacaccggcgtgcccgacagattcagcggctctggcagcggcaccgacttcaccttcaccatcagctccctccagcccgaggatattgccgtgtactactgccagcagcactacatcacccccctgacctttggcggaggcaccaaggtggaaatcaagggcggaggcggaagtggaggcggaggatctggcggcggaggctctcagatccaactggtgcagagcggccacgaagtgaagaaacctggggccagcgtgaaggtgtcctgcaaagccagcggctacacctttaccaactacggcatgaactgggtgcgccaggcccctggacagggcctggaatggatgggctggatcaacaccaagaccggcgagcccacctacgccgaagagttcaagggcagattcgtgttcagcctggaaaccagcgcctccaccgcctacctccagatcagctctctgaaggccgaggacaccgccatgtacttttgcggcagaggcggctacggcagcagctactggtacttcgatgtgtggggccagggcaccaccgtgaccgtgtcatctacgcgtggaatgaggactgaggatcttcccaaagctgtcgtctttctcgaaccccaatggtatcgggtgctcgaaaaagactctgtgacactgaaatgccaaggggcctactctcccgaggacaactccacacagtggtttcataatgagtccctcatcagctctcaggccagctcttatttcattgatgccgctacagtggacgactccggcgagtatcggtgtcagaccaatctgtctacactgtctgaccccgtgcagcttgaggtccacattggatggttgctcttgcaagccccacgctgggttttcaaagaggaagatccaatccatctgcggtgccacagctggaaaaacaccgctctccacaaagtcacatacctgcaaaatggcaaaggacgcaaatacttccatcacaattccgatttttacattccgaaggctaccctgaaagacagcggcagctatttctgccggggactcgtcggctccaagaatgtgtcctccgaaaccgtgaatatcacgattacccaaggactggctgtgcctacaatctctagcttctttccgcctggataccaagtctccttctgtcttgtgatggtcctcctgtttgctgtggacacaggactgtacttttccgtgaaaacgaacatccgcagctccacacgcgattggaaagatcacaagtttaaatggcgcaaagatccccaggacaag

SEQ ID NO: 4929 - DNA, 1521 bp, Artificial Sequence
  Synthetic Polynucleotide
atggccttaccagtgaccgccttgctcctgccgctggccttgctgctccacgccgccaggccgcaggctgtcgtgacacagcctcctagcgcctctggcacaccaggccagagagtgaccatctcctgtagcggcagcagcagcaacatcggcagcaacaccgtgaactggtatcagcaggtgcccggcaccgctcccaagctgctgatctacagcaacaaccagcggcccagcggcgtgcccgatagattttctggcagcaagagcggcaccagcgccagcctggctatctctggactccagtccgaggacgaggccgactactattgcgccgcctgggacgatagcctgaacggctgggtgttcggcggaggcaccaagctgacagtgctgggcggaggcggaagtggaggcggaggatctggcggcggaggctctcagatgcaactggtgcagagcggagccgaagtgaaagagcctggcgagagcctgcggatctcctgcaagggcagcggctacagcttcaccaatttctggatctcttgggtgcgccagatgcccggcaagggcctggaatggatgggcagagtggaccccggctactcctacagcacctacagccctagcttccagggccacgtgaccatcagcgccgacaagagcaccagcaccgcctacctccagtggaacagcctgaaggccagcgacaccgccatgtactactgcgccagagtgcagtacagcggctattacgattggttcgacccctggggccagggcacactcgtgacagtgtcaagcacgcgtggaatgaggactgaggatcttcccaaagctgtcgtctttctcgaaccccaatggtatcgggtgctcgaaaaagactctgtgacactgaaatgccaaggggcctactctcccgaggacaactccacacagtggtttcataatgagtccctcatcagctctcaggccagctcttatttcattgatgccgctacagtggacgactccggcgagtatcggtgtcagaccaatctgtctacactgtctgaccccgtgcagcttgaggtccacattggatggttgctcttgcaagccccacgctgggttttcaaagaggaagatccaatccatctgcggtgccacagctggaaaaacaccgctctccacaaagtcacatacctgcaaaatggcaaaggacgcaaatacttccatcacaattccgatttttacattccgaaggctaccctgaaagacagcggcagctatttctgccggggactcgtcggctccaagaatgtgtcctccgaaaccgtgaatatcacgattacccaaggactggctgtgcctacaatctctagcttctttccgcctggataccaagtctccttctgtcttgtgatggtcctcctgtttgctgtggacacaggactgtacttttccgtgaaaacgaacatccgcagctccacacgcgattggaaagatcacaagtttaaatggcgcaaagatccccaggacaag

SEQ ID NO: 4930 - DNA, 1503 bp, Artificial Sequence
  Synthetic Polynucleotide
atggccttaccagtgaccgccttgctcctgccgctggccttgctgctccacgccgccaggccggacatccagatgacccagagccccagcacactgagcgccagcgtgggcgacagagtgaccatcacctgtcgggccagccagaacatcaacaagtggctggcctggtatcagcagaggcccggaaaagccccccagctgctgatctacaaggccagcagcctggaaagcggcgtgcccagcagattttctggcagcggctctggcaccgagtacaccctgaccatcagctccctccagcccgacgacttcgccacctactactgccagcagtacaacagctacgccaccttcggccagggcaccaaggtggaaatcaagagaggcggaggcggaagtggaggcggaggatctggcggcggaggctctcaggtgcagctggtgcagtctggggccgaagtgaagaagcctggcgagagcctgaagatcagctgcaagggctccggctacaacttctctaacaagtggatcggctgggtgcgccagctgcctggcagaggactggaatggatcgccatcatctaccccggctacagcgacatcacctacagccccagcttccagggccgcgtgacaatcagcgccgacaccagcatcaacaccgcctacctgcactggcacagcctgaaggccagcgacaccgccatgtactactgcgtgcggcatacagccctggctggcttcgattattggggcctgggcaccctcgtgaccgtgtctagtacgcgtggaatgaggactgaggatcttcccaaagctgtcgtctttctcgaaccccaatggtatcgggtgctcgaaaaagactctgtgacactgaaatgccaaggggcctactctcccgaggacaactccacacagtggtttcataatgagtccctcatcagctctcaggccagctcttatttcattgatgccgctacagtggacgactccggcgagtatcggtgtcagaccaatctgtctacactgtctgaccccgtgcagcttgaggtccacattggatggttgctcttgcaagccccacgctgggttttcaaagaggaagatccaatccatctgcggtgccacagctggaaaaacaccgctctccacaaagtcacatacctgcaaaatggcaaaggacgcaaatacttccatcacaattccgatttttacattccgaaggctaccctgaaagacagcggcagctatttctgccggggactcgtcggctccaagaatgtgtcctccgaaaccgtgaatatcacgattacccaaggactggctgtgcctacaatctctagcttctttccgcctggataccaagtctccttctgtcttgtgatggtcctcctgtttgctgtggacacaggactgtacttttccgtgaaaacgaacatccgcagctccacacgcgattggaaagatcacaagtttaaatggcgcaaagatccccaggacaag

SEQ ID NO: 4931 - DNA, 1518 bp, Artificial Sequence
  Synthetic Polynucleotide
atggccttaccagtgaccgccttgctcctgccgctggccttgctgctccacgccgccaggccgcagagcgtcgtgacacagcctcctagcgtgtcagtggcccctggcaagaccgccagaatcacctgtggccggaacaacatcggcagcaagagcgtgcactggtatcagcagaagcccggccaggctcctgtgctggtggtgtacgacgacagcgacagacccagcggcatccccgagagattcagcggcagcaactccggcaataccgccaccctgaccatcagcagagtggaagccggcgacgaggccgactactactgccaagtgtgggacagcagcagcgatcacgtggtgtttggcggaggcaccaagctgacagtgctgggtggcggaggcggaagtggaggcggaggatctggcggcggaggctctgaagtgcaactggtgcagtctggcggaggggtcgtgcggcctggcggatctctgagactgtcttgtgccgccagcggcttcaccttcgacgactacggcatgagctgggtgcgccaggcccctggaaaaggcctggaatgggtgtccggcatcaactggaatggcggcagcaccggctacgccgattctgtgcggggcagattcaccatcagccgggacaacgccaagaacagcctgtacctgcagatgaactccctgcgggccgaggacaccgccctgtactattgcgccagagagcggggctacggctaccacgaccctcacgattattggggccagggcacccttgtcaccgtgtcctctacgcgtggaatgaggactgaggatcttcccaaagctgtcgtctttctcgaaccccaatggtatcgggtgctcgaaaaagactctgtgacactgaaatgccaaggggcctactctcccgaggacaactccacacagtggtttcataatgagtccctcatcagctctcaggccagctcttatttcattgatgccgctacagtggacgactccggcgagtatcggtgtcagaccaatctgtctacactgtctgaccccgtgcagcttgaggtccacattggatggttgctcttgcaagccccacgctgggttttcaaagaggaagatccaatccatctgcggtgccacagctggaaaaacaccgctctccacaaagtcacatacctgcaaaatggcaaaggacgcaaatacttccatcacaattccgatttttacattccgaaggctaccctgaaagacagcggcagctatttctgccggggactcgtcggctccaagaatgtgtcctccgaaaccgtgaatatcacgattacccaaggactggctgtgcctacaatctctagcttctttccgcctggataccaagtctccttctgtcttgtgatggtcctcctgtttgctgtggacacaggactgtacttttccgtgaaaacgaacatccgcagctccacacgcgattggaaagatcacaagtttaaatggcgcaaagatccccaggacaag

SEQ ID NO: 4932 - DNA, 1515 bp, Artificial Sequence
  Synthetic Polynucleotide
atggccttaccagtgaccgccttgctcctgccgctggccttgctgctccacgccgccaggccggacatcgtgctgacacagagccctgcttctctggccgtgtctctgggacagagagccaccatcagctgtagagccagcgagagcgtggacaactacggcaacaccttcatgcactggtatcagcagaagcccggccagcctcctaagctgctgatctacagagccagcaacctggaaagcggcatccccgccagattttctggcagcggcagcagaaccgacttcaccctgaccatcaatcccgtggaagccgacgacgtggcaacctactactgccagcagagcaacgaggaccctcctacatttggagccggcaccaagctggaactgaaaggcggaggcggaagtggaggcggaggatctggcggcggaggctctcagattcagctggtgcagtctggccccgagctgaagaaacctggcgagacagtgaagatcagctgcaaggccagcggctacatcttcaccaattacggcatgaactgggtcaagcaggcccctggcaagagcttcaagtggatgggctggatcaacacctacaccggcgagagcacatacagcgccgacttcaagggcagattcgccttcagcctggaaaccagcgccagcacagcctacctgcacatcaacgacctgaagaacgaggacaccgccacctacttttgcgccagaagcggcggctacgaccctatggattattggggccagggcaccagcgtgaccgtttcttctacgcgtggaatgaggactgaggatcttcccaaagctgtcgtctttctcgaaccccaatggtatcgggtgctcgaaaaagactctgtgacactgaaatgccaaggggcctactctcccgaggacaactccacacagtggtttcataatgagtccctcatcagctctcaggccagctcttatttcattgatgccgctacagtggacgactccggcgagtatcggtgtcagaccaatctgtctacactgtctgaccccgtgcagcttgaggtccacattggatggttgctcttgcaagccccacgctgggttttcaaagaggaagatccaatccatctgcggtgccacagctggaaaaacaccgctctccacaaagtcacatacctgcaaaatggcaaaggacgcaaatacttccatcacaattccgatttttacattccgaaggctaccctgaaagacagcggcagctatttctgccggggactcgtcggctccaagaatgtgtcctccgaaaccgtgaatatcacgattacccaaggactggctgtgcctacaatctctagcttctttccgcctggataccaagtctccttctgtcttgtgatggtcctcctgtttgctgtggacacaggactgtacttttccgtgaaaacgaacatccgcagctccacacgcgattggaaagatcacaagtttaaatggcgcaaagatccccaggacaag

SEQ ID NO: 4933 - DNA, 1509 bp, Artificial Sequence
  Synthetic Polynucleotide
atggccttaccagtgaccgccttgctcctgccgctggccttgctgctccacgccgccaggccggagatcgtgctgacacagagccctggcaccctgagcctgtctccaggcgaaagagccacactgagctgtcgggccagccagagcgtgtccaatacctacctggcctggtatcaccagaggcccggacaggctccccggctgctgatctatggcgcttctagcagagccaccggcatccccgatagattcagcggctctggcagcggcaccgacttcgccctgacaatcagctccctggaacccgaggacttcgccgtgtactactgccagcagtacagcaactcctggaccttcggccagggcaccaaggtggaaatcaagagaggcggaggcggaagtggaggcggaggatctggcggcggaggctctcaggtgcaactggtggaatctggcgggggagtggtgcagcctggcagaagcctgagactgtcttgtgccgccagcggcttcaccttcagcagctacgacatgcactgggtgcgccaggcccctggcaaaggactggaatgggtggccgtgatctcctacgacggcaccaacgagtattacgccgacagcgtgaagggccggttcaccatctccagagacaccagcaagaacaccctgtacctccagatgaacagcctgcgggccgaggacacagccgtgtattattgcgccagagagcggtacttcgactggtccttcgactactggggccagggaaccctggtgtccgtgtctagtacgcgtggaatgaggactgaggatcttcccaaagctgtcgtctttctcgaaccccaatggtatcgggtgctcgaaaaagactctgtgacactgaaatgccaaggggcctactctcccgaggacaactccacacagtggtttcataatgagtccctcatcagctctcaggccagctcttatttcattgatgccgctacagtggacgactccggcgagtatcggtgtcagaccaatctgtctacactgtctgaccccgtgcagcttgaggtccacattggatggttgctcttgcaagccccacgctgggttttcaaagaggaagatccaatccatctgcggtgccacagctggaaaaacaccgctctccacaaagtcacatacctgcaaaatggcaaaggacgcaaatacttccatcacaattccgatttttacattccgaaggctaccctgaaagacagcggcagctatttctgccggggactcgtcggctccaagaatgtgtcctccgaaaccgtgaatatcacgattacccaaggactggctgtgcctacaatctctagcttctttccgcctggataccaagtctccttctgtcttgtgatggtcctcctgtttgctgtggacacaggactgtacttttccgtgaaaacgaacatccgcagctccacacgcgattggaaagatcacaagtttaaatggcgcaaagatccccaggacaag

SEQ ID NO: 4934 - DNA, 1506 bp, Artificial Sequence
  Synthetic Polynucleotide
atggccttaccagtgaccgccttgctcctgccgctggccttgctgctccacgccgccaggccggagctgacacaggaccctgctgtgtctgttgccctgggccagacagtgcggattacctgtcaaggcgacagcctgagaagcaactacgccaactggtatcagcagaagcccggacaggctcccgtgctggttatctacggccagaacaacagacccagcggcatccccgatagattcagcggctctagctctggcaataccgccagcctgacaatcactggcgctcaggctgccgatgaggccgactactactgcgatagcagagtgtccaccggcaatcacgtggtgtttggcggcggaacaaagctgacagtgctcggacaaggcggaggcggaagtggaggcggaggatctggcggcggaggctctgaagttcagctggtgcagagcggagccgaagtgaagaaacctggggcctctgtgaaggtgtcctgcaaggcttccggctacacctttaccagctacgccatgcactgggtccgacaggcacctggacaacggcttgaatggatgggctggatcaacgccggcaacggcaacaccaagtacagccagaaattccagggccgcgtgaccatcaccagagatacaagcgccagcaccgcctacatggaactgtctagcctgagatccgaggacaccgccgtgtactactgtgccagagacatcagctacggcagcttcgactattggggccagggcacactggtcaccgttagctctacgcgtggaatgaggactgaggatcttcccaaagctgtcgtctttctcgaaccccaatggtatcgggtgctcgaaaaagactctgtgacactgaaatgccaaggggcctactctcccgaggacaactccacacagtggtttcataatgagtccctcatcagctctcaggccagctcttatttcattgatgccgctacagtggacgactccggcgagtatcggtgtcagaccaatctgtctacactgtctgaccccgtgcagcttgaggtccacattggatggttgctcttgcaagccccacgctgggttttcaaagaggaagatccaatccatctgcggtgccacagctggaaaaacaccgctctccacaaagtcacatacctgcaaaatggcaaaggacgcaaatacttccatcacaattccgatttttacattccgaaggctaccctgaaagacagcggcagctatttctgccggggactcgtcggctccaagaatgtgtcctccgaaaccgtgaatatcacgattacccaaggactggctgtgcctacaatctctagcttctttccgcctggataccaagtctccttctgtcttgtgatggtcctcctgtttgctgtggacacaggactgtacttttccgtgaaaacgaacatccgcagctccacacgcgattggaaagatcacaagtttaaatggcgcaaagatccccaggacaag

SEQ ID NO: 4935 - DNA, 1494 bp, Artificial Sequence
  Synthetic Polynucleotide
atggccttaccagtgaccgccttgctcctgccgctggccttgctgctccacgccgccaggccggacatccagatgacacagagccctagcagcctgtctgccagcgtgggagacagagtgaccatcacctgtagcgccaccagcagcatcagctacatgcactggtatcagcagaagcccggcaaggcccctaaaggctggatctacgataccagcaaactggcccacggcgtgcccagcagattttctggttctggcagcggcaccgacttcaccctgacaatatctagcctccagcctgaggacttcgccacctactactgccaccagagaagaagctaccccttcaccttcggccagggcaccaaggtggaaatcaaaggcggaggcggaagtggaggcggaggatctggcggcggaggctctgaagtgcaactggttcagagcggagccgaagtgaagaaacctggggcctctgtgaaggtgtcctgcaaggcttccggctacacctttaccaatttctggattcactgggtccgacaggctccaggccaaggactggaatggatcggagagatcgaccccagcgacagctacaccaactacaaccagaaattcaaaggccgggtcaccatcaccagagacaccagcacaagcaccgcctacctggaactgagcagcctgagaagcgaggacaccgccgtgtactactgcgccagggaaatcaccaccgtggattattggggccagggaaccctggtcaccgtgtcatctacgcgtggaatgaggactgaggatcttcccaaagctgtcgtctttctcgaaccccaatggtatcgggtgctcgaaaaagactctgtgacactgaaatgccaaggggcctactctcccgaggacaactccacacagtggtttcataatgagtccctcatcagctctcaggccagctcttatttcattgatgccgctacagtggacgactccggcgagtatcggtgtcagaccaatctgtctacactgtctgaccccgtgcagcttgaggtccacattggatggttgctcttgcaagccccacgctgggttttcaaagaggaagatccaatccatctgcggtgccacagctggaaaaacaccgctctccacaaagtcacatacctgcaaaatggcaaaggacgcaaatacttccatcacaattccgatttttacattccgaaggctaccctgaaagacagcggcagctatttctgccggggactcgtcggctccaagaatgtgtcctccgaaaccgtgaatatcacgattacccaaggactggctgtgcctacaatctctagcttctttccgcctggataccaagtctccttctgtcttgtgatggtcctcctgtttgctgtggacacaggactgtacttttccgtgaaaacgaacatccgcagctccacacgcgattggaaagatcacaagtttaaatggcgcaaagatccccaggacaag

SEQ ID NO: 4936 - DNA, 1515 bp, Artificial Sequence
  Synthetic Polynucleotide
atggccttaccagtgaccgccttgctcctgccgctggccttgctgctccacgccgccaggccggacatccagatgacacagagccctagcagcctgtctgccagcgtgggagacagagtgaccatcacatgcaaggccagccagggcttcaacaaatacgtggcctggtatcagcagaagcccggcaaggctcctaagctgctgatctactacaccagcacactccagcctggcgtgcccagcagattttctggctctggcagcggcagagactacaccctgacaatatccagcctccagccagaggacttcgccacctactactgtctccagtacggcaacctgctgtacgcctttggacagggcaccaaggtggaaatcaagagaggcggaggcggaagtggaggcggaggatctggcggcggaggctctgaagttcagcttgtgcagagcggagccgaagtgaagaaacctggggcctctgtgaaggtgtcctgcaaagccagcggctacacctttaccagctactggatcggctgggtccgacaggctcctggacaaggactggaatggatcggcgacatctatcccggcggaggctacaccaactacaacgagaagttcaagggccgcgtgacaatcaccagagacacctctacaagcaccgcctacctggaactgagcagcctgagaagcgaggacaccgccgtgtactactgcgccagactggatggcagcagctacagaggcgctatggattcttggggccagggcacactggtcaccgtttcttctacgcgtggaatgaggactgaggatcttcccaaagctgtcgtctttctcgaaccccaatggtatcgggtgctcgaaaaagactctgtgacactgaaatgccaaggggcctactctcccgaggacaactccacacagtggtttcataatgagtccctcatcagctctcaggccagctcttatttcattgatgccgctacagtggacgactccggcgagtatcggtgtcagaccaatctgtctacactgtctgaccccgtgcagcttgaggtccacattggatggttgctcttgcaagccccacgctgggttttcaaagaggaagatccaatccatctgcggtgccacagctggaaaaacaccgctctccacaaagtcacatacctgcaaaatggcaaaggacgcaaatacttccatcacaattccgatttttacattccgaaggctaccctgaaagacagcggcagctatttctgccggggactcgtcggctccaagaatgtgtcctccgaaaccgtgaatatcacgattacccaaggactggctgtgcctacaatctctagcttctttccgcctggataccaagtctccttctgtcttgtgatggtcctcctgtttgctgtggacacaggactgtacttttccgtgaaaacgaacatccgcagctccacacgcgattggaaagatcacaagtttaaatggcgcaaagatccccaggacaag

SEQ ID NO: 4937 - DNA, 1503 bp, Artificial Sequence
  Synthetic Polynucleotide
atggccttaccagtgaccgccttgctcctgccgctggccttgctgctccacgccgccaggccggacatccagatgacacagagccctagcagcctgtctgccagcgtgggagacagagtgaccatcacctgtagagccagccaggacatccggtactacctgaactggtatcagcagaagcccggcaaggcccctaagctgctgatctatgtggcctccagcctccagagcggagtgccttctagattttctggcagcggctccggcaccgagtttaccctgacagtgtctagcttgcagcccgaggacttcgccacctactactgcctgcaagtgtacagcacccctcggacctttggacagggcaccaaggtggaaatcaaaggcggaggcggaagtggaggcggaggatctggcggcggaggctctgaagtgcagcttgttgaatctggcggcggactggctaagcctggcggatctctgagactgtcttgtgccgccagcggcttccggttcaccttcaacaactactacatggactgggtccgacaggcccctggacaaggacttgaatgggtgtccagaatcagcagcagcggcgaccctacttggtacgccgattctgtgaagggcagattcaccatcagcagagagaacgccaagaacaccctgttcctccagatgaactccctgagagccgaggacaccgccgtgtactattgtgcctctctgaccaccggcagcgattcttggggacagggcgtgctggttaccgtgtcatctacgcgtggaatgaggactgaggatcttcccaaagctgtcgtctttctcgaaccccaatggtatcgggtgctcgaaaaagactctgtgacactgaaatgccaaggggcctactctcccgaggacaactccacacagtggtttcataatgagtccctcatcagctctcaggccagctcttatttcattgatgccgctacagtggacgactccggcgagtatcggtgtcagaccaatctgtctacactgtctgaccccgtgcagcttgaggtccacattggatggttgctcttgcaagccccacgctgggttttcaaagaggaagatccaatccatctgcggtgccacagctggaaaaacaccgctctccacaaagtcacatacctgcaaaatggcaaaggacgcaaatacttccatcacaattccgatttttacattccgaaggctaccctgaaagacagcggcagctatttctgccggggactcgtcggctccaagaatgtgtcctccgaaaccgtgaatatcacgattacccaaggactggctgtgcctacaatctctagcttctttccgcctggataccaagtctccttctgtcttgtgatggtcctcctgtttgctgtggacacaggactgtacttttccgtgaaaacgaacatccgcagctccacacgcgattggaaagatcacaagtttaaatggcgcaaagatccccaggacaag

SEQ ID NO: 4938 - DNA, 1506 bp, Artificial Sequence
  Synthetic Polynucleotide
atggccttaccagtgaccgccttgctcctgccgctggccttgctgctccacgccgccaggccggagatcgtgatgacacagagccccgccacactgagtgtgtctccaggcgaaagagccacactgtcctgtagagccagccagagcgtgtccagaaacctggcctggtatcagcagaagcctggacaggctccccggctgttgatctacggcgcttctacaagagccaccggcattcccgccagattttctggctctggcagcggcaccgagttcaccctgacaatcggaagcctccagagcgaggacttcgccgtgtactactgccagcagtacaagacctggcctcggacctttggacagggcaccaacgtggaaatcaaaggcggaggcggaagtggaggcggaggatctggcggcggaggctctcaagttcagctgcaacaatggggagccggcctgctgaagcctagcgaaacactgtctctgacctgcgccgtgttcggcggctctttcagcggctactactggtcctggatcagacagcctcctggcaaaggactggaatggatcggcgagatcaaccaccggggcaacaccaacgacaaccccagcctgaaaagcagagtgaccatcagcgtggacaccagcaagaaccagttcgccctgaagctgagcagcgtgacagccgctgataccgccgtgtattattgcgccagagagcggggctacacctacggcaatttcgatcactggggccagggcaccctggtcacagtttcttctacgcgtggaatgaggactgaggatcttcccaaagctgtcgtctttctcgaaccccaatggtatcgggtgctcgaaaaagactctgtgacactgaaatgccaaggggcctactctcccgaggacaactccacacagtggtttcataatgagtccctcatcagctctcaggccagctcttatttcattgatgccgctacagtggacgactccggcgagtatcggtgtcagaccaatctgtctacactgtctgaccccgtgcagcttgaggtccacattggatggttgctcttgcaagccccacgctgggttttcaaagaggaagatccaatccatctgcggtgccacagctggaaaaacaccgctctccacaaagtcacatacctgcaaaatggcaaaggacgcaaatacttccatcacaattccgatttttacattccgaaggctaccctgaaagacagcggcagctatttctgccggggactcgtcggctccaagaatgtgtcctccgaaaccgtgaatatcacgattacccaaggactggctgtgcctacaatctctagcttctttccgcctggataccaagtctccttctgtcttgtgatggtcctcctgtttgctgtggacacaggactgtacttttccgtgaaaacgaacatccgcagctccacacgcgattggaaagatcacaagtttaaatggcgcaaagatccccaggacaag

SEQ ID NO: 4939 - DNA, 1524 bp, Artificial Sequence
  Synthetic Polynucleotide
atggccttaccagtgaccgccttgctcctgccgctggccttgctgctccacgccgccaggccggacatccagatgacccagagccccagcagcctgtctgccagcgtgggcgacagagtgaccatcacatgcaaggccagcaagaacatcagaagctacctggcctggtatcagcagaagcccggcaaggcccccaagctgctgatctacagcggcagcacactgcacagcggcgtgcccagcagattttccggctctggcagcggcaccgacttcaccctgaccatctctagcctccagcccgaggacttcgccacctactactgccagcagcaccacgagtaccccctgacattcggccagggcaccaaggtggaaatcaagagaggcggaggcggaagtggaggcggaggatctggcggcggaggctctcaggtgcaactccaggaatctggccccggactcgtgaagcccagcgagacactgagcctgacctgtaccgtgtccggctacaccatcaccagcggctacgactggtcctggatcagacagcctcctggcaagggcctggaatggatcggctacatcaactacggcggctccaccaactacaagcccagcctgggaagccgcgtgacaatcagcgtggacacctccaagaaccagttcagcctgaagctgagcagcgtgacagccgccgataccgccgtgtactactgcgcccggtacaacgagtacaagagctacatctacgattggtacttcgacttctggggccagggaaccctcgtgaccgtgtctagtacgcgtggaatgaggactgaggatcttcccaaagctgtcgtctttctcgaaccccaatggtatcgggtgctcgaaaaagactctgtgacactgaaatgccaaggggcctactctcccgaggacaactccacacagtggtttcataatgagtccctcatcagctctcaggccagctcttatttcattgatgccgctacagtggacgactccggcgagtatcggtgtcagaccaatctgtctacactgtctgaccccgtgcagcttgaggtccacattggatggttgctcttgcaagccccacgctgggttttcaaagaggaagatccaatccatctgcggtgccacagctggaaaaacaccgctctccacaaagtcacatacctgcaaaatggcaaaggacgcaaatacttccatcacaattccgatttttacattccgaaggctaccctgaaagacagcggcagctatttctgccggggactcgtcggctccaagaatgtgtcctccgaaaccgtgaatatcacgattacccaaggactggctgtgcctacaatctctagcttctttccgcctggataccaagtctccttctgtcttgtgatggtcctcctgtttgctgtggacacaggactgtacttttccgtgaaaacgaacatccgcagctccacacgcgattggaaagatcacaagtttaaatggcgcaaagatccccaggacaag

SEQ ID NO: 4940 - DNA, 1530 bp, Artificial Sequence
  Synthetic Polynucleotide
atggccttaccagtgaccgccttgctcctgccgctggccttgctgctccacgccgccaggccgcagtctgtggtcacacagcctccatccgtgtctgctgcccctggacagaaagtgaccatctcctgtagcggcagcagcagcaacatcggcaacaactacgtgtcctggtatcagcagctccccggcacagctcccaaactgctgatctacgacaacaacaagcggcccagcggcatccccgatagattttctggcagcaagagcggcaccagcgccacactgggaattaccggacttcagacaggcgacgaggccgactactactgtggcacatgggatggcagcctgtacaccatgcttttcggcggaggcaccaagctgacagtgcttggcggaggcggaagtggaggcggaggatctggcggcggaggctctgaagtgcaactggtggaatctggcggcggactggttaagcctggcggatctctgagactgtcttgtgccgccagcggcttcaccttcagcaatgcctggatgagctgggttcgacaggcccctggaaaaggactggaatgggtcggattcatccggtccaaagcctacggcggcaccacagaatatgccgcctctgtgaagggcagattcaccatcagccgggacgacagcaagtctatcgcctacctccagatgaacaacctgaaaaccgaggacaccgccgtgtactactgcgccagagatggcctgtacagcagctcttggtacgacagcgattactggggccagggcacactggtcacagtgtcatctacgcgtggaatgaggactgaggatcttcccaaagctgtcgtctttctcgaaccccaatggtatcgggtgctcgaaaaagactctgtgacactgaaatgccaaggggcctactctcccgaggacaactccacacagtggtttcataatgagtccctcatcagctctcaggccagctcttatttcattgatgccgctacagtggacgactccggcgagtatcggtgtcagaccaatctgtctacactgtctgaccccgtgcagcttgaggtccacattggatggttgctcttgcaagccccacgctgggttttcaaagaggaagatccaatccatctgcggtgccacagctggaaaaacaccgctctccacaaagtcacatacctgcaaaatggcaaaggacgcaaatacttccatcacaattccgatttttacattccgaaggctaccctgaaagacagcggcagctatttctgccggggactcgtcggctccaagaatgtgtcctccgaaaccgtgaatatcacgattacccaaggactggctgtgcctacaatctctagcttctttccgcctggataccaagtctccttctgtcttgtgatggtcctcctgtttgctgtggacacaggactgtacttttccgtgaaaacgaacatccgcagctccacacgcgattggaaagatcacaagtttaaatggcgcaaagatccccaggacaag

SEQ ID NO: 4941 - DNA, 1545 bp, Artificial Sequence
  Synthetic Polynucleotide
atggccttaccagtgaccgccttgctcctgccgctggccttgctgctccacgccgccaggccgcagtctgtgctgacacagcctcctagtgtgtctggcgctcctggacagagagtgaccatctcttgtaccggcagcagcagcaatatcggagccggctatgacgtgcactggtatcagcagctccctggcacagcccctaaactgctgatcttcggcaacagcaacagacccagcggcgtgcccgatagattcagcggctttaagagcggcacaagcgccagcctggctatcactggactgcaagccgaggacgaggccgactacttctgccagagctacgatagcagcctgagcggcagcggagtgtttggcacaggcaccaaagtgacagtgcttggcggcggaggcggaagtggaggcggaggatctggcggcggaggctctcaaatgcaactggttcaaagcggcggtggcctggtgcaacctggaagaagtctgagactgagctgtgccgccagcggcttcaccttcgatgattacgccatgcactgggtccgacaggcccctggaaaaggactggaatgggtgtccggcatctcctggaatagcggctctatcggctacgccgacagcgtgaagggcagattcaccatcagccgggacaacgccaagaacagcctgtacctccagatgaactccctgagagccgaggatacagccctgtactactgcgccaaggacatccacagcggcagctactacggcctgctgtactacgctatggacgtgtggggccagggcacaaccgtgacagtttcttctacgcgtggaatgaggactgaggatcttcccaaagctgtcgtctttctcgaaccccaatggtatcgggtgctcgaaaaagactctgtgacactgaaatgccaaggggcctactctcccgaggacaactccacacagtggtttcataatgagtccctcatcagctctcaggccagctcttatttcattgatgccgctacagtggacgactccggcgagtatcggtgtcagaccaatctgtctacactgtctgaccccgtgcagcttgaggtccacattggatggttgctcttgcaagccccacgctgggttttcaaagaggaagatccaatccatctgcggtgccacagctggaaaaacaccgctctccacaaagtcacatacctgcaaaatggcaaaggacgcaaatacttccatcacaattccgatttttacattccgaaggctaccctgaaagacagcggcagctatttctgccggggactcgtcggctccaagaatgtgtcctccgaaaccgtgaatatcacgattacccaaggactggctgtgcctacaatctctagcttctttccgcctggataccaagtctccttctgtcttgtgatggtcctcctgtttgctgtggacacaggactgtacttttccgtgaaaacgaacatccgcagctccacacgcgattggaaagatcacaagtttaaatggcgcaaagatccccaggacaag

SEQ ID NO: 4942 - DNA, 1545 bp, Artificial Sequence
  Synthetic Polynucleotide
atggccttaccagtgaccgccttgctcctgccgctggccttgctgctccacgccgccaggccgctgcctgttctgacacagcctccatctgcctctggcacacctggacagagagtgaccatcagctgtagcggcagaagcagcaacatcggcagcaacagcgtgaactggtacagacagcttcctggcgctgcccctaagctgctgatctacagcaacaaccagcggcctcctggcgtgccagtcagattttctggcagcaagagcggcacaagcgccagcctggctatttctggactccagtctgaggacgaggccacctactactgtgccacctgggacgacaacctgaacgtgcactacgtgttcggcaccggcaccaaagtgacagtgcttggaagtagaggcggaggcggaagtggaggcggaggatctggcggcggaggctctcttgaaatggctcaggtgcagctggtgcagagcggagccgaagtgaagaaacctggcagcagcgtgaaggtgtcctgcaaagcttctggcggcaccttcagcagctacgccatctcttgggttcgacaggcccctggacaaggactggaatggatgggcagaatcatccccatcctgggaatcgccaactacgcccagaaattccagggcagagtgacaatcaccgccgacaagagcaccagcaccgcctacatggaactgagcagcctgagaagcgaggacaccgccgtgtactattgtgcaagaggcggctactacagccacgacatgtggagcgaagattggggccagggcacactggtcacagtgtcatctacgcgtggaatgaggactgaggatcttcccaaagctgtcgtctttctcgaaccccaatggtatcgggtgctcgaaaaagactctgtgacactgaaatgccaaggggcctactctcccgaggacaactccacacagtggtttcataatgagtccctcatcagctctcaggccagctcttatttcattgatgccgctacagtggacgactccggcgagtatcggtgtcagaccaatctgtctacactgtctgaccccgtgcagcttgaggtccacattggatggttgctcttgcaagccccacgctgggttttcaaagaggaagatccaatccatctgcggtgccacagctggaaaaacaccgctctccacaaagtcacatacctgcaaaatggcaaaggacgcaaatacttccatcacaattccgatttttacattccgaaggctaccctgaaagacagcggcagctatttctgccggggactcgtcggctccaagaatgtgtcctccgaaaccgtgaatatcacgattacccaaggactggctgtgcctacaatctctagcttctttccgcctggataccaagtctccttctgtcttgtgatggtcctcctgtttgctgtggacacaggactgtacttttccgtgaaaacgaacatccgcagctccacacgcgattggaaagatcacaagtttaaatggcgcaaagatccccaggacaag

SEQ ID NO: 4943 - DNA, 1512 bp, Artificial Sequence
  Synthetic Polynucleotide
atggccttaccagtgaccgccttgctcctgccgctggccttgctgctccacgccgccaggccggacatcgtgctgacacagagccctgcttctctggccgtgtctctgggagagagagccaccatcaactgtagagccagcgagagcgtgtccgtgattggagcccacctgatccactggtatcagcagaagcctggacagcctcctaagctgctgatctacctggcctccaacctggaaacaggcgtgccagccagattttctggcagcggctctggcaccgatttcaccctgacaatcagcagcctccaggccgaagatgccgccatctactactgcctccagagccggatcttccccagaacctttggacagggcaccaagctggaaatcaaaggcggaggcggaagtggaggcggaggatctggcggcggaggctctcaagttcagctggtgcagtctggctccgagctgaagaaacctggcgagtccgtgaagatcagctgcaaggccagcggctacaccttcaccgactacagcatcaactgggtcaagcaggcccctggacagggactgaaatggatgggctggatcaacaccgagacaagagagcccgcctacgcctacgacttcagaggcagattcgtgttctccctggacaccagcgccagcacagcctatctccagatcagctctctgaaggccgaggataccgccgtgtacttctgcgccctggactacagctacgctatggactattggggccagggcaccctggtcacagtctcttctacgcgtggaatgaggactgaggatcttcccaaagctgtcgtctttctcgaaccccaatggtatcgggtgctcgaaaaagactctgtgacactgaaatgccaaggggcctactctcccgaggacaactccacacagtggtttcataatgagtccctcatcagctctcaggccagctcttatttcattgatgccgctacagtggacgactccggcgagtatcggtgtcagaccaatctgtctacactgtctgaccccgtgcagcttgaggtccacattggatggttgctcttgcaagccccacgctgggttttcaaagaggaagatccaatccatctgcggtgccacagctggaaaaacaccgctctccacaaagtcacatacctgcaaaatggcaaaggacgcaaatacttccatcacaattccgatttttacattccgaaggctaccctgaaagacagcggcagctatttctgccggggactcgtcggctccaagaatgtgtcctccgaaaccgtgaatatcacgattacccaaggactggctgtgcctacaatctctagcttctttccgcctggataccaagtctccttctgtcttgtgatggtcctcctgtttgctgtggacacaggactgtacttttccgtgaaaacgaacatccgcagctccacacgcgattggaaagatcacaagtttaaatggcgcaaagatccccaggacaag

SEQ ID NO: 4944 - DNA, 1515 bp, Artificial Sequence
  Synthetic Polynucleotide
atggccttaccagtgaccgccttgctcctgccgctggccttgctgctccacgccgccaggccggacatcgtgctgacacagtctcccgccacactgtcactgagccctggcgatagagccacactgagctgtagagccagcgagagcgtgacaatcctgggcagccacctgatctactggtatcagcagaagcccggacaggcccctagactgctgattcagctcgccagcaatgtgcagacaggcatccctgccagattttccggcagcggcagcagaaccgatttcaccctgaccataagcagcctggaacctgaggacttcgccgtgtactactgcctccagagccggacaatccccagaacctttggacagggcaccaagctggaaatcaagagaggcggaggcggaagtggaggcggaggatctggcggcggaggctctcaagttcaactggtgcagagcggctccgagctgaagaaacctggcgagtccgtgaagattagctgcaaggccagcggctacaccttcacacactacagcatgaactgggtccgacaggctccaggccaaggactggaatggatgggcagaatcaacaccgagacaggcgagcccctgtacgccgacgatttcaagggcagattcgtgttcagcctggacaccagcgccagcacagcctatctccagatcagctctctgaaggccgaggacaccgccgtgtattattgcagcaacgactacctgtactccctggactattggggccagggcacactggtcacagtgtctagtacgcgtggaatgaggactgaggatcttcccaaagctgtcgtctttctcgaaccccaatggtatcgggtgctcgaaaaagactctgtgacactgaaatgccaaggggcctactctcccgaggacaactccacacagtggtttcataatgagtccctcatcagctctcaggccagctcttatttcattgatgccgctacagtggacgactccggcgagtatcggtgtcagaccaatctgtctacactgtctgaccccgtgcagcttgaggtccacattggatggttgctcttgcaagccccacgctgggttttcaaagaggaagatccaatccatctgcggtgccacagctggaaaaacaccgctctccacaaagtcacatacctgcaaaatggcaaaggacgcaaatacttccatcacaattccgatttttacattccgaaggctaccctgaaagacagcggcagctatttctgccggggactcgtcggctccaagaatgtgtcctccgaaaccgtgaatatcacgattacccaaggactggctgtgcctacaatctctagcttctttccgcctggataccaagtctccttctgtcttgtgatggtcctcctgtttgctgtggacacaggactgtacttttccgtgaaaacgaacatccgcagctccacacgcgattggaaagatcacaagtttaaatggcgcaaagatccccaggacaag

SEQ ID NO: 4945 - DNA, 1527 bp, Artificial Sequence
  Synthetic Polynucleotide
atggccttaccagtgaccgccttgctcctgccgctggccttgctgctccacgccgccaggccggacttcgtgatgacacagagccctgatagcctggccgtgtctctcggcgagcgagtgaccatgagctgcaagtctagccagagcctgctgaacagcggcaaccagaagaactacctgacctggtatcagcagaagcccggccagcctcctaagctgctgatctactgggccagcaccagagaaagcggcgtgcccgatagattttctggctctggcagcggcaccgacttcaccctgacaatttctagcctgcaagccgaggacgtggccgtgtactactgccagaacgactacagctacccctacaccttcggccagggcaccaagctggaaatcaaaggcggaggcggaagtggaggcggaggatctggcggcggaggctctgaagtgcaactggttcagagcggagccgagctgaagaaacctggggccagcgtgaaggtgtcctgtaaagccagcggctacacctttaccgactactacatgaaatgggtccgacaggccccaggccagggactcgaatggatcggcgatattatccccagcaacggggccaccttctacaaccagaaattcaagggccgcgtgaccatcaccgtggacaagagcacaagcaccgcctacatggaactgagcagcctgagaagcgaggacaccgccgtgtattattgcgccagaagccatctgctgcgggccagttggttcgcctattggggacagggaaccctggtcaccgttagctctacgcgtggaatgaggactgaggatcttcccaaagctgtcgtctttctcgaaccccaatggtatcgggtgctcgaaaaagactctgtgacactgaaatgccaaggggcctactctcccgaggacaactccacacagtggtttcataatgagtccctcatcagctctcaggccagctcttatttcattgatgccgctacagtggacgactccggcgagtatcggtgtcagaccaatctgtctacactgtctgaccccgtgcagcttgaggtccacattggatggttgctcttgcaagccccacgctgggttttcaaagaggaagatccaatccatctgcggtgccacagctggaaaaacaccgctctccacaaagtcacatacctgcaaaatggcaaaggacgcaaatacttccatcacaattccgatttttacattccgaaggctaccctgaaagacagcggcagctatttctgccggggactcgtcggctccaagaatgtgtcctccgaaaccgtgaatatcacgattacccaaggactggctgtgcctacaatctctagcttctttccgcctggataccaagtctccttctgtcttgtgatggtcctcctgtttgctgtggacacaggactgtacttttccgtgaaaacgaacatccgcagctccacacgcgattggaaagatcacaagtttaaatggcgcaaagatccccaggacaag

SEQ ID NO: 4946 - DNA, 1527 bp, Artificial Sequence
  Synthetic Polynucleotide
atggccttaccagtgaccgccttgctcctgccgctggccttgctgctccacgccgccaggccggacttcgtgatgacacagagccctgatagcctggccgtgtctctcggcgagcgagtgaccatgagctgcaagtctagccagagcctgctgaacagcggcaaccagaagaactacctgacctggtatcagcagaagcccggccagcctcctaagctgctgatctactgggccagcaccagagaaagcggcgtgcccgatagattttctggctctggcagcggcaccgacttcaccctgacaatttctagcctgcaagccgaggacgtggccgtgtactactgccagaacgactacagctacccctacaccttcggccagggcaccaagctggaaatcaaaggcggaggcggaagtggaggcggaggatctggcggcggaggctctcaagtgcaactggttcagagcggagccgagctgaagaaacctggggccagcgtgaaggtgtcctgtaaagccagcggctacacctttaccgactactacatgaaatgggtccgacaggccccaggccagggactcgaatggatcggcgatattatccccagcaacggggccaccttctacaaccagaaattcaagggccgcgtgaccatcaccgtggacaagagcacaagcaccgcctacatggaactgagcagcctgagaagcgaggacaccgccgtgtattattgcgccagaagccatctgctgcgggccagttggttcgcctattggggacagggaaccctggtcaccgttagctctacgcgtggaatgaggactgaggatcttcccaaagctgtcgtctttctcgaaccccaatggtatcgggtgctcgaaaaagactctgtgacactgaaatgccaaggggcctactctcccgaggacaactccacacagtggtttcataatgagtccctcatcagctctcaggccagctcttatttcattgatgccgctacagtggacgactccggcgagtatcggtgtcagaccaatctgtctacactgtctgaccccgtgcagcttgaggtccacattggatggttgctcttgcaagccccacgctgggttttcaaagaggaagatccaatccatctgcggtgccacagctggaaaaacaccgctctccacaaagtcacatacctgcaaaatggcaaaggacgcaaatacttccatcacaattccgatttttacattccgaaggctaccctgaaagacagcggcagctatttctgccggggactcgtcggctccaagaatgtgtcctccgaaaccgtgaatatcacgattacccaaggactggctgtgcctacaatctctagcttctttccgcctggataccaagtctccttctgtcttgtgatggtcctcctgtttgctgtggacacaggactgtacttttccgtgaaaacgaacatccgcagctccacacgcgattggaaagatcacaagtttaaatggcgcaaagatccccaggacaag

SEQ ID NO: 4947 - DNA, 1497 bp, Artificial Sequence
  Synthetic Polynucleotide
atggccttaccagtgaccgccttgctcctgccgctggccttgctgctccacgccgccaggccggacgtgcagatcacacagagccctagctacctggctgcctctcctggcgagacaatcaccatcaactgtcgggccagcaagagcatcagcaaggacctggcctggtatcaagagaagcccggcaagaccaacaagctgctgatctacagcggcagcacactccagtctggcatccccagcagattttccggctctggcagcggcaccgatttcaccctgaccataagcagcctggaacctgaggacttcgccatgtactactgccagcagcacaacaagtacccctacacctttggcggaggcaccaagctggaaatcaagagaggcggaggcggaagtggaggcggaggatctggcggcggaggctctcaagttcaactgcaacagcctggggccgagcttgttagacctggcgcttctgtgaagctgagctgcaaggccagcggctacaccttcaccagctactggatgaactgggtcaagcagcggcctgaccagggcctcgaatggatcggcagaatcgacccctacgacagcgagacacactacaaccagaagttcaaggacaaggccatcctgaccgtggacaagagcagctccaccgcctacatgcaactgagcagcctgacctctgaggatagcgccgtgtactattgcgccagaggcaactgggacgactattggggccagggcacaaccctgacagtgtctagtacgcgtggaatgaggactgaggatcttcccaaagctgtcgtctttctcgaaccccaatggtatcgggtgctcgaaaaagactctgtgacactgaaatgccaaggggcctactctcccgaggacaactccacacagtggtttcataatgagtccctcatcagctctcaggccagctcttatttcattgatgccgctacagtggacgactccggcgagtatcggtgtcagaccaatctgtctacactgtctgaccccgtgcagcttgaggtccacattggatggttgctcttgcaagccccacgctgggttttcaaagaggaagatccaatccatctgcggtgccacagctggaaaaacaccgctctccacaaagtcacatacctgcaaaatggcaaaggacgcaaatacttccatcacaattccgatttttacattccgaaggctaccctgaaagacagcggcagctatttctgccggggactcgtcggctccaagaatgtgtcctccgaaaccgtgaatatcacgattacccaaggactggctgtgcctacaatctctagcttctttccgcctggataccaagtctccttctgtcttgtgatggtcctcctgtttgctgtggacacaggactgtacttttccgtgaaaacgaacatccgcagctccacacgcgattggaaagatcacaagtttaaatggcgcaaagatccccaggacaag

SEQ ID NO: 4948 - DNA, 1503 bp, Artificial Sequence
  Synthetic Polynucleotide
atggccttaccagtgaccgccttgctcctgccgctggccttgctgctccacgccgccaggccggagatcgtgctgacacagagccctaccagcatgacagcctctccaggcgagcaagtgaccatcacctgtagagccagcagcagcatcaactacatgcactggtatcagcagaagcctggcgcaagccccagaccttggatctacgagacaagcaagctggcctccggcgtgcccgatagattttctggatctgccagcggcaccagctacagcctgaccatcaacaacatggaagccgaggacgccgccacctactactgccagcagtggaattacccctcctggacctttggcggaggcaccaagctggaacttaaaggcggaggcggaagtggaggcggaggatctggcggcggaggctctgaagtgcagctcgttgagtctggtggcggactggttcagcctggaagaagcctgaagctgagctgtgccgccagcggcttcaccttcagcgactacaatatggcctgggtccgacaggcccctaagaaaggactggaatgggtcgccaccatcctgtacgatggcggcagaacctactaccggggcagcgtgaagggcagattcaccatcagcagagacaacgccaagagcaccctgtacctgcggatggactctctgagaagcgaggataccgccacatattactgtgccacacacagccggggcaccgactactttgattattggggccagggcgtgatggttaccgtgtctagtacgcgtggaatgaggactgaggatcttcccaaagctgtcgtctttctcgaaccccaatggtatcgggtgctcgaaaaagactctgtgacactgaaatgccaaggggcctactctcccgaggacaactccacacagtggtttcataatgagtccctcatcagctctcaggccagctcttatttcattgatgccgctacagtggacgactccggcgagtatcggtgtcagaccaatctgtctacactgtctgaccccgtgcagcttgaggtccacattggatggttgctcttgcaagccccacgctgggttttcaaagaggaagatccaatccatctgcggtgccacagctggaaaaacaccgctctccacaaagtcacatacctgcaaaatggcaaaggacgcaaatacttccatcacaattccgatttttacattccgaaggctaccctgaaagacagcggcagctatttctgccggggactcgtcggctccaagaatgtgtcctccgaaaccgtgaatatcacgattacccaaggactggctgtgcctacaatctctagcttctttccgcctggataccaagtctccttctgtcttgtgatggtcctcctgtttgctgtggacacaggactgtacttttccgtgaaaacgaacatccgcagctccacacgcgattggaaagatcacaagtttaaatggcgcaaagatccccaggacaag

SEQ ID NO: 4949 - DNA, 1530 bp, Artificial Sequence
  Synthetic Polynucleotide
atggccttaccagtgaccgccttgctcctgccgctggccttgctgctccacgccgccaggccggacatcgtgatgacacagagcccttctagcctggccgtgtctgagggcgagacagtgaccatcaactgcaagagcagccagagcttcctgtctagcggcgacggcaagaattacgtggcctggtatcagtacaagcccggacagagccccaagctgctgatctactgggccagcacaagacagagcggcgtgcccgatagattcatcggctctggcagcggcaccgacttcaccctgacaatctctacagtgcaggccgaggacctggctatctactactgccagcagtattacgacacccctctgacctttggctccggcaccaagctggaaatcaaaggcggaggcggaagtggaggcggaggatctggcggcggaggctctgaagtgaagctgcaagagtctggccccagcctggtgcagagtagccaaacactgagcctgacctgtaccgtgtccggctttagcctgaccagctaccacatccactgggtccgacagacccctggcaaaggactggaatggatgggcgtgatgtggagcgacggcgacaccagctataacagcgccctgaagtcccggctgagcatcagcagagatacaagccagagccaggtgttcctgaagatgaacagcctccagaccgaggacaccgccacctactattgtgccagaggctactacagcagctacctgtacctttggttcgcctattggggccagggcaccctggttacagtcagctctacgcgtggaatgaggactgaggatcttcccaaagctgtcgtctttctcgaaccccaatggtatcgggtgctcgaaaaagactctgtgacactgaaatgccaaggggcctactctcccgaggacaactccacacagtggtttcataatgagtccctcatcagctctcaggccagctcttatttcattgatgccgctacagtggacgactccggcgagtatcggtgtcagaccaatctgtctacactgtctgaccccgtgcagcttgaggtccacattggatggttgctcttgcaagccccacgctgggttttcaaagaggaagatccaatccatctgcggtgccacagctggaaaaacaccgctctccacaaagtcacatacctgcaaaatggcaaaggacgcaaatacttccatcacaattccgatttttacattccgaaggctaccctgaaagacagcggcagctatttctgccggggactcgtcggctccaagaatgtgtcctccgaaaccgtgaatatcacgattacccaaggactggctgtgcctacaatctctagcttctttccgcctggataccaagtctccttctgtcttgtgatggtcctcctgtttgctgtggacacaggactgtacttttccgtgaaaacgaacatccgcagctccacacgcgattggaaagatcacaagtttaaatggcgcaaagatccccaggacaag

SEQ ID NO: 4950 - DNA, 1542 bp, Artificial Sequence
  Synthetic Polynucleotide
atggccttaccagtgaccgccttgctcctgccgctggccttgctgctccacgccgccaggccggacgtgctgatgacccagacacctgtgtctctgccagtgtctctcggaggccaggtgtccatctcctgtagaagcagccagagcctggtgcactccgacggcgatacctacctgcactggtatctccagaagcctggacagagccctcagctcctgatctaccgggtgtccaacagattcagcggcgtgcccgatagattttccggcagcggctctggcaccgacttcaccctgaagatcagcagagtggaacccgaggacctgggcctgtactactgtctccagaccacacacttcccaccttggacctttggcggaggcaccaagctggaaatgaaaggcggaggcggaagtggaggcggaggatctggcggcggaggctctcaggttcagctccagcagtctggacccgagcttagaaggccaggatctagcgtcagactgagctgcaaggccagcggctaccggatcaaggacttcctgatccactggattaagaacagacccgagcacggcctggaatggatcggatggattgaccctgaggacggcgagactaagtacgcccagaagttccagaccaaggccacactgaccgccgacacctctagcaacaccgcctacatgcaactgagcagcctgaccagcgaggacaccgccacctacttttgtgctagatggggcgacgtgtactacggcctgatgagaggccatgtgatggatgcctggggccagggaacaagcgtgacagtctcttctacgcgtggaatgaggactgaggatcttcccaaagctgtcgtctttctcgaaccccaatggtatcgggtgctcgaaaaagactctgtgacactgaaatgccaaggggcctactctcccgaggacaactccacacagtggtttcataatgagtccctcatcagctctcaggccagctcttatttcattgatgccgctacagtggacgactccggcgagtatcggtgtcagaccaatctgtctacactgtctgaccccgtgcagcttgaggtccacattggatggttgctcttgcaagccccacgctgggttttcaaagaggaagatccaatccatctgcggtgccacagctggaaaaacaccgctctccacaaagtcacatacctgcaaaatggcaaaggacgcaaatacttccatcacaattccgatttttacattccgaaggctaccctgaaagacagcggcagctatttctgccggggactcgtcggctccaagaatgtgtcctccgaaaccgtgaatatcacgattacccaaggactggctgtgcctacaatctctagcttctttccgcctggataccaagtctccttctgtcttgtgatggtcctcctgtttgctgtggacacaggactgtacttttccgtgaaaacgaacatccgcagctccacacgcgattggaaagatcacaagtttaaatggcgcaaagatccccaggacaag

SEQ ID NO: 4951 - DNA, 1530 bp, Artificial Sequence
  Synthetic Polynucleotide
atggccttaccagtgaccgccttgctcctgccgctggccttgctgctccacgccgccaggccggacatcgtgatgacccaggccgctcccagcatccctgtgacacctggcgagagcgtgtccatctcctgccggtctagcaagagcctgctgaacagcaacggcaatacctacctgtactggttcctccagcggccaggccagtctccccaactgctgatctaccggatgagcaacctggcctccggcgtgcccgatagattttctggcagcggctccggcaccgccttcaccctgagaatcagcagagtggaagccgaggacgtgggcgtgtactactgtatgcagcacctggaataccccttcaccttcggagccggcaccaagctggaactgaagagaggcggaggcggaagtggaggcggaggatctggcggcggaggctctgaagtgcaactccagcagagcggccctgagctgattaagcctggggccagcgtgaagatgagctgcaaggccagcggctacaccttcaccagctacgtgatgcactgggtcaagcagaagcccggccagggcctggaatggatcggctacatcaacccctacaacgatggcaccaagtacaacgagaagttcaagggcaaggccaccctgaccagcgacaagagcagcagcaccgcctacatggaactgagcagcctgacaagcgaggacagcgccgtgtactattgcgccagaggcacctactactacggcagccgggtgttcgactattggggccagggcaccacactgaccgtgtcctctacgcgtggaatgaggactgaggatcttcccaaagctgtcgtctttctcgaaccccaatggtatcgggtgctcgaaaaagactctgtgacactgaaatgccaaggggcctactctcccgaggacaactccacacagtggtttcataatgagtccctcatcagctctcaggccagctcttatttcattgatgccgctacagtggacgactccggcgagtatcggtgtcagaccaatctgtctacactgtctgaccccgtgcagcttgaggtccacattggatggttgctcttgcaagccccacgctgggttttcaaagaggaagatccaatccatctgcggtgccacagctggaaaaacaccgctctccacaaagtcacatacctgcaaaatggcaaaggacgcaaatacttccatcacaattccgatttttacattccgaaggctaccctgaaagacagcggcagctatttctgccggggactcgtcggctccaagaatgtgtcctccgaaaccgtgaatatcacgattacccaaggactggctgtgcctacaatctctagcttctttccgcctggataccaagtctccttctgtcttgtgatggtcctcctgtttgctgtggacacaggactgtacttttccgtgaaaacgaacatccgcagctccacacgcgattggaaagatcacaagtttaaatggcgcaaagatccccaggacaag

SEQ ID NO: 4952 - DNA, 1530 bp, Artificial Sequence; identical to SEQ ID NO: 4951
  Synthetic Polynucleotide

SEQ ID NO: 4953 - DNA, 1584 bp, Artificial Sequence
  Synthetic Polynucleotide
atggccttaccagtgaccgccttgctcctgccgctggccttgctgctccacgccgccaggccgatcaacatctacaacgccgagcctgccaatcctagcgagaagaacagccccgaattcgacatcgtgatgacacagagccccgccacactgtcactgtctccaggcgaaagagccacactgagctgtcggagcagcaagagcctccagaacgtgaacggcaacacctacctgtactggttccagcagaagcccggccagtctcctcagctcctgatctacagaatgagcaacctgaacagcggcgtgcccgacagattttctggcagcggaagcggcaccgagttcaccctgaccataagcagcctggaacctgaggacttcgccgtgtactactgtatgcagcacctggaataccccatcaccttcggagccggcaccaagctggaaatcaaaggcggaggcggaagtggaggcggaggatctggcggcggaggctctgaagtgcaactggttgaatctggcggcggactggttaagcctggcggatctctgaagctgagctgtgccgccagcggctacacctttaccagctacgtgatgcactgggtccgacaggcccctggcaaaggacttgagtggatcggctacatcaacccctacaacgatggcaccaagtacaacgagaagttccagggcagagtgaccatcagctccgacaagagcatcagcaccgcctacatggaactgagcagcctgagaagcgaggataccgccatgtactattgcgccagaggcacctactactacggcaccagagtgttcgactactggggccagggaaccctggtcacagtctcttctacgcgtggaatgaggactgaggatcttcccaaagctgtcgtctttctcgaaccccaatggtatcgggtgctcgaaaaagactctgtgacactgaaatgccaaggggcctactctcccgaggacaactccacacagtggtttcataatgagtccctcatcagctctcaggccagctcttatttcattgatgccgctacagtggacgactccggcgagtatcggtgtcagaccaatctgtctacactgtctgaccccgtgcagcttgaggtccacattggatggttgctcttgcaagccccacgctgggttttcaaagaggaagatccaatccatctgcggtgccacagctggaaaaacaccgctctccacaaagtcacatacctgcaaaatggcaaaggacgcaaatacttccatcacaattccgatttttacattccgaaggctaccctgaaagacagcggcagctatttctgccggggactcgtcggctccaagaatgtgtcctccgaaaccgtgaatatcacgattacccaaggactggctgtgcctacaatctctagcttctttccgcctggataccaagtctccttctgtcttgtgatggtcctcctgtttgctgtggacacaggactgtacttttccgtgaaaacgaacatccgcagctccacacgcgattggaaagatcacaagtttaaatggcgcaaagatccccaggacaag

SEQ ID NO: 4954 - DNA, 1515 bp, Artificial Sequence
  Synthetic Polynucleotide
atggccttaccagtgaccgccttgctcctgccgctggccttgctgctccacgccgccaggccggacatccagatgacacagagccctagcagcctgtctgccagcgtgggagacagagtgaccatcacatgcaaggccagcgaccacatcaacaactggctggcctggtatcagcagaagcctggacaggcccctaagctgctgatctacggcgctaccacactggaaacaggcgtgcccagcagattttctggcagcggctctggcaccgactacaccctgacaatatccagcctccagcctgaggacttcgccacctactactgtcagcagagctggaacaccccttggacattcggccagggcaccaagctggaaatcaagagaggcggaggcggaagtggaggcggaggatctggcggcggaggctctcaagttcagcttcaacagcctggcgctgagctggtcaaacctggcgcttctgtgaagatgagctgcaaagccagcggctacgccttcagcagctactggatcaactggatgaagcagaaacccggccagggactcgaatggatcggccaaatctatcccggcgacggcgacaccaactacaacggcaagttcaagggcagagccacactgaccgccgatacctctagcagcacagcctacatgcagctgagcagcctgaccagcgaagatagcgccgtgtacttctgtgcccggtccatcacaacagtcgtgggctgcgctatggactattggggccagggaacaagcgtgaccgtgtctagtacgcgtggaatgaggactgaggatcttcccaaagctgtcgtctttctcgaaccccaatggtatcgggtgctcgaaaaagactctgtgacactgaaatgccaaggggcctactctcccgaggacaactccacacagtggtttcataatgagtccctcatcagctctcaggccagctcttatttcattgatgccgctacagtggacgactccggcgagtatcggtgtcagaccaatctgtctacactgtctgaccccgtgcagcttgaggtccacattggatggttgctcttgcaagccccacgctgggttttcaaagaggaagatccaatccatctgcggtgccacagctggaaaaacaccgctctccacaaagtcacatacctgcaaaatggcaaaggacgcaaatacttccatcacaattccgatttttacattccgaaggctaccctgaaagacagcggcagctatttctgccggggactcgtcggctccaagaatgtgtcctccgaaaccgtgaatatcacgattacccaaggactggctgtgcctacaatctctagcttctttccgcctggataccaagtctccttctgtcttgtgatggtcctcctgtttgctgtggacacaggactgtacttttccgtgaaaacgaacatccgcagctccacacgcgattggaaagatcacaagtttaaatggcgcaaagatccccaggacaag

SEQ ID NO: 4955 - DNA, 1521 bp, Artificial Sequence
  Synthetic Polynucleotide
atggccttaccagtgaccgccttgctcctgccgctggccttgctgctccacgccgccaggccgcagatcgtgctgtctcagtctcctgccatcctgagcgcttccccaggcgagaaagtgaccatgacctgtagagccagcagcagcgtgtcctacatgcactggtatcagcagaagcccggcagcagccctaagccttggatctacgccaccagcaatctggcctctggcgtgccagccagattttctggctctggcagcggcaccagctacagcttcacaatcagcagagtggaagccgaggacgccgccacctactattgtcagcagtggaccttcaatcctcctaccttcggcggaggcacccggctggaaatcaaaagaacagtggctgctggcggaggcggaagtggaggcggaggatctggcggcggaggctctcaggcttatctgcaacagagcggagccgaactcgtcagacctggcgcttctgtgaagatgagctgcaaggccagcggctacaccttcaccagctataatatgcactgggtcaagcagacccctcggcagggactcgaatggatcggcggaatctatcccggcaacggcgacacctcctacaaccagaagttcaagggcaaagccacactgaccgtgggcaagagcagcagcaccgcctatatgcagctcagcagcctgaccagcgaggacagcgccgtgtacttctgcgccagatacgactacaactacgctatggactactggggccagggcaccagcgtgacagttagctctgccagcacgcgtggaatgaggactgaggatcttcccaaagctgtcgtctttctcgaaccccaatggtatcgggtgctcgaaaaagactctgtgacactgaaatgccaaggggcctactctcccgaggacaactccacacagtggtttcataatgagtccctcatcagctctcaggccagctcttatttcattgatgccgctacagtggacgactccggcgagtatcggtgtcagaccaatctgtctacactgtctgaccccgtgcagcttgaggtccacattggatggttgctcttgcaagccccacgctgggttttcaaagaggaagatccaatccatctgcggtgccacagctggaaaaacaccgctctccacaaagtcacatacctgcaaaatggcaaaggacgcaaatacttccatcacaattccgatttttacattccgaaggctaccctgaaagacagcggcagctatttctgccggggactcgtcggctccaagaatgtgtcctccgaaaccgtgaatatcacgattacccaaggactggctgtgcctacaatctctagcttctttccgcctggataccaagtctccttctgtcttgtgatggtcctcctgtttgctgtggacacaggactgtacttttccgtgaaaacgaacatccgcagctccacacgcgattggaaagatcacaagtttaaatggcgcaaagatccccaggacaag

SEQ ID NO: 4956 - DNA, 1518 bp, Artificial Sequence
  Synthetic Polynucleotide
atggccttaccagtgaccgccttgctcctgccgctggccttgctgctccacgccgccaggccggacgagatcgtgctgacacagagccctgccaccctgtctctgagccctggcgaaagagccaccctgagctgtagagccagccagagcgtgtccagctacctggcctggtatcagcagaagcccggccaggctccccggctgctgatctacgatgccagcaatagagccaccggcatccccgccagattttccggctctggcagcggcaccgacttcaccctgaccatcagctccctggaacccgaggacttcgccgtgtactactgccagcagcggagcaactggcccatcacattcggccagggcacccggctggaaatcaaaggcggaggcggaagtggaggcggaggatctggcggcggaggctctgaggtgcagcttgttgagtctggcggaggactggtgcagcccgatagaagcctgagactgtcttgtgccgccagcggcttcaccttccacgattatgccatgcactgggtccgacaggcccctggcaaaggacttgaatgggtgtccaccatctcttggaacagcggcacaatcggctacgccgactctgtgaagggcagattcaccatcagccgggacaacgccaagaacagcctgtacctccagatgaactccctgagagccgaggacacagccctgtactactgcgccaaggacatccagtacggcaactactactacggcatggacgtgtggggccagggcacaacagtgacagtctcttctacgcgtggaatgaggactgaggatcttcccaaagctgtcgtctttctcgaaccccaatggtatcgggtgctcgaaaaagactctgtgacactgaaatgccaaggggcctactctcccgaggacaactccacacagtggtttcataatgagtccctcatcagctctcaggccagctcttatttcattgatgccgctacagtggacgactccggcgagtatcggtgtcagaccaatctgtctacactgtctgaccccgtgcagcttgaggtccacattggatggttgctcttgcaagccccacgctgggttttcaaagaggaagatccaatccatctgcggtgccacagctggaaaaacaccgctctccacaaagtcacatacctgcaaaatggcaaaggacgcaaatacttccatcacaattccgatttttacattccgaaggctaccctgaaagacagcggcagctatttctgccggggactcgtcggctccaagaatgtgtcctccgaaaccgtgaatatcacgattacccaaggactggctgtgcctacaatctctagcttctttccgcctggataccaagtctccttctgtcttgtgatggtcctcctgtttgctgtggacacaggactgtacttttccgtgaaaacgaacatccgcagctccacacgcgattggaaagatcacaagtttaaatggcgcaaagatccccaggacaag

SEQ ID NO: 4957 - DNA, 1500 bp, Artificial Sequence
  Synthetic Polynucleotide
atggccttaccagtgaccgccttgctcctgccgctggccttgctgctccacgccgccaggccggacatccagatgacacagagccctagcagcctgtctgccagcgtgggagatagagtgaccatcaactgcaaggccagccaggacatcaacagctacctgagctggttccagcagaagcctggcaaggcccctaagacactgatctaccgggccaacagactggtggatggcgtgccaagcagattttctggcagcggcagcggccaggattacaccctgacaatatccagcctccagcctgaggacttcgccacctactactgcctccagtacgacgagttccctctgacctttggcggaggcaccaaggtggaaatcaaaggcggaggcggaagtggaggcggaggatctggcggcggaggctctcaggtgcaactggtgcagtctggggccgaagtgaagaaacctggggcctctgtgaaggtgtcctgcaaagccagcggctacacctttaccaactacgacatcaactgggtccgacaggctccaggccaaggactggaatggatcggctggatctatcctggcgacggcagcaccaagtacaacgagaagttcaaggccaaggccacactgaccgccgataccagcacaagcaccgcctacatggaactgcggagcctgagaagcgacgacaccgccgtgtactattgtgcctccggctacgaggacgctatggactattggggccagggcaccaccgtgacagtgtctagtacgcgtggaatgaggactgaggatcttcccaaagctgtcgtctttctcgaaccccaatggtatcgggtgctcgaaaaagactctgtgacactgaaatgccaaggggcctactctcccgaggacaactccacacagtggtttcataatgagtccctcatcagctctcaggccagctcttatttcattgatgccgctacagtggacgactccggcgagtatcggtgtcagaccaatctgtctacactgtctgaccccgtgcagcttgaggtccacattggatggttgctcttgcaagccccacgctgggttttcaaagaggaagatccaatccatctgcggtgccacagctggaaaaacaccgctctccacaaagtcacatacctgcaaaatggcaaaggacgcaaatacttccatcacaattccgatttttacattccgaaggctaccctgaaagacagcggcagctatttctgccggggactcgtcggctccaagaatgtgtcctccgaaaccgtgaatatcacgattacccaaggactggctgtgcctacaatctctagcttctttccgcctggataccaagtctccttctgtcttgtgatggtcctcctgtttgctgtggacacaggactgtacttttccgtgaaaacgaacatccgcagctccacacgcgattggaaagatcacaagtttaaatggcgcaaagatccccaggacaag

SEQ ID NO: 4958 - DNA, 1506 bp, Artificial Sequence
  Synthetic Polynucleotide
atggccttaccagtgaccgccttgctcctgccgctggccttgctgctccacgccgccaggccggacatcgtgatgacccagacacctctgagcctgagcgtgacacctggacagcctgccagcattagctgcaagagcagccagtctctgctggacggcgacggcaagacctacctgaattggctgctccagaagcctggacagagccctcagcggctgatctacctggtgtccaagctggatagcggcgtgcccgatagattttctggcagcggctctggcaccgacttcaccctgaagatcagcagagtggaagccgaggacgtgggcgtgtactactgttggcagggcacacacttccccagaacattcggccagggcacaaagctggaaatcaaaggcggaggcggaagtggaggcggaggatctggcggcggaggctctcaagtgcaactggttcagagcggagccgaagtgaagaaacctggggcctctgtgaaggtgtcctgcaaggccagcggctacaccttcaaggacacctacatccactgggtccgacaggcccctggacaaggacttgagtggatgggcagaatcgaccccgccaacggcaacaccaaatacgaccccaagttccagggcagagtgaccatgaccagagacaccagcatcagcaccgcctacatggaactgagccggctgagatccgatgacaccgccgtgtactattgcgctagaagaggcggagtggattggggccagggaacactggttaccgtgtctagtacgcgtggaatgaggactgaggatcttcccaaagctgtcgtctttctcgaaccccaatggtatcgggtgctcgaaaaagactctgtgacactgaaatgccaaggggcctactctcccgaggacaactccacacagtggtttcataatgagtccctcatcagctctcaggccagctcttatttcattgatgccgctacagtggacgactccggcgagtatcggtgtcagaccaatctgtctacactgtctgaccccgtgcagcttgaggtccacattggatggttgctcttgcaagccccacgctgggttttcaaagaggaagatccaatccatctgcggtgccacagctggaaaaacaccgctctccacaaagtcacatacctgcaaaatggcaaaggacgcaaatacttccatcacaattccgatttttacattccgaaggctaccctgaaagacagcggcagctatttctgccggggactcgtcggctccaagaatgtgtcctccgaaaccgtgaatatcacgattacccaaggactggctgtgcctacaatctctagcttctttccgcctggataccaagtctccttctgtcttgtgatggtcctcctgtttgctgtggacacaggactgtacttttccgtgaaaacgaacatccgcagctccacacgcgattggaaagatcacaagtttaaatggcgcaaagatccccaggacaag

SEQ ID NO: 4959 - DNA, 1509 bp, Artificial Sequence
  Synthetic Polynucleotide
atggccttaccagtgaccgccttgctcctgccgctggccttgctgctccacgccgccaggccggacatccagatgacacagagccctagcagcctgtctgccagcgtgggagacagagtgaccatcacatgcaaggccagccaggatgtgtctacagccgtggcctggttccagcagaagcctggaaaagcccctaagctgctgatctacagccccagctacagatacaccggcgtgcccagcagattttctggcagcggctctggcaccgacttcaccctgacaatatccagcctccagcctgaggacttcacctactactgccagcagctctacagcaccccttacacattcggccagggcaccaaggtggaaatcaaaggcggaggcggaagtggaggcggaggatctggcggcggaggctctgaagtgcaactggttcagagcggagccgaagtgaagaaacctggggcctctgtgaaggtgtcctgcaaagccagcggctacacctttaccgactactacctggacgtggtcgtgcggcaagctcctggacaaggactggaatggatcggcagagtgaacccctacaacggcggcaccatctacaaccagaaattcaagggaagagtgaccctgaccagagacaccagcacctccacagcctacctggaactgagcagcctgagaagcgaagataccgccgtgtactactgcgccagggaccactacagatatgaccctctgctggactactggggccagggaaccctggttacagtgtctagtacgcgtggaatgaggactgaggatcttcccaaagctgtcgtctttctcgaaccccaatggtatcgggtgctcgaaaaagactctgtgacactgaaatgccaaggggcctactctcccgaggacaactccacacagtggtttcataatgagtccctcatcagctctcaggccagctcttatttcattgatgccgctacagtggacgactccggcgagtatcggtgtcagaccaatctgtctacactgtctgaccccgtgcagcttgaggtccacattggatggttgctcttgcaagccccacgctgggttttcaaagaggaagatccaatccatctgcggtgccacagctggaaaaacaccgctctccacaaagtcacatacctgcaaaatggcaaaggacgcaaatacttccatcacaattccgatttttacattccgaaggctaccctgaaagacagcggcagctatttctgccggggactcgtcggctccaagaatgtgtcctccgaaaccgtgaatatcacgattacccaaggactggctgtgcctacaatctctagcttctttccgcctggataccaagtctccttctgtcttgtgatggtcctcctgtttgctgtggacacaggactgtacttttccgtgaaaacgaacatccgcagctccacacgcgattggaaagatcacaagtttaaatggcgcaaagatccccaggacaag

SEQ ID NO: 4960 - DNA, 1527 bp, Artificial Sequence
  Synthetic Polynucleotide
atggccttaccagtgaccgccttgctcctgccgctggccttgctgctccacgccgccaggccggacatccagatgacacagagccctagcagcctgtctgccagcgtgggagacagagtgaccatcacctgtagagccagccagagcgtgtccaccagcagctacaactacatgcactggtatcagcagaagcccggcaagcctcctaagctgctgattaagtacgccagcaacctggaaagcggcgtgcccagcagattttctggcagcggctctggcaccgacttcaccctgacaatatccagcctccagcctgaggacttcgccacctactactgtcagcactcctgggagatccctctgacattcggccagggcaccaaggtggaaatcaaaggcggaggcggaagtggaggcggaggatctggcggcggaggctctgaagtgcaactggttcagagcggagccgaagtgaagaaacctggggcctctgtgaaggtgtcctgcaaggccagcggctacagcttcaccgactattatatgcactgggtccgacaggctccaggccagggacttgagtggatcggcagaatcaacccctacaacggcgctgccttctacagccagaacttcaaggatagagtgaccctgaccgtggacaccagcaccagcacagcctacctggaactgagcagcctgagaagcgaggacaccgccgtgtactactgcgccattgagagaggcgctgacctggaaggctacgctatggattattggggccagggaaccctggtcaccgtgtcatctacgcgtggaatgaggactgaggatcttcccaaagctgtcgtctttctcgaaccccaatggtatcgggtgctcgaaaaagactctgtgacactgaaatgccaaggggcctactctcccgaggacaactccacacagtggtttcataatgagtccctcatcagctctcaggccagctcttatttcattgatgccgctacagtggacgactccggcgagtatcggtgtcagaccaatctgtctacactgtctgaccccgtgcagcttgaggtccacattggatggttgctcttgcaagccccacgctgggttttcaaagaggaagatccaatccatctgcggtgccacagctggaaaaacaccgctctccacaaagtcacatacctgcaaaatggcaaaggacgcaaatacttccatcacaattccgatttttacattccgaaggctaccctgaaagacagcggcagctatttctgccggggactcgtcggctccaagaatgtgtcctccgaaaccgtgaatatcacgattacccaaggactggctgtgcctacaatctctagcttctttccgcctggataccaagtctccttctgtcttgtgatggtcctcctgtttgctgtggacacaggactgtacttttccgtgaaaacgaacatccgcagctccacacgcgattggaaagatcacaagtttaaatggcgcaaagatccccaggacaag

SEQ ID NO: 4961 - DNA, 1521 bp, Artificial Sequence
  Synthetic Polynucleotide
atggccttaccagtgaccgccttgctcctgccgctggccttgctgctccacgccgccaggccggagatcgtgctgacacagtctccagccacactgagcgcttctccaggcgagagagtgaccctgacctgtagagccagcagcaacgtgatctccagctacgtgcactggtatcagcagaagcctggcagcagccccagactgtttctgtacagcaccagcaatctggcctccggcgtgccaagcagattttctggctctggcagcggcaccgacttcacctttaccatctctagcctggaagccgaggacgccgccacctactactgtcagcagtacagcggctaccctctgaccttcggccagggcacaagactggaaatcaaaggcggaggcggaagtggaggcggaggatctggcggcggaggctctcaagttcagctgcaagagtctggccctggcctggtcaagcctagcgaaacactgagcctgacctgcgccgtgtctggctactctatcaccagcgcctactattggaactggatcagacagcctcctggcaaaggactggaatggatcggctacatcagctacgacggcagaaacaactacaaccccagcctgaagaaccggatcaccatcaatcccgacaccagcaagaaccagttcagcctccagctgaacagcgtgacccctgaggataccgccgtgtactactgtgccagagaaggcgactacgacgtgggcaactactacgctatggactactggggccagggaaccctggtcacagtctcttctacgcgtggaatgaggactgaggatcttcccaaagctgtcgtctttctcgaaccccaatggtatcgggtgctcgaaaaagactctgtgacactgaaatgccaaggggcctactctcccgaggacaactccacacagtggtttcataatgagtccctcatcagctctcaggccagctcttatttcattgatgccgctacagtggacgactccggcgagtatcggtgtcagaccaatctgtctacactgtctgaccccgtgcagcttgaggtccacattggatggttgctcttgcaagccccacgctgggttttcaaagaggaagatccaatccatctgcggtgccacagctggaaaaacaccgctctccacaaagtcacatacctgcaaaatggcaaaggacgcaaatacttccatcacaattccgatttttacattccgaaggctaccctgaaagacagcggcagctatttctgccggggactcgtcggctccaagaatgtgtcctccgaaaccgtgaatatcacgattacccaaggactggctgtgcctacaatctctagcttctttccgcctggataccaagtctccttctgtcttgtgatggtcctcctgtttgctgtggacacaggactgtacttttccgtgaaaacgaacatccgcagctccacacgcgattggaaagatcacaagtttaaatggcgcaaagatccccaggacaag

SEQ ID NO: 4962 - DNA, 1521 bp, Artificial Sequence
  Synthetic Polynucleotide
atggccttaccagtgaccgccttgctcctgccgctggccttgctgctccacgccgccaggccggagatcgtgctgacacagtctcccgccacactgtcactgtctccaggcgaaagagccacactgagctgtagagccagcagcaacgtgatctccagctacgtgcactggtatcagcagaagcctggacaggcccctcggctgctgatctacagcacaagcaatctggcctctggcatccccgccagattttctggctctggaagcggcaccgacttcaccctgaccataagcagcctggaacctgaggacttcgccgtgtactactgccagcagtatagcggctaccctctgaccttcggccagggcacaagactggaaatcaaaggcggaggcggaagtggaggcggaggatctggcggcggaggctctgaagtgcaactggtggaaagtggcggcggactggtgcaacctggaagaagcctgagactgtcctgtgccgccagcggctactctatcacaagcgcctactactggaactgggtccgacaggctcctggcaaaggactggaatgggtgtcctacatcagctacgacggcagaaacaactacaaccccagcctgaagaaccgcttcaccatcagccgggacaacgccaagaagtccctgtacctccagatgaacagcctgagagccgaggacacagccctgtactattgcgccaaagagggcgactacgacgtcggcaactactacgctatggactactggggccagggaaccaccgtgactgtctcttctacgcgtggaatgaggactgaggatcttcccaaagctgtcgtctttctcgaaccccaatggtatcgggtgctcgaaaaagactctgtgacactgaaatgccaaggggcctactctcccgaggacaactccacacagtggtttcataatgagtccctcatcagctctcaggccagctcttatttcattgatgccgctacagtggacgactccggcgagtatcggtgtcagaccaatctgtctacactgtctgaccccgtgcagcttgaggtccacattggatggttgctcttgcaagccccacgctgggttttcaaagaggaagatccaatccatctgcggtgccacagctggaaaaacaccgctctccacaaagtcacatacctgcaaaatggcaaaggacgcaaatacttccatcacaattccgatttttacattccgaaggctaccctgaaagacagcggcagctatttctgccggggactcgtcggctccaagaatgtgtcctccgaaaccgtgaatatcacgattacccaaggactggctgtgcctacaatctctagcttctttccgcctggataccaagtctccttctgtcttgtgatggtcctcctgtttgctgtggacacaggactgtacttttccgtgaaaacgaacatccgcagctccacacgcgattggaaagatcacaagtttaaatggcgcaaagatccccaggacaag

SEQ ID NO: 4963 - DNA, 1548 bp, Artificial Sequence
  Synthetic Polynucleotide
atggccttaccagtgaccgccttgctcctgccgctggccttgctgctccacgccgccaggccggacgtggtcatgacacagaccccactgagcctgcctgtgtctctgggagatcaggccagcatctcctgtagaagcagccagagcctggtgcacagcaacggcaacacctacctgcggtggtatctccagaagcctggacagagccccaaggtgctgatctacaaggtgtccaacagagtgtccggcgtgcccgatagattttctggcagcggctctggcaccgacttcaccctgaagatcaatagagtggaagccgaggacctgggcgtgtacttctgtagccagagcacccatgtgccttggacctttggcggaggcaccaagctggaaatcaagagcagcgccgacgacgccaagaaggacgccgccaaaaaggatgatgccaagaaagacgatgctaaaaaagacggcggcgtgaagctggacgagacaggcggaggacttgttcaacctggcggagccatgaagctgagctgtgtgaccagcggctttaccttcggccactactggatgaactgggtccgacagtcccctgagaaaggactggaatgggtcgcccagttcagaaacaagccctacaactacgaaacctactacagcgacagcgtgaagggcagattcaccatcagccgggacgacagcaagtccagcgtgtacctccagatgaacaacctgcgcgtggaagataccggcatctactactgtaccggggccagctacggcatggaatatctcggccagggcaccagcgtgaccgtgtctacaacgcgtggaatgaggactgaggatcttcccaaagctgtcgtctttctcgaaccccaatggtatcgggtgctcgaaaaagactctgtgacactgaaatgccaaggggcctactctcccgaggacaactccacacagtggtttcataatgagtccctcatcagctctcaggccagctcttatttcattgatgccgctacagtggacgactccggcgagtatcggtgtcagaccaatctgtctacactgtctgaccccgtgcagcttgaggtccacattggatggttgctcttgcaagccccacgctgggttttcaaagaggaagatccaatccatctgcggtgccacagctggaaaaacaccgctctccacaaagtcacatacctgcaaaatggcaaaggacgcaaatacttccatcacaattccgatttttacattccgaaggctaccctgaaagacagcggcagctatttctgccggggactcgtcggctccaagaatgtgtcctccgaaaccgtgaatatcacgattacccaaggactggctgtgcctacaatctctagcttctttccgcctggataccaagtctccttctgtcttgtgatggtcctcctgtttgctgtggacacaggactgtacttttccgtgaaaacgaacatccgcagctccacacgcgattggaaagatcacaagtttaaatggcgcaaagatccccaggacaag

SEQ ID NO: 4964 - DNA, 1536 bp, Artificial Sequence
  Synthetic Polynucleotide
atggccttaccagtgaccgccttgctcctgccgctggccttgctgctccacgccgccaggccgcaggtgcaactggtggaatctggcggcaatctggttcagcctggcggctctctgagactgtcttgtgccgccagcggcttcaccttcggcagcttttctatgagctgggtccgacaagctcctggcggaggacttgaatgggtggcaggactgtctgccagaagcagcctgacacactacgccgactctgtgaagggcagattcaccatcagccgggacaacgccaagaacagcgtgtacctccagatgaacagcctgagagtggaagataccgccgtgtactactgcgccagaagaagctacgacagcagcggctactggggccacttctacagctacatggatgtgtggggccagggcaccctggttacagtttctggcggaggcggaagtggaggcggaggatctggcggcggaggctcttctgtgctgacccagcctagctccgtgtctgctgctcctggacagaaagtgaccatctcctgtagcggcagcaccagcaacatcggcaacaactacgtgtcctggtatcagcagcaccccggcaaggcccctaagctgatgatctacgacgtgtccaagaggcccagcggcgtgccagatagattttccggcagcaagagcggcaacagcgccagcctggatattagcggactccagtctgaggacgaggccgactactattgcgccgcctgggatgatagcctgagcgagtttctgtttggcaccggcaccaagctgacagtgcttggaacgcgtggaatgaggactgaggatcttcccaaagctgtcgtctttctcgaaccccaatggtatcgggtgctcgaaaaagactctgtgacactgaaatgccaaggggcctactctcccgaggacaactccacacagtggtttcataatgagtccctcatcagctctcaggccagctcttatttcattgatgccgctacagtggacgactccggcgagtatcggtgtcagaccaatctgtctacactgtctgaccccgtgcagcttgaggtccacattggatggttgctcttgcaagccccacgctgggttttcaaagaggaagatccaatccatctgcggtgccacagctggaaaaacaccgctctccacaaagtcacatacctgcaaaatggcaaaggacgcaaatacttccatcacaattccgatttttacattccgaaggctaccctgaaagacagcggcagctatttctgccggggactcgtcggctccaagaatgtgtcctccgaaaccgtgaatatcacgattacccaaggactggctgtgcctacaatctctagcttctttccgcctggataccaagtctccttctgtcttgtgatggtcctcctgtttgctgtggacacaggactgtacttttccgtgaaaacgaacatccgcagctccacacgcgattggaaagatcacaagtttaaatggcgcaaagatccccaggacaag

SEQ ID NO: 4965 - DNA, 1509 bp, Artificial Sequence
  Synthetic Polynucleotide
atggccttaccagtgaccgccttgctcctgccgctggccttgctgctccacgccgccaggccgcagtctgtggtcacacagcctccatctgtgtctggcgctccaggccagagagtgaccatctcttgtaccggcagcagcagcaatatcggagccggctatgacgtgcactggtatcagcagctccctggcacagcccctaaactgctgatctacggcaacagcaacagacccagcggcgtgcccgatagattttccggctctaagagcggcacaagcgccagcctggctattactggactccaggccgaggacgaggccgactactactgtcagagctacgacagcagcctgagcggcagctatgtgtttggcaccggcaccaagctgacagtgcttggaggcggaggcggaagtggaggcggaggatctggcggcggaggctctgaagttcaactggtggaaaccggcggcaacctggttcaacctggcgcttctctgagactgagctgtgccgccagcggctttagctttagcggaacagccatgcactgggtccgacaggcacctggcaaaggactggaatgggtgtccaccatcagcagcacaggcagaagcacctactaccgggacagcgtgaagggcagattcaccatctccagagacaacagcaagaacaccctgtacctccagatgaacagcctgagaggcgaggacaccgccgtgtactattgtgccagagtgtccttcgactactggggccagggaaccctggtcacagtctcttctacgcgtggaatgaggactgaggatcttcccaaagctgtcgtctttctcgaaccccaatggtatcgggtgctcgaaaaagactctgtgacactgaaatgccaaggggcctactctcccgaggacaactccacacagtggtttcataatgagtccctcatcagctctcaggccagctcttatttcattgatgccgctacagtggacgactccggcgagtatcggtgtcagaccaatctgtctacactgtctgaccccgtgcagcttgaggtccacattggatggttgctcttgcaagccccacgctgggttttcaaagaggaagatccaatccatctgcggtgccacagctggaaaaacaccgctctccacaaagtcacatacctgcaaaatggcaaaggacgcaaatacttccatcacaattccgatttttacattccgaaggctaccctgaaagacagcggcagctatttctgccggggactcgtcggctccaagaatgtgtcctccgaaaccgtgaatatcacgattacccaaggactggctgtgcctacaatctctagcttctttccgcctggataccaagtctccttctgtcttgtgatggtcctcctgtttgctgtggacacaggactgtacttttccgtgaaaacgaacatccgcagctccacacgcgattggaaagatcacaagtttaaatggcgcaaagatccccaggacaag

SEQ ID NO: 4966 - DNA, 1515 bp, Artificial Sequence
  Synthetic Polynucleotide
atggccttaccagtgaccgccttgctcctgccgctggccttgctgctccacgccgccaggccgcagtctgtggttacacagcctgcctccgtgtctggctctcctggccagagcatcaccatcagctgtaccggcaccagctctgatgtcggcggctacaattacgtgtcctggtatcagcagcaccccggcaaggcccctaagctgatgatctacgacgtgtccaagaggcccagcggcgtgtccaatagattcagcggcagcaagagcggcaacaccgccagcctgacaatttctggactgcaagccgaggacgaggccgactactactgtagcagctacaccagcagcagcacactggtgtttggcggaggcaccaagctgacagttcttggaggcggaggcggaagtggaggcggaggatctggcggcggaggctctgaagttcagctggttgaaagcggcggagcctttgttcagcctggcggatctctgagactgagctgtgccgccagcggcttcacattttccagctacgccatgacctgggtccgacaggctcctggcaaaggactggaatgggtgtccaccatctccggcagaggcagaagcaccttctacgccgatagcgtgaagggcagattcacaatcagccgggacaacagcaagaacaccctgtacctccagatgaacagcctgagagccgaggataccgccgtgtactactgtgcccggtactatcacgctggcgcctttgatctttggggccagggaacactggtcaccgtgtcatctacgcgtggaatgaggactgaggatcttcccaaagctgtcgtctttctcgaaccccaatggtatcgggtgctcgaaaaagactctgtgacactgaaatgccaaggggcctactctcccgaggacaactccacacagtggtttcataatgagtccctcatcagctctcaggccagctcttatttcattgatgccgctacagtggacgactccggcgagtatcggtgtcagaccaatctgtctacactgtctgaccccgtgcagcttgaggtccacattggatggttgctcttgcaagccccacgctgggttttcaaagaggaagatccaatccatctgcggtgccacagctggaaaaacaccgctctccacaaagtcacatacctgcaaaatggcaaaggacgcaaatacttccatcacaattccgatttttacattccgaaggctaccctgaaagacagcggcagctatttctgccggggactcgtcggctccaagaatgtgtcctccgaaaccgtgaatatcacgattacccaaggactggctgtgcctacaatctctagcttctttccgcctggataccaagtctccttctgtcttgtgatggtcctcctgtttgctgtggacacaggactgtacttttccgtgaaaacgaacatccgcagctccacacgcgattggaaagatcacaagtttaaatggcgcaaagatccccaggacaag

SEQ ID NO: 4967 - DNA, 1521 bp, Artificial Sequence
  Synthetic Polynucleotide
atggccttaccagtgaccgccttgctcctgccgctggccttgctgctccacgccgccaggccggacgtggtcatgacacagagcccttctagcctgtctgccagcgtgggcgacagagtgacaatcacctgtcagagcagcctggacatcagccactacctgaactggtatcagcagaagcccggcaaggcccctaagctgctgatctacgacgccagcaatctggaaaccggcgtgcccagcagattttctggcagcggaagcggcacccacttcaccttcacaatatccagcctccagcctgaggacttcgccacctactactgccagcagtacgacaacctgcctctgacctttggcggaggcaccaagctggaaatcaagagaggcggaggcggaagtggaggcggaggatctggcggcggaggctctcaagttcaactggttcaatcaggcggaggcgtggtgcaacctggtggctctctgagagtgtcttgtgctgcctctggcgtgaccctgagcgactatggaatgcactgggtccgacaggcccctggcaaaggacttgagtgggtcgccttcatcagaaacgacggcagcgacaagtattacgccgacagcgtgaagggcagattcaccatcagccgggacaacagcgagaaaaccgtgtctctccagatgtctagcctgagagccgaggacaccgccgtgtactactgtgccaagaatggcgagagcggccctctggactactggtatctggatctgtggggcagaggcaccctggtcacagtctcttctacgcgtggaatgaggactgaggatcttcccaaagctgtcgtctttctcgaaccccaatggtatcgggtgctcgaaaaagactctgtgacactgaaatgccaaggggcctactctcccgaggacaactccacacagtggtttcataatgagtccctcatcagctctcaggccagctcttatttcattgatgccgctacagtggacgactccggcgagtatcggtgtcagaccaatctgtctacactgtctgaccccgtgcagcttgaggtccacattggatggttgctcttgcaagccccacgctgggttttcaaagaggaagatccaatccatctgcggtgccacagctggaaaaacaccgctctccacaaagtcacatacctgcaaaatggcaaaggacgcaaatacttccatcacaattccgatttttacattccgaaggctaccctgaaagacagcggcagctatttctgccggggactcgtcggctccaagaatgtgtcctccgaaaccgtgaatatcacgattacccaaggactggctgtgcctacaatctctagcttctttccgcctggataccaagtctccttctgtcttgtgatggtcctcctgtttgctgtggacacaggactgtacttttccgtgaaaacgaacatccgcagctccacacgcgattggaaagatcacaagtttaaatggcgcaaagatccccaggacaag

SEQ ID NO: 4968 - DNA, 1542 bp, Artificial Sequence
  Synthetic Polynucleotide
atggccttaccagtgaccgccttgctcctgccgctggccttgctgctccacgccgccaggccggacgtgatgctgacccagacaccactgagcctgcctgtgtctctgggcgatcaggccagcatctcctgtagaagcagccagagcatcctgcacagcaccggcgatacctacctggaatggtatctccagaagcctggacagagccccaagctgctgattaacaaggtgtccaaccggctgagcggcgtgcccgatagattttctggcagcggctctggcaccgacttcaccctgaagatcagcagagtggaagccgaggacctgggcgtgtactactgcttccaaggcagccatgttccttggacctttggcggaggcaccaagctggaaatcaagagagctgacgccgctcctaccgtgtccatctttcctggaggcggtggaagtggcggcggtggttcaggcggcggaggatctcaagtgaagctccagcagagcggccctagccttgtgaaacctggcgcttccgtgaagatgagctgcaaggccagcggctacaccttcaccgatttctacatgaaatgggtcaagcagagccacggcaagtctctggaatggatcggcgacatcaaccccaacatcggagacaccttctacaaccagaagttcaagggcaaagccacactgaccgtggacaagagcagcagcaccgcctacatgcagctcaacagcctgaccagcgaggacagcgccgtgtacttttgttccgtgggctacttcgacgtgtggggagccggaacaaccgtgacagtctcttctacgcgtggaatgaggactgaggatcttcccaaagctgtcgtctttctcgaaccccaatggtatcgggtgctcgaaaaagactctgtgacactgaaatgccaaggggcctactctcccgaggacaactccacacagtggtttcataatgagtccctcatcagctctcaggccagctcttatttcattgatgccgctacagtggacgactccggcgagtatcggtgtcagaccaatctgtctacactgtctgaccccgtgcagcttgaggtccacattggatggttgctcttgcaagccccacgctgggttttcaaagaggaagatccaatccatctgcggtgccacagctggaaaaacaccgctctccacaaagtcacatacctgcaaaatggcaaaggacgcaaatacttccatcacaattccgatttttacattccgaaggctaccctgaaagacagcggcagctatttctgccggggactcgtcggctccaagaatgtgtcctccgaaaccgtgaatatcacgattacccaaggactggctgtgcctacaatctctagcttctttccgcctggataccaagtctccttctgtcttgtgatggtcctcctgtttgctgtggacacaggactgtacttttccgtgaaaacgaacatccgcagctccacacgcgattggaaagatcacaagtttaaatggcgcaaagatccccaggacaag

SEQ ID NO: 4969 - DNA, 1542 bp, Artificial Sequence
  Synthetic Polynucleotide
atggccttaccagtgaccgccttgctcctgccgctggccttgctgctccacgccgccaggccgctgcctgttctgacacagcctccatccgtgtctgtggcccctggaaagaccgccagaatcacatgcggcggcaacaacatcggcagcaagagcgtgcactggtatcagcagaagcctggacaggctcctgtgctggtggtgtacgacgacagcgatagacctagcggcatccccgagagattcagcggcagcaattccggcaataccgccacactgaccatcagcagagtggaagctggcgacgaggccgactactactgccaagtgtgggacagcagcagcgactacgtggtgtttggcggcggaacaaagctgacagtgcttggcggaggcggaagtggaggcggaggatctggcggcggaggctctgaagttcaactggtgcagagcggagccgaagtgaagaagccaggcgagagcctgaagattagctgcaaaggcagcggctacagcttcaccagctactggatcggctgggtccgacagatgcctggcaaaggactggaatggatgggcatcatctaccccggcgacagcgacaccagatacagccctagctttcagggccaagtgaccatctccgccgacaagagcatcagcacagcctacctccagtggtcctctctgaaggccagcgataccgccatgtactactgcgccagacaagtctggggatggcaaggcggcatgtaccccaggtctaactggtggtacaacctggactcttggggccagggcacactggtcacagtctcttctacgcgtggaatgaggactgaggatcttcccaaagctgtcgtctttctcgaaccccaatggtatcgggtgctcgaaaaagactctgtgacactgaaatgccaaggggcctactctcccgaggacaactccacacagtggtttcataatgagtccctcatcagctctcaggccagctcttatttcattgatgccgctacagtggacgactccggcgagtatcggtgtcagaccaatctgtctacactgtctgaccccgtgcagcttgaggtccacattggatggttgctcttgcaagccccacgctgggttttcaaagaggaagatccaatccatctgcggtgccacagctggaaaaacaccgctctccacaaagtcacatacctgcaaaatggcaaaggacgcaaatacttccatcacaattccgatttttacattccgaaggctaccctgaaagacagcggcagctatttctgccggggactcgtcggctccaagaatgtgtcctccgaaaccgtgaatatcacgattacccaaggactggctgtgcctacaatctctagcttctttccgcctggataccaagtctccttctgtcttgtgatggtcctcctgtttgctgtggacacaggactgtacttttccgtgaaaacgaacatccgcagctccacacgcgattggaaagatcacaagtttaaatggcgcaaagatccccaggacaag

SEQ ID NO: 4970 - DNA, 1521 bp, Artificial Sequence
  Synthetic Polynucleotide
atggccttaccagtgaccgccttgctcctgccgctggccttgctgctccacgccgccaggccggagctggtcatgacacagagccctgcttctctggccgtgtcactgggacagagagccaccatctcttgcagagccagcgagagcgtggacagctacggcaagagcttcatgcactggtatcagctcaagcccggccagcctcctaagctgctgatctacagagcctccaacctggaaagcggcgtgccagccagattttctggcagcggcagcagaaccgacttcaccctgaccattgatcccgtggaagccgatgatgccgccacctactactgccagcagaacaacgaggacccctggacatttggcggaggcaccaagctggaaatcaaaggcggaggcggaagtggaggcggaggatctggcggcggaggctctgaagtgcagctcgaacagtctggccccgagcttgtgaaacctggcgcttccgtgaagatgagctgcaaggccagcggctacaccttcaccaactactacatgaaatgggtcaagcagagccacggcaagtccctggaatggatcggcgatctgaaccccaacaacggcgacaccttctacaaccagaagttcaagggcaaagccacactgaccgtggacaagagcagcaacaccgcctacatgcagctcaactccctgaccagcgaggacagcgccgtgtactactgtgccagaaccggcagatacgaagagaacgctatggactactggggccagggcacaagcgtgacagtctcttctacgcgtggaatgaggactgaggatcttcccaaagctgtcgtctttctcgaaccccaatggtatcgggtgctcgaaaaagactctgtgacactgaaatgccaaggggcctactctcccgaggacaactccacacagtggtttcataatgagtccctcatcagctctcaggccagctcttatttcattgatgccgctacagtggacgactccggcgagtatcggtgtcagaccaatctgtctacactgtctgaccccgtgcagcttgaggtccacattggatggttgctcttgcaagccccacgctgggttttcaaagaggaagatccaatccatctgcggtgccacagctggaaaaacaccgctctccacaaagtcacatacctgcaaaatggcaaaggacgcaaatacttccatcacaattccgatttttacattccgaaggctaccctgaaagacagcggcagctatttctgccggggactcgtcggctccaagaatgtgtcctccgaaaccgtgaatatcacgattacccaaggactggctgtgcctacaatctctagcttctttccgcctggataccaagtctccttctgtcttgtgatggtcctcctgtttgctgtggacacaggactgtacttttccgtgaaaacgaacatccgcagctccacacgcgattggaaagatcacaagtttaaatggcgcaaagatccccaggacaag

SEQ ID NO: 4971 - DNA, 1515 bp, Artificial Sequence; identical to SEQ ID NO: 4944
  Synthetic Polynucleotide

SEQ ID NO: 4972 - DNA, 1515 bp, Artificial Sequence; identical to SEQ ID NO: 4853
  Synthetic Polynucleotide

SEQ ID NO: 4973 - DNA, 1503 bp, Artificial Sequence
  Synthetic Polynucleotide
atggccttaccagtgaccgccttgctcctgccgctggccttgctgctccacgccgccaggccggacgtggtcatgacacagagcccttctagcctgtctgccagcgtgggcgacagagtgaccatcacctgtatggcctccgaggacatctacatccggctggcctggtatcagcagaagcctggaaacgcccctaagctgctgatctacgccgccacctctctggaaacaggcgtgccaagcagattttccggcagcggctctggcaccgatttcaccctgacaatatccagcctccagcctgaggacttcgccacctactactgccagcagtattggagcagcccctggacatttggcggaggcaccaaggtggaaatcaaaggcggaggcggaagtggaggcggaggatctggcggcggaggctctcaggttcagctgcaagagtctggccccggactggtcaagcctagccaaacactgagcctgacctgtaccgtgtccggctacagcatcaccagcgactacacctggaactggatcagacagcctcctggcaacggactggaatggatcggctacatcacctacagcggcagcaccagctacaaccccagcctgaaaagccgggtgctgatctccgtggacaccagcaagaatcaggtgtccctgaagctgagcagcgtgacagccgctgataccgccgtgtactactgtgccagactggggagaagatacacaatggactactggggccagggcaccaccgtgacagtttcttctacgcgtggaatgaggactgaggatcttcccaaagctgtcgtctttctcgaaccccaatggtatcgggtgctcgaaaaagactctgtgacactgaaatgccaaggggcctactctcccgaggacaactccacacagtggtttcataatgagtccctcatcagctctcaggccagctcttatttcattgatgccgctacagtggacgactccggcgagtatcggtgtcagaccaatctgtctacactgtctgaccccgtgcagcttgaggtccacattggatggttgctcttgcaagccccacgctgggttttcaaagaggaagatccaatccatctgcggtgccacagctggaaaaacaccgctctccacaaagtcacatacctgcaaaatggcaaaggacgcaaatacttccatcacaattccgatttttacattccgaaggctaccctgaaagacagcggcagctatttctgccggggactcgtcggctccaagaatgtgtcctccgaaaccgtgaatatcacgattacccaaggactggctgtgcctacaatctctagcttctttccgcctggataccaagtctccttctgtcttgtgatggtcctcctgtttgctgtggacacaggactgtacttttccgtgaaaacgaacatccgcagctccacacgcgattggaaagatcacaagtttaaatggcgcaaagatccccaggacaag

SEQ ID NO: 4974 - DNA, 1518 bp, Artificial Sequence
  Synthetic Polynucleotide
atggccttaccagtgaccgccttgctcctgccgctggccttgctgctccacgccgccaggccggaggtgcaactggttgagtctggcggaggactggtgcagcctggaagaagcctgagactgtcttgtgccgccagcggcttcaccttcgacgattatgccatgcactgggtccgacaggcccctggcaaaggacttgaatgggtgtccggcatctcctggaacagcggctctatcggctacgccgattccgtgaagggcagattcaccatcagccgggacaacgccaagaacagcctgtacctccagatgaactccctgagagccgaggacacagccctgtactactgcgccaaagacaaaggcggaggctactacgacttttggagcggcagcgattattggggccagggcacactggtcacagtgtctagcggcggaggcggaagtggaggcggaggatctggcggcggaggctcttcttctgagctgacacaggaccctgccgtgtctgttgctctgggccagacagtgcggattacctgtcagggcgatagcctgagaagctactacgcctcctggtatcagcagaagccaggccaggctcctgtgctggtcatctacggcaagaacaacagacccagcggcatccccgatagattcagcggaagcagctctggcaataccgccagcctgacaattactggcgctcaggccgaggacgaggccgactactactgcaacagcagagatagcagcggctgggttttcggcggaggcacaaaactgacagtgctgacgcgtggaatgaggactgaggatcttcccaaagctgtcgtctttctcgaaccccaatggtatcgggtgctcgaaaaagactctgtgacactgaaatgccaaggggcctactctcccgaggacaactccacacagtggtttcataatgagtccctcatcagctctcaggccagctcttatttcattgatgccgctacagtggacgactccggcgagtatcggtgtcagaccaatctgtctacactgtctgaccccgtgcagcttgaggtccacattggatggttgctcttgcaagccccacgctgggttttcaaagaggaagatccaatccatctgcggtgccacagctggaaaaacaccgctctccacaaagtcacatacctgcaaaatggcaaaggacgcaaatacttccatcacaattccgatttttacattccgaaggctaccctgaaagacagcggcagctatttctgccggggactcgtcggctccaagaatgtgtcctccgaaaccgtgaatatcacgattacccaaggactggctgtgcctacaatctctagcttctttccgcctggataccaagtctccttctgtcttgtgatggtcctcctgtttgctgtggacacaggactgtacttttccgtgaaaacgaacatccgcagctccacacgcgattggaaagatcacaagtttaaatggcgcaaagatccccaggacaag

SEQ ID NO: 4975 - DNA, 1545 bp, Artificial Sequence
  Synthetic Polynucleotide
atggccttaccagtgaccgccttgctcctgccgctggccttgctgctccacgccgccaggccggaagtgcagctccagcagtctggacctggcctggttaagcctagccagacactgagcctgacctgtgccatcagcggcgatagcgtgctgagcaacagcgacacctggaactggatcagacagagccctagcagaggactggaatggctgggcagaacctaccacagaagcacttggtacgacgactacgccagctctgtgcggggcagagtgtccatcaatgtggacaccagcaagaaccagtacagcctgcaactgaacgccgtgacacctgaggataccggcgtgtactactgcgccagagacagactccaggacggcaactcttggagcgacgcctttgatgtgtggggccagggcacaatggtcaccgtttctagcggcggaggcggaagtggaggcggaggatctggcggcggaggctctcaatctgctctgacacagcctgccagcgtgtcaggatctcctggacagagcatcaccatctcttgcaccggcaccagctctgatgtcggcggctacaattacgtgtcctggtatcagcagcaccccggcaaggcccctaagctgatgatctacgacgtgtccaacagacccagcggcgtgtccaatagattctccggcagcaagagcggcaacaccgccagcctgacaatttctggactgcaagccgaggacgaggccgactactactgtagcagctacaccagcagcagcacactggtgtacgtgttcggcacaggcaccaaagtgaccgtgcttacgcgtggaatgaggactgaggatcttcccaaagctgtcgtctttctcgaaccccaatggtatcgggtgctcgaaaaagactctgtgacactgaaatgccaaggggcctactctcccgaggacaactccacacagtggtttcataatgagtccctcatcagctctcaggccagctcttatttcattgatgccgctacagtggacgactccggcgagtatcggtgtcagaccaatctgtctacactgtctgaccccgtgcagcttgaggtccacattggatggttgctcttgcaagccccacgctgggttttcaaagaggaagatccaatccatctgcggtgccacagctggaaaaacaccgctctccacaaagtcacatacctgcaaaatggcaaaggacgcaaatacttccatcacaattccgatttttacattccgaaggctaccctgaaagacagcggcagctatttctgccggggactcgtcggctccaagaatgtgtcctccgaaaccgtgaatatcacgattacccaaggactggctgtgcctacaatctctagcttctttccgcctggataccaagtctccttctgtcttgtgatggtcctcctgtttgctgtggacacaggactgtacttttccgtgaaaacgaacatccgcagctccacacgcgattggaaagatcacaagtttaaatggcgcaaagatccccaggacaag

SEQ ID NO: 4976 - DNA, 1539 bp, Artificial Sequence
  Synthetic Polynucleotide
atggccttaccagtgaccgccttgctcctgccgctggccttgctgctccacgccgccaggccgcaggtgcaactggttcagtctggggccgaagtgaagaaacctggggcctctgtgaaggtgtcctgcaaggcttccggctacacctttaccagctacgacatcaactgggtccgacaggccacaggccaaggactggaatggatgggctggatgaaccccaacagcggcaataccggctacgcccagaaattccagggcagagtgaccatgaccagaaacaccagcatcagcaccgcctacatggaactgagcagcctgagaagcgaggacaccgccgtgtactattgcgccagaggcgacagcaactactggtcctactacggcatggacgtgtggggccagggaacactggttacagtttctagcggcggaggcggaagtggaggcggaggatctggcggcggaggctctggcggtggtggatctcaatctgtgctgacccagcctagatccgtgtctggctctcctggacagagcgtgaccatctcttgtaccggcaccagctctgatgtcggcggctacaattacgtgtcctggtatcagcagcaccccggcgaagcccctaagctgattatctacgacgccgacaagcggcccagcggcatcagcaatagattcagctctggcaagagcggcaacaccgccagcctgacaatcagcggactccaggtggaagatgaggccgactactactgctgctcctatgccggcggaagcacctgggttttcggaggcggtacaaaagtgaccgtgctgacgcgtggaatgaggactgaggatcttcccaaagctgtcgtctttctcgaaccccaatggtatcgggtgctcgaaaaagactctgtgacactgaaatgccaaggggcctactctcccgaggacaactccacacagtggtttcataatgagtccctcatcagctctcaggccagctcttatttcattgatgccgctacagtggacgactccggcgagtatcggtgtcagaccaatctgtctacactgtctgaccccgtgcagcttgaggtccacattggatggttgctcttgcaagccccacgctgggttttcaaagaggaagatccaatccatctgcggtgccacagctggaaaaacaccgctctccacaaagtcacatacctgcaaaatggcaaaggacgcaaatacttccatcacaattccgatttttacattccgaaggctaccctgaaagacagcggcagctatttctgccggggactcgtcggctccaagaatgtgtcctccgaaaccgtgaatatcacgattacccaaggactggctgtgcctacaatctctagcttctttccgcctggataccaagtctccttctgtcttgtgatggtcctcctgtttgctgtggacacaggactgtacttttccgtgaaaacgaacatccgcagctccacacgcgattggaaagatcacaagtttaaatggcgcaaagatccccaggacaag

SEQ ID NO: 4977 - DNA, 1545 bp, Artificial Sequence
  Synthetic Polynucleotide
atggccttaccagtgaccgccttgctcctgccgctggccttgctgctccacgccgccaggccggaagtgcagctccagcagtctggacctggcctggttaagcctagccagacactgagcctgacctgtgccatcagcggcgatagcgtgtcctctaatagcgccgcctggaactggatcagacagagccctagcagaggactggaatggctgggcagaacctactaccgcagcaagtggtacagcgactacgccgtgtccgtgaagtcccggatcaccatcaatcccgacaccagcaagaaccagttcagcctgcaactgaacagcgtgacccctgaggataccgccgtgtactactgcgccagagatccctacgacttttggagcggctaccccgacgcctttgacatctggggacagggcacaatggtcaccgtttctagcggcggaggcggaagtggaggcggaggatctggcggcggaggctctcaatctgctctgacacagcctgccagcgtgtcaggatctcctggacagagcatcaccatctcttgcaccggcaccagctctgatgtcggcggctacaattacgtgtcctggtatcagcagcaccccggcaaggcccctaaagtgattatcagcgaagtgaacaacagacccagcggcgtgtcccacagattcagcggctctaagtctggcaacaccgccagcctgacaatctctggactgcaagccgaggacgaggccgactacttctgtagcagctacaccagcggcagaaccctgtacgtgttcggcacaggcagcaaagtgacagtgctgggaacgcgtggaatgaggactgaggatcttcccaaagctgtcgtctttctcgaaccccaatggtatcgggtgctcgaaaaagactctgtgacactgaaatgccaaggggcctactctcccgaggacaactccacacagtggtttcataatgagtccctcatcagctctcaggccagctcttatttcattgatgccgctacagtggacgactccggcgagtatcggtgtcagaccaatctgtctacactgtctgaccccgtgcagcttgaggtccacattggatggttgctcttgcaagccccacgctgggttttcaaagaggaagatccaatccatctgcggtgccacagctggaaaaacaccgctctccacaaagtcacatacctgcaaaatggcaaaggacgcaaatacttccatcacaattccgatttttacattccgaaggctaccctgaaagacagcggcagctatttctgccggggactcgtcggctccaagaatgtgtcctccgaaaccgtgaatatcacgattacccaaggactggctgtgcctacaatctctagcttctttccgcctggataccaagtctccttctgtcttgtgatggtcctcctgtttgctgtggacacaggactgtacttttccgtgaaaacgaacatccgcagctccacacgcgattggaaagatcacaagtttaaatggcgcaaagatccccaggacaag

SEQ ID NO: 4978 - DNA, 1542 bp, Artificial Sequence
  Synthetic Polynucleotide
atggccttaccagtgaccgccttgctcctgccgctggccttgctgctccacgccgccaggccggaagtgcagctccagcagtctggacctggcctggttaagcctagccagacactgagcctgacctgtgccatcagcggcgattccatgctgagcaacagcgacacctggaactggatcagacagagccccagcagaggcctggaatggctgggcagaacataccacagaagcacttggtacgacgactacgccagctctgtgcggggcagagtgtccatcaatgtggacaccagcaagaaccagtacagcctgcaactgaacgccgtgacacctgaggataccggcgtgtactactgtgccagagtgcggctccaggacggcaattcttggagcgacgcctttgatgtgtggggccagggcacaatggtcaccgtttctagcggcggaggcggaagtggaggcggaggatctggcggcggaggctctcaatctgctctgacacagcctgccagcgcctctggatctcctggacagagcgtgaccatctcctgtaccggcacctcttctgatgtcggcggctacaactacgtgtcctggtatcagcagcaccccggcaaggcccctaagctgatgatctacgacgtgtccaacagacccagcggcgtgtccaatagattctccggcagcaagagcggcaacaccgccagcctgacaatttctggactgcaagccgaggacgaggccgactactactgtagcagctacaccagcagcagcacactgtacgtgttcggcacaggcacccagctcacagttcttacgcgtggaatgaggactgaggatcttcccaaagctgtcgtctttctcgaaccccaatggtatcgggtgctcgaaaaagactctgtgacactgaaatgccaaggggcctactctcccgaggacaactccacacagtggtttcataatgagtccctcatcagctctcaggccagctcttatttcattgatgccgctacagtggacgactccggcgagtatcggtgtcagaccaatctgtctacactgtctgaccccgtgcagcttgaggtccacattggatggttgctcttgcaagccccacgctgggttttcaaagaggaagatccaatccatctgcggtgccacagctggaaaaacaccgctctccacaaagtcacatacctgcaaaatggcaaaggacgcaaatacttccatcacaattccgatttttacattccgaaggctaccctgaaagacagcggcagctatttctgccggggactcgtcggctccaagaatgtgtcctccgaaaccgtgaatatcacgattacccaaggactggctgtgcctacaatctctagcttctttccgcctggataccaagtctccttctgtcttgtgatggtcctcctgtttgctgtggacacaggactgtacttttccgtgaaaacgaacatccgcagctccacacgcgattggaaagatcacaagtttaaatggcgcaaagatccccaggacaag

SEQ ID NO: 4979 - DNA, 1515 bp, Artificial Sequence
  Synthetic Polynucleotide
atggccttaccagtgaccgccttgctcctgccgctggccttgctgctccacgccgccaggccggagatcgtgctgacacagtctcccgccacactgtcactgtctccaggcgaaagagccacactgagctgtagcgccagcagcagcgtgtcctacatgtactggtatcagcagaagcccggacaggcccctagactgctgatctacagaaccagcaacctggcctctggcatccccgccagattttctggctctggcagcggcaccgatttcaccctgaccataagcagcctggaacctgaggacttcgccgtgtactactgccagcagtaccacagctaccccaccacctttggacagggcaccaaggtggaaatcaagcggacagttggcggaggcggaagtggaggcggaggatctggcggcggaggctctgaagtgcagctggttgaatcaggtggcggcctggttcaacctggcggatctctgagactgtcttgtgccgccagcggcttcagcttcaacacctacgccatgaactgggtccgacaggctcctggcaaaggactggaatgggtgtcccacatcagaagcaagagcaacaacttcgccacctactacgccgacagcgtgaaggacagattcaccatcagccgggacaacgccaagaacagcctgtacctccagatgaactccctgagagccgaggacaccgccgtgtattattgcgccagacaaggcggcgacttccctatggattattggggccagggcaccctggtcaccgtttcttctacgcgtggaatgaggactgaggatcttcccaaagctgtcgtctttctcgaaccccaatggtatcgggtgctcgaaaaagactctgtgacactgaaatgccaaggggcctactctcccgaggacaactccacacagtggtttcataatgagtccctcatcagctctcaggccagctcttatttcattgatgccgctacagtggacgactccggcgagtatcggtgtcagaccaatctgtctacactgtctgaccccgtgcagcttgaggtccacattggatggttgctcttgcaagccccacgctgggttttcaaagaggaagatccaatccatctgcggtgccacagctggaaaaacaccgctctccacaaagtcacatacctgcaaaatggcaaaggacgcaaatacttccatcacaattccgatttttacattccgaaggctaccctgaaagacagcggcagctatttctgccggggactcgtcggctccaagaatgtgtcctccgaaaccgtgaatatcacgattacccaaggactggctgtgcctacaatctctagcttctttccgcctggataccaagtctccttctgtcttgtgatggtcctcctgtttgctgtggacacaggactgtacttttccgtgaaaacgaacatccgcagctccacacgcgattggaaagatcacaagtttaaatggcgcaaagatccccaggacaag

SEQ ID NO: 4980 - DNA, 1503 bp, Artificial Sequence
  Synthetic Polynucleotide
atggccttaccagtgaccgccttgctcctgccgctggccttgctgctccacgccgccaggccggacgtggtcatgacacagagcccttctagcctgtctgccagcgtgggcgacagagtgaccatcacctgtaaagccagcgaggacatctacatccggctggcctggtatcagcagaagcctggaaaggcccctaagctgctgatctacgccgccacctctctggaaacaggcgtgccaagcagattttccggcagcggctctggcaccgatttcaccctgacaatatccagcctccagcctgaggacttcgccacctactactgccagcagtattggaccacaccttggacctttggcggaggcaccaaggtggaaatcaaaggcggaggcggaagtggaggcggaggatctggcggcggaggctctcaggtgcagctccaagagtctggccctggactggtcaagcctagccagacactgagcctgacctgtaccgtgtccggctacagcatcaccatcgactacacctggaactggatcagacagcctcctggcaaaggactggaatggatcggctacatcacctacagcggcagcaccgactacaaccccagcctgaaaagccgggtgctgatctccgtggacaccagcaagaatcaggtgtccctgaagctgagcagcgtgacagccgctgataccgccgtgtactactgtgccagactgggcagaagatacgccctggattattggggccagggcaccaccgtgacagtgtcatctacgcgtggaatgaggactgaggatcttcccaaagctgtcgtctttctcgaaccccaatggtatcgggtgctcgaaaaagactctgtgacactgaaatgccaaggggcctactctcccgaggacaactccacacagtggtttcataatgagtccctcatcagctctcaggccagctcttatttcattgatgccgctacagtggacgactccggcgagtatcggtgtcagaccaatctgtctacactgtctgaccccgtgcagcttgaggtccacattggatggttgctcttgcaagccccacgctgggttttcaaagaggaagatccaatccatctgcggtgccacagctggaaaaacaccgctctccacaaagtcacatacctgcaaaatggcaaaggacgcaaatacttccatcacaattccgatttttacattccgaaggctaccctgaaagacagcggcagctatttctgccggggactcgtcggctccaagaatgtgtcctccgaaaccgtgaatatcacgattacccaaggactggctgtgcctacaatctctagcttctttccgcctggataccaagtctccttctgtcttgtgatggtcctcctgtttgctgtggacacaggactgtacttttccgtgaaaacgaacatccgcagctccacacgcgattggaaagatcacaagtttaaatggcgcaaagatccccaggacaag

SEQ ID NO: 4981 - DNA, 1518 bp, Artificial Sequence
  Synthetic Polynucleotide
atggccttaccagtgaccgccttgctcctgccgctggccttgctgctccacgccgccaggccggacatccagctgactcagagccctagctttctgagcgccagcgtgggcgacagagtgaccattacatgtagagccagccagggcatcagcaccgacctgaactggtatcagcagaagcctggcaaggcccctaagctgctgatctacgccgccagcaatctggaaagcggcgtgccaagcagattttccggctctggcagcggcaccgagttcaccctgacaatatctagcctccagcctgaggacttcgccacctactactgccagcagagctacaactggccctacacctttggcggaggcaccaaggtggaaatcaagagaggcggaggcggaagtggaggcggaggatctggcggcggaggctctgaagttcagctggttgaatcaggcggaggactcgtgaaacctggcggctctctgagactgtcttgtgccgccagcggcttcaccttcagcaacttcgagatgaactgggtccgacaggccccaggcaaaggactggaatgggtgtccggcatcagctccaatggccggtacatcaactacgccgacagcgtgaagggcagattcaccatcagccgggacaacgccaagaacagcctgtacctccagatgaactccctgagagccgaggacaccgccgtgtactattgtgccagagtggtggacttcgaccaggactacaacggcttcgactattggggccagggcaccctggttaccgttagctctacgcgtggaatgaggactgaggatcttcccaaagctgtcgtctttctcgaaccccaatggtatcgggtgctcgaaaaagactctgtgacactgaaatgccaaggggcctactctcccgaggacaactccacacagtggtttcataatgagtccctcatcagctctcaggccagctcttatttcattgatgccgctacagtggacgactccggcgagtatcggtgtcagaccaatctgtctacactgtctgaccccgtgcagcttgaggtccacattggatggttgctcttgcaagccccacgctgggttttcaaagaggaagatccaatccatctgcggtgccacagctggaaaaacaccgctctccacaaagtcacatacctgcaaaatggcaaaggacgcaaatacttccatcacaattccgatttttacattccgaaggctaccctgaaagacagcggcagctatttctgccggggactcgtcggctccaagaatgtgtcctccgaaaccgtgaatatcacgattacccaaggactggctgtgcctacaatctctagcttctttccgcctggataccaagtctccttctgtcttgtgatggtcctcctgtttgctgtggacacaggactgtacttttccgtgaaaacgaacatccgcagctccacacgcgattggaaagatcacaagtttaaatggcgcaaagatccccaggacaag

SEQ ID NO: 4982 - DNA, 1512 bp, Artificial Sequence
  Synthetic Polynucleotide
atggccttaccagtgaccgccttgctcctgccgctggccttgctgctccacgccgccaggccggacatccaactgactcagagccccagctttctgagcgcctctgtgggcgacagagtgaccatcacatgtagtctcagcctgggcatcagcacatggcgggattggtttccgccgaggcttggcaggggccttgagccgctgacctacgccgccagcacactgcaaagcggagtgcctagcagattttccggcagcggctctggcaccgagttcaccctgacaatatccagcctccagcctgaggacttcgccacctactactgccagcagctcaacagctaccctctgacctttggcggaggcaccaaggtggaaatcaagagaggcggaggcggaagtggaggcggaggatctggcggcggaggctctgaagttcaactggttgagtctggtggcggcctggttaagcctggcggatctctgagactgagctgtgccgccagcggcttcacctttagcacatacggcatgagctgggtccgacaggcccctggaaaaggacttgagtgggtcgcctacatcaacaacggctccggctacatctactacgccgacagcgtgaagggcagattcaccatcagccgggacaacgccaagaacagcctgtacctccagatgaactccctgagagccgaggacaccgccgtgtactattgtgccagaggacagtggtggagcggcggagactttgattattggggccagggcaccctggtcaccgtttcttctacgcgtggaatgaggactgaggatcttcccaaagctgtcgtctttctcgaaccccaatggtatcgggtgctcgaaaaagactctgtgacactgaaatgccaaggggcctactctcccgaggacaactccacacagtggtttcataatgagtccctcatcagctctcaggccagctcttatttcattgatgccgctacagtggacgactccggcgagtatcggtgtcagaccaatctgtctacactgtctgaccccgtgcagcttgaggtccacattggatggttgctcttgcaagccccacgctgggttttcaaagaggaagatccaatccatctgcggtgccacagctggaaaaacaccgctctccacaaagtcacatacctgcaaaatggcaaaggacgcaaatacttccatcacaattccgatttttacattccgaaggctaccctgaaagacagcggcagctatttctgccggggactcgtcggctccaagaatgtgtcctccgaaaccgtgaatatcacgattacccaaggactggctgtgcctacaatctctagcttctttccgcctggataccaagtctccttctgtcttgtgatggtcctcctgtttgctgtggacacaggactgtacttttccgtgaaaacgaacatccgcagctccacacgcgattggaaagatcacaagtttaaatggcgcaaagatccccaggacaag

SEQ ID NO: 4983 - DNA, 1518 bp, Artificial Sequence
  Synthetic Polynucleotide
atggccttaccagtgaccgccttgctcctgccgctggccttgctgctccacgccgccaggccggacatccagatgacccagaccacaagcagcctgtctgccagcctgggcgacagagtgaccatctcttgtagagccagccaggacatcagcaactacctgaactggtatcagcagaaacccgacggcaccgtgaagctgctgatctactacaccagcatcctgcacagcggcgtgcccagcagattttctggctctggcagcggcaccgactacagcctgaccatcagcaatctggaacaagaggacttcgctacctacttctgccagcaaggcaacaccctgccttggacatttggcggaggcaccaagctggaaatcaaagctggcggaggcggaagtggaggcggaggatctggcggcggaggctctgaagtgcaactggttgaatctggcggcggactggttaagcctggcggatctctgaagctgagctgtgccgcctctggcttcgccttcagcatctacgatatgagctgggtccgacagacccctgagaagagactggaatgggtcgcctacatctctagcggcggagggacctactatcccgacacagtgaagggcagattcaccatctccagagacaacgccaagaacaccctgtacctccagatgagcagcctgaagtccgaggacaccgccatgtactactgcgccagacacagcggctatggcacacattggggagtgctgtttgcctactggggccagggaacactggtcacagtttctgctacgcgtggaatgaggactgaggatcttcccaaagctgtcgtctttctcgaaccccaatggtatcgggtgctcgaaaaagactctgtgacactgaaatgccaaggggcctactctcccgaggacaactccacacagtggtttcataatgagtccctcatcagctctcaggccagctcttatttcattgatgccgctacagtggacgactccggcgagtatcggtgtcagaccaatctgtctacactgtctgaccccgtgcagcttgaggtccacattggatggttgctcttgcaagccccacgctgggttttcaaagaggaagatccaatccatctgcggtgccacagctggaaaaacaccgctctccacaaagtcacatacctgcaaaatggcaaaggacgcaaatacttccatcacaattccgatttttacattccgaaggctaccctgaaagacagcggcagctatttctgccggggactcgtcggctccaagaatgtgtcctccgaaaccgtgaatatcacgattacccaaggactggctgtgcctacaatctctagcttctttccgcctggataccaagtctccttctgtcttgtgatggtcctcctgtttgctgtggacacaggactgtacttttccgtgaaaacgaacatccgcagctccacacgcgattggaaagatcacaagtttaaatggcgcaaagatccccaggacaag

SEQ ID NO: 4984 - DNA, 1548 bp, Artificial Sequence
  Synthetic Polynucleotide
atggccttaccagtgaccgccttgctcctgccgctggccttgctgctccacgccgccaggccggacatcgtgatgacacagagccctgatagcctggccgtgtctctgggagagagagccaccatcaactgcaagagcagccagagcctgctgtacagaagcaaccagaagaactacctggcctggtatcagcagaagcccggccagcctcctaagctgctgatctactgggccagcaccagagaaagcggcgtgcccgatagattttctggctctggcagcggcaccgacttcaccctgacaatttctagcctgcaagccgaggacgtggccgtgtactactgccagcagtattacaactaccccagaaccttcggccagggcaccaaggtggaaatcaagagaacagttggcggaggcggaagtggaggcggaggatctggcggcggaggctctgaagttcagctgcttgaatcaggcggcggactggttcaacctggcggatctctgagactgagctgtgccgccagcggctacagcatcacaagcgactatgcctggaactgggtccgacaggcccctggcaaaggactggaatgggtgtcctacatcagcaacagcggcagcaccagctacaaccccagcctgaagtcccggttcaccatcagcagagacaacagcaagaacaccctgtacctccagatgaacagcctgagagctgaggacaccgccgtgtattattgcgccaaagagcggaactacgactacgacgattactactacgctatggactactggggccagggaaccctggtcacagtctcttctacgcgtggaatgaggactgaggatcttcccaaagctgtcgtctttctcgaaccccaatggtatcgggtgctcgaaaaagactctgtgacactgaaatgccaaggggcctactctcccgaggacaactccacacagtggtttcataatgagtccctcatcagctctcaggccagctcttatttcattgatgccgctacagtggacgactccggcgagtatcggtgtcagaccaatctgtctacactgtctgaccccgtgcagcttgaggtccacattggatggttgctcttgcaagccccacgctgggttttcaaagaggaagatccaatccatctgcggtgccacagctggaaaaacaccgctctccacaaagtcacatacctgcaaaatggcaaaggacgcaaatacttccatcacaattccgatttttacattccgaaggctaccctgaaagacagcggcagctatttctgccggggactcgtcggctccaagaatgtgtcctccgaaaccgtgaatatcacgattacccaaggactggctgtgcctacaatctctagcttctttccgcctggataccaagtctccttctgtcttgtgatggtcctcctgtttgctgtggacacaggactgtacttttccgtgaaaacgaacatccgcagctccacacgcgattggaaagatcacaagtttaaatggcgcaaagatccccaggacaag

SEQ ID NO: 4985 - DNA, 1527 bp, Artificial Sequence
  Synthetic Polynucleotide
atggccttaccagtgaccgccttgctcctgccgctggccttgctgctccacgccgccaggccggacgtggtcatgacacagagccctctgagcctgcctgtgacacttggacagcctgccagcatcagctgtagaagcagccagagcctgctgcacagcagcggcaatacctacctggaatggtatcagcagaggcccggacagagccccagacctctgatctacaagatcagcacccggttcagcggcgtgcccgatagattttctggctctggcagcggcaccgacttcaccctgaagattagcagagtggaagccgaggacgtgggcgtgtactactgcttccaaggcagccacgtgccatacacctttggcggcggaacaaaggtggaaatcaagagaggcggaggcggaagtggaggcggaggatctggcggcggaggctctcaagttcagctggttcagagcggagccgaagtgaagaaacctggggcctctgtgaaggtgtcctgcaaagcctctggcctgaccatcgaggactactacatgcactgggtccgacaggcccctggacaaggacttgaatggatgggctggatcgaccccgagaacggcgatacagagtacggccctaagttccagggcagagtgaccatgaccagagacaccagcatcaacaccgcctacatggaactgagccggctgagatccgatgacaccgccgtgtactattgcgccgtgcacaatgcccactacggcacttggtttgcctattggggccagggcacactggtcaccgttagctctacgcgtggaatgaggactgaggatcttcccaaagctgtcgtctttctcgaaccccaatggtatcgggtgctcgaaaaagactctgtgacactgaaatgccaaggggcctactctcccgaggacaactccacacagtggtttcataatgagtccctcatcagctctcaggccagctcttatttcattgatgccgctacagtggacgactccggcgagtatcggtgtcagaccaatctgtctacactgtctgaccccgtgcagcttgaggtccacattggatggttgctcttgcaagccccacgctgggttttcaaagaggaagatccaatccatctgcggtgccacagctggaaaaacaccgctctccacaaagtcacatacctgcaaaatggcaaaggacgcaaatacttccatcacaattccgatttttacattccgaaggctaccctgaaagacagcggcagctatttctgccggggactcgtcggctccaagaatgtgtcctccgaaaccgtgaatatcacgattacccaaggactggctgtgcctacaatctctagcttctttccgcctggataccaagtctccttctgtcttgtgatggtcctcctgtttgctgtggacacaggactgtacttttccgtgaaaacgaacatccgcagctccacacgcgattggaaagatcacaagtttaaatggcgcaaagatccccaggacaag

SEQ ID NO: 4986 - DNA, 1503 bp, Artificial Sequence
  Synthetic Polynucleotide
atggccttaccagtgaccgccttgctcctgccgctggccttgctgctccacgccgccaggccggacatccagatgacacagagccctagcagcctgtctgccagcgtgggagacagagtgaccatcacctgtagagccagcgagaacatctacagcaacctggcctggtatcagcagaagcctggcaaggcccctaagctgctgatctacgccgccaccaatctggctgatggcgtgccaagcagattttccggctctggcagcggcaccgatttcaccctgacaatatccagcctccagcctgaggacttcgccacctactactgccagcacttttggggcacccctacattcggccagggcaccaaggtggaaatcaagagaacagttggcggaggcggaagtggaggcggaggatctggcggcggaggctctgaagtgcagctggttgaatcaggtggcggcctggttcaacctggcggatctctgagactgagctgtgccgcctctggcttcagcctgacaaattacggcgtgcactgggtccgacaggcccctggaaaaggactggaatgggtgtccgtgatttggagcggcggcagcaccgattacaacgccgccttcatcagccggttcaccatcagcgccgacaccagcaagaataccgcctacctccagatgaactccctgagagccgaggacaccgccgtgtactattgcgccagagaactgatccacgctatggacaactggggccagggaaccctggtcacagtctcttctacgcgtggaatgaggactgaggatcttcccaaagctgtcgtctttctcgaaccccaatggtatcgggtgctcgaaaaagactctgtgacactgaaatgccaaggggcctactctcccgaggacaactccacacagtggtttcataatgagtccctcatcagctctcaggccagctcttatttcattgatgccgctacagtggacgactccggcgagtatcggtgtcagaccaatctgtctacactgtctgaccccgtgcagcttgaggtccacattggatggttgctcttgcaagccccacgctgggttttcaaagaggaagatccaatccatctgcggtgccacagctggaaaaacaccgctctccacaaagtcacatacctgcaaaatggcaaaggacgcaaatacttccatcacaattccgatttttacattccgaaggctaccctgaaagacagcggcagctatttctgccggggactcgtcggctccaagaatgtgtcctccgaaaccgtgaatatcacgattacccaaggactggctgtgcctacaatctctagcttctttccgcctggataccaagtctccttctgtcttgtgatggtcctcctgtttgctgtggacacaggactgtacttttccgtgaaaacgaacatccgcagctccacacgcgattggaaagatcacaagtttaaatggcgcaaagatccccaggacaag

SEQ ID NO: 4987 - DNA, 1524 bp, Artificial Sequence
  Synthetic Polynucleotide
atggccttaccagtgaccgccttgctcctgccgctggccttgctgctccacgccgccaggccggacttcgtgatgacacagagccctctgagcctgcctgtgacacctggcgaacctgccagcatcagctgtagaagcagccagagcatcgtgcacagcaacggcaacacctacctggaatggtatctccagaagcctggacagagcccacagctgctgatctacaaggtgtccaacagattcagcggcgtgcccgacagattttctggcagcggctctggcaccgacttcaccctgaagattagcagagtggaagccgaggacgtgggcgtgtactactgcttccaaggctctcacgtgcccctgacctttggacagggcaccaagctggaaatcaagagaggcggaggcggaagtggaggcggaggatctggcggcggaggctctgaagtgcagctggttgaaagcggagccgaagtgaagaaacctggggcctctgtgaaggtgtcctgcaaggccagcggctacacctttaccagctactggattcactgggtccgacaggcccctggacaaggacttgagtggatgggcgagaacgacccctccaacggcaggaccaactacaacgagaagttcaagaaccgcgtgaccctgaccgtggacaccagcatctctaccgcctacatggaactgagccggctgagatccgatgacaccgccgtgtactattgcgccagaggacccaactacttttacagcatggactactggggccagggcacaatggtcaccgttagctctacgcgtggaatgaggactgaggatcttcccaaagctgtcgtctttctcgaaccccaatggtatcgggtgctcgaaaaagactctgtgacactgaaatgccaaggggcctactctcccgaggacaactccacacagtggtttcataatgagtccctcatcagctctcaggccagctcttatttcattgatgccgctacagtggacgactccggcgagtatcggtgtcagaccaatctgtctacactgtctgaccccgtgcagcttgaggtccacattggatggttgctcttgcaagccccacgctgggttttcaaagaggaagatccaatccatctgcggtgccacagctggaaaaacaccgctctccacaaagtcacatacctgcaaaatggcaaaggacgcaaatacttccatcacaattccgatttttacattccgaaggctaccctgaaagacagcggcagctatttctgccggggactcgtcggctccaagaatgtgtcctccgaaaccgtgaatatcacgattacccaaggactggctgtgcctacaatctctagcttctttccgcctggataccaagtctccttctgtcttgtgatggtcctcctgtttgctgtggacacaggactgtacttttccgtgaaaacgaacatccgcagctccacacgcgattggaaagatcacaagtttaaatggcgcaaagatccccaggacaag

SEQ ID NO: 4988 - DNA, 1503 bp, Artificial Sequence
  Synthetic Polynucleotide
atggccttaccagtgaccgccttgctcctgccgctggccttgctgctccacgccgccaggccggacatccagctgactcagagccctagctttctgagcgccagcgtgggcgacagagtgaccatcacatgtagcgccagatccagcatcagcttcatgtactggtatcagcagaagcccggcaaggcccctaagctgctgatctacgacaccagcaatctggcctctggcgtgcccagcagattttctggaagcggcagcggcaccgagttcaccctgacaatctctagcctggaagccgaggatgccgccacctactattgccagcagtggtccagctatcccctgacatttggacagggcaccaagctggaaatcaaaggcggaggcggaagtggaggcggaggatctggcggcggaggctctcaggttcagctggttcagtctggggccgaagtgaagaaacctggggcctctgtgaaggtgtcctgcaaggcttccggctacacctttaccggctcttggatgaactgggtccgacaggctcctggacagggactcgaatggatcggcagaatctatcctggcgacggcgagacaaactacaacggcaagttcaaggaccgcgtgacaatcaccgccgacaagagcacaagcaccgcctacatggaactgagcagcctgcggagcgaagataccgccgtgtactactgcgcccggatctacggcaacaacgtgtacttcgatgtgtggggccagggcacaaccgtgacagtctcttctacgcgtggaatgaggactgaggatcttcccaaagctgtcgtctttctcgaaccccaatggtatcgggtgctcgaaaaagactctgtgacactgaaatgccaaggggcctactctcccgaggacaactccacacagtggtttcataatgagtccctcatcagctctcaggccagctcttatttcattgatgccgctacagtggacgactccggcgagtatcggtgtcagaccaatctgtctacactgtctgaccccgtgcagcttgaggtccacattggatggttgctcttgcaagccccacgctgggttttcaaagaggaagatccaatccatctgcggtgccacagctggaaaaacaccgctctccacaaagtcacatacctgcaaaatggcaaaggacgcaaatacttccatcacaattccgatttttacattccgaaggctaccctgaaagacagcggcagctatttctgccggggactcgtcggctccaagaatgtgtcctccgaaaccgtgaatatcacgattacccaaggactggctgtgcctacaatctctagcttctttccgcctggataccaagtctccttctgtcttgtgatggtcctcctgtttgctgtggacacaggactgtacttttccgtgaaaacgaacatccgcagctccacacgcgattggaaagatcacaagtttaaatggcgcaaagatccccaggacaag

SEQ ID NO: 4989 - DNA, 1527 bp, Artificial Sequence
  Synthetic Polynucleotide
atggccttaccagtgaccgccttgctcctgccgctggccttgctgctccacgccgccaggccgcagctggtgctgacacagtctccaagcgcctctgccagcctgggatctagcgtgaagctgacctgtacactgagcagcggccacaagaccgacaccatcgactggtatcagcagcagcctggcaaggcccctagatacctgatgaagctggaaggcagcggcagctacaacaaaggctctggcgtgcccgatagattcagcggcagttcttctggcgctgattggtatctgaccatcagcagcctccagagcgaggacgaggccgattactactgcggcacagactaccccggcaactacctgtttggcggcggaacacagctgacagtgcttggcggcggaggcggaagtggaggcggaggatctggcggcggaggctctcaagaacagctggttgaaagcggcggaggactggttcaacctggcggttctctgagactgagctgtgccgccagcggcttcaccttcagcgactactacatgagctggatcagacaggccccaggcaaaggactggaatgggtcgccacaatctaccccagcagcggcaagacctactacgccgattctgccaagggcagactgaccatctccagcgacaacgccaaggacagcctgtacctccagatgaacagcctgagagccgaggacaccgccgtgtactactgcaccagagatagctacgccgacgacgccgctctgtttgacatttggggccagggcaccaccgtgaccgtttcttctacgcgtggaatgaggactgaggatcttcccaaagctgtcgtctttctcgaaccccaatggtatcgggtgctcgaaaaagactctgtgacactgaaatgccaaggggcctactctcccgaggacaactccacacagtggtttcataatgagtccctcatcagctctcaggccagctcttatttcattgatgccgctacagtggacgactccggcgagtatcggtgtcagaccaatctgtctacactgtctgaccccgtgcagcttgaggtccacattggatggttgctcttgcaagccccacgctgggttttcaaagaggaagatccaatccatctgcggtgccacagctggaaaaacaccgctctccacaaagtcacatacctgcaaaatggcaaaggacgcaaatacttccatcacaattccgatttttacattccgaaggctaccctgaaagacagcggcagctatttctgccggggactcgtcggctccaagaatgtgtcctccgaaaccgtgaatatcacgattacccaaggactggctgtgcctacaatctctagcttctttccgcctggataccaagtctccttctgtcttgtgatggtcctcctgtttgctgtggacacaggactgtacttttccgtgaaaacgaacatccgcagctccacacgcgattggaaagatcacaagtttaaatggcgcaaagatccccaggacaag

SEQ ID NO: 4990 - DNA, 1512 bp, Artificial Sequence
  Synthetic Polynucleotide
atggccttaccagtgaccgccttgctcctgccgctggccttgctgctccacgccgccaggccggacatcgtgctgacacagagccctccaagcctggctatgagcctgggaaagagagccaccatcagctgtagagccagcgagagcgtgacaatcctgggctctcacctgatccactggtatcagcagaagcccggccagcctcctacactgctgattcagctggcctccaatgtgcagacaggcgtgccagccagattttctggcagcggcagcagaaccgacttcaccctgaccattgatcccgtggaagaggacgacgtggccgtgtactactgcctccagagcagaacaatccccagaacctttggcggaggcaccaagctggaaatcaaaggcggcggaggaagcggaggcggaggatctggtggtggtggatctcaaatccagctggtgcagtctggccccgagctgaagaaacctggcgagacagtgaagatcagctgcaaggccagcggctacaccttcaccgactacagcatcaactgggtcaagagagcccctggcaagggcctgaaatggatgggctggatcaacaccgaaaccagagagcccgcctacgcctacgacttcagaggcagattcgccttcagcctggaaaccagcgccagcacagcctacctccagatcaacaacctgaagtacgaggacaccgccacctacttttgcgccctggactacagctacgctatggactattggggccagggcaccagcgtgacagtctcttctacgcgtggaatgaggactgaggatcttcccaaagctgtcgtctttctcgaaccccaatggtatcgggtgctcgaaaaagactctgtgacactgaaatgccaaggggcctactctcccgaggacaactccacacagtggtttcataatgagtccctcatcagctctcaggccagctcttatttcattgatgccgctacagtggacgactccggcgagtatcggtgtcagaccaatctgtctacactgtctgaccccgtgcagcttgaggtccacattggatggttgctcttgcaagccccacgctgggttttcaaagaggaagatccaatccatctgcggtgccacagctggaaaaacaccgctctccacaaagtcacatacctgcaaaatggcaaaggacgcaaatacttccatcacaattccgatttttacattccgaaggctaccctgaaagacagcggcagctatttctgccggggactcgtcggctccaagaatgtgtcctccgaaaccgtgaatatcacgattacccaaggactggctgtgcctacaatctctagcttctttccgcctggataccaagtctccttctgtcttgtgatggtcctcctgtttgctgtggacacaggactgtacttttccgtgaaaacgaacatccgcagctccacacgcgattggaaagatcacaagtttaaatggcgcaaagatccccaggacaag

SEQ ID NO: 4991 - DNA, 1524 bp, Artificial Sequence
  Synthetic Polynucleotide
atggccttaccagtgaccgccttgctcctgccgctggccttgctgctccacgccgccaggccgcaggtacagctgcaggaatctgggcccggacttgtcaagccaagtcagacactttctcttacatgtaccgtgagcggcggaagtataagcagtggaggcttttactggtcttggatacggcagcacccaggcaaaggcttggagtggattggatacattcatcattcaggatctacacactataatccatcccttaagtcccgggtcaccattagcattgatacgtctaagaatctgttcagtctcaggctgtcctccgtcactgctgccgacacagccgtgtactactgcgcctccttggtttactgcggaggcgactgttatagcggctttgattattgggggcaggggaccctcgtaaccgtgagctctggaggcggaggatcaggtggcggtggatctggcggtggcggatctgatatccagctcactcaaagcccctctagtctctctgcctcagtgggggatcgggtcagttttacttgtcaagcttcacaggatatcaacaacttccttaattggtatcagcagaagccaggaaaagcacccaagctgctcatctatgatgcctcaaatttggagacgggtgttcccagtcgattctctgggtcagggtccgggaccgactttacgtttacgatctcctctctgcagcccgaagacatcgccacatactattgtcaacagtacggcaacttgcctttcacatttgggggcgggactaaggttgaaatcaagaggacgcgtggaatgaggactgaggatcttcccaaagctgtcgtctttctcgaaccccaatggtatcgggtgctcgaaaaagactctgtgacactgaaatgccaaggggcctactctcccgaggacaactccacacagtggtttcataatgagtccctcatcagctctcaggccagctcttatttcattgatgccgctacagtggacgactccggcgagtatcggtgtcagaccaatctgtctacactgtctgaccccgtgcagcttgaggtccacattggatggttgctcttgcaagccccacgctgggttttcaaagaggaagatccaatccatctgcggtgccacagctggaaaaacaccgctctccacaaagtcacatacctgcaaaatggcaaaggacgcaaatacttccatcacaattccgatttttacattccgaaggctaccctgaaagacagcggcagctatttctgccggggactcgtcggctccaagaatgtgtcctccgaaaccgtgaatatcacgattacccaaggactggctgtgcctacaatctctagcttctttccgcctggataccaagtctccttctgtcttgtgatggtcctcctgtttgctgtggacacaggactgtacttttccgtgaaaacgaacatccgcagctccacacgcgattggaaagatcacaagtttaaatggcgcaaagatccccaggacaag

SEQ ID NO: 4992 - DNA, 1518 bp, Artificial Sequence
  Synthetic Polynucleotide
atggccttaccagtgaccgccttgctcctgccgctggccttgctgctccacgccgccaggccgcaggtccaactgcaagaaagcggacccggactggtgaagccttctgagacacttagtctgacgtgcacggtcagtggcggctccatctcctcctattattggtcatggatacgacaacccccaggtaagggcctggaatggattggctatatctactattcaggaagcacgaactacaatcccagcctgaagtcccgagtgacaatttcagtagataccagtaaaaaccagttcagtcttaaactgtcaagcgtgacagctgccgacaccgctgtgtattactgcgtctcactggtgtattgtggaggggattgttatagcgggttcgattattggggacagggaaccctggtgactgtatcttccggaggcggaggatcaggtggcggtggatctggcggtggcggatctgatattcaactgacacaatcccccagctcactcagcgccagcgtgggggacagggttagctttacctgtcaagcctctcaggatataaataactttctgaactggtatcaacagaagcctgggaaggcgcccaaactcctgatctatgatgcgtccaacctggaaactggcgtgccttcacgctttagcggctctggcagtggtacagacttcacttttaccatctcttcacttcagccggaggacatcgccacatattactgtcaacagtacggaaacttgccctttacttttggaggcggcaccaaagttgaaatcaaaagaacgcgtggaatgaggactgaggatcttcccaaagctgtcgtctttctcgaaccccaatggtatcgggtgctcgaaaaagactctgtgacactgaaatgccaaggggcctactctcccgaggacaactccacacagtggtttcataatgagtccctcatcagctctcaggccagctcttatttcattgatgccgctacagtggacgactccggcgagtatcggtgtcagaccaatctgtctacactgtctgaccccgtgcagcttgaggtccacattggatggttgctcttgcaagccccacgctgggttttcaaagaggaagatccaatccatctgcggtgccacagctggaaaaacaccgctctccacaaagtcacatacctgcaaaatggcaaaggacgcaaatacttccatcacaattccgatttttacattccgaaggctaccctgaaagacagcggcagctatttctgccggggactcgtcggctccaagaatgtgtcctccgaaaccgtgaatatcacgattacccaaggactggctgtgcctacaatctctagcttctttccgcctggataccaagtctccttctgtcttgtgatggtcctcctgtttgctgtggacacaggactgtacttttccgtgaaaacgaacatccgcagctccacacgcgattggaaagatcacaagtttaaatggcgcaaagatccccaggacaag

SEQ ID NO: 4993 - DNA, 1533 bp, Artificial Sequence
  Synthetic Polynucleotide
atggccttaccagtgaccgccttgctcctgccgctggccttgctgctccacgccgccaggccgcaagttactttgaaggagtctggacctgtactggtgaagccaaccgagacactgacactcacgtgtacagtgagtggtttttccttgatcaacgcaaggatgggcgtcagctggatcaggcaaccccctggcaaggctctggaatggctcgctcacatattcagcaatgccgaaaaaagctaccggacaagcctgaaatcccgcctgactatttccaaggacacttctaagtctcaggtggtgctgaccatgaccaacatggacccggtggacaccgccacctattactgcgcaagaatccctgggtatggtgggaatggtgactaccattattatgggatggatgtgtgggggcaaggcacaaccgtaacggtctcaagcggaggcggaggatcaggtggcggtggatctggcggtggcggatctgacattcagatgacccaaagcccgtccagcctgtccgccagcctgggagatagagtgacaatcacgtgtagagcttcccaagggataagaaatgatctcgggtggtatcagcagaagcccggcaaagcccccaaaaggcttatatatgctagtagtacactgcagtctggagttccttcccgattttcaggtagcggctccggtacagagttcaccctcacgataagctcactccagcctgaggatttcgcaacgtactactgcctccagcacaacaattttccctggactttcggccagggcaccaaggtggagatcaagaggacgcgtggaatgaggactgaggatcttcccaaagctgtcgtctttctcgaaccccaatggtatcgggtgctcgaaaaagactctgtgacactgaaatgccaaggggcctactctcccgaggacaactccacacagtggtttcataatgagtccctcatcagctctcaggccagctcttatttcattgatgccgctacagtggacgactccggcgagtatcggtgtcagaccaatctgtctacactgtctgaccccgtgcagcttgaggtccacattggatggttgctcttgcaagccccacgctgggttttcaaagaggaagatccaatccatctgcggtgccacagctggaaaaacaccgctctccacaaagtcacatacctgcaaaatggcaaaggacgcaaatacttccatcacaattccgatttttacattccgaaggctaccctgaaagacagcggcagctatttctgccggggactcgtcggctccaagaatgtgtcctccgaaaccgtgaatatcacgattacccaaggactggctgtgcctacaatctctagcttctttccgcctggataccaagtctccttctgtcttgtgatggtcctcctgtttgctgtggacacaggactgtacttttccgtgaaaacgaacatccgcagctccacacgcgattggaaagatcacaagtttaaatggcgcaaagatccccaggacaag

SEQ ID NO: 4994 - DNA, 1515 bp, Artificial Sequence
  Synthetic Polynucleotide
atggccttaccagtgaccgccttgctcctgccgctggccttgctgctccacgccgccaggccgcagatccagttggtggaatcagggggcggtgtggtgcagccgggtaggagcctgagactgtcatgcgtggcgtctggcttcacattcaagaactacggcatgcactgggtgcgacaggcccccggaaagggtttggagtgggtcgccgtgatctggtacgacggatctaatgagtattacggagatcctgtgaagggaaggttcaccatctcccgcgacaatagcaaaaatatgctctacctgcaaatgaactcactcagggcggatgatacggcggtctactattgcgctcgctcagggattgctgtggccggcgcattcgattactggggacagggtaccctggtgacagtatcaagcggaggcggaggatcaggtggcggtggatctggcggtggcggatctgagattgtgttgacacagtctcccgataccctgtcactgtcacccggcgagaaggcaacgctgagttgcagagcaagccagtcagtctcctcttcttttctggcctggtatcagcaaaaaccaggtcaggcaccatctctcctgatttacgttgccagcagacgggcggctggcattcccgacaggttctctggaagcggatctgggaccgattttaccctgacaattagccgcttggagcccgaagactttggtatgttttactgccagcactacggaaggacacctttcacatttggcccgggcacgaaagtcgatataaaacgcacgcgtggaatgaggactgaggatcttcccaaagctgtcgtctttctcgaaccccaatggtatcgggtgctcgaaaaagactctgtgacactgaaatgccaaggggcctactctcccgaggacaactccacacagtggtttcataatgagtccctcatcagctctcaggccagctcttatttcattgatgccgctacagtggacgactccggcgagtatcggtgtcagaccaatctgtctacactgtctgaccccgtgcagcttgaggtccacattggatggttgctcttgcaagccccacgctgggttttcaaagaggaagatccaatccatctgcggtgccacagctggaaaaacaccgctctccacaaagtcacatacctgcaaaatggcaaaggacgcaaatacttccatcacaattccgatttttacattccgaaggctaccctgaaagacagcggcagctatttctgccggggactcgtcggctccaagaatgtgtcctccgaaaccgtgaatatcacgattacccaaggactggctgtgcctacaatctctagcttctttccgcctggataccaagtctccttctgtcttgtgatggtcctcctgtttgctgtggacacaggactgtacttttccgtgaaaacgaacatccgcagctccacacgcgattggaaagatcacaagtttaaatggcgcaaagatccccaggacaag

SEQ ID NO: 4995 - DNA, 1518 bp, Artificial Sequence
  Synthetic Polynucleotide
atggccttaccagtgaccgccttgctcctgccgctggccttgctgctccacgccgccaggccggacatccaactgactcagagccccagctttctgagcgcctctgtgggcgacagagtgaccatcacatgtagagccagccagggcatcagcagctacctggcttggtatcagcagaagcctggcaaggcccctaaactgctgatctacgccgccagcacactccagtctggcgtgccaagcagattttctggcagcggctctggcaccgagttcaccctgacaatatccagcctccagcctgaggacttcgccacctactactgccagcaagtgaacagctaccctctgacctttggcggaggcaccaaggtggaaatcaagagaggcggaggcggaagtggaggcggaggatctggcggcggaggctctcaactgcaactgcaagagtctggccctggcctggtcaagcctagcgaaacactgagcctgacctgtaccgtgtctggcggcagcatcagctccagcacatattactggggctggatcagacagcctcctggcaaaggactggaatggatcggctccatctacttcaccggcagcaccgactacaaccccagcctgaagtccagggtgtccatctccgtggacaccagcaagaaccagttctccctgaagctgagcagcgtgacagccgctgataccgccgtgtactactgcgccaaagaggacgatagcagcggctactacagcttcgactattggggccagggcaacctggtcaccgttagctctacgcgtggaatgaggactgaggatcttcccaaagctgtcgtctttctcgaaccccaatggtatcgggtgctcgaaaaagactctgtgacactgaaatgccaaggggcctactctcccgaggacaactccacacagtggtttcataatgagtccctcatcagctctcaggccagctcttatttcattgatgccgctacagtggacgactccggcgagtatcggtgtcagaccaatctgtctacactgtctgaccccgtgcagcttgaggtccacattggatggttgctcttgcaagccccacgctgggttttcaaagaggaagatccaatccatctgcggtgccacagctggaaaaacaccgctctccacaaagtcacatacctgcaaaatggcaaaggacgcaaatacttccatcacaattccgatttttacattccgaaggctaccctgaaagacagcggcagctatttctgccggggactcgtcggctccaagaatgtgtcctccgaaaccgtgaatatcacgattacccaaggactggctgtgcctacaatctctagcttctttccgcctggataccaagtctccttctgtcttgtgatggtcctcctgtttgctgtggacacaggactgtacttttccgtgaaaacgaacatccgcagctccacacgcgattggaaagatcacaagtttaaatggcgcaaagatccccaggacaag

SEQ ID NO: 4996 - DNA, 1527 bp, Artificial Sequence
  Synthetic Polynucleotide
atggccttaccagtgaccgccttgctcctgccgctggccttgctgctccacgccgccaggccgcagtctgctctgacccagcctagatccgtgtctggctctcctggacacagcgtgaccatcagctgtaccggcacctcttccgacgtgggcgactacaattacgtgtcctggtatcagcagaggcccggcaaggtgccaaagctgctgatctacgacgtgtccaagaggccaagcggcgtgcccgatagattttccggcagcaagtctggcaacaccgccagcctgacaatctctggactgcaagccgaggacgaggccatctacttttgtgccagctacgccggcaactacaacgtggtgtttggcggaggcaccaagctgacagtgcttggacaaggcggaggcggaagtggaggcggaggatctggcggcggaggctctcaagttcagctggtgcagtctggcagcgagctgaagaaacctggggcctctgtgaaggtgtcctgcaaggcttccggctacaccttcaacacctacgccatgaattgggtccgacaggctccaggccaaggactggaatggatgggctggatcaacaccaacaccggcaatcccacatacgcccagggcttcaccggcagattcgtgttctctctggacacctccgtgtccaccgcctacctccagatcagctctctgaaggccgaggataccgccgtgtactactgcgccagacggtacttcgattggctgctgggagccttcgacatctggggccagggaacaatggtcaccgtgtctagtacgcgtggaatgaggactgaggatcttcccaaagctgtcgtctttctcgaaccccaatggtatcgggtgctcgaaaaagactctgtgacactgaaatgccaaggggcctactctcccgaggacaactccacacagtggtttcataatgagtccctcatcagctctcaggccagctcttatttcattgatgccgctacagtggacgactccggcgagtatcggtgtcagaccaatctgtctacactgtctgaccccgtgcagcttgaggtccacattggatggttgctcttgcaagccccacgctgggttttcaaagaggaagatccaatccatctgcggtgccacagctggaaaaacaccgctctccacaaagtcacatacctgcaaaatggcaaaggacgcaaatacttccatcacaattccgatttttacattccgaaggctaccctgaaagacagcggcagctatttctgccggggactcgtcggctccaagaatgtgtcctccgaaaccgtgaatatcacgattacccaaggactggctgtgcctacaatctctagcttctttccgcctggataccaagtctccttctgtcttgtgatggtcctcctgtttgctgtggacacaggactgtacttttccgtgaaaacgaacatccgcagctccacacgcgattggaaagatcacaagtttaaatggcgcaaagatccccaggacaag

SEQ ID NO: 4997 - DNA, 1503 bp, Artificial Sequence
  Synthetic Polynucleotide
atggccttaccagtgaccgccttgctcctgccgctggccttgctgctccacgccgccaggccggacatccagatgacacagagccctagcagcctgtctgccagcgtgggagacagagtgaccatcacatgtagcgccagccagggcatcaacaactacctgaactggtatcagcagaagcccggcaaggcccctaagctgctgatccactacacatctggactgcacgctggcgtgcccagcagattttctggctctggcagcggcaccgactacaccctgacaatatctagcctccagcctgaggacgtggcaacctactactgccagcagtacagcatcctgccttggacctttggcggaggcaccaaggtggaaatcaagagaggcggaggcggaagtggaggcggaggatctggcggcggaggctctcaagttcagcttgttcagagcggagccgaagtgaagaaacccggcagctctgtgaaggtgtcctgcaaggcttccggctacgcctttagcagcagctggatgaactgggtccgacaggctcctggacagggccttgaatggatgggcagaatctatcccggcgacggcaatacccactacgcccagaaattccagggccgcgtgacactgacagccgacaagtctacaagcaccgcctacatggaactgagcagcctgagaagcgaggacaccgccgtgtactattgcggcgaaggctatctggaccctatggactattggggccagggcacactggtcaccgttagctctacgcgtggaatgaggactgaggatcttcccaaagctgtcgtctttctcgaaccccaatggtatcgggtgctcgaaaaagactctgtgacactgaaatgccaaggggcctactctcccgaggacaactccacacagtggtttcataatgagtccctcatcagctctcaggccagctcttatttcattgatgccgctacagtggacgactccggcgagtatcggtgtcagaccaatctgtctacactgtctgaccccgtgcagcttgaggtccacattggatggttgctcttgcaagccccacgctgggttttcaaagaggaagatccaatccatctgcggtgccacagctggaaaaacaccgctctccacaaagtcacatacctgcaaaatggcaaaggacgcaaatacttccatcacaattccgatttttacattccgaaggctaccctgaaagacagcggcagctatttctgccggggactcgtcggctccaagaatgtgtcctccgaaaccgtgaatatcacgattacccaaggactggctgtgcctacaatctctagcttctttccgcctggataccaagtctccttctgtcttgtgatggtcctcctgtttgctgtggacacaggactgtacttttccgtgaaaacgaacatccgcagctccacacgcgattggaaagatcacaagtttaaatggcgcaaagatccccaggacaag

SEQ ID NO: 4998 - DNA, 1512 bp, Artificial Sequence
  Synthetic Polynucleotide
atggccttaccagtgaccgccttgctcctgccgctggccttgctgctccacgccgccaggccggaggtgcagctggttgaatctggcggaggactggttcagcctggcggatctctgagactgtcttgtgccgccagcggctacaccttcaccacctattggatgcactgggtccgacaggcccctggcaaaggacttgagtgggtcggatatatcaggcccagcaccggctacacagagtacaaccagaagttcaaggaccgcttcaccatcagcgccgacaccagcaagaataccgcctacctccagatgaacagcctgagagccgaggacaccgccgtgtactactgtgccagatccagatggctgctggactattggggccagggcacactggttacagtttctggcggaggcggaagtggaggcggaggatctggcggcggaggctctgacattcagatgacacagagccctagcagcctgagcgcctctgtgggagacagagtgaccatcacatgcaagagcagccagagcgtgctgtactccagcaatcagaagaactacctggcctggttccagcagaagcctggcaaggctcctaagctgctgatctactgggccagcaccagagaaagcggcgtgccaagcagattttctggcagcggctctggcaccgacttcaccctgacaatatccagcctccagcctgaggacttcgccacctacttttgccaccagtacctgagcagctacacattcggacagggcaccaaggtggaaatcaagcggacgcgtggaatgaggactgaggatcttcccaaagctgtcgtctttctcgaaccccaatggtatcgggtgctcgaaaaagactctgtgacactgaaatgccaaggggcctactctcccgaggacaactccacacagtggtttcataatgagtccctcatcagctctcaggccagctcttatttcattgatgccgctacagtggacgactccggcgagtatcggtgtcagaccaatctgtctacactgtctgaccccgtgcagcttgaggtccacattggatggttgctcttgcaagccccacgctgggttttcaaagaggaagatccaatccatctgcggtgccacagctggaaaaacaccgctctccacaaagtcacatacctgcaaaatggcaaaggacgcaaatacttccatcacaattccgatttttacattccgaaggctaccctgaaagacagcggcagctatttctgccggggactcgtcggctccaagaatgtgtcctccgaaaccgtgaatatcacgattacccaaggactggctgtgcctacaatctctagcttctttccgcctggataccaagtctccttctgtcttgtgatggtcctcctgtttgctgtggacacaggactgtacttttccgtgaaaacgaacatccgcagctccacacgcgattggaaagatcacaagtttaaatggcgcaaagatccccaggacaag

SEQ ID NO: 4999 - DNA, 1503 bp, Artificial Sequence
  Synthetic Polynucleotide
atggccttaccagtgaccgccttgctcctgccgctggccttgctgctccacgccgccaggccggacatccagatgacacagagccctagcagcctgtctgccagcgtgggagacagagtgaccatcacctgtagagccagccaggacatcagcaactacctgaactggtatcagcagaagcccggcaaggcccctaagctgctgatctactacaccagcagactgcacagcggcgtgcccagcagattttctggctctggcagcggcaccgacttcaccctgacaatatctagcctccagcctgaggacttcgccacctactattgccagcagggcaacaccctgccttacacatttggacagggcaccaaggtggaaatcaagagaggcggaggcggaagtggaggcggaggatctggcggcggaggctctgaagtgcagctggttgaatcaggtggcggcctggttcaacctggcggatctctgagactgagctgtgccgccagcggcttcaccttcagcgactactttatgagctgggtccgacaggcccctggcaaaggacttgaatgggtcgccaccatcagcaatggcggcacctacacttactaccccgacagcgtgaagggcagattcaccatctccagagacaacagcaagaacaccctgtacctccagatgaactccctgagagccgaggacaccgccgtgtactactgcgccagattcgacggctacatcttcgactattggggccagggcaccctggtcacagtctcttctacgcgtggaatgaggactgaggatcttcccaaagctgtcgtctttctcgaaccccaatggtatcgggtgctcgaaaaagactctgtgacactgaaatgccaaggggcctactctcccgaggacaactccacacagtggtttcataatgagtccctcatcagctctcaggccagctcttatttcattgatgccgctacagtggacgactccggcgagtatcggtgtcagaccaatctgtctacactgtctgaccccgtgcagcttgaggtccacattggatggttgctcttgcaagccccacgctgggttttcaaagaggaagatccaatccatctgcggtgccacagctggaaaaacaccgctctccacaaagtcacatacctgcaaaatggcaaaggacgcaaatacttccatcacaattccgatttttacattccgaaggctaccctgaaagacagcggcagctatttctgccggggactcgtcggctccaagaatgtgtcctccgaaaccgtgaatatcacgattacccaaggactggctgtgcctacaatctctagcttctttccgcctggataccaagtctccttctgtcttgtgatggtcctcctgtttgctgtggacacaggactgtacttttccgtgaaaacgaacatccgcagctccacacgcgattggaaagatcacaagtttaaatggcgcaaagatccccaggacaag

SEQ ID NO: 5000 - DNA, 1524 bp, Artificial Sequence
  Synthetic Polynucleotide
atggccttaccagtgaccgccttgctcctgccgctggccttgctgctccacgccgccaggccggacatccagatgacacagagccctagcagcctgtctgccagcgtgggagacagagtgaccatcacctgtaccgccagcagcagagtgtccagcagctacctgcactggttccagcagaagcctggcaaggcccctaagctgctgatctacagcaccagcaatctggcctctggcgtgcccagcagattttctggctctggcagcggcaccgacttcaccctgacaatatctagcctccagcctgaggacttcgccacctactactgccaccagtaccacagaagcccctacacattcggccagggcaccaaggtggaaatcaagagaggcggaggcggaagtggaggcggaggatctggcggcggaggctctgaagttcagctggttgaatctggcggcggactggttcaacctggcggatctctgagactgagctgtgccgcctctggctacgccttcagcaacagctggatcaactgggtccgacaggcccctggcaaaggactggaatgggtcggacaaatctaccccggcgactacgacaccaactacaacggcaagttcaagggcagattcaccatcagccgggacaagagcaagaacaccgcctacctccagatgaactccctgagagccgaggacaccgccgtgtactattgtgctagaggcggctccatctactacggcaacctgggcttcttcgacgtgtggggacagggcacactggtcacagtctcttctacgcgtggaatgaggactgaggatcttcccaaagctgtcgtctttctcgaaccccaatggtatcgggtgctcgaaaaagactctgtgacactgaaatgccaaggggcctactctcccgaggacaactccacacagtggtttcataatgagtccctcatcagctctcaggccagctcttatttcattgatgccgctacagtggacgactccggcgagtatcggtgtcagaccaatctgtctacactgtctgaccccgtgcagcttgaggtccacattggatggttgctcttgcaagccccacgctgggttttcaaagaggaagatccaatccatctgcggtgccacagctggaaaaacaccgctctccacaaagtcacatacctgcaaaatggcaaaggacgcaaatacttccatcacaattccgatttttacattccgaaggctaccctgaaagacagcggcagctatttctgccggggactcgtcggctccaagaatgtgtcctccgaaaccgtgaatatcacgattacccaaggactggctgtgcctacaatctctagcttctttccgcctggataccaagtctccttctgtcttgtgatggtcctcctgtttgctgtggacacaggactgtacttttccgtgaaaacgaacatccgcagctccacacgcgattggaaagatcacaagtttaaatggcgcaaagatccccaggacaag

SEQ ID NO: 5001 - DNA, 1494 bp, Artificial Sequence
  Synthetic Polynucleotide
atggccttaccagtgaccgccttgctcctgccgctggccttgctgctccacgccgccaggccggacatccagatgacacagagccctagcagcctgtctgccagcgtgggagacagagtgaccatcacatgtagcgccagcagcagcgtgacctacatgtactggtatcagcagaagcccggcaaggcccctaagctgctgatctacgacaccagcaatctggcctctggcgtgcccagcagattttctggctctggcagcggcaccgactacaccctgacaatatctagcctccagcctgaggacttcgccacctactactgccagcagtggtccaactatcccctgacattcggccagggcaccaaggtggaaatcaaaggcggaggcggaagtggaggcggaggatctggcggcggaggctctcaagttcagctggttcagagcggagccgaagtgaagaaacctggggcctctgtgaaggtgtcctgcaaggccagcggctacagcttcatcgagtacaccatcaactgggtccgacaggcccctggacaaggcctggaatggatcggcaacatcgacccctactacggcacaacctactacaaccagatgttcaccggcagagccacactgaccgtggacacctctatcagcaccgcctacatggaactgagccggctgagatccgatgacaccgccgtgtactattgtgccagaggcagcgcctggtttccctattggggacagggaaccctggtcaccgttagctctacgcgtggaatgaggactgaggatcttcccaaagctgtcgtctttctcgaaccccaatggtatcgggtgctcgaaaaagactctgtgacactgaaatgccaaggggcctactctcccgaggacaactccacacagtggtttcataatgagtccctcatcagctctcaggccagctcttatttcattgatgccgctacagtggacgactccggcgagtatcggtgtcagaccaatctgtctacactgtctgaccccgtgcagcttgaggtccacattggatggttgctcttgcaagccccacgctgggttttcaaagaggaagatccaatccatctgcggtgccacagctggaaaaacaccgctctccacaaagtcacatacctgcaaaatggcaaaggacgcaaatacttccatcacaattccgatttttacattccgaaggctaccctgaaagacagcggcagctatttctgccggggactcgtcggctccaagaatgtgtcctccgaaaccgtgaatatcacgattacccaaggactggctgtgcctacaatctctagcttctttccgcctggataccaagtctccttctgtcttgtgatggtcctcctgtttgctgtggacacaggactgtacttttccgtgaaaacgaacatccgcagctccacacgcgattggaaagatcacaagtttaaatggcgcaaagatccccaggacaag

SEQ ID NO: 5002 - DNA, 1494 bp, Artificial Sequence
  Synthetic Polynucleotide
atggccttaccagtgaccgccttgctcctgccgctggccttgctgctccacgccgccaggccggagatcgtgctgacacagagcccttctagcctgtctgccagcgtgggcgacagagtgaccatcacatgtagagccagcgagaacatctacagctacctggcctggtatcagcagaagcctggcaaggcccctaagctgctgatctacaacaccaagacactcggcgagggcgtgcccagcagattttctggttctggcagcggcaccgacttcaccctgaccatatctagcctgcagcctgaggacttcgccacctactactgccagcaccactacggcacccctttcacatttggccctggcaccaaggtggacatcaaaggcggaggcggaagtggaggcggaggatctggcggcggaggctctcaagttcagctggttcagagcggagccgaagtgaagaaacctggggcctctgtgaaggtgtcctgcaaggccagcggctacaccttcagcgactattgggtgcactgggtccgacaggctccaggacaaggactggaatggatgggagccatcgacggcagcgataccttcaacgattacagccagaaattcaaaggccgcgtgaccatgaccagagacaccagcatcagcaccgcctacatggaactgagccggctgagatccgatgacaccgccgtgtactattgtgccagaggcggcctgctgcagtattggggacagggaacactggtcaccgtgtcctctacgcgtggaatgaggactgaggatcttcccaaagctgtcgtctttctcgaaccccaatggtatcgggtgctcgaaaaagactctgtgacactgaaatgccaaggggcctactctcccgaggacaactccacacagtggtttcataatgagtccctcatcagctctcaggccagctcttatttcattgatgccgctacagtggacgactccggcgagtatcggtgtcagaccaatctgtctacactgtctgaccccgtgcagcttgaggtccacattggatggttgctcttgcaagccccacgctgggttttcaaagaggaagatccaatccatctgcggtgccacagctggaaaaacaccgctctccacaaagtcacatacctgcaaaatggcaaaggacgcaaatacttccatcacaattccgatttttacattccgaaggctaccctgaaagacagcggcagctatttctgccggggactcgtcggctccaagaatgtgtcctccgaaaccgtgaatatcacgattacccaaggactggctgtgcctacaatctctagcttctttccgcctggataccaagtctccttctgtcttgtgatggtcctcctgtttgctgtggacacaggactgtacttttccgtgaaaacgaacatccgcagctccacacgcgattggaaagatcacaagtttaaatggcgcaaagatccccaggacaag

SEQ ID NO: 5003 - DNA, 1506 bp, Artificial Sequence
  Synthetic Polynucleotide
atggccttaccagtgaccgccttgctcctgccgctggccttgctgctccacgccgccaggccgcaggttcagctccagcagtctggacctgagctggttaagcctggcgcttccgtgaagatcagctgcaaggcttccggctacgccttcagcagcagctggatgaactgggtcaaacagaggcccggcaaaggactggaatggatcggcagaatctaccccggcgacgaggacaccaattacagcggcaagttcaaggacaaggccacactgaccgccgacaagagcagcaccacagcctacatgcagctgagcagcctgaccagcgaggatagcgccgtgtacttctgtgccagaagcctgctgtacggcgactacctggattattggggccagggcacaaccctgacagtgtctagcggcggaggcggaagtggaggcggaggatctggcggcggaggctctcaaattgtgctgacacagagccccgccatcatgagcgcttctccaggcgagaaagtgaccatgacctgtagcgccagcagctccgtgtcttacatgcactggtatcagcagaagtccggcacaagccccaagcggtggatctacgataccagcaaactggcctccggcgtgcccgatagattttctggcagcggcagcggaaccagctacttcctgaccatcaacaacatggaagccgaggacgccgccacctactactgccagcagtggaacatcaaccctctgacctttggagccggcaccaagctggaactgaagagaacgcgtggaatgaggactgaggatcttcccaaagctgtcgtctttctcgaaccccaatggtatcgggtgctcgaaaaagactctgtgacactgaaatgccaaggggcctactctcccgaggacaactccacacagtggtttcataatgagtccctcatcagctctcaggccagctcttatttcattgatgccgctacagtggacgactccggcgagtatcggtgtcagaccaatctgtctacactgtctgaccccgtgcagcttgaggtccacattggatggttgctcttgcaagccccacgctgggttttcaaagaggaagatccaatccatctgcggtgccacagctggaaaaacaccgctctccacaaagtcacatacctgcaaaatggcaaaggacgcaaatacttccatcacaattccgatttttacattccgaaggctaccctgaaagacagcggcagctatttctgccggggactcgtcggctccaagaatgtgtcctccgaaaccgtgaatatcacgattacccaaggactggctgtgcctacaatctctagcttctttccgcctggataccaagtctccttctgtcttgtgatggtcctcctgtttgctgtggacacaggactgtacttttccgtgaaaacgaacatccgcagctccacacgcgattggaaagatcacaagtttaaatggcgcaaagatccccaggacaag

SEQ ID NO: 5004 - DNA, 1515 bp, Artificial Sequence
  Synthetic Polynucleotide
atggccttaccagtgaccgccttgctcctgccgctggccttgctgctccacgccgccaggccggacatccagatgacacagagcagcgcctacctgagcgtgtcccttggaggcagagtgaccatcacatgcaaggccagcgaccacatcaacaactggctggcctggtatcagcacaagcccggcaatgcccctagactgctgatctctggcgctaccacactggaaacaggcgtgcccagcagattttctggcagcggctctggcaaggactacaccctgagcatcaccagcctccagaccgaggatgtggctacctactactgccagcagagctggaacaccccttggacatttggcggaggcaccaagctggaaatcaagagaggcggaggcggaagtggaggcggaggatctggcggcggaggctctcaagttcagctgcaacagagcggagccgagcttgtcagacctggcagctctgtgaagattagctgcaaagccagcggctacgccttcagcagctactgggtcaactggatgaagcagcggcctggacagggcctcgaatggatcggccaaatctatcctggcgacggcgacaccaactacaacggcaagtttaagggcagagccaccgtgaccgccgacaagagcagcagcacatcctacatgcagttcagcagcctgaccagcgaggacagcgccgtgtatttctgtgccagatccatcaccaccgtcgtgggctgcgctatggattattggggccagggcacaagcgtgaccgtgtcatctacgcgtggaatgaggactgaggatcttcccaaagctgtcgtctttctcgaaccccaatggtatcgggtgctcgaaaaagactctgtgacactgaaatgccaaggggcctactctcccgaggacaactccacacagtggtttcataatgagtccctcatcagctctcaggccagctcttatttcattgatgccgctacagtggacgactccggcgagtatcggtgtcagaccaatctgtctacactgtctgaccccgtgcagcttgaggtccacattggatggttgctcttgcaagccccacgctgggttttcaaagaggaagatccaatccatctgcggtgccacagctggaaaaacaccgctctccacaaagtcacatacctgcaaaatggcaaaggacgcaaatacttccatcacaattccgatttttacattccgaaggctaccctgaaagacagcggcagctatttctgccggggactcgtcggctccaagaatgtgtcctccgaaaccgtgaatatcacgattacccaaggactggctgtgcctacaatctctagcttctttccgcctggataccaagtctccttctgtcttgtgatggtcctcctgtttgctgtggacacaggactgtacttttccgtgaaaacgaacatccgcagctccacacgcgattggaaagatcacaagtttaaatggcgcaaagatccccaggacaag

SEQ ID NO: 5005 - DNA, 1512 bp, Artificial Sequence
  Synthetic Polynucleotide
atggccttaccagtgaccgccttgctcctgccgctggccttgctgctccacgccgccaggccggaggttcagctgcttgagtctggcggaggactggttcaacctggcggaagcctgagactgtcttgtgccgccagcggcttcacctttagcagctacgccatgagctgggtccgacaggctcctggcaaaggactggaatgggtgtccgtgatctctggctctggcggcagacccaattacgccgattctgtgaagggcagattcaccatcagccgggacaacagcaagaacaccctgtacctccagatgaacagcctgcgcgacgaggataccgccgtgtactattgtgccaaggtggactacagcaactacctgttcttcgactactggggccagggcaccctggtcacagtttctagcggcggaggcggaagtggaggcggaggatctggcggcggaggctctgaaatcgtgctgacacagagccccggcacactgtcactttctccaggcgaaggcgctaccctgtcttgtagagctggacagtctgtgcggagcagctacctcggatggtatcagcagaagcctggacaggcccctcggctgttgatctacggtgcttctagcagagccacaggcatccccgatagattttctggcagcggctccggcaccgacttcaccctgacaatcagcagactggaacccgaggacttcgccgtgtattactgccagcagtacggctacagccctcctacatttggcggaggcaccaagctggaaatcaagacgcgtggaatgaggactgaggatcttcccaaagctgtcgtctttctcgaaccccaatggtatcgggtgctcgaaaaagactctgtgacactgaaatgccaaggggcctactctcccgaggacaactccacacagtggtttcataatgagtccctcatcagctctcaggccagctcttatttcattgatgccgctacagtggacgactccggcgagtatcggtgtcagaccaatctgtctacactgtctgaccccgtgcagcttgaggtccacattggatggttgctcttgcaagccccacgctgggttttcaaagaggaagatccaatccatctgcggtgccacagctggaaaaacaccgctctccacaaagtcacatacctgcaaaatggcaaaggacgcaaatacttccatcacaattccgatttttacattccgaaggctaccctgaaagacagcggcagctatttctgccggggactcgtcggctccaagaatgtgtcctccgaaaccgtgaatatcacgattacccaaggactggctgtgcctacaatctctagcttctttccgcctggataccaagtctccttctgtcttgtgatggtcctcctgtttgctgtggacacaggactgtacttttccgtgaaaacgaacatccgcagctccacacgcgattggaaagatcacaagtttaaatggcgcaaagatccccaggacaag

SEQ ID NO: 5006 - DNA, 1521 bp, Artificial Sequence
  Synthetic Polynucleotide
atggccttaccagtgaccgccttgctcctgccgctggccttgctgctccacgccgccaggccggacatcgtgctgacacagagccctccaagcctggctatgagcctgggaaagagagccaccatcagctgtagagccagcgagagcgtgacaatcctgggctctcacctgatccactggtatcagcagaagcccggccagcctcctacactgctgattcagctggcctccaatgtgcagacaggcgtgccagccagattttctggcagcggcagcagaaccgacttcaccctgaccattgatcccgtggaagaggacgacgtggccgtgtactactgcctccagagcagaacaatccccagaacctttggcggaggcaccaagctggaaatcaagggcagcacaagcggcagcggaaagcctggatctggcgagggatctaccaagggacagatccagctggtgcagtctggccccgagctgaagaaacctggcgagacagtgaagatcagctgcaaggccagcggctacaccttcaccgactacagcatcaactgggtcaagagagcccctggcaagggcctgaaatggatgggctggatcaacaccgaaaccagagagcccgcctacgcctacgacttcagaggcagattcgccttcagcctggaaaccagcgccagcacagcctacctccagatcaacaacctgaagtacgaggacaccgccacctacttttgcgccctggactacagctacgctatggactattggggccagggcaccagcgtgacagtctcttctacgcgtggaatgaggactgaggatcttcccaaagctgtcgtctttctcgaaccccaatggtatcgggtgctcgaaaaagactctgtgacactgaaatgccaaggggcctactctcccgaggacaactccacacagtggtttcataatgagtccctcatcagctctcaggccagctcttatttcattgatgccgctacagtggacgactccggcgagtatcggtgtcagaccaatctgtctacactgtctgaccccgtgcagcttgaggtccacattggatggttgctcttgcaagccccacgctgggttttcaaagaggaagatccaatccatctgcggtgccacagctggaaaaacaccgctctccacaaagtcacatacctgcaaaatggcaaaggacgcaaatacttccatcacaattccgatttttacattccgaaggctaccctgaaagacagcggcagctatttctgccggggactcgtcggctccaagaatgtgtcctccgaaaccgtgaatatcacgattacccaaggactggctgtgcctacaatctctagcttctttccgcctggataccaagtctccttctgtcttgtgatggtcctcctgtttgctgtggacacaggactgtacttttccgtgaaaacgaacatccgcagctccacacgcgattggaaagatcacaagtttaaatggcgcaaagatccccaggacaag

SEQ ID NO: 5007 - DNA, 1521 bp, Artificial Sequence
  Synthetic Polynucleotide
atggccttaccagtgaccgccttgctcctgccgctggccttgctgctccacgccgccaggccggacatccagatgacacagagccctagcagcctgtctgccagcgtgggagacagagtgaccatcacctgtagagccagcagcagcgtgtcctacatgcactggtatcagcagaagcccggcaaggcccctaagctgctgatctacgccaccagcaatctggcctctggcgtgccaagcagattttctggcagcggctctggcaccgacttcaccctgacaatatccagcctccagcctgaggacttcgccacctactactgccagcagtggaccttcaatcctcctaccttcggccagggcaccaagctggaaatcaagagaacagtggctgccggcggaggcggaagtggaggcggaggatctggcggcggaggctctcaagttcagctggttcagtctggggccgaagtgaagaaacctggggcctctgtgaaggtgtcctgcaaggcttccggctacacctttaccagctacaatatgcactgggtccgacaggctcccggccagagacttgaatggatgggcggcatctaccccggcaatggcgacacctcctacaaccagaaattcaagggccgcgtgacaatcaccagagacacctctgccagcaccgcctacatggaactgagcagcctgagaagcgaggacaccgccgtgtactactgcgccagatacgactacaactacgctatggactactggggccagggaaccctggtcacagtgtctagtgcttccacgcgtggaatgaggactgaggatcttcccaaagctgtcgtctttctcgaaccccaatggtatcgggtgctcgaaaaagactctgtgacactgaaatgccaaggggcctactctcccgaggacaactccacacagtggtttcataatgagtccctcatcagctctcaggccagctcttatttcattgatgccgctacagtggacgactccggcgagtatcggtgtcagaccaatctgtctacactgtctgaccccgtgcagcttgaggtccacattggatggttgctcttgcaagccccacgctgggttttcaaagaggaagatccaatccatctgcggtgccacagctggaaaaacaccgctctccacaaagtcacatacctgcaaaatggcaaaggacgcaaatacttccatcacaattccgatttttacattccgaaggctaccctgaaagacagcggcagctatttctgccggggactcgtcggctccaagaatgtgtcctccgaaaccgtgaatatcacgattacccaaggactggctgtgcctacaatctctagcttctttccgcctggataccaagtctccttctgtcttgtgatggtcctcctgtttgctgtggacacaggactgtacttttccgtgaaaacgaacatccgcagctccacacgcgattggaaagatcacaagtttaaatggcgcaaagatccccaggacaag

SEQ ID NO: 5008 - DNA, 1506 bp, Artificial Sequence
  Synthetic Polynucleotide
atggccttaccagtgaccgccttgctcctgccgctggccttgctgctccacgccgccaggccggagatcgtgctgacacagagccctggcacactgtcactgtctccaggcgaaagagccacactgagctgtagagccagccagagcgtgtccagctcttacctggcttggtatcagcagaagcccggacaggctcccagactgctgatctacggtgcctctagcagagccacaggcatccccgatagattttctggcagcggctccggcaccgacttcaccctgacaatcagcagactggaacccgaggacttcgccgtgtactactgccagcagtaccaccactctccactgacctttggcggaggcaccaaggtggaaatcaagagaggcggaggcggaagtggaggcggaggatctggcggcggaggctctgaagttcagctggttgaatcaggtggcggcctggttcaacctggcggatctctgagactgtcttgtgccgccagcggcttcactttcagcggcagatccatgaactgggtccgacaggcccctggcaaaggactggaatgggtgtcctacatcagcagcgacagccggaccatctactacgccgatagcgtgaagggcagattcaccatctccagagacaacgccaagaacagcctgtacctccagatgaactccctgagagccgaggacacagccgtgtattattgtgccagaggcggccacggctacttcgatctttggggcagaggcaccctggtcaccgtttcttctacgcgtggaatgaggactgaggatcttcccaaagctgtcgtctttctcgaaccccaatggtatcgggtgctcgaaaaagactctgtgacactgaaatgccaaggggcctactctcccgaggacaactccacacagtggtttcataatgagtccctcatcagctctcaggccagctcttatttcattgatgccgctacagtggacgactccggcgagtatcggtgtcagaccaatctgtctacactgtctgaccccgtgcagcttgaggtccacattggatggttgctcttgcaagccccacgctgggttttcaaagaggaagatccaatccatctgcggtgccacagctggaaaaacaccgctctccacaaagtcacatacctgcaaaatggcaaaggacgcaaatacttccatcacaattccgatttttacattccgaaggctaccctgaaagacagcggcagctatttctgccggggactcgtcggctccaagaatgtgtcctccgaaaccgtgaatatcacgattacccaaggactggctgtgcctacaatctctagcttctttccgcctggataccaagtctccttctgtcttgtgatggtcctcctgtttgctgtggacacaggactgtacttttccgtgaaaacgaacatccgcagctccacacgcgattggaaagatcacaagtttaaatggcgcaaagatccccaggacaag

SEQ ID NO: 5009 - DNA, 1515 bp, Artificial Sequence
  Synthetic Polynucleotide
atggccttaccagtgaccgccttgctcctgccgctggccttgctgctccacgccgccaggccggagatcgtgctgacacagagccctggcacactgtcactgtctccaggcgaaagagccacactgagctgtagagccagccagagcgtgtccagcgattacctggcttggtatcagcagaagcccggacaggctcccagactgctgatctatggtgcctctcggagagccacaggcatccccgatagattttctggcagcggctccggcaccgacttcaccctgacaatcagcagactggaacccgaggacttcgccgtgtactactgccagcagtacgtgtcctactggacctttggcggaggcaccaaggtggaaatcaagagaggcggaggcggaagtggaggcggaggatctggcggcggaggctctcaagttcagctggttgaatcaggcggaggcgttgtgcagcctggcagaagtctgagactgtcttgtgccgccagcggcttcaccttcagcagctatggaatgcactgggtccgacaggcccctggcaaaggacttgaatgggtggccggcatttggtgggacggcagcaatgagaagtacgccgacagcgtgaagggcagattcaccatctccagagacaacagcaagaacaccctgtacctccagatgaacagcctgagagccgaggacacagccgtgtattattgcgccaaagaggccccttactacgccaaggactacatggacgtgtggggcaagggcaccacagtgactgtctcttctacgcgtggaatgaggactgaggatcttcccaaagctgtcgtctttctcgaaccccaatggtatcgggtgctcgaaaaagactctgtgacactgaaatgccaaggggcctactctcccgaggacaactccacacagtggtttcataatgagtccctcatcagctctcaggccagctcttatttcattgatgccgctacagtggacgactccggcgagtatcggtgtcagaccaatctgtctacactgtctgaccccgtgcagcttgaggtccacattggatggttgctcttgcaagccccacgctgggttttcaaagaggaagatccaatccatctgcggtgccacagctggaaaaacaccgctctccacaaagtcacatacctgcaaaatggcaaaggacgcaaatacttccatcacaattccgatttttacattccgaaggctaccctgaaagacagcggcagctatttctgccggggactcgtcggctccaagaatgtgtcctccgaaaccgtgaatatcacgattacccaaggactggctgtgcctacaatctctagcttctttccgcctggataccaagtctccttctgtcttgtgatggtcctcctgtttgctgtggacacaggactgtacttttccgtgaaaacgaacatccgcagctccacacgcgattggaaagatcacaagtttaaatggcgcaaagatccccaggacaag

SEQ ID NO: 5010 - DNA, 1515 bp, Artificial Sequence
  Synthetic Polynucleotide
atggccttaccagtgaccgccttgctcctgccgctggccttgctgctccacgccgccaggccggacatccagatgacacagagccctagcagcctgtctgccagcgtgggagacagagtgaccatcacctgtagagccagccaggacgtgaacacagccgtggcttggtatcagcagaagcctggcaaggcccctaagctgctgatctacagcgccagctttctgtacagcggcgtgcccagcagattcagcggaagcagaagcggcaccgacttcaccctgacaatatccagcctccagcctgaggacttcgccacctactactgccagcagcactacaccacacctccaacattcggccagggcaccaaggtggaaatcaagagaacaggcggaggcggaagtggaggcggaggatctggcggcggaggctctgaagtgcagctggttgaatcaggtggcggcctggttcaacctggcggatctctgagactgagctgtgccgccagcggcttcaacatcaaggacacctacatccactgggtccgacaggcccctggcaaaggacttgaatgggtcgccagaatctaccccaccaacggctacaccagatacgccgactctgtgaagggcagattcaccatcagcgccgacaccagcaagaacaccgcctacctccagatgaactccctgagagccgaggacaccgccgtgtactactgtagcagatggggcggctggggcttctacgctatggattattggggccagggaaccctggtcaccgtgtcatctacgcgtggaatgaggactgaggatcttcccaaagctgtcgtctttctcgaaccccaatggtatcgggtgctcgaaaaagactctgtgacactgaaatgccaaggggcctactctcccgaggacaactccacacagtggtttcataatgagtccctcatcagctctcaggccagctcttatttcattgatgccgctacagtggacgactccggcgagtatcggtgtcagaccaatctgtctacactgtctgaccccgtgcagcttgaggtccacattggatggttgctcttgcaagccccacgctgggttttcaaagaggaagatccaatccatctgcggtgccacagctggaaaaacaccgctctccacaaagtcacatacctgcaaaatggcaaaggacgcaaatacttccatcacaattccgatttttacattccgaaggctaccctgaaagacagcggcagctatttctgccggggactcgtcggctccaagaatgtgtcctccgaaaccgtgaatatcacgattacccaaggactggctgtgcctacaatctctagcttctttccgcctggataccaagtctccttctgtcttgtgatggtcctcctgtttgctgtggacacaggactgtacttttccgtgaaaacgaacatccgcagctccacacgcgattggaaagatcacaagtttaaatggcgcaaagatccccaggacaag

SEQ ID NO: 5011 - DNA, 1500 bp, Artificial Sequence
  Synthetic Polynucleotide
atggccttaccagtgaccgccttgctcctgccgctggccttgctgctccacgccgccaggccgcaggtgcagctggttgaatctggcggcggacttgtgaagcctggcggatctctgagactgagctgtgccgccagcggcttcaccttcagcgactactacatgacctggatcagacaggcccctggcaaaggactggaatggatcagctacatcagcagcagcggcagcaccatctactacgccgatagcgtgaagggcagattcaccatcagccgggacaacgccaagaacagcctgtacctccagatgaactccctgagagccgaggacaccgccgtgtactactgcgccagagacagaaacagccacttcgactattggggccagggcaccctggtcacagtttctagcggcggaggcggaagtggaggcggaggatctggcggcggaggctctgatattcagatgacacagagccccagcagcgtgtccgcctctgtgggagatagagtgaccatcacctgtagagccagccagggcatcacaagatggctggcctggtatcagcagaagccaggcaaggcccctaagctgctgatctacgccgcttctgtgctccagagcggagtgcctagcagattttctggcagcggctccggcaccgatttcaccctgacaatatccagcctccagcctgaggacttcgccacctactactgccagcagagcaacagcttccccagaacattcggacagggcaccaaggtggaaatcaagacgcgtggaatgaggactgaggatcttcccaaagctgtcgtctttctcgaaccccaatggtatcgggtgctcgaaaaagactctgtgacactgaaatgccaaggggcctactctcccgaggacaactccacacagtggtttcataatgagtccctcatcagctctcaggccagctcttatttcattgatgccgctacagtggacgactccggcgagtatcggtgtcagaccaatctgtctacactgtctgaccccgtgcagcttgaggtccacattggatggttgctcttgcaagccccacgctgggttttcaaagaggaagatccaatccatctgcggtgccacagctggaaaaacaccgctctccacaaagtcacatacctgcaaaatggcaaaggacgcaaatacttccatcacaattccgatttttacattccgaaggctaccctgaaagacagcggcagctatttctgccggggactcgtcggctccaagaatgtgtcctccgaaaccgtgaatatcacgattacccaaggactggctgtgcctacaatctctagcttctttccgcctggataccaagtctccttctgtcttgtgatggtcctcctgtttgctgtggacacaggactgtacttttccgtgaaaacgaacatccgcagctccacacgcgattggaaagatcacaagtttaaatggcgcaaagatccccaggacaag

SEQ ID NO: 5012 - DNA, 1500 bp, Artificial Sequence
  Synthetic Polynucleotide
atggccttaccagtgaccgccttgctcctgccgctggccttgctgctccacgccgccaggccgcaggtgcagctggttgaatctggcggcggacttgtgaagcctggcggatctctgagactgagctgtgccgccagcggcttcaccttcagcgatcactacatgagctggatcagacaggcccctggcaaaggactggaatggttcagctacatcagcagcagcggcggcatcatctactacgccgatagcgtgaagggcagattcaccatcagccgggacaacgccaagaacagcctgtacctccagatgaactccctgagagccgaggacaccgccgtgtactactgtgccagagatgtgggcagccacttcgactattggggccagggaacactggtcaccgtttctagcggcggaggcggaagtggaggcggaggatctggcggcggaggctctgatattcagatgacacagagccccagcagcgtgtccgcctctgtgggagatagagtgaccatcacctgtcgggccagccaggacattagcagatggctggcttggtatcagcagaagccaggcaaggcccctaagctgctgatttcagccgccagcagactccagagcggagtgcctagcagattttctggctctggcagcggcaccgacttcaccctgacaatatctagcctccagcctgaggacttcgccatctactattgccagcaggccaagagcttccccagaacatttggacagggcaccaaggtggaaatcaagacgcgtggaatgaggactgaggatcttcccaaagctgtcgtctttctcgaaccccaatggtatcgggtgctcgaaaaagactctgtgacactgaaatgccaaggggcctactctcccgaggacaactccacacagtggtttcataatgagtccctcatcagctctcaggccagctcttatttcattgatgccgctacagtggacgactccggcgagtatcggtgtcagaccaatctgtctacactgtctgaccccgtgcagcttgaggtccacattggatggttgctcttgcaagccccacgctgggttttcaaagaggaagatccaatccatctgcggtgccacagctggaaaaacaccgctctccacaaagtcacatacctgcaaaatggcaaaggacgcaaatacttccatcacaattccgatttttacattccgaaggctaccctgaaagacagcggcagctatttctgccggggactcgtcggctccaagaatgtgtcctccgaaaccgtgaatatcacgattacccaaggactggctgtgcctacaatctctagcttctttccgcctggataccaagtctccttctgtcttgtgatggtcctcctgtttgctgtggacacaggactgtacttttccgtgaaaacgaacatccgcagctccacacgcgattggaaagatcacaagtttaaatggcgcaaagatccccaggacaag

SEQ ID NO: 5013 - DNA, 1536 bp, Artificial Sequence
  Synthetic Polynucleotide
atggccttaccagtgaccgccttgctcctgccgctggccttgctgctccacgccgccaggccgcaggtgcagctggttgaatctggtggcggagtggtgcagtctggcagaagcctgagactgtcttgtgccgccagcggcttcaccttcagaaactacggaatgcactgggtccgacaggcccctggcaaaggacttgaatgggtcgccgtgatttggtacgacggcagcgacaagtactacgccgattctgtgcggggcagattcaccatcagccgggacaacagcaagaacaccctgtacctccagatgaacagcctgagagccgaggacaccgccgtgtactactgtgccagagatggctacgacatcctgaccggcaatcccagagacttcgactattggggccagggcacactggtcacagtttctagcggcggaggcggaagtggaggcggaggatctggcggcggaggctctgataccgtgatgacccagacacctctgagcagccacgtgacacttggacagcctgccagcatcagctgtagaagcagccagagcctggtgcacagcgacggcaatacctacctgtcttggctccagcagaggccaggacagcctcctagactgctgatctaccggatcagcagacggttcagcggcgtgcccgatagattttctggaagcggagccggcaccgacttcaccctggaaatcagcagagtggaagccgaggatgtgggcgtctactactgtatgcagagcacccacgtgccacggacctttggacagggcaccaaggtggaaatcaagacgcgtggaatgaggactgaggatcttcccaaagctgtcgtctttctcgaaccccaatggtatcgggtgctcgaaaaagactctgtgacactgaaatgccaaggggcctactctcccgaggacaactccacacagtggtttcataatgagtccctcatcagctctcaggccagctcttatttcattgatgccgctacagtggacgactccggcgagtatcggtgtcagaccaatctgtctacactgtctgaccccgtgcagcttgaggtccacattggatggttgctcttgcaagccccacgctgggttttcaaagaggaagatccaatccatctgcggtgccacagctggaaaaacaccgctctccacaaagtcacatacctgcaaaatggcaaaggacgcaaatacttccatcacaattccgatttttacattccgaaggctaccctgaaagacagcggcagctatttctgccggggactcgtcggctccaagaatgtgtcctccgaaaccgtgaatatcacgattacccaaggactggctgtgcctacaatctctagcttctttccgcctggataccaagtctccttctgtcttgtgatggtcctcctgtttgctgtggacacaggactgtacttttccgtgaaaacgaacatccgcagctccacacgcgattggaaagatcacaagtttaaatggcgcaaagatccccaggacaag

SEQ ID NO: 5014 - DNA, 1515 bp, Artificial Sequence
  Synthetic Polynucleotide
atggccttaccagtgaccgccttgctcctgccgctggccttgctgctccacgccgccaggccggaggtgcagctggttgaatctggcggaggactggttcagcctggcggatctctgagactgtcttgtgccgccagcggcttcccattcagcagctacgatatgcactgggtccgacaggccacaggcaaaggactggaatgggtgtccgccatcggaacagccggcgctacctattatcccggctctgtgaagggcagattcaccatcagcagagagaacgccaagaacagcctgtacctccagatgaactccctgagagccggcgataccgccgtgtactattgtgccagaggcgactacgtgtggggcacctacagacccctgttcgattattggggccagggcaccctggtcacagtttctagtggcggaggcggaagtggaggcggaggatctggcggcggaggctctgatattcagctgactcagagccccagcttcctgtctgcctctgtgggcgacagagtgaccatcacatgttgggccagccagggcatcaacaactacctggcctggtatcagcagaagcccggcaaggctcctaagctgctgatctacgccgccagcacactgcaaacaggcgtgccaagcagattttccggctctggcagcggcaccgagttcaccctgacaatatctagcctccagcctgaggacttcgccacctactactgccagcagctgaacagctaccctctgacctttggaggcggcaccaaggtggaaatcaagacgcgtggaatgaggactgaggatcttcccaaagctgtcgtctttctcgaaccccaatggtatcgggtgctcgaaaaagactctgtgacactgaaatgccaaggggcctactctcccgaggacaactccacacagtggtttcataatgagtccctcatcagctctcaggccagctcttatttcattgatgccgctacagtggacgactccggcgagtatcggtgtcagaccaatctgtctacactgtctgaccccgtgcagcttgaggtccacattggatggttgctcttgcaagccccacgctgggttttcaaagaggaagatccaatccatctgcggtgccacagctggaaaaacaccgctctccacaaagtcacatacctgcaaaatggcaaaggacgcaaatacttccatcacaattccgatttttacattccgaaggctaccctgaaagacagcggcagctatttctgccggggactcgtcggctccaagaatgtgtcctccgaaaccgtgaatatcacgattacccaaggactggctgtgcctacaatctctagcttctttccgcctggataccaagtctccttctgtcttgtgatggtcctcctgtttgctgtggacacaggactgtacttttccgtgaaaacgaacatccgcagctccacacgcgattggaaagatcacaagtttaaatggcgcaaagatccccaggacaag

SEQ ID NO: 5015 - DNA, 1506 bp, Artificial Sequence
  Synthetic Polynucleotide
atggccttaccagtgaccgccttgctcctgccgctggccttgctgctccacgccgccaggccgcaggttcagctgcaagagtctggccctggcctggtcaagcctagcgaaacactgagcctgacctgtaccgtgtctggggccagcatcagcagcttctactggtcctggatcagacagcctcctggcaaaggactggaatggatcggctacatctactacagcggcaccaccaactacaaccccagcctgaagtccagagtgaccatcagcgtggacaccagcaagaaccagttctccctgaagctgagcagcgtgacagccgccgatacagccgtgtactactgtgccagaattgccgtggccggcttcttcttcgactattggggccagggcaccctggtcacagtttctagcggcggaggcggaagtggaggcggaggatctggcggcggaggctctgaaattgtgctgacacagagccccggcacactgtcactttctccaggcgaaagagccacactgagctgtagagccagccagagcgtgaacaagaactacctggcttggtatcagcagaagcccggacaggctcccagactgctgatctacggtgcctctagcagagccacaggcatccccgatagattttctggcagcggctccggcaccgacttcaccctgacaatcagcagactggaacccgaggacttcgccgtgtattattgccagcagtacgacagaagccctctgacctttggaggcggcaccaaggtggaaatcaagacgcgtggaatgaggactgaggatcttcccaaagctgtcgtctttctcgaaccccaatggtatcgggtgctcgaaaaagactctgtgacactgaaatgccaaggggcctactctcccgaggacaactccacacagtggtttcataatgagtccctcatcagctctcaggccagctcttatttcattgatgccgctacagtggacgactccggcgagtatcggtgtcagaccaatctgtctacactgtctgaccccgtgcagcttgaggtccacattggatggttgctcttgcaagccccacgctgggttttcaaagaggaagatccaatccatctgcggtgccacagctggaaaaacaccgctctccacaaagtcacatacctgcaaaatggcaaaggacgcaaatacttccatcacaattccgatttttacattccgaaggctaccctgaaagacagcggcagctatttctgccggggactcgtcggctccaagaatgtgtcctccgaaaccgtgaatatcacgattacccaaggactggctgtgcctacaatctctagcttctttccgcctggataccaagtctccttctgtcttgtgatggtcctcctgtttgctgtggacacaggactgtacttttccgtgaaaacgaacatccgcagctccacacgcgattggaaagatcacaagtttaaatggcgcaaagatccccaggacaag

SEQ ID NO: 5016 - DNA, 1533 bp, Artificial Sequence
  Synthetic Polynucleotide
atggccttaccagtgaccgccttgctcctgccgctggccttgctgctccacgccgccaggccgcaggttcagctggttcagtctggggccgaagtgaagaaacctggggcctctgtgaaggtgtcctgcaaggccagcggctacacctttaccaactactacatgcactgggtccgacaggcccctggactgggacttgagtggatgggcatcatcaaccctagcgacggcagcacaagctacgcccagaaattccagggcagagtgaccatgaccagagacaccagcaccaacaccgtgtacatggacctgagcagcctgagaagcgaggacaccgccgtgtactattgtgccagaggcggcaacagcgccttctacagctactacgacatggacgtgtggggccagggcaccacagtgacagtttctagcggcggaggcggaagtggaggcggaggatctggcggcggaggctctgatgtggtcatgacacagacccctctgagcctgcctgtgacacttggacagcctgccagcatcagctgtagatccagccagagcctggtgtacagagatggcaacacctacctgagctggttccagcagaggcctggacagtctcctcggcggctgatctacaaggtgtccaactggcagagcggcgtgcccgatagattttctggcggtggcagcggcaccgacttcaccctgaagatcagcagagtggaagccgaggacgtgggcgtgtactactgtatgcagggcacacactggcctccaacattcggccagggaacaaaggtggaaatcaagacgcgtggaatgaggactgaggatcttcccaaagctgtcgtctttctcgaaccccaatggtatcgggtgctcgaaaaagactctgtgacactgaaatgccaaggggcctactctcccgaggacaactccacacagtggtttcataatgagtccctcatcagctctcaggccagctcttatttcattgatgccgctacagtggacgactccggcgagtatcggtgtcagaccaatctgtctacactgtctgaccccgtgcagcttgaggtccacattggatggttgctcttgcaagccccacgctgggttttcaaagaggaagatccaatccatctgcggtgccacagctggaaaaacaccgctctccacaaagtcacatacctgcaaaatggcaaaggacgcaaatacttccatcacaattccgatttttacattccgaaggctaccctgaaagacagcggcagctatttctgccggggactcgtcggctccaagaatgtgtcctccgaaaccgtgaatatcacgattacccaaggactggctgtgcctacaatctctagcttctttccgcctggataccaagtctccttctgtcttgtgatggtcctcctgtttgctgtggacacaggactgtacttttccgtgaaaacgaacatccgcagctccacacgcgattggaaagatcacaagtttaaatggcgcaaagatccccaggacaag

SEQ ID NO: 5017 - DNA, 1494 bp, Artificial Sequence
  Synthetic Polynucleotide
atggccttaccagtgaccgccttgctcctgccgctggccttgctgctccacgccgccaggccgcaggttcagctccagcagtctggacctgagctggttaagcctggcgcttctgtgcggatctcttgcaaggccagcggctacaccttcaccacctactacatccactgggtcaagcagcggcctggacagggactcgaatggatcggctggatctaccccggcaacgtgaacaccaactacaacgagaagttcaagggcaaagccacactgaccgccgacaagagcagcagcacagcctacatgcagctgaccagcctgacctctgaggacagcgccgtgtacttttgtgccagaggcgtgtactacttcgactactggggccagggcaccatcctgacagtttctagcggcggaggcggaagtggaggcggaggatctggcggcggaggctctatcgtgatgacccagactcctaagttcctgctggtgtctgccggcgacagagtgaccatcacctgtaaagccagccagagcgtgaacaacgacgtgtcctggttccagcagaagcccggccaatctcctacactgctgatctactacgccagcaacagatacaccggcgtgcccgatagattcaccggctctggctacggcaccgacttcacctttaccatcagcaccgtgcaggccgaggacctggctgtgtacttctgccagcaagactacagcagcccttacacctttggaggcggcaccaagctggaaatcaagacgcgtggaatgaggactgaggatcttcccaaagctgtcgtctttctcgaaccccaatggtatcgggtgctcgaaaaagactctgtgacactgaaatgccaaggggcctactctcccgaggacaactccacacagtggtttcataatgagtccctcatcagctctcaggccagctcttatttcattgatgccgctacagtggacgactccggcgagtatcggtgtcagaccaatctgtctacactgtctgaccccgtgcagcttgaggtccacattggatggttgctcttgcaagccccacgctgggttttcaaagaggaagatccaatccatctgcggtgccacagctggaaaaacaccgctctccacaaagtcacatacctgcaaaatggcaaaggacgcaaatacttccatcacaattccgatttttacattccgaaggctaccctgaaagacagcggcagctatttctgccggggactcgtcggctccaagaatgtgtcctccgaaaccgtgaatatcacgattacccaaggactggctgtgcctacaatctctagcttctttccgcctggataccaagtctccttctgtcttgtgatggtcctcctgtttgctgtggacacaggactgtacttttccgtgaaaacgaacatccgcagctccacacgcgattggaaagatcacaagtttaaatggcgcaaagatccccaggacaag

SEQ ID NO: 5018 - DNA, 1503 bp, Artificial Sequence
  Synthetic Polynucleotide
atggccttaccagtgaccgccttgctcctgccgctggccttgctgctccacgccgccaggccgcaggttcagctgcaagagtctggccctggcctggtcaagcctagccaaacactgagcctgacctgtaccgtgtctggcggcagcatcaacaacaacaattactactggacctggatcagacagcaccccggcaaaggactggaatggatcggctacatctactacagcggcagcaccttctacaaccccagcctgaagtccagagtgaccatcagcgtggacaccagcaagacccagttctccctgaagctgagcagcgtgacagccgccgatacagccgtgtactactgcgccagagaagataccatgaccggcctggatgtgtggggccagggaacaacagtgacagtgtctagcggcggaggcggaagtggaggcggaggatctggcggcggaggctctgacattcagatgacacagagccctagcagcctgagcgcctctgtgggagacagagtgacaattacctgtcgggccagccagtctatcaacaactacctgaactggtatcagcagaagcccggcaaggcccctacactgctgatctatgccgccagctctctccagagcggagtgcctagcagattcagcggaagcagaagcggcaccgacttcaccctgacaatatccagcctccagcctgaggacttcgccgcctacttttgccagcagacctacagcaaccccacctttggccagggcaccaaggtggaagtgaagacgcgtggaatgaggactgaggatcttcccaaagctgtcgtctttctcgaaccccaatggtatcgggtgctcgaaaaagactctgtgacactgaaatgccaaggggcctactctcccgaggacaactccacacagtggtttcataatgagtccctcatcagctctcaggccagctcttatttcattgatgccgctacagtggacgactccggcgagtatcggtgtcagaccaatctgtctacactgtctgaccccgtgcagcttgaggtccacattggatggttgctcttgcaagccccacgctgggttttcaaagaggaagatccaatccatctgcggtgccacagctggaaaaacaccgctctccacaaagtcacatacctgcaaaatggcaaaggacgcaaatacttccatcacaattccgatttttacattccgaaggctaccctgaaagacagcggcagctatttctgccggggactcgtcggctccaagaatgtgtcctccgaaaccgtgaatatcacgattacccaaggactggctgtgcctacaatctctagcttctttccgcctggataccaagtctccttctgtcttgtgatggtcctcctgtttgctgtggacacaggactgtacttttccgtgaaaacgaacatccgcagctccacacgcgattggaaagatcacaagtttaaatggcgcaaagatccccaggacaag

SEQ ID NO: 5019 - DNA, 1518 bp, Artificial Sequence
  Synthetic Polynucleotide
atggccttaccagtgaccgccttgctcctgccgctggccttgctgctccacgccgccaggccgagctacgagctgacacagcctccaagcgtgtccgtgtctcctggacagacagccagcatcacctgtagcggcgataagctgggcgataagtacgccagctggtatcagcagaagcccggccagtctcctgtgctggtcatctaccaggacaacagaaggcccagcggcatccccgagagattcagcggcagcaatagcggcaataccgccacactgaccatcagcggcacccaggctatggacgaggccgactactattgccaggcttgggacagcgacacctacgtgttcggcaccggcaccaaagtgacagtgcttggacaaggcggaggcggaagtggaggcggaggatctggcggcggaggctctgaagttcagctggttcagagcggagccgaagtgaagaaacctggggcctctgtgaaggtgtcctgcaaggcttccggcgataccttcaagcggtactacgtgcactgggtccgacaggctccaggacaaggactggaatggatgggcatcatcaaccccagcggcgtgtccacaacatacgcccagaaattccagggcagagtgaccatgaccagagacaccagcacctccaccgtgtacatggaactgagcagcctgagaagcgaggacaccgccgtgtactactgtgctgaagtgcgcggcagcggcttcaactacttcggcatggatgtgtggggccagggcacactggttaccgtttcttctacgcgtggaatgaggactgaggatcttcccaaagctgtcgtctttctcgaaccccaatggtatcgggtgctcgaaaaagactctgtgacactgaaatgccaaggggcctactctcccgaggacaactccacacagtggtttcataatgagtccctcatcagctctcaggccagctcttatttcattgatgccgctacagtggacgactccggcgagtatcggtgtcagaccaatctgtctacactgtctgaccccgtgcagcttgaggtccacattggatggttgctcttgcaagccccacgctgggttttcaaagaggaagatccaatccatctgcggtgccacagctggaaaaacaccgctctccacaaagtcacatacctgcaaaatggcaaaggacgcaaatacttccatcacaattccgatttttacattccgaaggctaccctgaaagacagcggcagctatttctgccggggactcgtcggctccaagaatgtgtcctccgaaaccgtgaatatcacgattacccaaggactggctgtgcctacaatctctagcttctttccgcctggataccaagtctccttctgtcttgtgatggtcctcctgtttgctgtggacacaggactgtacttttccgtgaaaacgaacatccgcagctccacacgcgattggaaagatcacaagtttaaatggcgcaaagatccccaggacaag

SEQ ID NO: 5020 - DNA, 1515 bp, Artificial Sequence
  Synthetic Polynucleotide
atggccttaccagtgaccgccttgctcctgccgctggccttgctgctccacgccgccaggccggaggttcagctgcttgagtctggcggaggactggttcaacctggcggaagcctgagactgtcttgtgccgccagcggcttcacctttagcagctacgccatgagctgggtccgacaggctcctggcaaaggactggaagtggtggtgtctgccatttctggcggcggaggcagaacctactacgccgattctgtgaagggcagattcaccatcagccgggacaacagcaagaacaccctgtacctgcagatgaacagcctgagagccgaggacaccgccgtgtactactgtgccagagaagagatggccttccgggcctacagattcgacatctggggccagggaaccctggtcacagtttctagcggcggaggcggaagtggaggcggaggatctggcggcggaggctctgatattcagatgacacagagccccagcagcctgtctgcctctgtgggagacagagtgaccatcacctgtagagccagccagagcatcagcagctacctgaactggtatcagcagaagcccggcaaggcccctaaactgctgatctatgccgcctccagtctgcagagcggagtgcctagcagattttctggctctggcagcggcaccgacttcaccctgacaatatctagcctgcagcctgaggacttcgccacctactactgccagcagagctacatcacccctctgacattcggtggcggcaccaaggtggaaatcaagacgcgtggaatgaggactgaggatcttcccaaagctgtcgtctttctcgaaccccaatggtatcgggtgctcgaaaaagactctgtgacactgaaatgccaaggggcctactctcccgaggacaactccacacagtggtttcataatgagtccctcatcagctctcaggccagctcttatttcattgatgccgctacagtggacgactccggcgagtatcggtgtcagaccaatctgtctacactgtctgaccccgtgcagcttgaggtccacattggatggttgctcttgcaagccccacgctgggttttcaaagaggaagatccaatccatctgcggtgccacagctggaaaaacaccgctctccacaaagtcacatacctgcaaaatggcaaaggacgcaaatacttccatcacaattccgatttttacattccgaaggctaccctgaaagacagcggcagctatttctgccggggactcgtcggctccaagaatgtgtcctccgaaaccgtgaatatcacgattacccaaggactggctgtgcctacaatctctagcttctttccgcctggataccaagtctccttctgtcttgtgatggtcctcctgtttgctgtggacacaggactgtacttttccgtgaaaacgaacatccgcagctccacacgcgattggaaagatcacaagtttaaatggcgcaaagatccccaggacaag

SEQ ID NO: 5021 - DNA, 1539 bp, Artificial Sequence
  Synthetic Polynucleotide
atggccttaccagtgaccgccttgctcctgccgctggccttgctgctccacgccgccaggccggacatcgtgctgacacagagccctgcttctctggccgtgtctcttggacagggcgctaccatcagctgtagagccagcaagagcgtgtccaccagcggctacacctacatgcactggtatcagcagaagcccggccagcctcctaagctgctgatctacctggcctccaacctggaaagcggagtgcctgccagattttctggcagcggctctggcaccgacttcaccctgaatatccatcctgtggaagaagaggacgccgccacctactactgtcagcactctggcgaactgccacctagctttggcggaggcaccaagctggaaatcaagagagctggcggaggcggaagtggaggcggaggatctggcggcggaggctctgaagtgcagctggtggaatctggcggcgaccttgtgaaacctggcggctctctgaagctgagctgtgccgtgtccggcttcacctttagcagctacggcatgagctgggtccgacagacccctgacaagagactggaatgggtcgccacagtgtctagcggcggcacctacacatattaccccgacagcgtgaagggcagattcaccatcagccgggacaacgccaagaacaccctgtacctccagatgagcagcctgaagtccgaggacagcgccatgtactactgcgccagacaccggggcaattactacgccacctattattacgctatggactactggggccagggcaccagcgtgacagtttcttctacgcgtggaatgaggactgaggatcttcccaaagctgtcgtctttctcgaaccccaatggtatcgggtgctcgaaaaagactctgtgacactgaaatgccaaggggcctactctcccgaggacaactccacacagtggtttcataatgagtccctcatcagctctcaggccagctcttatttcattgatgccgctacagtggacgactccggcgagtatcggtgtcagaccaatctgtctacactgtctgaccccgtgcagcttgaggtccacattggatggttgctcttgcaagccccacgctgggttttcaaagaggaagatccaatccatctgcggtgccacagctggaaaaacaccgctctccacaaagtcacatacctgcaaaatggcaaaggacgcaaatacttccatcacaattccgatttttacattccgaaggctaccctgaaagacagcggcagctatttctgccggggactcgtcggctccaagaatgtgtcctccgaaaccgtgaatatcacgattacccaaggactggctgtgcctacaatctctagcttctttccgcctggataccaagtctccttctgtcttgtgatggtcctcctgtttgctgtggacacaggactgtacttttccgtgaaaacgaacatccgcagctccacacgcgattggaaagatcacaagtttaaatggcgcaaagatccccaggacaag

SEQ ID NO: 5022 - DNA, 1521 bp, Artificial Sequence
  Synthetic Polynucleotide
atggccttaccagtgaccgccttgctcctgccgctggccttgctgctccacgccgccaggccggacatccagatgacacagagccctagcagcctgtctgccagcgtgggagacagagtgaccatcacatgtagcgccagccagggcatcagaaactacctgaactggtatcagcagaaacccggcaaggtgcccaagctgctgatctactacaccagcagactgcacagcggcgtgcccagcagattttctggctctggcagcggcaccgacttcaccctgacaatatctagcctccagcctgaggacgtggcaacctactactgtcagcagtacggcaagctgccctacacattcggccagggcaccaagctggaaatcaagagaacagtggctgccggcggaggcggaagtggaggcggaggatctggcggcggaggctctgaagttcagctggttgaatcaggcggcggactggttcaacctggcggatctctgagactgagctgtgccgccagcggcttcacattttccgacgcctggatggactgggtccgacaggctcctggaaaaggactggaatgggtcggagagatccggtccaaagtgaacaaccacgaaacctactatgccgagagcgtgaagggcagattcaccatcagccgggacgacagcaagaacagcctgtacctccagatgaactccctgaaaaccgaggacaccgccgtgtactactgcgccagaaacgactacttcgactactggggccagggaaccaccgtgacagtgtctagtgcttccacgcgtggaatgaggactgaggatcttcccaaagctgtcgtctttctcgaaccccaatggtatcgggtgctcgaaaaagactctgtgacactgaaatgccaaggggcctactctcccgaggacaactccacacagtggtttcataatgagtccctcatcagctctcaggccagctcttatttcattgatgccgctacagtggacgactccggcgagtatcggtgtcagaccaatctgtctacactgtctgaccccgtgcagcttgaggtccacattggatggttgctcttgcaagccccacgctgggttttcaaagaggaagatccaatccatctgcggtgccacagctggaaaaacaccgctctccacaaagtcacatacctgcaaaatggcaaaggacgcaaatacttccatcacaattccgatttttacattccgaaggctaccctgaaagacagcggcagctatttctgccggggactcgtcggctccaagaatgtgtcctccgaaaccgtgaatatcacgattacccaaggactggctgtgcctacaatctctagcttctttccgcctggataccaagtctccttctgtcttgtgatggtcctcctgtttgctgtggacacaggactgtacttttccgtgaaaacgaacatccgcagctccacacgcgattggaaagatcacaagtttaaatggcgcaaagatccccaggacaag

SEQ ID NO: 5023 - DNA, 1545 bp, Artificial Sequence
  Synthetic Polynucleotide
atggccttaccagtgaccgccttgctcctgccgctggccttgctgctccacgccgccaggccggaggttcagctgcaagagtctggggccgaagtgaagaaacctggcagcagcgtgaaggtgtcctgcaaggccagcggcttcaacatcaaggacacctacatgcactgggtccgacaggcccctggacaaggacttgagtggatgggcagaatcgaccccgccaacggcaacagcaaatacgtgcccaagttccagggcagagtgaccatcacagccgacgagagcacaagcaccgcctacatggaactgagcagcctgagaagcgaggacaccgccgtgtactactgtgcccctttcggctactacgtgtccgactacgccatggcctattggggccagggaaccaccgtgacagtgtctagtgcatctggcggaggcggaagtggaggcggaggatctggcggcggaggctctgacatcgtgatgacacagagccccgatagcctggccgtgtctctgggagaaagagccaccatcaactgtagagccggcgagagcgtggacatcttcggcgtgggatttctgcactggtatcagcagaagcccggccagcctcctaagctgctgatctacagagccagcaacctggaaagcggcgtgcccgatagattttctggcagcggctctggcaccgacttcaccctgacaatcagacctctccaggccgaggatgtggccgtgtattattgccagcagaccaacgaggacccctacacatttggacagggcaccaagctggaaatcaagagaacagtggccgccacgcgtggaatgaggactgaggatcttcccaaagctgtcgtctttctcgaaccccaatggtatcgggtgctcgaaaaagactctgtgacactgaaatgccaaggggcctactctcccgaggacaactccacacagtggtttcataatgagtccctcatcagctctcaggccagctcttatttcattgatgccgctacagtggacgactccggcgagtatcggtgtcagaccaatctgtctacactgtctgaccccgtgcagcttgaggtccacattggatggttgctcttgcaagccccacgctgggttttcaaagaggaagatccaatccatctgcggtgccacagctggaaaaacaccgctctccacaaagtcacatacctgcaaaatggcaaaggacgcaaatacttccatcacaattccgatttttacattccgaaggctaccctgaaagacagcggcagctatttctgccggggactcgtcggctccaagaatgtgtcctccgaaaccgtgaatatcacgattacccaaggactggctgtgcctacaatctctagcttctttccgcctggataccaagtctccttctgtcttgtgatggtcctcctgtttgctgtggacacaggactgtacttttccgtgaaaacgaacatccgcagctccacacgcgattggaaagatcacaagtttaaatggcgcaaagatccccaggacaag

SEQ ID NO: 5024 - DNA, 1524 bp, Artificial Sequence
  Synthetic Polynucleotide
atggccttaccagtgaccgccttgctcctgccgctggccttgctgctccacgccgccaggccgcaagttcagctggttcagtctggggccgaagtgaagaaacctggcagcagcgtgaaggtgtcctgcaaagcaagcggcggcacctttagcagctacgccatctcttgggtccgacaggcaccaggacaaggactggaatggatgggcctgattatccccagatacggcaaggccagatacgcccagaaattccagggcagagtgaccatcaccgccgacgagtctacaagcaccgcctacatggaactgagcagcctgagaagcgaggacacagccgtgtattattgcgcccggaactggccctactactacatggatttttggggccagggaaccctggtcaccgtgtctagtgcatctggcggaggcggaagtggaggcggaggatctggcggcggaggctctgacatcgtgctgacacagtctcccgccacactgtcactgtctccaggcgaaagagccacactgagctgtagagccagccagaacatcgtgttcaacctggcctggtatcagcagaagcctggacaggctccccggctgctgatctacgatgccagcaatagagccaccggcgtgcccgccagattttctggttctggcagcggcaccgacttcaccctgaccatatctagcctggaacctgaggacttcgccgtgtactactgccagcagaaaaagtccatgcctctgaccttcggccagggcaccaaggtggaaatcaagagaacagtggctgccacgcgtggaatgaggactgaggatcttcccaaagctgtcgtctttctcgaaccccaatggtatcgggtgctcgaaaaagactctgtgacactgaaatgccaaggggcctactctcccgaggacaactccacacagtggtttcataatgagtccctcatcagctctcaggccagctcttatttcattgatgccgctacagtggacgactccggcgagtatcggtgtcagaccaatctgtctacactgtctgaccccgtgcagcttgaggtccacattggatggttgctcttgcaagccccacgctgggttttcaaagaggaagatccaatccatctgcggtgccacagctggaaaaacaccgctctccacaaagtcacatacctgcaaaatggcaaaggacgcaaatacttccatcacaattccgatttttacattccgaaggctaccctgaaagacagcggcagctatttctgccggggactcgtcggctccaagaatgtgtcctccgaaaccgtgaatatcacgattacccaaggactggctgtgcctacaatctctagcttctttccgcctggataccaagtctccttctgtcttgtgatggtcctcctgtttgctgtggacacaggactgtacttttccgtgaaaacgaacatccgcagctccacacgcgattggaaagatcacaagtttaaatggcgcaaagatccccaggacaag

SEQ ID NO: 5025 - DNA, 1533 bp, Artificial Sequence
  Synthetic Polynucleotide
atggccttaccagtgaccgccttgctcctgccgctggccttgctgctccacgccgccaggccggaggtgcagctggttgaatctggcggcggacttgtgaagcctggcggatctctgagactgagctgtgccgccagcggcttcacctttagcaatgcctggatgagctgggtccgacaggcccctggaaaaggactggaatgggtcggacggatcaagagcaagaccgaaggcggcaccaccgattatgctgcccctgtgaagggcagattcaccatcagcagggacgacagcaagaacaccctgtacctccagatgaacagcctgaaaaccgaggacaccgccgtgtactactgcaccacaccttacgagtggtcttggtacgactactggggccagggcacactggtcacagtgtcatctgcatctggcggaggcggaagtggaggcggaggatctggcggcggaggctctcagacagtggtcacccaagagcctagcctgacagtgtctcctggcggaaccgtgacactgacatgtggcagttctaccggcgctgtgaccaccagcaattacgccaactgggtgcagcagaagccaggccaagctcctagaggactgatcggcggcacaaacaagagagcccctggcacaccagccagattttctggctctctgctcggcggaaaggccgctcttacactgtctggtgtccagcctgaggacgaggccgagtattattgcgccctgtggtacagcaacctgtgggttttcggcggaggcaccaagctgacagtgctgactgttgctgctacgcgtggaatgaggactgaggatcttcccaaagctgtcgtctttctcgaaccccaatggtatcgggtgctcgaaaaagactctgtgacactgaaatgccaaggggcctactctcccgaggacaactccacacagtggtttcataatgagtccctcatcagctctcaggccagctcttatttcattgatgccgctacagtggacgactccggcgagtatcggtgtcagaccaatctgtctacactgtctgaccccgtgcagcttgaggtccacattggatggttgctcttgcaagccccacgctgggttttcaaagaggaagatccaatccatctgcggtgccacagctggaaaaacaccgctctccacaaagtcacatacctgcaaaatggcaaaggacgcaaatacttccatcacaattccgatttttacattccgaaggctaccctgaaagacagcggcagctatttctgccggggactcgtcggctccaagaatgtgtcctccgaaaccgtgaatatcacgattacccaaggactggctgtgcctacaatctctagcttctttccgcctggataccaagtctccttctgtcttgtgatggtcctcctgtttgctgtggacacaggactgtacttttccgtgaaaacgaacatccgcagctccacacgcgattggaaagatcacaagtttaaatggcgcaaagatccccaggacaag

SEQ ID NO: 5026 - DNA, 1533 bp, Artificial Sequence
  Synthetic Polynucleotide
atggccttaccagtgaccgccttgctcctgccgctggccttgctgctccacgccgccaggccgcaggttcagctggttcagtctggggccgaagtgaagaaacctggggcctctgtgaaggtgtcctgcaaggcttccggctacacctttaccagctactacatgcactgggtccgacaggcccctggacaaggacttgagtggatgggcatcatcaaccctagcggcggcagcacaagctacgcccagaaattccagggcagagtgaccatgacacacgacaccagcacctccaccgtgtacatggaactgagcagcctgagaagcgaggacaccgccgtgtactactgcgccagatccttcttcaccggcttccacctggattactggggccagggaacactggtcacagtgtcatctgcatctggcggaggcggaagtggaggcggaggatctggcggcggaggctctgaaattgtgctgacacagagccccggcacactgtcactttctccaggcgaaagagccacactgagctgtagagccagccagagcgtgtccagctcttacctggcttggtatcagcagaagcccggccaggctcctagactgctgatctacggtgccagcagcagagccacaggcatccccgatagattttctggcagcggctccggcaccgacttcaccctgacaatcagcagactggaacccgaggactttgccgtgtattattgccagcagtacaccaacgagcactactacaccttcggccagggcaccaaggtggaaatcaagagaacagtggccgccacgcgtggaatgaggactgaggatcttcccaaagctgtcgtctttctcgaaccccaatggtatcgggtgctcgaaaaagactctgtgacactgaaatgccaaggggcctactctcccgaggacaactccacacagtggtttcataatgagtccctcatcagctctcaggccagctcttatttcattgatgccgctacagtggacgactccggcgagtatcggtgtcagaccaatctgtctacactgtctgaccccgtgcagcttgaggtccacattggatggttgctcttgcaagccccacgctgggttttcaaagaggaagatccaatccatctgcggtgccacagctggaaaaacaccgctctccacaaagtcacatacctgcaaaatggcaaaggacgcaaatacttccatcacaattccgatttttacattccgaaggctaccctgaaagacagcggcagctatttctgccggggactcgtcggctccaagaatgtgtcctccgaaaccgtgaatatcacgattacccaaggactggctgtgcctacaatctctagcttctttccgcctggataccaagtctccttctgtcttgtgatggtcctcctgtttgctgtggacacaggactgtacttttccgtgaaaacgaacatccgcagctccacacgcgattggaaagatcacaagtttaaatggcgcaaagatccccaggacaag

SEQ ID NO: 5027 - DNA, 1551 bp, Artificial Sequence
  Synthetic Polynucleotide
atggccttaccagtgaccgccttgctcctgccgctggccttgctgctccacgccgccaggccggagatcgtgctgacacagtctcccgccacactgtcactgtctccaggcgaaagagccacactgagctgtagcgtgtccagcagcatcagcagcagcaacctgcactggtatcagcagaagcctggacaggcccctcggctgctgatctacggcacatctaatctggcctctggcatccccgccagattttctggctctggaagcggcaccgacttcaccctgaccataagcagcctggaacctgaggacttcgccgtgtactactgccagcagtggtccagctatccccacacatttggcggaggcaccaaggtggaaatcaagagaacagtggctgccggcggaggcggaagtggaggcggaggatctggcggcggaggctctcaggttcagctggttcagagcggagccgaagtgaagaaacctggggcctctgtgaaggtgtcctgcaaggcttccggctacacctttaccaactacctgatcgagtgggtccgacaggctccaggacaaggactggaatggatgggcctgattaaccctggcagcggcggcaccaactacaacgagaagttcaagggcagagtgaccatgaccaccgacaccagcacaagcaccgcctacatggaactgcggagcctgagaagcgacgacaccgccgtgtattattgcgccagaagaagccctctcggctcttggatctactacgcctatgacggcgtggcctattggggccagggaacactggttacagtgtcctctgccagcacgcgtggaatgaggactgaggatcttcccaaagctgtcgtctttctcgaaccccaatggtatcgggtgctcgaaaaagactctgtgacactgaaatgccaaggggcctactctcccgaggacaactccacacagtggtttcataatgagtccctcatcagctctcaggccagctcttatttcattgatgccgctacagtggacgactccggcgagtatcggtgtcagaccaatctgtctacactgtctgaccccgtgcagcttgaggtccacattggatggttgctcttgcaagccccacgctgggttttcaaagaggaagatccaatccatctgcggtgccacagctggaaaaacaccgctctccacaaagtcacatacctgcaaaatggcaaaggacgcaaatacttccatcacaattccgatttttacattccgaaggctaccctgaaagacagcggcagctatttctgccggggactcgtcggctccaagaatgtgtcctccgaaaccgtgaatatcacgattacccaaggactggctgtgcctacaatctctagcttctttccgcctggataccaagtctccttctgtcttgtgatggtcctcctgtttgctgtggacacaggactgtacttttccgtgaaaacgaacatccgcagctccacacgcgattggaaagatcacaagtttaaatggcgcaaagatccccaggacaag

SEQ ID NO: 5028 - DNA, 1506 bp, Artificial Sequence
  Synthetic Polynucleotide
atggccttaccagtgaccgccttgctcctgccgctggccttgctgctccacgccgccaggccggacatccagatgacacagagccctagcagcctgtctgccagcgtgggagacagagtgaccatcacctgtaaagccggccagaacgtgggcacaagcgtggcatggtatcagcagaagcctggcaaggcccctaagctgctgatctacagcgccagctacagatacagcggcgtgcccagcagattttctggcagcggctctggcaccgacttcaccctgacaatatccagcctccagcctgaggacttcgccacctactactgccagcagtacatcacatacccctacaccttcggccagggcaccaaggtggaaatcaagagaacagtggctgccggcggaggcggaagtggaggcggaggatctggcggcggaggctctgaagttcagctggttgaatcaggcggcggactggttcaacctggcggatctctgagactgagctgtgccgccagcggcttcaccttcagcagatactggatgagctgggtccgacaggcccctggcaaaggacttgaatgggtcgccgagatcaaccccgacagcagcaccatccagtacaccccatctctgaaggcccggttcaccctgtccgtggacagaagcaagaacaccctgtacctccagatgaactccctgagagccgaggacaccgccgtgtactattgtgccagacctgcctattggggccagggaacactggtcacagtgtctagcgcttccacgcgtggaatgaggactgaggatcttcccaaagctgtcgtctttctcgaaccccaatggtatcgggtgctcgaaaaagactctgtgacactgaaatgccaaggggcctactctcccgaggacaactccacacagtggtttcataatgagtccctcatcagctctcaggccagctcttatttcattgatgccgctacagtggacgactccggcgagtatcggtgtcagaccaatctgtctacactgtctgaccccgtgcagcttgaggtccacattggatggttgctcttgcaagccccacgctgggttttcaaagaggaagatccaatccatctgcggtgccacagctggaaaaacaccgctctccacaaagtcacatacctgcaaaatggcaaaggacgcaaatacttccatcacaattccgatttttacattccgaaggctaccctgaaagacagcggcagctatttctgccggggactcgtcggctccaagaatgtgtcctccgaaaccgtgaatatcacgattacccaaggactggctgtgcctacaatctctagcttctttccgcctggataccaagtctccttctgtcttgtgatggtcctcctgtttgctgtggacacaggactgtacttttccgtgaaaacgaacatccgcagctccacacgcgattggaaagatcacaagtttaaatggcgcaaagatccccaggacaag

SEQ ID NO: 5029 - DNA, 1527 bp, Artificial Sequence
  Synthetic Polynucleotide
atggccttaccagtgaccgccttgctcctgccgctggccttgctgctccacgccgccaggccggacatccagatgacacagagccctagcagcctgtctgccagcgtgggagacagagtgaccatcacatgtagcgccagccaggacatcggcaactttctgaactggtatcagcagaagcccggcaaggcccctaagctgctgatctactacacctccagcctgtacagcggcgtgcccagcagattttctggcagcggctctggcaccgacttcaccctgacaatatccagcctccagccagaggacttcgccacctactactgccagcagtacagcaagctgcccctgacctttggacagggcaccaagctggaaatcaagagaacagtggctgccggcggaggcggaagtggaggcggaggatctggcggcggaggctctcaagttcagctggttcagtctggggccgaagtgaagaaacctggggcctctgtgaaggtgtcctgcaaggcttccggctacacctttaccggctacaacatccactgggtccgacaggctcccggccaaagacttgaatggatgggcgctatctaccccggcaacggcgataccagctacaagcagaaattccggggcagagtgacaattaccagagacaccagcgccagcaccgcctacatggaactgtctagcctgagaagcgaggacaccgccgtgtactattgcgccagaggcgaaacagccagagccacctttgcctattggggccagggaaccctggtcacagtgtctagtgcttccacgcgtggaatgaggactgaggatcttcccaaagctgtcgtctttctcgaaccccaatggtatcgggtgctcgaaaaagactctgtgacactgaaatgccaaggggcctactctcccgaggacaactccacacagtggtttcataatgagtccctcatcagctctcaggccagctcttatttcattgatgccgctacagtggacgactccggcgagtatcggtgtcagaccaatctgtctacactgtctgaccccgtgcagcttgaggtccacattggatggttgctcttgcaagccccacgctgggttttcaaagaggaagatccaatccatctgcggtgccacagctggaaaaacaccgctctccacaaagtcacatacctgcaaaatggcaaaggacgcaaatacttccatcacaattccgatttttacattccgaaggctaccctgaaagacagcggcagctatttctgccggggactcgtcggctccaagaatgtgtcctccgaaaccgtgaatatcacgattacccaaggactggctgtgcctacaatctctagcttctttccgcctggataccaagtctccttctgtcttgtgatggtcctcctgtttgctgtggacacaggactgtacttttccgtgaaaacgaacatccgcagctccacacgcgattggaaagatcacaagtttaaatggcgcaaagatccccaggacaag

SEQ ID NO: 5030 - DNA, 1119 bp, Artificial Sequence
  Synthetic Polynucleotide
atggccttaccagtgaccgccttgctcctgccgctggccttgctgctccacgccgccaggccggatgtgcaagtgacacagagccctagcagcctgtctgcctctgtgggcgacagagtgacaatcacctgtcggagcagccagagcctggctaactcctacggcaataccttcctgagctggtatctgcacaagcccggaaaggctccccagctgctgatctacggcatcagcaacagattcagcggcgtgcccgataggtttagcggctctggaagcggcaccgacttcaccctgacaatatccagcctccagcctgaggactttgccacctactactgtctgcaaggcacccaccagccttacacattcggacagggcaccaaggtggaaatcaagacgcgtggaatgaggactgaggatcttcccaaagctgtcgtctttctcgaaccccaatggtatcgggtgctcgaaaaagactctgtgacactgaaatgccaaggggcctactctcccgaggacaactccacacagtggtttcataatgagtccctcatcagctctcaggccagctcttatttcattgatgccgctacagtggacgactccggcgagtatcggtgtcagaccaatctgtctacactgtctgaccccgtgcagcttgaggtccacattggatggttgctcttgcaagccccacgctgggttttcaaagaggaagatccaatccatctgcggtgccacagctggaaaaacaccgctctccacaaagtcacatacctgcaaaatggcaaaggacgcaaatacttccatcacaattccgatttttacattccgaaggctaccctgaaagacagcggcagctatttctgccggggactcgtcggctccaagaatgtgtcctccgaaaccgtgaatatcacgattacccaaggactggctgtgcctacaatctctagcttctttccgcctggataccaagtctccttctgtcttgtgatggtcctcctgtttgctgtggacacaggactgtacttttccgtgaaaacgaacatccgcagctccacacgcgattggaaagatcacaagtttaaatggcgcaaagatccccaggacaag

SEQ ID NO: 5031 - DNA, 1104 bp, Artificial Sequence
  Synthetic Polynucleotide
atggccttaccagtgaccgccttgctcctgccgctggccttgctgctccacgccgccaggccggacatccagatgacacagagccctagcagcctgtctgccagcgtgggagacagagtgaccatcacctgtagagccagccaggacatcagcaactacctgaactggtatcagcagaaacccggcaaggccgtgaagctgctgatctactacaccagcatcctgcacagcggcgtgcccagcagattttctggctctggcagcggcaccgactacaccctgacaatatctagcctccagcctgaggacttcgctacctacttctgccagcaaggcaacaccctgccttggacatttggcggaggcaccaaggtggaaatcaaaacgcgtggaatgaggactgaggatcttcccaaagctgtcgtctttctcgaaccccaatggtatcgggtgctcgaaaaagactctgtgacactgaaatgccaaggggcctactctcccgaggacaactccacacagtggtttcataatgagtccctcatcagctctcaggccagctcttatttcattgatgccgctacagtggacgactccggcgagtatcggtgtcagaccaatctgtctacactgtctgaccccgtgcagcttgaggtccacattggatggttgctcttgcaagccccacgctgggttttcaaagaggaagatccaatccatctgcggtgccacagctggaaaaacaccgctctccacaaagtcacatacctgcaaaatggcaaaggacgcaaatacttccatcacaattccgatttttacattccgaaggctaccctgaaagacagcggcagctatttctgccggggactcgtcggctccaagaatgtgtcctccgaaaccgtgaatatcacgattacccaaggactggctgtgcctacaatctctagcttctttccgcctggataccaagtctccttctgtcttgtgatggtcctcctgtttgctgtggacacaggactgtacttttccgtgaaaacgaacatccgcagctccacacgcgattggaaagatcacaagtttaaatggcgcaaagatccccaggacaag

SEQ ID NO: 5032 - DNA, 1107 bp, Artificial Sequence
  Synthetic Polynucleotide
atggccttaccagtgaccgccttgctcctgccgctggccttgctgctccacgccgccaggccggacatcgtgatgacccagagccagcggttcatgaccacaagcgtgggcgatagagtgtccgtgacatgcaaggccagccagagcgtggactctaacgtggcctggtatcagcagaagcccagacagagccccaaggctctgatctttagcgccagcctgagattcagcggagtgcccgctagattcacaggcagcggctctggcaccgatttcaccctgaccatcagcaacctccagagcgaggacctggccgagtatttctgccagcagtacaacaactaccctctgaccttcggagccggcaccaagctggaactgaagagaacgcgtggaatgaggactgaggatcttcccaaagctgtcgtctttctcgaaccccaatggtatcgggtgctcgaaaaagactctgtgacactgaaatgccaaggggcctactctcccgaggacaactccacacagtggtttcataatgagtccctcatcagctctcaggccagctcttatttcattgatgccgctacagtggacgactccggcgagtatcggtgtcagaccaatctgtctacactgtctgaccccgtgcagcttgaggtccacattggatggttgctcttgcaagccccacgctgggttttcaaagaggaagatccaatccatctgcggtgccacagctggaaaaacaccgctctccacaaagtcacatacctgcaaaatggcaaaggacgcaaatacttccatcacaattccgatttttacattccgaaggctaccctgaaagacagcggcagctatttctgccggggactcgtcggctccaagaatgtgtcctccgaaaccgtgaatatcacgattacccaaggactggctgtgcctacaatctctagcttctttccgcctggataccaagtctccttctgtcttgtgatggtcctcctgtttgctgtggacacaggactgtacttttccgtgaaaacgaacatccgcagctccacacgcgattggaaagatcacaagtttaaatggcgcaaagatccccaggacaag

SEQ ID NO: 5033 - DNA, 1107 bp, Artificial Sequence
  Synthetic Polynucleotide
atggccttaccagtgaccgccttgctcctgccgctggccttgctgctccacgccgccaggccggacatccagatgacacagagccctagcagcctgtctgccagcgtgggagacagagtgaccatcacctgtagagccagccaggacatcagcaactacctgaactggtatcagcagaagcccggcaaggcccctaagctgctgatctactacaccagcatcctgcacagcggcgtgcccagcagattttctggctctggcagcggcaccgacttcaccctgacaatatctagcctccagcctgaggacttcgccacctactattgccagcagggcaacaccctgccttggacctttggacagggcaccaaggtggaaatcaagagaacgcgtggaatgaggactgaggatcttcccaaagctgtcgtctttctcgaaccccaatggtatcgggtgctcgaaaaagactctgtgacactgaaatgccaaggggcctactctcccgaggacaactccacacagtggtttcataatgagtccctcatcagctctcaggccagctcttatttcattgatgccgctacagtggacgactccggcgagtatcggtgtcagaccaatctgtctacactgtctgaccccgtgcagcttgaggtccacattggatggttgctcttgcaagccccacgctgggttttcaaagaggaagatccaatccatctgcggtgccacagctggaaaaacaccgctctccacaaagtcacatacctgcaaaatggcaaaggacgcaaatacttccatcacaattccgatttttacattccgaaggctaccctgaaagacagcggcagctatttctgccggggactcgtcggctccaagaatgtgtcctccgaaaccgtgaatatcacgattacccaaggactggctgtgcctacaatctctagcttctttccgcctggataccaagtctccttctgtcttgtgatggtcctcctgtttgctgtggacacaggactgtacttttccgtgaaaacgaacatccgcagctccacacgcgattggaaagatcacaagtttaaatggcgcaaagatccccaggacaag

SEQ ID NO: 5034 - DNA, 1107 bp, Artificial Sequence
  Synthetic Polynucleotide
atggccttaccagtgaccgccttgctcctgccgctggccttgctgctccacgccgccaggccggacatccagatgacacagagccctagcagcctgtctgccagcgtgggagacagagtgaccatcacatgcaaggccagcgaccacatcaacaactggctggcctggtatcagcagaagcctggcaaggcccctaagctgctgatctacggcgctaccacactggaaacaggcgtgcccagcagattttctggcagcggctctggcaccgacttcaccctgacaatatccagcctccagcctgaggacttcgccacctactactgtcagcagagctggaacaccccttggacattcggccagggcaccaaggtggaaatcaagagaacgcgtggaatgaggactgaggatcttcccaaagctgtcgtctttctcgaaccccaatggtatcgggtgctcgaaaaagactctgtgacactgaaatgccaaggggcctactctcccgaggacaactccacacagtggtttcataatgagtccctcatcagctctcaggccagctcttatttcattgatgccgctacagtggacgactccggcgagtatcggtgtcagaccaatctgtctacactgtctgaccccgtgcagcttgaggtccacattggatggttgctcttgcaagccccacgctgggttttcaaagaggaagatccaatccatctgcggtgccacagctggaaaaacaccgctctccacaaagtcacatacctgcaaaatggcaaaggacgcaaatacttccatcacaattccgatttttacattccgaaggctaccctgaaagacagcggcagctatttctgccggggactcgtcggctccaagaatgtgtcctccgaaaccgtgaatatcacgattacccaaggactggctgtgcctacaatctctagcttctttccgcctggataccaagtctccttctgtcttgtgatggtcctcctgtttgctgtggacacaggactgtacttttccgtgaaaacgaacatccgcagctccacacgcgattggaaagatcacaagtttaaatggcgcaaagatccccaggacaag

SEQ ID NO: 5035 - DNA, 1107 bp, Artificial Sequence
  Synthetic Polynucleotide
atggccttaccagtgaccgccttgctcctgccgctggccttgctgctccacgccgccaggccgagctacgtgctgacacagcctccatccgtgtctgtggctccaggacagaccgccagaatcacatgcggcggcaacaacatcggcagcaagagcgtgcactggtatcagcagccacctggacaggctccagtggtggtggtgtacgacgacagcgatagacctagcggcatccccgagagattcagcggcagcaattccggcaataccgccacactgaccatcagcagagtggaagctggcgacgaggccgtgtactactgccaagtgtgggacagcagcagcgatcacgtggtgtttggcggcggaacaaagctgacagtgcttacgcgtggaatgaggactgaggatcttcccaaagctgtcgtctttctcgaaccccaatggtatcgggtgctcgaaaaagactctgtgacactgaaatgccaaggggcctactctcccgaggacaactccacacagtggtttcataatgagtccctcatcagctctcaggccagctcttatttcattgatgccgctacagtggacgactccggcgagtatcggtgtcagaccaatctgtctacactgtctgaccccgtgcagcttgaggtccacattggatggttgctcttgcaagccccacgctgggttttcaaagaggaagatccaatccatctgcggtgccacagctggaaaaacaccgctctccacaaagtcacatacctgcaaaatggcaaaggacgcaaatacttccatcacaattccgatttttacattccgaaggctaccctgaaagacagcggcagctatttctgccggggactcgtcggctccaagaatgtgtcctccgaaaccgtgaatatcacgattacccaaggactggctgtgcctacaatctctagcttctttccgcctggataccaagtctccttctgtcttgtgatggtcctcctgtttgctgtggacacaggactgtacttttccgtgaaaacgaacatccgcagctccacacgcgattggaaagatcacaagtttaaatggcgcaaagatccccaggacaag

SEQ ID NO: 5036 - DNA, 1107 bp, Artificial Sequence
  Synthetic Polynucleotide
atggccttaccagtgaccgccttgctcctgccgctggccttgctgctccacgccgccaggccggacatccagatgacacagagccctagcagcctgtctgccagcgtgggagacagagtgaccatcacctgtatggcctccgaggacatctacatccggctggcctggtatcagcagaagcctggaaaggcccctaagctgctgatctacgccgccacctctctggaaacaggcgtgccaagcagattttccggcagcggctctggcaccgatttcaccctgaccataagcagcctgcagcctgaggacttcgccacctactactgccagcagtattggagcagcccctggacctttggacagggcaccaaggtggaaatcaagagaacgcgtggaatgaggactgaggatcttcccaaagctgtcgtctttctcgaaccccaatggtatcgggtgctcgaaaaagactctgtgacactgaaatgccaaggggcctactctcccgaggacaactccacacagtggtttcataatgagtccctcatcagctctcaggccagctcttatttcattgatgccgctacagtggacgactccggcgagtatcggtgtcagaccaatctgtctacactgtctgaccccgtgcagcttgaggtccacattggatggttgctcttgcaagccccacgctgggttttcaaagaggaagatccaatccatctgcggtgccacagctggaaaaacaccgctctccacaaagtcacatacctgcaaaatggcaaaggacgcaaatacttccatcacaattccgatttttacattccgaaggctaccctgaaagacagcggcagctatttctgccggggactcgtcggctccaagaatgtgtcctccgaaaccgtgaatatcacgattacccaaggactggctgtgcctacaatctctagcttctttccgcctggataccaagtctccttctgtcttgtgatggtcctcctgtttgctgtggacacaggactgtacttttccgtgaaaacgaacatccgcagctccacacgcgattggaaagatcacaagtttaaatggcgcaaagatccccaggacaag

SEQ ID NO: 5037 - DNA, 1119 bp, Artificial Sequence
  Synthetic Polynucleotide
atggccttaccagtgaccgccttgctcctgccgctggccttgctgctccacgccgccaggccggacatccagatgacacagagccctagcagcgtgtccgcctctgtgggagacagagtgaccatcacctgtagagccagcgagagcgtggacaactacggcatcagcttcatgaactggtatcagcagaagcccggcaaggcccctaagctgctgattagcgccgccagcaatagagccacaggcgtgccaagcagattttccggctctggcagcggcaccgatttcaccctgacaatatccagcctccagcctgaggacttcgccatctactactgccagcagagcaaagaggtgccctggacctttggacagggcaccaaggtggaaatcaagagaacgcgtggaatgaggactgaggatcttcccaaagctgtcgtctttctcgaaccccaatggtatcgggtgctcgaaaaagactctgtgacactgaaatgccaaggggcctactctcccgaggacaactccacacagtggtttcataatgagtccctcatcagctctcaggccagctcttatttcattgatgccgctacagtggacgactccggcgagtatcggtgtcagaccaatctgtctacactgtctgaccccgtgcagcttgaggtccacattggatggttgctcttgcaagccccacgctgggttttcaaagaggaagatccaatccatctgcggtgccacagctggaaaaacaccgctctccacaaagtcacatacctgcaaaatggcaaaggacgcaaatacttccatcacaattccgatttttacattccgaaggctaccctgaaagacagcggcagctatttctgccggggactcgtcggctccaagaatgtgtcctccgaaaccgtgaatatcacgattacccaaggactggctgtgcctacaatctctagcttctttccgcctggataccaagtctccttctgtcttgtgatggtcctcctgtttgctgtggacacaggactgtacttttccgtgaaaacgaacatccgcagctccacacgcgattggaaagatcacaagtttaaatggcgcaaagatccccaggacaag

SEQ ID NO: 5038 - DNA, 1119 bp, Artificial Sequence
  Synthetic Polynucleotide
atggccttaccagtgaccgccttgctcctgccgctggccttgctgctccacgccgccaggccggacatccagctgacacagagcccttctagcctgtctgccagcgtgggcgacagagtgaccatcacatgtagagccagcaagagcgtgtccaccagcggctacagctacatgcactggtatcagcagaagcccggcaaggcccctaagctgctgatctacctggtgtccaacctggaaagcggcgtgcccagcagattttctggcagcggctctggcaccgacttcaccctgacaatatccagcctccagcctgaggacttcgccacctactactgccagcagttcagcgagctgccttggacctttggacagggcaccaaggtggaaatcaagagaacgcgtggaatgaggactgaggatcttcccaaagctgtcgtctttctcgaaccccaatggtatcgggtgctcgaaaaagactctgtgacactgaaatgccaaggggcctactctcccgaggacaactccacacagtggtttcataatgagtccctcatcagctctcaggccagctcttatttcattgatgccgctacagtggacgactccggcgagtatcggtgtcagaccaatctgtctacactgtctgaccccgtgcagcttgaggtccacattggatggttgctcttgcaagccccacgctgggttttcaaagaggaagatccaatccatctgcggtgccacagctggaaaaacaccgctctccacaaagtcacatacctgcaaaatggcaaaggacgcaaatacttccatcacaattccgatttttacattccgaaggctaccctgaaagacagcggcagctatttctgccggggactcgtcggctccaagaatgtgtcctccgaaaccgtgaatatcacgattacccaaggactggctgtgcctacaatctctagcttctttccgcctggataccaagtctccttctgtcttgtgatggtcctcctgtttgctgtggacacaggactgtacttttccgtgaaaacgaacatccgcagctccacacgcgattggaaagatcacaagtttaaatggcgcaaagatccccaggacaag

SEQ ID NO: 5039 - DNA, 1110 bp, Artificial Sequence
  Synthetic Polynucleotide
atggccttaccagtgaccgccttgctcctgccgctggccttgctgctccacgccgccaggccggacatccagatgacacagagccctagcagcgtgtccgcctctgtgggagacagagtgaccatcacctgtcgggccagccagttcatcagcagcagctacctgagctggtatcagcagaagcctggcaaggcccctaagctgctgatctctggcagctctagcagagccacaggcgtgccaagcagattttctggcagcggctctggcaccgacttcaccctgacaatatccagcctccagcctgaggacttcgccatctactactgccagcagctgtactctagccccatgacattcggccagggcaccaaggtggaaatcaagagaacgcgtggaatgaggactgaggatcttcccaaagctgtcgtctttctcgaaccccaatggtatcgggtgctcgaaaaagactctgtgacactgaaatgccaaggggcctactctcccgaggacaactccacacagtggtttcataatgagtccctcatcagctctcaggccagctcttatttcattgatgccgctacagtggacgactccggcgagtatcggtgtcagaccaatctgtctacactgtctgaccccgtgcagcttgaggtccacattggatggttgctcttgcaagccccacgctgggttttcaaagaggaagatccaatccatctgcggtgccacagctggaaaaacaccgctctccacaaagtcacatacctgcaaaatggcaaaggacgcaaatacttccatcacaattccgatttttacattccgaaggctaccctgaaagacagcggcagctatttctgccggggactcgtcggctccaagaatgtgtcctccgaaaccgtgaatatcacgattacccaaggactggctgtgcctacaatctctagcttctttccgcctggataccaagtctccttctgtcttgtgatggtcctcctgtttgctgtggacacaggactgtacttttccgtgaaaacgaacatccgcagctccacacgcgattggaaagatcacaagtttaaatggcgcaaagatccccaggacaag

SEQ ID NO: 5040 - DNA, 1152 bp, Artificial Sequence
  Synthetic Polynucleotide
atggccttaccagtgaccgccttgctcctgccgctggccttgctgctccacgccgccaggccgcaggtccagctcgtcgagtccggcggcggcctcgtccaggccggcgactccgtcaccctctcctgcaccgcctccggccgcaccttctcctcctacgccctcgcctggttccgccagcgccccggcaaggagcgcgagttcgtcgccggcctccgctggggcggccccaccaactacgccgactccgtcaaggaccgcttcaccatctccggcgactccgccaagcacaccatgtacctccagatgaactccctcaagcccgaggacaccgccgtctactactgcggctacaaccccggcggctgggccgtcccctcccagtacgagtacgactcctggggccagggcacccaggtcaccgtctcctccacgcgtggaatgaggactgaggatcttcccaaagctgtcgtctttctcgaaccccaatggtatcgggtgctcgaaaaagactctgtgacactgaaatgccaaggggcctactctcccgaggacaactccacacagtggtttcataatgagtccctcatcagctctcaggccagctcttatttcattgatgccgctacagtggacgactccggcgagtatcggtgtcagaccaatctgtctacactgtctgaccccgtgcagcttgaggtccacattggatggttgctcttgcaagccccacgctgggttttcaaagaggaagatccaatccatctgcggtgccacagctggaaaaacaccgctctccacaaagtcacatacctgcaaaatggcaaaggacgcaaatacttccatcacaattccgatttttacattccgaaggctaccctgaaagacagcggcagctatttctgccggggactcgtcggctccaagaatgtgtcctccgaaaccgtgaatatcacgattacccaaggactggctgtgcctacaatctctagcttctttccgcctggataccaagtctccttctgtcttgtgatggtcctcctgtttgctgtggacacaggactgtacttttccgtgaaaacgaacatccgcagctccacacgcgattggaaagatcacaagtttaaatggcgcaaagatccccaggacaag

SEQ ID NO: 5041 - DNA, 1137 bp, Artificial Sequence
  Synthetic Polynucleotide
atggccttaccagtgaccgccttgctcctgccgctggccttgctgctccacgccgccaggccgcaggttcagctgcaagagtctggcggaggacttgctcaagctggcggaagcctgagactgtcttgtgccgcctctggcagaaccttcagcatgggctggtttagacaggcccctggcaaagagagagagttcgtcgccgccatcacatacagcggcggcagcccttactacgcctcttctgtcagaggccggttcaccatcagccgggacaacgccaagaacaccgtgtacctccagatgaacagcctgaagccagaggacaccgccgtgtactactgtgccgccaatccaacctacggcagcgactggaatgccgagaattggggccagggcacccaagtgacagtgtctagtacgcgtggaatgaggactgaggatcttcccaaagctgtcgtctttctcgaaccccaatggtatcgggtgctcgaaaaagactctgtgacactgaaatgccaaggggcctactctcccgaggacaactccacacagtggtttcataatgagtccctcatcagctctcaggccagctcttatttcattgatgccgctacagtggacgactccggcgagtatcggtgtcagaccaatctgtctacactgtctgaccccgtgcagcttgaggtccacattggatggttgctcttgcaagccccacgctgggttttcaaagaggaagatccaatccatctgcggtgccacagctggaaaaacaccgctctccacaaagtcacatacctgcaaaatggcaaaggacgcaaatacttccatcacaattccgatttttacattccgaaggctaccctgaaagacagcggcagctatttctgccggggactcgtcggctccaagaatgtgtcctccgaaaccgtgaatatcacgattacccaaggactggctgtgcctacaatctctagcttctttccgcctggataccaagtctccttctgtcttgtgatggtcctcctgtttgctgtggacacaggactgtacttttccgtgaaaacgaacatccgcagctccacacgcgattggaaagatcacaagtttaaatggcgcaaagatccccaggacaag

SEQ ID NO: 5042 - DNA, 1131 bp, Artificial Sequence
  Synthetic Polynucleotide
atggccttaccagtgaccgccttgctcctgccgctggccttgctgctccacgccgccaggccggaagtgcagctggttgaatctggcggaggactggttcagcctggcggatctctgagactgtcttgtgccgccagcggcttcagcttcagcgacttttggatgagctgggtccgacaggcccctggcaaaggacttgaatgggtcgccacaatcagccaggccggcagcgagaaggactacgtggactctgtgaagggcagattcaccatcagccgggacaacgccaagaagtccctgtacctccagatgaacagcctgagagccgaggacaccgccgtgtactattgtgcctctggcgtgtacagcttcgactacagaggccagggcaccctggtcacagtctcttctacgcgtggaatgaggactgaggatcttcccaaagctgtcgtctttctcgaaccccaatggtatcgggtgctcgaaaaagactctgtgacactgaaatgccaaggggcctactctcccgaggacaactccacacagtggtttcataatgagtccctcatcagctctcaggccagctcttatttcattgatgccgctacagtggacgactccggcgagtatcggtgtcagaccaatctgtctacactgtctgaccccgtgcagcttgaggtccacattggatggttgctcttgcaagccccacgctgggttttcaaagaggaagatccaatccatctgcggtgccacagctggaaaaacaccgctctccacaaagtcacatacctgcaaaatggcaaaggacgcaaatacttccatcacaattccgatttttacattccgaaggctaccctgaaagacagcggcagctatttctgccggggactcgtcggctccaagaatgtgtcctccgaaaccgtgaatatcacgattacccaaggactggctgtgcctacaatctctagcttctttccgcctggataccaagtctccttctgtcttgtgatggtcctcctgtttgctgtggacacaggactgtacttttccgtgaaaacgaacatccgcagctccacacgcgattggaaagatcacaagtttaaatggcgcaaagatccccaggacaag

SEQ ID NO: 5043 - DNA, 1131 bp, Artificial Sequence
  Synthetic Polynucleotide
atggccttaccagtgaccgccttgctcctgccgctggccttgctgctccacgccgccaggccggaagtgcagctggttgaatctggcggaggactggttcagcctggcggatctctgagactgtcttgtgccgccagcggcttcaccttcagcaactactggatgagctgggtccgacaggcccctggaaagggacaagaatgggtcgccaccatcaaccaggacggcagcgacaaggattacgtggacagcgtgaagggcagattcaccatcagccgggacaacgccaagaagtccctgtacctccagatgaacagcctgagagccgaggacaccgccgtgtactattgtgcctctggcgtgtacagcttcgactacagaggccagggcaccctggtcacagtctcttctacgcgtggaatgaggactgaggatcttcccaaagctgtcgtctttctcgaaccccaatggtatcgggtgctcgaaaaagactctgtgacactgaaatgccaaggggcctactctcccgaggacaactccacacagtggtttcataatgagtccctcatcagctctcaggccagctcttatttcattgatgccgctacagtggacgactccggcgagtatcggtgtcagaccaatctgtctacactgtctgaccccgtgcagcttgaggtccacattggatggttgctcttgcaagccccacgctgggttttcaaagaggaagatccaatccatctgcggtgccacagctggaaaaacaccgctctccacaaagtcacatacctgcaaaatggcaaaggacgcaaatacttccatcacaattccgatttttacattccgaaggctaccctgaaagacagcggcagctatttctgccggggactcgtcggctccaagaatgtgtcctccgaaaccgtgaatatcacgattacccaaggactggctgtgcctacaatctctagcttctttccgcctggataccaagtctccttctgtcttgtgatggtcctcctgtttgctgtggacacaggactgtacttttccgtgaaaacgaacatccgcagctccacacgcgattggaaagatcacaagtttaaatggcgcaaagatccccaggacaag

SEQ ID NO: 5044 - DNA, 1131 bp, Artificial Sequence
  Synthetic Polynucleotide
atggccttaccagtgaccgccttgctcctgccgctggccttgctgctccacgccgccaggccggaagtgcagctggttgaatctggcggaggactggttcagcctggcggatctctgagactgtcttgtgccgccagcggcatcgacttcagcagatactggatgagctgggtccgacaggcccctggcaaaggacttgaatgggtcgccacaatcagccaggccggcagcgagaaggactacgtggactctgtgaagggcagattcaccatcagccgggacaacgccaagaagtccctgtacctccagatgaacagcctgagagccgaggacaccgccgtgtactattgtgcctctggcgtgtacagcttcgactacagaggccagggcaccctggtcacagtctcttctacgcgtggaatgaggactgaggatcttcccaaagctgtcgtctttctcgaaccccaatggtatcgggtgctcgaaaaagactctgtgacactgaaatgccaaggggcctactctcccgaggacaactccacacagtggtttcataatgagtccctcatcagctctcaggccagctcttatttcattgatgccgctacagtggacgactccggcgagtatcggtgtcagaccaatctgtctacactgtctgaccccgtgcagcttgaggtccacattggatggttgctcttgcaagccccacgctgggttttcaaagaggaagatccaatccatctgcggtgccacagctggaaaaacaccgctctccacaaagtcacatacctgcaaaatggcaaaggacgcaaatacttccatcacaattccgatttttacattccgaaggctaccctgaaagacagcggcagctatttctgccggggactcgtcggctccaagaatgtgtcctccgaaaccgtgaatatcacgattacccaaggactggctgtgcctacaatctctagcttctttccgcctggataccaagtctccttctgtcttgtgatggtcctcctgtttgctgtggacacaggactgtacttttccgtgaaaacgaacatccgcagctccacacgcgattggaaagatcacaagtttaaatggcgcaaagatccccaggacaag

SEQ ID NO: 5045 - DNA, 1131 bp, Artificial Sequence
  Synthetic Polynucleotide
atggccttaccagtgaccgccttgctcctgccgctggccttgctgctccacgccgccaggccggaagtgcagctggttgaatctggcggaggactggttcagcctggcggatctctgagactgtcttgtgccgccagcggcatcgacttcagcagatactggatgagctgggtccgacaggcccctggaaagggacaagaatgggtcgccaccatcaaccaggacggcagcgacaaggattacgtggacagcgtgaagggcagattcaccatcagccgggacaacgccaagaagtccctgtacctccagatgaacagcctgagagccgaggacaccgccgtgtactattgtgcctctggcgtgtacagcttcgactacagaggccagggcaccctggtcacagtctcttctacgcgtggaatgaggactgaggatcttcccaaagctgtcgtctttctcgaaccccaatggtatcgggtgctcgaaaaagactctgtgacactgaaatgccaaggggcctactctcccgaggacaactccacacagtggtttcataatgagtccctcatcagctctcaggccagctcttatttcattgatgccgctacagtggacgactccggcgagtatcggtgtcagaccaatctgtctacactgtctgaccccgtgcagcttgaggtccacattggatggttgctcttgcaagccccacgctgggttttcaaagaggaagatccaatccatctgcggtgccacagctggaaaaacaccgctctccacaaagtcacatacctgcaaaatggcaaaggacgcaaatacttccatcacaattccgatttttacattccgaaggctaccctgaaagacagcggcagctatttctgccggggactcgtcggctccaagaatgtgtcctccgaaaccgtgaatatcacgattacccaaggactggctgtgcctacaatctctagcttctttccgcctggataccaagtctccttctgtcttgtgatggtcctcctgtttgctgtggacacaggactgtacttttccgtgaaaacgaacatccgcagctccacacgcgattggaaagatcacaagtttaaatggcgcaaagatccccaggacaag

SEQ ID NO: 5046 - DNA, 1143 bp, Artificial Sequence
  Synthetic Polynucleotide
atggccttaccagtgaccgccttgctcctgccgctggccttgctgctccacgccgccaggccggaggtgcagctggttgaatctggcggaggactggttcagcctggcggatctctgagactgtcctgcacattttccggcggcaccttcagcagctacacaatgggctggttcagacaggcccctggcaaagaacgggaatttgtggccgaagtccgatggggcggagtgaccacatacagcaacagcctgaaggacagattcagcatcagcgaggacagcgtgaagaacgccgtgtacctccagatgaactccctgaagcctgaggacacagccgtgtactattgtgccgctgtgcggcagatgtacatgaccgtggtgcctgattattggggccagggcacactggtcacagtgtctagcacgcgtggaatgaggactgaggatcttcccaaagctgtcgtctttctcgaaccccaatggtatcgggtgctcgaaaaagactctgtgacactgaaatgccaaggggcctactctcccgaggacaactccacacagtggtttcataatgagtccctcatcagctctcaggccagctcttatttcattgatgccgctacagtggacgactccggcgagtatcggtgtcagaccaatctgtctacactgtctgaccccgtgcagcttgaggtccacattggatggttgctcttgcaagccccacgctgggttttcaaagaggaagatccaatccatctgcggtgccacagctggaaaaacaccgctctccacaaagtcacatacctgcaaaatggcaaaggacgcaaatacttccatcacaattccgatttttacattccgaaggctaccctgaaagacagcggcagctatttctgccggggactcgtcggctccaagaatgtgtcctccgaaaccgtgaatatcacgattacccaaggactggctgtgcctacaatctctagcttctttccgcctggataccaagtctccttctgtcttgtgatggtcctcctgtttgctgtggacacaggactgtacttttccgtgaaaacgaacatccgcagctccacacgcgattggaaagatcacaagtttaaatggcgcaaagatccccaggacaag

SEQ ID NO: 5047 - DNA, 1137 bp, Artificial Sequence
  Synthetic Polynucleotide
atggccttaccagtgaccgccttgctcctgccgctggccttgctgctccacgccgccaggccggaagtgcagctggttgaatctggcggaggactggttcaggctggcggatctctgagactgtcttgtgccgccagcggcagaacctttagcatgggctggtttagacaggcccctggcaaagagagagagttcgtcgccgccatcacatactctggcggcagcccttactacgccgactctgtgaagggcagattcaccatcagccgggacaacgccaagaacaccgtgtacctccagatgaacagcctgaagcctgaggacaccgccgtgtactactgcgccgccaatccaacatacggcagcgactggaacgccgagaattggggccagggaacccaagtgacagtgtctagcacgcgtggaatgaggactgaggatcttcccaaagctgtcgtctttctcgaaccccaatggtatcgggtgctcgaaaaagactctgtgacactgaaatgccaaggggcctactctcccgaggacaactccacacagtggtttcataatgagtccctcatcagctctcaggccagctcttatttcattgatgccgctacagtggacgactccggcgagtatcggtgtcagaccaatctgtctacactgtctgaccccgtgcagcttgaggtccacattggatggttgctcttgcaagccccacgctgggttttcaaagaggaagatccaatccatctgcggtgccacagctggaaaaacaccgctctccacaaagtcacatacctgcaaaatggcaaaggacgcaaatacttccatcacaattccgatttttacattccgaaggctaccctgaaagacagcggcagctatttctgccggggactcgtcggctccaagaatgtgtcctccgaaaccgtgaatatcacgattacccaaggactggctgtgcctacaatctctagcttctttccgcctggataccaagtctccttctgtcttgtgatggtcctcctgtttgctgtggacacaggactgtacttttccgtgaaaacgaacatccgcagctccacacgcgattggaaagatcacaagtttaaatggcgcaaagatccccaggacaag

SEQ ID NO: 5048 - DNA, 1137 bp, Artificial Sequence
  Synthetic Polynucleotide
atggccttaccagtgaccgccttgctcctgccgctggccttgctgctccacgccgccaggccgcagctccagttgcaagagagcggccctggcttggtaaaaccttccgagacccttagcctcacatgcacggttagtgggggcagcatttcctcaggtgattactattggggatggattcggcaacccccgggtaaaggattggagtggattggtcatatttattatagtggagcgacgtactacaacccaagtctcaaatccagggttacaatatccgtcgatacgagcaggaaccaattcagcttgaaactttctagtgtcaccgcagcagacacagccgtctattactgtacgcgggatgactccagtaattggcggtcccgagggcaagggacactggtcacggtctcctcaacgcgtggaatgaggactgaggatcttcccaaagctgtcgtctttctcgaaccccaatggtatcgggtgctcgaaaaagactctgtgacactgaaatgccaaggggcctactctcccgaggacaactccacacagtggtttcataatgagtccctcatcagctctcaggccagctcttatttcattgatgccgctacagtggacgactccggcgagtatcggtgtcagaccaatctgtctacactgtctgaccccgtgcagcttgaggtccacattggatggttgctcttgcaagccccacgctgggttttcaaagaggaagatccaatccatctgcggtgccacagctggaaaaacaccgctctccacaaagtcacatacctgcaaaatggcaaaggacgcaaatacttccatcacaattccgatttttacattccgaaggctaccctgaaagacagcggcagctatttctgccggggactcgtcggctccaagaatgtgtcctccgaaaccgtgaatatcacgattacccaaggactggctgtgcctacaatctctagcttctttccgcctggataccaagtctccttctgtcttgtgatggtcctcctgtttgctgtggacacaggactgtacttttccgtgaaaacgaacatccgcagctccacacgcgattggaaagatcacaagtttaaatggcgcaaagatccccaggacaag

SEQ ID NO: 5049 - DNA, 1137 bp, Artificial Sequence
  Synthetic Polynucleotide
atggccttaccagtgaccgccttgctcctgccgctggccttgctgctccacgccgccaggccgcagctccagctgcaagagtctggacctggcctggtcaagcctagcgagacactgagcctgacctgtaccgtgtccggcgatagcatcagcagcggcgattactactggggctggatcagacagcctcctggcaaaggactggaatggatcggccacatctactacagcggcgtgacctactacaaccccagcctgaagtccagagtgaccatcagcgtggacaccagccggaaccagttctccctgaagctgtctagcgtgacagccgccgataccgccgtgtactactgcaccagagaggacagcagcaactggcggagtagaggccagggaacactggtcacagttagctctacgcgtggaatgaggactgaggatcttcccaaagctgtcgtctttctcgaaccccaatggtatcgggtgctcgaaaaagactctgtgacactgaaatgccaaggggcctactctcccgaggacaactccacacagtggtttcataatgagtccctcatcagctctcaggccagctcttatttcattgatgccgctacagtggacgactccggcgagtatcggtgtcagaccaatctgtctacactgtctgaccccgtgcagcttgaggtccacattggatggttgctcttgcaagccccacgctgggttttcaaagaggaagatccaatccatctgcggtgccacagctggaaaaacaccgctctccacaaagtcacatacctgcaaaatggcaaaggacgcaaatacttccatcacaattccgatttttacattccgaaggctaccctgaaagacagcggcagctatttctgccggggactcgtcggctccaagaatgtgtcctccgaaaccgtgaatatcacgattacccaaggactggctgtgcctacaatctctagcttctttccgcctggataccaagtctccttctgtcttgtgatggtcctcctgtttgctgtggacacaggactgtacttttccgtgaaaacgaacatccgcagctccacacgcgattggaaagatcacaagtttaaatggcgcaaagatccccaggacaag

SEQ ID NO: 5050 - DNA, 1137 bp, Artificial Sequence
  Synthetic Polynucleotide
atggccttaccagtgaccgccttgctcctgccgctggccttgctgctccacgccgccaggccgcaactgcaactgcaagagtctggccctggcctggtcaagccttctgaaaccctgagcctgacctgtaccgtgtccggcggctctatcagcagcggcgattactactggggctggatcagacagcctccaggcaagggactcgaatggatcggcagcatcagctacagcggctccacctactacaacccaagcctgaagtccagagtgaccatcagcgtggacaccagcagaaaccagttctccctgaagctgagcagcgtgacagccgccgatacagccgtgtattattgcaccagagaggacagcagcaactggcggagtagaggacagggcacactggtcacagtgtcctctacgcgtggaatgaggactgaggatcttcccaaagctgtcgtctttctcgaaccccaatggtatcgggtgctcgaaaaagactctgtgacactgaaatgccaaggggcctactctcccgaggacaactccacacagtggtttcataatgagtccctcatcagctctcaggccagctcttatttcattgatgccgctacagtggacgactccggcgagtatcggtgtcagaccaatctgtctacactgtctgaccccgtgcagcttgaggtccacattggatggttgctcttgcaagccccacgctgggttttcaaagaggaagatccaatccatctgcggtgccacagctggaaaaacaccgctctccacaaagtcacatacctgcaaaatggcaaaggacgcaaatacttccatcacaattccgatttttacattccgaaggctaccctgaaagacagcggcagctatttctgccggggactcgtcggctccaagaatgtgtcctccgaaaccgtgaatatcacgattacccaaggactggctgtgcctacaatctctagcttctttccgcctggataccaagtctccttctgtcttgtgatggtcctcctgtttgctgtggacacaggactgtacttttccgtgaaaacgaacatccgcagctccacacgcgattggaaagatcacaagtttaaatggcgcaaagatccccaggacaag

SEQ ID NO: 5051 - DNA, 1155 bp, Artificial Sequence
  Synthetic Polynucleotide
atggccttaccagtgaccgccttgctcctgccgctggccttgctgctccacgccgccaggccgcagctgcaactgcaagagtctggccccggactggtcaagccttctgaaacactggccctgacctgcaatgtgtccggcggctctatcagcagcagctcctattactggggctggatcagacagcctccaggcaagagactggaatggatcggcagcatctactacagcggcagcacatacttcaaccccagcctgaagtccagagtgaccatcagcgtggacacctccaagaaccagttctccctgaagctgagcagcgtgacagccgccgatacagccgtgtattactgtgctggcggcgactactatggccccgttggacaatggcccagcgattacagaggacagggaacccttgtgaccgtgtcctctacgcgtggaatgaggactgaggatcttcccaaagctgtcgtctttctcgaaccccaatggtatcgggtgctcgaaaaagactctgtgacactgaaatgccaaggggcctactctcccgaggacaactccacacagtggtttcataatgagtccctcatcagctctcaggccagctcttatttcattgatgccgctacagtggacgactccggcgagtatcggtgtcagaccaatctgtctacactgtctgaccccgtgcagcttgaggtccacattggatggttgctcttgcaagccccacgctgggttttcaaagaggaagatccaatccatctgcggtgccacagctggaaaaacaccgctctccacaaagtcacatacctgcaaaatggcaaaggacgcaaatacttccatcacaattccgatttttacattccgaaggctaccctgaaagacagcggcagctatttctgccggggactcgtcggctccaagaatgtgtcctccgaaaccgtgaatatcacgattacccaaggactggctgtgcctacaatctctagcttctttccgcctggataccaagtctccttctgtcttgtgatggtcctcctgtttgctgtggacacaggactgtacttttccgtgaaaacgaacatccgcagctccacacgcgattggaaagatcacaagtttaaatggcgcaaagatccccaggacaag

SEQ ID NO: 5052 - DNA, 1173 bp, Artificial Sequence
  Synthetic Polynucleotide
atggccttaccagtgaccgccttgctcctgccgctggccttgctgctccacgccgccaggccggaagttcagctgcttgagtctggcggaggactggttcaacctggcggaagcctgagactgtcttgtgccgccagcggcttcatcttcagcagctacgccatgagctgggtccgacaggctcctggaaagggccaagaatgggtttccggcgttagcggcacaggcgtgaacacctactacgccgatagcgtgaagggcagattcaccatcagccgggacaacagcaagaacaccctgtacctccagatgaacagcctgagagccgaggacaccgccgtgtactattgtgcctctggcaaaggctgggacagcggctcttggtacgaggactatagaggccagggcaccctggtcacagtttcttcaacgcgtcctcgactgtgccttctaacgcgtggaatgaggactgaggatcttcccaaagctgtcgtctttctcgaaccccaatggtatcgggtgctcgaaaaagactctgtgacactgaaatgccaaggggcctactctcccgaggacaactccacacagtggtttcataatgagtccctcatcagctctcaggccagctcttatttcattgatgccgctacagtggacgactccggcgagtatcggtgtcagaccaatctgtctacactgtctgaccccgtgcagcttgaggtccacattggatggttgctcttgcaagccccacgctgggttttcaaagaggaagatccaatccatctgcggtgccacagctggaaaaacaccgctctccacaaagtcacatacctgcaaaatggcaaaggacgcaaatacttccatcacaattccgatttttacattccgaaggctaccctgaaagacagcggcagctatttctgccggggactcgtcggctccaagaatgtgtcctccgaaaccgtgaatatcacgattacccaaggactggctgtgcctacaatctctagcttctttccgcctggataccaagtctccttctgtcttgtgatggtcctcctgtttgctgtggacacaggactgtacttttccgtgaaaacgaacatccgcagctccacacgcgattggaaagatcacaagtttaaatggcgcaaagatccccaggacaag

SEQ ID NO: 5053 - DNA, 1155 bp, Artificial Sequence
  Synthetic Polynucleotide
atggccttaccagtgaccgccttgctcctgccgctggccttgctgctccacgccgccaggccgcagctccagctgcaagagtctggacctggcctggtcaagcctagcgagacactgagcctgacctgtacagttagcggcggctctgtgtccagcagcagctattactggggctggatcagacagcctcctggcaagagactggaactgatcggcagcatctactacggcggctccacctacttcaaccccagcctgaaaagcagagtgaccatcagcgtggacaccagcaagaaccagttcagcctgaagctgagcagcgtgacagccgccgatacagccgtgtactattgtgccggcggagacacatacggccctgttggacaatggcccagcgactatagaggccagggcacactggtcacagtgtctagcacgcgtggaatgaggactgaggatcttcccaaagctgtcgtctttctcgaaccccaatggtatcgggtgctcgaaaaagactctgtgacactgaaatgccaaggggcctactctcccgaggacaactccacacagtggtttcataatgagtccctcatcagctctcaggccagctcttatttcattgatgccgctacagtggacgactccggcgagtatcggtgtcagaccaatctgtctacactgtctgaccccgtgcagcttgaggtccacattggatggttgctcttgcaagccccacgctgggttttcaaagaggaagatccaatccatctgcggtgccacagctggaaaaacaccgctctccacaaagtcacatacctgcaaaatggcaaaggacgcaaatacttccatcacaattccgatttttacattccgaaggctaccctgaaagacagcggcagctatttctgccggggactcgtcggctccaagaatgtgtcctccgaaaccgtgaatatcacgattacccaaggactggctgtgcctacaatctctagcttctttccgcctggataccaagtctccttctgtcttgtgatggtcctcctgtttgctgtggacacaggactgtacttttccgtgaaaacgaacatccgcagctccacacgcgattggaaagatcacaagtttaaatggcgcaaagatccccaggacaag

SEQ ID NO: 5054 - DNA, 1149 bp, Artificial Sequence
  Synthetic Polynucleotide
atggccttaccagtgaccgccttgctcctgccgctggccttgctgctccacgccgccaggccggaagttcagctgcttgaaagcggtggcggcctggttcaacctggcggatctctgagactgagctgtgccgccagcggcttcatcttctccatctacgccatgtcctgggtccgacaggcccctggaaaaggactggaatgggtgtccggcatctctggcagcggcgtgaacacctactacgccgattctgtgaagggccgcttcatcatcagccgggacaacagcagaaacaccgtgtacctccagatgaacagcctgagagccgatgacaccgccgtgtaccactgcgccaatggcaaaggctgggacggcaacacttggtacgaggattacagaggacagggaaccctcgtgaccgtgtctagtacgcgtggaatgaggactgaggatcttcccaaagctgtcgtctttctcgaaccccaatggtatcgggtgctcgaaaaagactctgtgacactgaaatgccaaggggcctactctcccgaggacaactccacacagtggtttcataatgagtccctcatcagctctcaggccagctcttatttcattgatgccgctacagtggacgactccggcgagtatcggtgtcagaccaatctgtctacactgtctgaccccgtgcagcttgaggtccacattggatggttgctcttgcaagccccacgctgggttttcaaagaggaagatccaatccatctgcggtgccacagctggaaaaacaccgctctccacaaagtcacatacctgcaaaatggcaaaggacgcaaatacttccatcacaattccgatttttacattccgaaggctaccctgaaagacagcggcagctatttctgccggggactcgtcggctccaagaatgtgtcctccgaaaccgtgaatatcacgattacccaaggactggctgtgcctacaatctctagcttctttccgcctggataccaagtctccttctgtcttgtgatggtcctcctgtttgctgtggacacaggactgtacttttccgtgaaaacgaacatccgcagctccacacgcgattggaaagatcacaagtttaaatggcgcaaagatccccaggacaag

SEQ ID NO: 5055 - DNA, 1134 bp, Artificial Sequence
  Synthetic Polynucleotide
atggccttaccagtgaccgccttgctcctgccgctggccttgctgctccacgccgccaggccggaagtgcaggttttggagtctggcggaggactggttcagcctggcggatctctgagactgtcttgtgccgccagcggcttcaccttcagcaactttgccatgagctgggtccgacaggcccctggcaaaggacttgaatgggtgtccacaatcagcggcagcgccggcacaacagattacgccgattctgtgaagggcagattcaccatcagccgggacaacagcaagaaaaccctgtacctccagatgaacagcctgcgcgtggaagataccgccgtgtactactgtgccgatggcagaggccccttcttcgattatcgcggccagggcacactggtcaccgtttcttctacgcgtggaatgaggactgaggatcttcccaaagctgtcgtctttctcgaaccccaatggtatcgggtgctcgaaaaagactctgtgacactgaaatgccaaggggcctactctcccgaggacaactccacacagtggtttcataatgagtccctcatcagctctcaggccagctcttatttcattgatgccgctacagtggacgactccggcgagtatcggtgtcagaccaatctgtctacactgtctgaccccgtgcagcttgaggtccacattggatggttgctcttgcaagccccacgctgggttttcaaagaggaagatccaatccatctgcggtgccacagctggaaaaacaccgctctccacaaagtcacatacctgcaaaatggcaaaggacgcaaatacttccatcacaattccgatttttacattccgaaggctaccctgaaagacagcggcagctatttctgccggggactcgtcggctccaagaatgtgtcctccgaaaccgtgaatatcacgattacccaaggactggctgtgcctacaatctctagcttctttccgcctggataccaagtctccttctgtcttgtgatggtcctcctgtttgctgtggacacaggactgtacttttccgtgaaaacgaacatccgcagctccacacgcgattggaaagatcacaagtttaaatggcgcaaagatccccaggacaag

SEQ ID NO: 5056 - DNA, 1140 bp, Artificial Sequence
  Synthetic Polynucleotide
atggccttaccagtgaccgccttgctcctgccgctggccttgctgctccacgccgccaggccggaggtgcagctggttgaatctggcggaggactggttcagcctggcggatctctgagactgtcttgtgccgccagcggcttcaacatcaaggatacctgtatcggctgggttcgcagagcccctggcaaagaggaagaactggtcgccaaaatctgcaagtacagcggccacaccagatacgccgacagcgtgaagggcagattcaccatcagcgccgacaccagcaagaacaccgcctacctccagatgaacagcctgagagccgaggacaccgccgtgtactattgtgccgctgtgtccgtcagagatgggcactacaattactggggccagggcaccaccgtgaccgtttcttcaacgcgtggaatgaggactgaggatcttcccaaagctgtcgtctttctcgaaccccaatggtatcgggtgctcgaaaaagactctgtgacactgaaatgccaaggggcctactctcccgaggacaactccacacagtggtttcataatgagtccctcatcagctctcaggccagctcttatttcattgatgccgctacagtggacgactccggcgagtatcggtgtcagaccaatctgtctacactgtctgaccccgtgcagcttgaggtccacattggatggttgctcttgcaagccccacgctgggttttcaaagaggaagatccaatccatctgcggtgccacagctggaaaaacaccgctctccacaaagtcacatacctgcaaaatggcaaaggacgcaaatacttccatcacaattccgatttttacattccgaaggctaccctgaaagacagcggcagctatttctgccggggactcgtcggctccaagaatgtgtcctccgaaaccgtgaatatcacgattacccaaggactggctgtgcctacaatctctagcttctttccgcctggataccaagtctccttctgtcttgtgatggtcctcctgtttgctgtggacacaggactgtacttttccgtgaaaacgaacatccgcagctccacacgcgattggaaagatcacaagtttaaatggcgcaaagatccccaggacaag

SEQ ID NO: 5057 - DNA, 1140 bp, Artificial Sequence
  Synthetic Polynucleotide
atggccttaccagtgaccgccttgctcctgccgctggccttgctgctccacgccgccaggccggaagtgcaactggtggaaagcggaggcggacttgttcaaccaggcggaagcctgagactgagctgtgccgcttccggctttaatatcaaagacacatgcatcggatgggttcgccgcgctccagggaaagaagaggaactggttgccgacatctgtccctacaagggcagcacaagatatgccgactccgtgaaaggccggtttaccatctctgccgacacctctaagaatacggcctatctgcaaatgaactctctgcgggccgaagatacagccgtgtattactgcgccatcgtgtctgccagagatggctactataactattggggacagggaaccacagtcacagtgtcctctacgcgtggaatgaggactgaggatcttcccaaagctgtcgtctttctcgaaccccaatggtatcgggtgctcgaaaaagactctgtgacactgaaatgccaaggggcctactctcccgaggacaactccacacagtggtttcataatgagtccctcatcagctctcaggccagctcttatttcattgatgccgctacagtggacgactccggcgagtatcggtgtcagaccaatctgtctacactgtctgaccccgtgcagcttgaggtccacattggatggttgctcttgcaagccccacgctgggttttcaaagaggaagatccaatccatctgcggtgccacagctggaaaaacaccgctctccacaaagtcacatacctgcaaaatggcaaaggacgcaaatacttccatcacaattccgatttttacattccgaaggctaccctgaaagacagcggcagctatttctgccggggactcgtcggctccaagaatgtgtcctccgaaaccgtgaatatcacgattacccaaggactggctgtgcctacaatctctagcttctttccgcctggataccaagtctccttctgtcttgtgatggtcctcctgtttgctgtggacacaggactgtacttttccgtgaaaacgaacatccgcagctccacacgcgattggaaagatcacaagtttaaatggcgcaaagatccccaggacaag

SEQ ID NO: 5058 - DNA, 1140 bp, Artificial Sequence
  Synthetic Polynucleotide
atggccttaccagtgaccgccttgctcctgccgctggccttgctgctccacgccgccaggccggaagtgcagctgcttgagtctggcggaggactggttcaacctggcggaagcctgagactgtcttgtgccgccagcggcttcacctttagcagctacgccatgagctgggtccgacaggctcctggcaaaggactggaatgggtgtccgccatcacaggctctggcggcagcacatattacgccgactctgtgaagggcagattcaccatcagccgggacaacagcaagaacaccctgtacctccagatgaacagcctgagagccgaggacaccgccgtgtactactgtgccaaggatgaggatggcggctctctgctgggacacagaggacagggaacactggtcaccgtgtctagcacgcgtggaatgaggactgaggatcttcccaaagctgtcgtctttctcgaaccccaatggtatcgggtgctcgaaaaagactctgtgacactgaaatgccaaggggcctactctcccgaggacaactccacacagtggtttcataatgagtccctcatcagctctcaggccagctcttatttcattgatgccgctacagtggacgactccggcgagtatcggtgtcagaccaatctgtctacactgtctgaccccgtgcagcttgaggtccacattggatggttgctcttgcaagccccacgctgggttttcaaagaggaagatccaatccatctgcggtgccacagctggaaaaacaccgctctccacaaagtcacatacctgcaaaatggcaaaggacgcaaatacttccatcacaattccgatttttacattccgaaggctaccctgaaagacagcggcagctatttctgccggggactcgtcggctccaagaatgtgtcctccgaaaccgtgaatatcacgattacccaaggactggctgtgcctacaatctctagcttctttccgcctggataccaagtctccttctgtcttgtgatggtcctcctgtttgctgtggacacaggactgtacttttccgtgaaaacgaacatccgcagctccacacgcgattggaaagatcacaagtttaaatggcgcaaagatccccaggacaag

SEQ ID NO: 5059 - DNA, 1140 bp, Artificial Sequence
  Synthetic Polynucleotide
atggccttaccagtgaccgccttgctcctgccgctggccttgctgctccacgccgccaggccggaagtgcagctgcttgagtctggcggcggactgattcaacctggcggaagcctgagactgagctgtgccgcttccggcttcacctttagcagccacgccatgacctgggtccgacaggctcctggaaaaggactggaatgggtgtccgccatcagcagcggcggcagctacacatattacgccgacagcgtgaagggcagattcaccatctccagagacaacagcaagaacaccctgtacctccagatgaacagcctgagagccgaggacaccgccgtgtactactgtgccaaggatgaggatggcggctctctgctgggacacagaggacagggaacactggtcaccgtgtctagcacgcgtggaatgaggactgaggatcttcccaaagctgtcgtctttctcgaaccccaatggtatcgggtgctcgaaaaagactctgtgacactgaaatgccaaggggcctactctcccgaggacaactccacacagtggtttcataatgagtccctcatcagctctcaggccagctcttatttcattgatgccgctacagtggacgactccggcgagtatcggtgtcagaccaatctgtctacactgtctgaccccgtgcagcttgaggtccacattggatggttgctcttgcaagccccacgctgggttttcaaagaggaagatccaatccatctgcggtgccacagctggaaaaacaccgctctccacaaagtcacatacctgcaaaatggcaaaggacgcaaatacttccatcacaattccgatttttacattccgaaggctaccctgaaagacagcggcagctatttctgccggggactcgtcggctccaagaatgtgtcctccgaaaccgtgaatatcacgattacccaaggactggctgtgcctacaatctctagcttctttccgcctggataccaagtctccttctgtcttgtgatggtcctcctgtttgctgtggacacaggactgtacttttccgtgaaaacgaacatccgcagctccacacgcgattggaaagatcacaagtttaaatggcgcaaagatccccaggacaag

SEQ ID NO: 5060 - DNA, 1140 bp, Artificial Sequence
  Synthetic Polynucleotide
atggccttaccagtgaccgccttgctcctgccgctggccttgctgctccacgccgccaggccggaagtgcagctggttgaatctggcggaggactggttcagcctggcggatctctgagactgtcttgtgccgccagcggcttcagcttcagcgacttttggatgagctgggtccgacaggcccctggcaaaggacttgaatgggtgtccgccatcagcggcagcggcgattatacacactacgccgacagcgtgaagggcagattcaccatcagccgggacaacagcaagaacaccgtgtacctccagatgaacagcctgagagccgaggacagcgccgtgtactactgtgccaaggatgaggatggcggctctctgctgggacacagaggacagggaacactggtcaccgtgtctagcacgcgtggaatgaggactgaggatcttcccaaagctgtcgtctttctcgaaccccaatggtatcgggtgctcgaaaaagactctgtgacactgaaatgccaaggggcctactctcccgaggacaactccacacagtggtttcataatgagtccctcatcagctctcaggccagctcttatttcattgatgccgctacagtggacgactccggcgagtatcggtgtcagaccaatctgtctacactgtctgaccccgtgcagcttgaggtccacattggatggttgctcttgcaagccccacgctgggttttcaaagaggaagatccaatccatctgcggtgccacagctggaaaaacaccgctctccacaaagtcacatacctgcaaaatggcaaaggacgcaaatacttccatcacaattccgatttttacattccgaaggctaccctgaaagacagcggcagctatttctgccggggactcgtcggctccaagaatgtgtcctccgaaaccgtgaatatcacgattacccaaggactggctgtgcctacaatctctagcttctttccgcctggataccaagtctccttctgtcttgtgatggtcctcctgtttgctgtggacacaggactgtacttttccgtgaaaacgaacatccgcagctccacacgcgattggaaagatcacaagtttaaatggcgcaaagatccccaggacaag

SEQ ID NO: 5061 - DNA, 1146 bp, Artificial Sequence
  Synthetic Polynucleotide
atggccttaccagtgaccgccttgctcctgccgctggccttgctgctccacgccgccaggccggaagtgcagctgcttgagtctggcggaggactggttcaacctggcggaagcctgagactgtcttgtgccgcctctggcttcgccttcagcatctacgatatgagctgggtccgacaggcccctggcaaaggacttgaatgggtgtccagcatcagcggcagcggcgactacatctactacgccgatagcgtgaagggcagattcaccatcagccgggacatcagcaagaacaccctgtacctccagatgaacagcctgagagccgaggacaccgccgtgtactactgtgccaaagaaggcaccggcgctaacagcagcctggccgattatagaggccagggcacactggtcaccgtgtctagtacgcgtggaatgaggactgaggatcttcccaaagctgtcgtctttctcgaaccccaatggtatcgggtgctcgaaaaagactctgtgacactgaaatgccaaggggcctactctcccgaggacaactccacacagtggtttcataatgagtccctcatcagctctcaggccagctcttatttcattgatgccgctacagtggacgactccggcgagtatcggtgtcagaccaatctgtctacactgtctgaccccgtgcagcttgaggtccacattggatggttgctcttgcaagccccacgctgggttttcaaagaggaagatccaatccatctgcggtgccacagctggaaaaacaccgctctccacaaagtcacatacctgcaaaatggcaaaggacgcaaatacttccatcacaattccgatttttacattccgaaggctaccctgaaagacagcggcagctatttctgccggggactcgtcggctccaagaatgtgtcctccgaaaccgtgaatatcacgattacccaaggactggctgtgcctacaatctctagcttctttccgcctggataccaagtctccttctgtcttgtgatggtcctcctgtttgctgtggacacaggactgtacttttccgtgaaaacgaacatccgcagctccacacgcgattggaaagatcacaagtttaaatggcgcaaagatccccaggacaag

SEQ ID NO: 5062 - DNA, 1146 bp, Artificial Sequence
  Synthetic Polynucleotide
atggccttaccagtgaccgccttgctcctgccgctggccttgctgctccacgccgccaggccggaggttcagctgcttgagtctggcggaggactggttcaacctggcggaagcctgagactgtcttgtgccgccagcggcttcacctttagcagctacgccatgagctgggtccgacaggctcctggcaaaggactggaatgggtgtccagcatcagcggcagcggcgactacatctactacgccgatagcgtgaagggcagattcaccatcagccgggacatcagcaagaacaccctgtacctccagatgaacagcctgagagccgaggacaccgccgtgtactactgtgccaaagaaggcaccggcgctaacagcagcctggccgattatagaggccagggcacactggtcaccgtgtctagtacgcgtggaatgaggactgaggatcttcccaaagctgtcgtctttctcgaaccccaatggtatcgggtgctcgaaaaagactctgtgacactgaaatgccaaggggcctactctcccgaggacaactccacacagtggtttcataatgagtccctcatcagctctcaggccagctcttatttcattgatgccgctacagtggacgactccggcgagtatcggtgtcagaccaatctgtctacactgtctgaccccgtgcagcttgaggtccacattggatggttgctcttgcaagccccacgctgggttttcaaagaggaagatccaatccatctgcggtgccacagctggaaaaacaccgctctccacaaagtcacatacctgcaaaatggcaaaggacgcaaatacttccatcacaattccgatttttacattccgaaggctaccctgaaagacagcggcagctatttctgccggggactcgtcggctccaagaatgtgtcctccgaaaccgtgaatatcacgattacccaaggactggctgtgcctacaatctctagcttctttccgcctggataccaagtctccttctgtcttgtgatggtcctcctgtttgctgtggacacaggactgtacttttccgtgaaaacgaacatccgcagctccacacgcgattggaaagatcacaagtttaaatggcgcaaagatccccaggacaag

SEQ ID NO: 5063 - DNA, 1137 bp, Artificial Sequence
  Synthetic Polynucleotide
atggccttaccagtgaccgccttgctcctgccgctggccttgctgctccacgccgccaggccgcaggtgcagctggttgaatctggcggaggactggttcagcctggcggatctctgagactgtcttgtgccgccagcggcttcaccttcaccaatcacgccatgagctgggtccgacaggcccctggaaaaggactggaactggtgtctagcatcagcggcaacggcagaaccacctactacgccgatagcgtgaagggcagattcaccatcagccgggacatcagcaagaacaccctggacctccagatgaacagcctgagagccgaggataccgccgtgtactactgtgccaaggatggcggagagacactggtggatagcagaggccagggcacactggtcacagtgtcatctacgcgtggaatgaggactgaggatcttcccaaagctgtcgtctttctcgaaccccaatggtatcgggtgctcgaaaaagactctgtgacactgaaatgccaaggggcctactctcccgaggacaactccacacagtggtttcataatgagtccctcatcagctctcaggccagctcttatttcattgatgccgctacagtggacgactccggcgagtatcggtgtcagaccaatctgtctacactgtctgaccccgtgcagcttgaggtccacattggatggttgctcttgcaagccccacgctgggttttcaaagaggaagatccaatccatctgcggtgccacagctggaaaaacaccgctctccacaaagtcacatacctgcaaaatggcaaaggacgcaaatacttccatcacaattccgatttttacattccgaaggctaccctgaaagacagcggcagctatttctgccggggactcgtcggctccaagaatgtgtcctccgaaaccgtgaatatcacgattacccaaggactggctgtgcctacaatctctagcttctttccgcctggataccaagtctccttctgtcttgtgatggtcctcctgtttgctgtggacacaggactgtacttttccgtgaaaacgaacatccgcagctccacacgcgattggaaagatcacaagtttaaatggcgcaaagatccccaggacaag

SEQ ID NO: 5064 - DNA, 1140 bp, Artificial Sequence
  Synthetic Polynucleotide
atggccttaccagtgaccgccttgctcctgccgctggccttgctgctccacgccgccaggccggaagtgcagctgcttgaaagtggcggcggactgattcagcctggcggatctctgagactgagctgtgccgccagcggcttcaccttttctagccacgccatgacctgggtccgacaggcacctggaaaagggcttgaatgggtgtccgccatcagcggctctggcgattacacacactacgccgacagcgtgaagggcagattcaccatcagcagagacaacagcaagaacaccgtgtacctccagatgaacagcctgagagccgaggacagcgccgtgtattattgcgccaaggatgaggatggcggcagcctgcttggacacagaggacaaggcaccctggtcaccgtttcttccacgcgtggaatgaggactgaggatcttcccaaagctgtcgtctttctcgaaccccaatggtatcgggtgctcgaaaaagactctgtgacactgaaatgccaaggggcctactctcccgaggacaactccacacagtggtttcataatgagtccctcatcagctctcaggccagctcttatttcattgatgccgctacagtggacgactccggcgagtatcggtgtcagaccaatctgtctacactgtctgaccccgtgcagcttgaggtccacattggatggttgctcttgcaagccccacgctgggttttcaaagaggaagatccaatccatctgcggtgccacagctggaaaaacaccgctctccacaaagtcacatacctgcaaaatggcaaaggacgcaaatacttccatcacaattccgatttttacattccgaaggctaccctgaaagacagcggcagctatttctgccggggactcgtcggctccaagaatgtgtcctccgaaaccgtgaatatcacgattacccaaggactggctgtgcctacaatctctagcttctttccgcctggataccaagtctccttctgtcttgtgatggtcctcctgtttgctgtggacacaggactgtacttttccgtgaaaacgaacatccgcagctccacacgcgattggaaagatcacaagtttaaatggcgcaaagatccccaggacaag

SEQ ID NO: 5065 - DNA, 1143 bp, Artificial Sequence
  Synthetic Polynucleotide
atggccttaccagtgaccgccttgctcctgccgctggccttgctgctccacgccgccaggccgcaggttcagctgcaagagtctggcggaggactggttcaggctggcgatagcctgagactgtcttgtgccgcttctggcagagccgtgtccagcctgtttatgggctggtttcggagagcccctggcaaagagagagaactggttgccgccatcagccggtacagcctgtacacctactacgccgacagcgtgaagggcagattcaccatcagcgccgacaacgccaagaacgccgtgtacctccagatgaacagcctgaagcctgaggacacagccgtgtactactgcgccagcaaacttgagtacaccagcaacgactacgacagctggggccagggaacccaagtgacagtctcttctacgcgtggaatgaggactgaggatcttcccaaagctgtcgtctttctcgaaccccaatggtatcgggtgctcgaaaaagactctgtgacactgaaatgccaaggggcctactctcccgaggacaactccacacagtggtttcataatgagtccctcatcagctctcaggccagctcttatttcattgatgccgctacagtggacgactccggcgagtatcggtgtcagaccaatctgtctacactgtctgaccccgtgcagcttgaggtccacattggatggttgctcttgcaagccccacgctgggttttcaaagaggaagatccaatccatctgcggtgccacagctggaaaaacaccgctctccacaaagtcacatacctgcaaaatggcaaaggacgcaaatacttccatcacaattccgatttttacattccgaaggctaccctgaaagacagcggcagctatttctgccggggactcgtcggctccaagaatgtgtcctccgaaaccgtgaatatcacgattacccaaggactggctgtgcctacaatctctagcttctttccgcctggataccaagtctccttctgtcttgtgatggtcctcctgtttgctgtggacacaggactgtacttttccgtgaaaacgaacatccgcagctccacacgcgattggaaagatcacaagtttaaatggcgcaaagatccccaggacaag

SEQ ID NO: 5066 - DNA, 1143 bp, Artificial Sequence
  Synthetic Polynucleotide
atggccttaccagtgaccgccttgctcctgccgctggccttgctgctccacgccgccaggccggaagttcagctgcaagagtctggcggaggactggttcaacctggcggaagcctgagactgtcttgtgccgcctctggcagaaccttcagcagcctgttcatgggctggttcagacaggcccctggcaaagagagagaactggtcgccgccatcagccggtacagcctgtacacctactacgccgacagcgtgaagggcagattcaccatcagcgccgacaacgccaagaacgccgtgtacctccagatgaacagcctgaagccagaggacacagccgtgtactactgcgccagcaaacttgagtacaccagcaacgactacgacagctggggccagggaacccaagtgacagtctcttctacgcgtggaatgaggactgaggatcttcccaaagctgtcgtctttctcgaaccccaatggtatcgggtgctcgaaaaagactctgtgacactgaaatgccaaggggcctactctcccgaggacaactccacacagtggtttcataatgagtccctcatcagctctcaggccagctcttatttcattgatgccgctacagtggacgactccggcgagtatcggtgtcagaccaatctgtctacactgtctgaccccgtgcagcttgaggtccacattggatggttgctcttgcaagccccacgctgggttttcaaagaggaagatccaatccatctgcggtgccacagctggaaaaacaccgctctccacaaagtcacatacctgcaaaatggcaaaggacgcaaatacttccatcacaattccgatttttacattccgaaggctaccctgaaagacagcggcagctatttctgccggggactcgtcggctccaagaatgtgtcctccgaaaccgtgaatatcacgattacccaaggactggctgtgcctacaatctctagcttctttccgcctggataccaagtctccttctgtcttgtgatggtcctcctgtttgctgtggacacaggactgtacttttccgtgaaaacgaacatccgcagctccacacgcgattggaaagatcacaagtttaaatggcgcaaagatccccaggacaag

SEQ ID NO: 5067 - DNA, 1143 bp, Artificial Sequence
  Synthetic Polynucleotide
atggccttaccagtgaccgccttgctcctgccgctggccttgctgctccacgccgccaggccggaagttcagctgcaagagtctggcggaggactggttcaacctggcggaagcctgagactgtcttgtgccgcctctggcagaaccttcagcagcctgtttatgggctgggtccgacaggcccctggcaaaggactggaactggtgtctgccatcagccggtacagcctgtacacctactacgccgacagcgtgaagggcagattcaccatcagcagagacaacgccaagaacaccctgtacctccagatgaacagcctgcggcctgaggataccgccgtgtactactgcgccagcaaacttgagtacaccagcaacgactacgacagctggggccagggaacactggtcacagtctcttctacgcgtggaatgaggactgaggatcttcccaaagctgtcgtctttctcgaaccccaatggtatcgggtgctcgaaaaagactctgtgacactgaaatgccaaggggcctactctcccgaggacaactccacacagtggtttcataatgagtccctcatcagctctcaggccagctcttatttcattgatgccgctacagtggacgactccggcgagtatcggtgtcagaccaatctgtctacactgtctgaccccgtgcagcttgaggtccacattggatggttgctcttgcaagccccacgctgggttttcaaagaggaagatccaatccatctgcggtgccacagctggaaaaacaccgctctccacaaagtcacatacctgcaaaatggcaaaggacgcaaatacttccatcacaattccgatttttacattccgaaggctaccctgaaagacagcggcagctatttctgccggggactcgtcggctccaagaatgtgtcctccgaaaccgtgaatatcacgattacccaaggactggctgtgcctacaatctctagcttctttccgcctggataccaagtctccttctgtcttgtgatggtcctcctgtttgctgtggacacaggactgtacttttccgtgaaaacgaacatccgcagctccacacgcgattggaaagatcacaagtttaaatggcgcaaagatccccaggacaag

SEQ ID NO: 5068 - DNA, 1167 bp, Artificial Sequence
  Synthetic Polynucleotide
atggccttaccagtgaccgccttgctcctgccgctggccttgctgctccacgccgccaggccggaagtgcagctggttgaatctggcggaggactggttcagcctggcggatctctgagactgagctgtgaagccagcggcttcgccagcgacgattacatcatcggctggttcagacaggcccctggcaaagagagagagggcgtcagctgcatcagctctaagtacgccaacaccgtgtacaccgacagcgtgaagggcagattcagactgagcagaggcaccgccaagaataccgtgtacctccagatgagcgccctgaagcctgaggataccgccgtgtactactgcgctatggacagccgcagagtgacatgccctgagatcagcaccatgcaccggaacttcgattcttggggccagggcacactggtcacagtgtcatctacgcgtggaatgaggactgaggatcttcccaaagctgtcgtctttctcgaaccccaatggtatcgggtgctcgaaaaagactctgtgacactgaaatgccaaggggcctactctcccgaggacaactccacacagtggtttcataatgagtccctcatcagctctcaggccagctcttatttcattgatgccgctacagtggacgactccggcgagtatcggtgtcagaccaatctgtctacactgtctgaccccgtgcagcttgaggtccacattggatggttgctcttgcaagccccacgctgggttttcaaagaggaagatccaatccatctgcggtgccacagctggaaaaacaccgctctccacaaagtcacatacctgcaaaatggcaaaggacgcaaatacttccatcacaattccgatttttacattccgaaggctaccctgaaagacagcggcagctatttctgccggggactcgtcggctccaagaatgtgtcctccgaaaccgtgaatatcacgattacccaaggactggctgtgcctacaatctctagcttctttccgcctggataccaagtctccttctgtcttgtgatggtcctcctgtttgctgtggacacaggactgtacttttccgtgaaaacgaacatccgcagctccacacgcgattggaaagatcacaagtttaaatggcgcaaagatccccaggacaag

SEQ ID NO: 5069 - DNA, 1167 bp, Artificial Sequence
  Synthetic Polynucleotide
atggccttaccagtgaccgccttgctcctgccgctggccttgctgctccacgccgccaggccggaagtgcagctggttgaatctggcggaggactggttcagcctggcggatctctgagactgtcttgtgccgcctctggcttcgccagcgactactatatcatcggctggttcagacaggcccctggcaaagagagagagggcgtcagctgtatcagcagcagatacgccaacaccaactacgccgacagcgtgaagggcagattcaccatcagccgggacaacgccaagaacaccgtgtacctccagatgaacagcctgaagcctgaggacaccgccgtgtactactgtgccgccgacaccagaagatacacctgtcctgacattgccaccatgcaccggaacttcgattcttggggccagggcacactggtcaccgtttcttctacgcgtggaatgaggactgaggatcttcccaaagctgtcgtctttctcgaaccccaatggtatcgggtgctcgaaaaagactctgtgacactgaaatgccaaggggcctactctcccgaggacaactccacacagtggtttcataatgagtccctcatcagctctcaggccagctcttatttcattgatgccgctacagtggacgactccggcgagtatcggtgtcagaccaatctgtctacactgtctgaccccgtgcagcttgaggtccacattggatggttgctcttgcaagccccacgctgggttttcaaagaggaagatccaatccatctgcggtgccacagctggaaaaacaccgctctccacaaagtcacatacctgcaaaatggcaaaggacgcaaatacttccatcacaattccgatttttacattccgaaggctaccctgaaagacagcggcagctatttctgccggggactcgtcggctccaagaatgtgtcctccgaaaccgtgaatatcacgattacccaaggactggctgtgcctacaatctctagcttctttccgcctggataccaagtctccttctgtcttgtgatggtcctcctgtttgctgtggacacaggactgtacttttccgtgaaaacgaacatccgcagctccacacgcgattggaaagatcacaagtttaaatggcgcaaagatccccaggacaag

SEQ ID NO: 5070 - DNA, 1155 bp, Artificial Sequence
  Synthetic Polynucleotide
atggccttaccagtgaccgccttgctcctgccgctggccttgctgctccacgccgccaggccggaagtgcaactggtggaatctggaggctctctggtgcagccagggggaagcctgagactgtcttgtgccgcttccggcttcaccttcgacgactacgccatgagctgggtgcgccaggtgccaggcaaaggcctggaatgggtgtccagcatcaactggagcggcacccacaccgattacgccgactccgtgaaaggcagattcacaatcagcagaaacaacgccaacaataccctgtacctgcagatgaactccctgaagtctgaggatacagcagtgtattattgcgccaagaactggcgggacgccggcaccacttggtttgagaaaagcggctctgccggacagggaacccaagtgacagtgtcctccacgcgtggaatgaggactgaggatcttcccaaagctgtcgtctttctcgaaccccaatggtatcgggtgctcgaaaaagactctgtgacactgaaatgccaaggggcctactctcccgaggacaactccacacagtggtttcataatgagtccctcatcagctctcaggccagctcttatttcattgatgccgctacagtggacgactccggcgagtatcggtgtcagaccaatctgtctacactgtctgaccccgtgcagcttgaggtccacattggatggttgctcttgcaagccccacgctgggttttcaaagaggaagatccaatccatctgcggtgccacagctggaaaaacaccgctctccacaaagtcacatacctgcaaaatggcaaaggacgcaaatacttccatcacaattccgatttttacattccgaaggctaccctgaaagacagcggcagctatttctgccggggactcgtcggctccaagaatgtgtcctccgaaaccgtgaatatcacgattacccaaggactggctgtgcctacaatctctagcttctttccgcctggataccaagtctccttctgtcttgtgatggtcctcctgtttgctgtggacacaggactgtacttttccgtgaaaacgaacatccgcagctccacacgcgattggaaagatcacaagtttaaatggcgcaaagatccccaggacaag

SEQ ID NO: 5071 - DNA, 1137 bp, Artificial Sequence
  Synthetic Polynucleotide
atggccttaccagtgaccgccttgctcctgccgctggccttgctgctccacgccgccaggccggaggtgcaactggtggaaagcggcggaggcctggtgcaggctggcggatctctgagactgagctgtgccgccagcggcatcaccttcagcatcaacacaatgggctggtacagacaggcccctggcaagcagagggaactggtggccctgatctccagcatcggcgacacctactacgccgacagcgtgaagggccggttcaccatcagccgggacaacgccaagaacaccgtgtacctccagatgaacagcctgaagcccgaggacaccgccgtgtactactgcaagcggttcagaacagccgcccagggcaccgattattggggccagggaacacaagtgaccgtgtcctctacgcgtggaatgaggactgaggatcttcccaaagctgtcgtctttctcgaaccccaatggtatcgggtgctcgaaaaagactctgtgacactgaaatgccaaggggcctactctcccgaggacaactccacacagtggtttcataatgagtccctcatcagctctcaggccagctcttatttcattgatgccgctacagtggacgactccggcgagtatcggtgtcagaccaatctgtctacactgtctgaccccgtgcagcttgaggtccacattggatggttgctcttgcaagccccacgctgggttttcaaagaggaagatccaatccatctgcggtgccacagctggaaaaacaccgctctccacaaagtcacatacctgcaaaatggcaaaggacgcaaatacttccatcacaattccgatttttacattccgaaggctaccctgaaagacagcggcagctatttctgccggggactcgtcggctccaagaatgtgtcctccgaaaccgtgaatatcacgattacccaaggactggctgtgcctacaatctctagcttctttccgcctggataccaagtctccttctgtcttgtgatggtcctcctgtttgctgtggacacaggactgtacttttccgtgaaaacgaacatccgcagctccacacgcgattggaaagatcacaagtttaaatggcgcaaagatccccaggacaag

SEQ ID NO: 5072 - DNA, 1140 bp, Artificial Sequence
  Synthetic Polynucleotide
atggccttaccagtgaccgccttgctcctgccgctggccttgctgctccacgccgccaggccggaagtgcaactggtggaatctgggggcggactggtgcagccaggcggaagtctgaggctgtcttgtgccgcctccggcagcatcttcggcttcaacgacatggcctggtatcggcaggctcccggaaaacagcgcgagctggtggctctgattagcagagtgggcgtgaccagcagcgccgactctgtgaagggcagattcacaatctccagagtgaacgccaaggatacagtgtacctccagatgaactctctgaaacctgaggatacagcagtgtactattgctacatggaccagcggctggacggcagcacactggcctactggggacagggaactcaagtgacagtgtctagcacgcgtggaatgaggactgaggatcttcccaaagctgtcgtctttctcgaaccccaatggtatcgggtgctcgaaaaagactctgtgacactgaaatgccaaggggcctactctcccgaggacaactccacacagtggtttcataatgagtccctcatcagctctcaggccagctcttatttcattgatgccgctacagtggacgactccggcgagtatcggtgtcagaccaatctgtctacactgtctgaccccgtgcagcttgaggtccacattggatggttgctcttgcaagccccacgctgggttttcaaagaggaagatccaatccatctgcggtgccacagctggaaaaacaccgctctccacaaagtcacatacctgcaaaatggcaaaggacgcaaatacttccatcacaattccgatttttacattccgaaggctaccctgaaagacagcggcagctatttctgccggggactcgtcggctccaagaatgtgtcctccgaaaccgtgaatatcacgattacccaaggactggctgtgcctacaatctctagcttctttccgcctggataccaagtctccttctgtcttgtgatggtcctcctgtttgctgtggacacaggactgtacttttccgtgaaaacgaacatccgcagctccacacgcgattggaaagatcacaagtttaaatggcgcaaagatccccaggacaag

SEQ ID NO: 5073 - DNA, 1143 bp, Artificial Sequence
  Synthetic Polynucleotide
atggccttaccagtgaccgccttgctcctgccgctggccttgctgctccacgccgccaggccggacgtgcaactcgtggaatccggcggaggcctggtgcagcctggcggatctctgagactgagctgtgccgccagcggctctatcggcggactgaatgccatggcctggtacagacaggcccctggcaaagaacgggaactggtggccggcatctttggcgtgggcagcaccagatacgccgacagcgtgaagggccggttcaccatcagccgggacaacagcaagaacaccgtgtacctgcagatgaacagcctgcggcccgaggataccgccgtgtactactgcagaatgtccagcgtgaccagaggctccagcgactactggggccagggaacacttgtgaccgtgtccagtctcgagacgcgtggaatgaggactgaggatcttcccaaagctgtcgtctttctcgaaccccaatggtatcgggtgctcgaaaaagactctgtgacactgaaatgccaaggggcctactctcccgaggacaactccacacagtggtttcataatgagtccctcatcagctctcaggccagctcttatttcattgatgccgctacagtggacgactccggcgagtatcggtgtcagaccaatctgtctacactgtctgaccccgtgcagcttgaggtccacattggatggttgctcttgcaagccccacgctgggttttcaaagaggaagatccaatccatctgcggtgccacagctggaaaaacaccgctctccacaaagtcacatacctgcaaaatggcaaaggacgcaaatacttccatcacaattccgatttttacattccgaaggctaccctgaaagacagcggcagctatttctgccggggactcgtcggctccaagaatgtgtcctccgaaaccgtgaatatcacgattacccaaggactggctgtgcctacaatctctagcttctttccgcctggataccaagtctccttctgtcttgtgatggtcctcctgtttgctgtggacacaggactgtacttttccgtgaaaacgaacatccgcagctccacacgcgattggaaagatcacaagtttaaatggcgcaaagatccccaggacaag

SEQ ID NO: 5074 - DNA, 1158 bp, Artificial Sequence
  Synthetic Polynucleotide
atggccttaccagtgaccgccttgctcctgccgctggccttgctgctccacgccgccaggccggaagtgcaactggtggagtccggcggtggactggtacagcctgggggttcactgcgcctgtcctgcgccgccagcggaagaacctattacctcaatgctatgggttggttccgccaggccccaggaaaggagcgcgagttcgtggcggctattgactggtccgaggggaacaaggactatgctgattccgtgaagggcaggtttaccatcagccgggataattcaaaaaatactgtttatttgcagatgaactctcttagaccagaagacactgctgtctattactgcgccgctgacacccctccttggggaccactgatttatatcgaaagctatgattcctgggggcagggcacactcgtcaccgtgagtagcacgcgtggaatgaggactgaggatcttcccaaagctgtcgtctttctcgaaccccaatggtatcgggtgctcgaaaaagactctgtgacactgaaatgccaaggggcctactctcccgaggacaactccacacagtggtttcataatgagtccctcatcagctctcaggccagctcttatttcattgatgccgctacagtggacgactccggcgagtatcggtgtcagaccaatctgtctacactgtctgaccccgtgcagcttgaggtccacattggatggttgctcttgcaagccccacgctgggttttcaaagaggaagatccaatccatctgcggtgccacagctggaaaaacaccgctctccacaaagtcacatacctgcaaaatggcaaaggacgcaaatacttccatcacaattccgatttttacattccgaaggctaccctgaaagacagcggcagctatttctgccggggactcgtcggctccaagaatgtgtcctccgaaaccgtgaatatcacgattacccaaggactggctgtgcctacaatctctagcttctttccgcctggataccaagtctccttctgtcttgtgatggtcctcctgtttgctgtggacacaggactgtacttttccgtgaaaacgaacatccgcagctccacacgcgattggaaagatcacaagtttaaatggcgcaaagatccccaggacaag

SEQ ID NO: 5075 - DNA, 1152 bp, Artificial Sequence
  Synthetic Polynucleotide
atggccttaccagtgaccgccttgctcctgccgctggccttgctgctccacgccgccaggccggaggtgcaactggtggaatccgggggaggcagcgtgcaggctgggggatcactgagactgtcttgtgctgcctccggcgacacctacggcagctattggatgggatggtttcggcaggctcccggaaaagaacgggaaggcgtggccgccatcaacagaggcggcggatacaccgtgtacgccgactctgtgaagggcagattcacaatctccagagacacagccaagaatactgtgtacctgcagatgaactccctgcgccccgacgataccgccgactattattgcgccgcttccggcgtgctgggcggcctgcatgaggactggttcaattattggggacagggaacacttgtgacagtgtccagcacgcgtggaatgaggactgaggatcttcccaaagctgtcgtctttctcgaaccccaatggtatcgggtgctcgaaaaagactctgtgacactgaaatgccaaggggcctactctcccgaggacaactccacacagtggtttcataatgagtccctcatcagctctcaggccagctcttatttcattgatgccgctacagtggacgactccggcgagtatcggtgtcagaccaatctgtctacactgtctgaccccgtgcagcttgaggtccacattggatggttgctcttgcaagccccacgctgggttttcaaagaggaagatccaatccatctgcggtgccacagctggaaaaacaccgctctccacaaagtcacatacctgcaaaatggcaaaggacgcaaatacttccatcacaattccgatttttacattccgaaggctaccctgaaagacagcggcagctatttctgccggggactcgtcggctccaagaatgtgtcctccgaaaccgtgaatatcacgattacccaaggactggctgtgcctacaatctctagcttctttccgcctggataccaagtctccttctgtcttgtgatggtcctcctgtttgctgtggacacaggactgtacttttccgtgaaaacgaacatccgcagctccacacgcgattggaaagatcacaagtttaaatggcgcaaagatccccaggacaag

SEQ ID NO: 5076 - DNA, 1149 bp, Artificial Sequence
  Synthetic Polynucleotide
atggccttaccagtgaccgccttgctcctgccgctggccttgctgctccacgccgccaggccggttcagctcgtggaaagcggtggcggaagtgtgcaggccggaggcagtttgcgcctgagctgcgctgcttccggcgatacatacgggtcttactggatgggctggtttaggcaggcacctggacaagaaagagaagctgtggccgctattaacaggggaggtggctataccgtttatgctgattccgtgaagggccgattcacaatctcccgggataacgccaaaaacactctgtacctgcagatgaactcccttaggcccgatgacacagccgattactattgtgcggcctccggcgtgctgggtggtctgcatgaggattggttcaactactgggggcaaggcaccctcgtaaccgtgagtagcacgcgtggaatgaggactgaggatcttcccaaagctgtcgtctttctcgaaccccaatggtatcgggtgctcgaaaaagactctgtgacactgaaatgccaaggggcctactctcccgaggacaactccacacagtggtttcataatgagtccctcatcagctctcaggccagctcttatttcattgatgccgctacagtggacgactccggcgagtatcggtgtcagaccaatctgtctacactgtctgaccccgtgcagcttgaggtccacattggatggttgctcttgcaagccccacgctgggttttcaaagaggaagatccaatccatctgcggtgccacagctggaaaaacaccgctctccacaaagtcacatacctgcaaaatggcaaaggacgcaaatacttccatcacaattccgatttttacattccgaaggctaccctgaaagacagcggcagctatttctgccggggactcgtcggctccaagaatgtgtcctccgaaaccgtgaatatcacgattacccaaggactggctgtgcctacaatctctagcttctttccgcctggataccaagtctccttctgtcttgtgatggtcctcctgtttgctgtggacacaggactgtacttttccgtgaaaacgaacatccgcagctccacacgcgattggaaagatcacaagtttaaatggcgcaaagatccccaggacaag

SEQ ID NO: 5077 - DNA, 1155 bp, Artificial Sequence
  Synthetic Polynucleotide
atggccttaccagtgaccgccttgctcctgccgctggccttgctgctccacgccgccaggccggaggtgcaactggtggaaagcggcggaggctctgtgcagacaggcggctctctgagactgacctgtgccgccagcggcagaaccagcagatcctatggcatgggctggttcagacaggcccctggcaaagaacgcgagttcgtgtccggcatctcttggagaggcgacagcaccggctacgccgatagcgtgaagggccggttcaccatcagccgggacaacgccaagaacaccgtggacctgcagatgaacagcctgaagcccgaggacaccgccatctactactgtgccgctgccgccggatctgcttggtacggcacactgtacgagtacgactactggggccagggcacccttgtgaccgtgtcatctacgcgtggaatgaggactgaggatcttcccaaagctgtcgtctttctcgaaccccaatggtatcgggtgctcgaaaaagactctgtgacactgaaatgccaaggggcctactctcccgaggacaactccacacagtggtttcataatgagtccctcatcagctctcaggccagctcttatttcattgatgccgctacagtggacgactccggcgagtatcggtgtcagaccaatctgtctacactgtctgaccccgtgcagcttgaggtccacattggatggttgctcttgcaagccccacgctgggttttcaaagaggaagatccaatccatctgcggtgccacagctggaaaaacaccgctctccacaaagtcacatacctgcaaaatggcaaaggacgcaaatacttccatcacaattccgatttttacattccgaaggctaccctgaaagacagcggcagctatttctgccggggactcgtcggctccaagaatgtgtcctccgaaaccgtgaatatcacgattacccaaggactggctgtgcctacaatctctagcttctttccgcctggataccaagtctccttctgtcttgtgatggtcctcctgtttgctgtggacacaggactgtacttttccgtgaaaacgaacatccgcagctccacacgcgattggaaagatcacaagtttaaatggcgcaaagatccccaggacaag

SEQ ID NO: 5078 - DNA, 1155 bp, Artificial Sequence
  Synthetic Polynucleotide
atggccttaccagtgaccgccttgctcctgccgctggccttgctgctccacgccgccaggccggaggtgcagctcgtagaatctggaggtggttccgtgcaagccggaggatcattgcgactgacctgcgcagcgagcggatctacttctcgctcttacggtatgggatggttcagacaggctcctgggaaagagcgcgagttcgtttcaggcatctcctggaggggggacagcaccggctacgcagatagcgtgaagggcaggttcacgatcagccgagacaacgccaaaaacaccgtcgatctgcaaatgaatagtctgaagcccgaagatactgcgatctactactgtgccgccgcagcagggtccacctggtacggcacactctacgagtacgactactgggggcagggaaccctggtaaccgtgtcctctacgcgtggaatgaggactgaggatcttcccaaagctgtcgtctttctcgaaccccaatggtatcgggtgctcgaaaaagactctgtgacactgaaatgccaaggggcctactctcccgaggacaactccacacagtggtttcataatgagtccctcatcagctctcaggccagctcttatttcattgatgccgctacagtggacgactccggcgagtatcggtgtcagaccaatctgtctacactgtctgaccccgtgcagcttgaggtccacattggatggttgctcttgcaagccccacgctgggttttcaaagaggaagatccaatccatctgcggtgccacagctggaaaaacaccgctctccacaaagtcacatacctgcaaaatggcaaaggacgcaaatacttccatcacaattccgatttttacattccgaaggctaccctgaaagacagcggcagctatttctgccggggactcgtcggctccaagaatgtgtcctccgaaaccgtgaatatcacgattacccaaggactggctgtgcctacaatctctagcttctttccgcctggataccaagtctccttctgtcttgtgatggtcctcctgtttgctgtggacacaggactgtacttttccgtgaaaacgaacatccgcagctccacacgcgattggaaagatcacaagtttaaatggcgcaaagatccccaggacaag

SEQ ID NO: 5079 - DNA, 1158 bp, Artificial Sequence
  Synthetic Polynucleotide
atggccttaccagtgaccgccttgctcctgccgctggccttgctgctccacgccgccaggccggatgttcagttggtggagtctggtggcggtttggtgcagccaggtggctccctgcgactcagttgtgcagcctccgggttcattctggattactacgctattggttggtttcgacaggcccccggaaaggagagagagggcgtgctctgcattgatgccagcgacgacattacctactacgccgattctgtgaagggccgcttcaccatcagtagagacaatagcaagaatacagtctacctgcagatgaactccctgcgcccagaagacactgccgtctactactgtgctacccctatcgggctttcttcctcttgccttctcgaatatgactacgattactgggggcaggggacgctggtcaccgtgtctagcacgcgtggaatgaggactgaggatcttcccaaagctgtcgtctttctcgaaccccaatggtatcgggtgctcgaaaaagactctgtgacactgaaatgccaaggggcctactctcccgaggacaactccacacagtggtttcataatgagtccctcatcagctctcaggccagctcttatttcattgatgccgctacagtggacgactccggcgagtatcggtgtcagaccaatctgtctacactgtctgaccccgtgcagcttgaggtccacattggatggttgctcttgcaagccccacgctgggttttcaaagaggaagatccaatccatctgcggtgccacagctggaaaaacaccgctctccacaaagtcacatacctgcaaaatggcaaaggacgcaaatacttccatcacaattccgatttttacattccgaaggctaccctgaaagacagcggcagctatttctgccggggactcgtcggctccaagaatgtgtcctccgaaaccgtgaatatcacgattacccaaggactggctgtgcctacaatctctagcttctttccgcctggataccaagtctccttctgtcttgtgatggtcctcctgtttgctgtggacacaggactgtacttttccgtgaaaacgaacatccgcagctccacacgcgattggaaagatcacaagtttaaatggcgcaaagatccccaggacaag

SEQ ID NO: 5080 - DNA, 1161 bp, Artificial Sequence
  Synthetic Polynucleotide
atggccttaccagtgaccgccttgctcctgccgctggccttgctgctccacgccgccaggccggaggtgcaactggtggaaagcggcggaggactggtgcaggctggcgatagcctgagactgagctgtgccgcctccggcagagccttcagcagatatgccatgggctggttcagacaggcccctggcaaagaacgcgagttcgtggccgccatcggctggggacctagcaagaccaactacgccgacagcgtgaagggccggttcaccatcagccgggacaacgccaagaacaccgtgtacctgcagatgaacaccctgaagcccgaggacaccgccgtgtactcttgcgccgccaagttcgtgaacaccgacagcacctggtcccgcagcgagatgtacacctattggggccagggcaccctcgtgaccgtgtctagtacgcgtggaatgaggactgaggatcttcccaaagctgtcgtctttctcgaaccccaatggtatcgggtgctcgaaaaagactctgtgacactgaaatgccaaggggcctactctcccgaggacaactccacacagtggtttcataatgagtccctcatcagctctcaggccagctcttatttcattgatgccgctacagtggacgactccggcgagtatcggtgtcagaccaatctgtctacactgtctgaccccgtgcagcttgaggtccacattggatggttgctcttgcaagccccacgctgggttttcaaagaggaagatccaatccatctgcggtgccacagctggaaaaacaccgctctccacaaagtcacatacctgcaaaatggcaaaggacgcaaatacttccatcacaattccgatttttacattccgaaggctaccctgaaagacagcggcagctatttctgccggggactcgtcggctccaagaatgtgtcctccgaaaccgtgaatatcacgattacccaaggactggctgtgcctacaatctctagcttctttccgcctggataccaagtctccttctgtcttgtgatggtcctcctgtttgctgtggacacaggactgtacttttccgtgaaaacgaacatccgcagctccacacgcgattggaaagatcacaagtttaaatggcgcaaagatccccaggacaag

SEQ ID NO: 5081 - DNA, 1149 bp, Artificial Sequence
  Synthetic Polynucleotide
atggccttaccagtgaccgccttgctcctgccgctggccttgctgctccacgccgccaggccggaggtgcagctggtagaatccggcgggggacttgtacaggctggtggtagtctgagactgagctgtgtggcctccggcatcagcagcagcaagcggaacatgggatggtataggcaagcccctggtaagcagagggaatccgtggctacaatcagcagcggcggcaacaaggactacaccgacgccgtgaaggacaggttcaccatctccagggacaccaccaagaacaccgtgtacctgcagatgaactccctcaagcccgaggacaccgccgtgtactactgcaagatcgaggccggcacaggctgggccaccagaagaggctacacatactgggggcagggaacactggtgaccgtgagctccacgcgtggaatgaggactgaggatcttcccaaagctgtcgtctttctcgaaccccaatggtatcgggtgctcgaaaaagactctgtgacactgaaatgccaaggggcctactctcccgaggacaactccacacagtggtttcataatgagtccctcatcagctctcaggccagctcttatttcattgatgccgctacagtggacgactccggcgagtatcggtgtcagaccaatctgtctacactgtctgaccccgtgcagcttgaggtccacattggatggttgctcttgcaagccccacgctgggttttcaaagaggaagatccaatccatctgcggtgccacagctggaaaaacaccgctctccacaaagtcacatacctgcaaaatggcaaaggacgcaaatacttccatcacaattccgatttttacattccgaaggctaccctgaaagacagcggcagctatttctgccggggactcgtcggctccaagaatgtgtcctccgaaaccgtgaatatcacgattacccaaggactggctgtgcctacaatctctagcttctttccgcctggataccaagtctccttctgtcttgtgatggtcctcctgtttgctgtggacacaggactgtacttttccgtgaaaacgaacatccgcagctccacacgcgattggaaagatcacaagtttaaatggcgcaaagatccccaggacaag

SEQ ID NO: 5082 - DNA, 1119 bp, Artificial Sequence
  Synthetic Polynucleotide
atggccttaccagtgaccgccttgctcctgccgctggccttgctgctccacgccgccaggccgcaggtgcaactggtgcagtctggcggagggctggtgcagccagggggatctctgagactgagctgtgccgccagcgacttcgacttcgccgcctacgagatgagctgggtgcgccaggctcctggacagggactggaatgggtggccatcatcagccacgacggcatcgacaagtattacaccgacagcgtgaagggccggttcaccatcagccgggacaacagcaagaacaccctgtacctgcagatgaataccctgcgggccgaggacaccgccacctactattgcctgagactgggagccgtgggccagggcacacttgtgacagtgtctagcacgcgtggaatgaggactgaggatcttcccaaagctgtcgtctttctcgaaccccaatggtatcgggtgctcgaaaaagactctgtgacactgaaatgccaaggggcctactctcccgaggacaactccacacagtggtttcataatgagtccctcatcagctctcaggccagctcttatttcattgatgccgctacagtggacgactccggcgagtatcggtgtcagaccaatctgtctacactgtctgaccccgtgcagcttgaggtccacattggatggttgctcttgcaagccccacgctgggttttcaaagaggaagatccaatccatctgcggtgccacagctggaaaaacaccgctctccacaaagtcacatacctgcaaaatggcaaaggacgcaaatacttccatcacaattccgatttttacattccgaaggctaccctgaaagacagcggcagctatttctgccggggactcgtcggctccaagaatgtgtcctccgaaaccgtgaatatcacgattacccaaggactggctgtgcctacaatctctagcttctttccgcctggataccaagtctccttctgtcttgtgatggtcctcctgtttgctgtggacacaggactgtacttttccgtgaaaacgaacatccgcagctccacacgcgattggaaagatcacaagtttaaatggcgcaaagatccccaggacaag

SEQ ID NO: 5083 - DNA, 1143 bp, Artificial Sequence
  Synthetic Polynucleotide
atggccttaccagtgaccgccttgctcctgccgctggccttgctgctccacgccgccaggccgcaggtgcaactggtgcagagcggaggcggactggtgcagcctgggggcagtctgaggctgtcttgtgccgcctccgatttcgccttcgatgattacgagatgtcttgggtgcggcaggccccaggcaaagccctggaatggatcggcgacatcaaccacagcggcaccaccatctacaaccccagcctgaagtccagagtgaccatctccagagacaactccaagaatactctgtacctgcagatgaacacactgagagccgaagatacagccatctactactgcgccagaccccactacggcgactacagcgacgccttcgacatctggggccagggaaccatggtcaccgtgtcctctacgcgtggaatgaggactgaggatcttcccaaagctgtcgtctttctcgaaccccaatggtatcgggtgctcgaaaaagactctgtgacactgaaatgccaaggggcctactctcccgaggacaactccacacagtggtttcataatgagtccctcatcagctctcaggccagctcttatttcattgatgccgctacagtggacgactccggcgagtatcggtgtcagaccaatctgtctacactgtctgaccccgtgcagcttgaggtccacattggatggttgctcttgcaagccccacgctgggttttcaaagaggaagatccaatccatctgcggtgccacagctggaaaaacaccgctctccacaaagtcacatacctgcaaaatggcaaaggacgcaaatacttccatcacaattccgatttttacattccgaaggctaccctgaaagacagcggcagctatttctgccggggactcgtcggctccaagaatgtgtcctccgaaaccgtgaatatcacgattacccaaggactggctgtgcctacaatctctagcttctttccgcctggataccaagtctccttctgtcttgtgatggtcctcctgtttgctgtggacacaggactgtacttttccgtgaaaacgaacatccgcagctccacacgcgattggaaagatcacaagtttaaatggcgcaaagatccccaggacaag

SEQ ID NO: 5084 - DNA, 1128 bp, Artificial Sequence
  Synthetic Polynucleotide
atggccttaccagtgaccgccttgctcctgccgctggccttgctgctccacgccgccaggccggaggtgcagctcgtggaatcaggcggaggtcttgtacagccaggaaattctcttcggctgtcttgcgccgcgagcgggttcaccttcagcagcttcggaatgagctgggtaagacaggcaccggggaaaggcctggagtgggtgagctcaatcagtgggagcgggtcagataccctgtacgcggattccgtgaagggcagattcacaatctctcgggacaatgctaagacaacactttaccttcagatgaactctctgcgacccgaggataccgctgtctactactgtacaataggaggttctctgtccagaagttctcaagggacactggtgaccgtctccagcacgcgtggaatgaggactgaggatcttcccaaagctgtcgtctttctcgaaccccaatggtatcgggtgctcgaaaaagactctgtgacactgaaatgccaaggggcctactctcccgaggacaactccacacagtggtttcataatgagtccctcatcagctctcaggccagctcttatttcattgatgccgctacagtggacgactccggcgagtatcggtgtcagaccaatctgtctacactgtctgaccccgtgcagcttgaggtccacattggatggttgctcttgcaagccccacgctgggttttcaaagaggaagatccaatccatctgcggtgccacagctggaaaaacaccgctctccacaaagtcacatacctgcaaaatggcaaaggacgcaaatacttccatcacaattccgatttttacattccgaaggctaccctgaaagacagcggcagctatttctgccggggactcgtcggctccaagaatgtgtcctccgaaaccgtgaatatcacgattacccaaggactggctgtgcctacaatctctagcttctttccgcctggataccaagtctccttctgtcttgtgatggtcctcctgtttgctgtggacacaggactgtacttttccgtgaaaacgaacatccgcagctccacacgcgattggaaagatcacaagtttaaatggcgcaaagatccccaggacaag

SEQ ID NO: 5085 - DNA, 1131 bp, Artificial Sequence
  Synthetic Polynucleotide
atggccttaccagtgaccgccttgctcctgccgctggccttgctgctccacgccgccaggccggaagttcaactggtggaatccggtggaggactggtgcaagcgggcggctcactgcgccttagctgtgctgccagcggcagtatcttcagcggcaatgtaatgggttggtacaggcgacaagccccaggcaaggagcgagagtgggtagccgcgattgcaagtgggggcagcatctactacagagattctgtgaaaggccgcttcactattagtcgggacaacgcaaaaaacacggtgtatctccaaatgaacagcttgaagccagaggacactgctgtctactattgtaacagtcatcccccaactctcccctattgggggctgggcactcaggtcaccgtgagttccacgcgtggaatgaggactgaggatcttcccaaagctgtcgtctttctcgaaccccaatggtatcgggtgctcgaaaaagactctgtgacactgaaatgccaaggggcctactctcccgaggacaactccacacagtggtttcataatgagtccctcatcagctctcaggccagctcttatttcattgatgccgctacagtggacgactccggcgagtatcggtgtcagaccaatctgtctacactgtctgaccccgtgcagcttgaggtccacattggatggttgctcttgcaagccccacgctgggttttcaaagaggaagatccaatccatctgcggtgccacagctggaaaaacaccgctctccacaaagtcacatacctgcaaaatggcaaaggacgcaaatacttccatcacaattccgatttttacattccgaaggctaccctgaaagacagcggcagctatttctgccggggactcgtcggctccaagaatgtgtcctccgaaaccgtgaatatcacgattacccaaggactggctgtgcctacaatctctagcttctttccgcctggataccaagtctccttctgtcttgtgatggtcctcctgtttgctgtggacacaggactgtacttttccgtgaaaacgaacatccgcagctccacacgcgattggaaagatcacaagtttaaatggcgcaaagatccccaggacaag

SEQ ID NO: 5086 - DNA, 1161 bp, Artificial Sequence
  Synthetic Polynucleotide
atggccttaccagtgaccgccttgctcctgccgctggccttgctgctccacgccgccaggccggaagtgcaactggtggaatctggagggggaagcgtgcaggcaggcggatctctgagactgtcctgcaccacatctggcagagccctgaatatgtacgtgatgggatggtttcggcaggctcccggcaacgagcgggaatttgtggccgctacaagcagcagcggcggcagcacaagctaccccgattctgtgaagggcagattcacaatctcccgcgataatgccaagaatactgtgtacctgcagatgaatagtctgaagcctgaagatacagccgcctacagatgtgccgccagcccctacgtgtccacccccaccatgaacatcctggaagagtacagatactggggcctgggaacacaagtgacagtgtccagcacgcgtggaatgaggactgaggatcttcccaaagctgtcgtctttctcgaaccccaatggtatcgggtgctcgaaaaagactctgtgacactgaaatgccaaggggcctactctcccgaggacaactccacacagtggtttcataatgagtccctcatcagctctcaggccagctcttatttcattgatgccgctacagtggacgactccggcgagtatcggtgtcagaccaatctgtctacactgtctgaccccgtgcagcttgaggtccacattggatggttgctcttgcaagccccacgctgggttttcaaagaggaagatccaatccatctgcggtgccacagctggaaaaacaccgctctccacaaagtcacatacctgcaaaatggcaaaggacgcaaatacttccatcacaattccgatttttacattccgaaggctaccctgaaagacagcggcagctatttctgccggggactcgtcggctccaagaatgtgtcctccgaaaccgtgaatatcacgattacccaaggactggctgtgcctacaatctctagcttctttccgcctggataccaagtctccttctgtcttgtgatggtcctcctgtttgctgtggacacaggactgtacttttccgtgaaaacgaacatccgcagctccacacgcgattggaaagatcacaagtttaaatggcgcaaagatccccaggacaag

SEQ ID NO: 5087 - DNA, 1146 bp, Artificial Sequence
  Synthetic Polynucleotide
atggccttaccagtgaccgccttgctcctgccgctggccttgctgctccacgccgccaggccggaggttcagttggtcgaatcaggcgggggcctcgtccaacccggcggaagcctgcggctgtcttgcgcagcaagtggtagtgtgttcaagatcaacgttatggcctggtatcgccaggctccgggaaaagggagagagctggttgcggggatcattagcggtggctccaccagctacgctgacagtgtgaagggaaggttcactatatcacgcgacaacgcaaagaatacattgtacctccagatgaatagcttgcggcccgaagacacggcagtctactattgtgcctttatcacaacagagagcgactatgacctgggccgccggtattgggggcagggaacccttgtgaccgtttcatccacgcgtggaatgaggactgaggatcttcccaaagctgtcgtctttctcgaaccccaatggtatcgggtgctcgaaaaagactctgtgacactgaaatgccaaggggcctactctcccgaggacaactccacacagtggtttcataatgagtccctcatcagctctcaggccagctcttatttcattgatgccgctacagtggacgactccggcgagtatcggtgtcagaccaatctgtctacactgtctgaccccgtgcagcttgaggtccacattggatggttgctcttgcaagccccacgctgggttttcaaagaggaagatccaatccatctgcggtgccacagctggaaaaacaccgctctccacaaagtcacatacctgcaaaatggcaaaggacgcaaatacttccatcacaattccgatttttacattccgaaggctaccctgaaagacagcggcagctatttctgccggggactcgtcggctccaagaatgtgtcctccgaaaccgtgaatatcacgattacccaaggactggctgtgcctacaatctctagcttctttccgcctggataccaagtctccttctgtcttgtgatggtcctcctgtttgctgtggacacaggactgtacttttccgtgaaaacgaacatccgcagctccacacgcgattggaaagatcacaagtttaaatggcgcaaagatccccaggacaag

SEQ ID NO: 5088 - DNA, 1581 bp, Artificial Sequence
  Synthetic Polynucleotide
atggccttaccagtgaccgccttgctcctgccgctggccttgctgctccacgccgccaggccggaggtgcaactggtggaaagcggcggaggctctgtgcagacaggcggctctctgagactgacctgtgccgccagcggcagaaccagcagatcctatggcatgggctggttcagacaggcccctggcaaagaacgcgagttcgtgtccggcatctcttggagaggcgacagcaccggctacgccgatagcgtgaagggccggttcaccatcagccgggacaacgccaagaacaccgtggacctgcagatgaacagcctgaagcccgaggacaccgccatctactactgtgccgctgccgccggatctgcttggtacggcacactgtacgagtacgactactggggccagggcacccttgtgaccgtgtcatctctcgagggcggaggcggaagtggaggcggaggatctggcggcggaggctctttcgaagaggtgcaactggtggaatccgggggaggcagcgtgcaggctgggggatcactgagactgtcttgtgctgcctccggcgacacctacggcagctattggatgggatggtttcggcaggctcccggaaaagaacgggaaggcgtggccgccatcaacagaggcggcggatacaccgtgtacgccgactctgtgaagggcagattcacaatctccagagacacagccaagaatactgtgtacctgcagatgaactccctgcgccccgacgataccgccgactattattgcgccgcttccggcgtgctgggcggcctgcatgaggactggttcaattattggggacagggaacacttgtgacagtgtccagcacgcgtggaatgaggactgaggatcttcccaaagctgtcgtctttctcgaaccccaatggtatcgggtgctcgaaaaagactctgtgacactgaaatgccaaggggcctactctcccgaggacaactccacacagtggtttcataatgagtccctcatcagctctcaggccagctcttatttcattgatgccgctacagtggacgactccggcgagtatcggtgtcagaccaatctgtctacactgtctgaccccgtgcagcttgaggtccacattggatggttgctcttgcaagccccacgctgggttttcaaagaggaagatccaatccatctgcggtgccacagctggaaaaacaccgctctccacaaagtcacatacctgcaaaatggcaaaggacgcaaatacttccatcacaattccgatttttacattccgaaggctaccctgaaagacagcggcagctatttctgccggggactcgtcggctccaagaatgtgtcctccgaaaccgtgaatatcacgattacccaaggactggctgtgcctacaatctctagcttctttccgcctggataccaagtctccttctgtcttgtgatggtcctcctgtttgctgtggacacaggactgtacttttccgtgaaaacgaacatccgcagctccacacgcgattggaaagatcacaagtttaaatggcgcaaagatccccaggacaag

SEQ ID NO: 5089 - DNA, 1638 bp, Artificial Sequence
  Synthetic Polynucleotide
atggccttaccagtgaccgccttgctcctgccgctggccttgctgctccacgccgccaggccggaggtgcagctcgtagaatctggaggtggttccgtgcaagccggaggatcattgcgactgacctgcgcagcgagcggatctacttctcgctcttacggtatgggatggttcagacaggctcctgggaaagagcgcgagttcgtttcaggcatctcctggaggggggacagcaccggctacgcagatagcgtgaagggcaggttcacgatcagccgagacaacgccaaaaacaccgtcgatctgcaaatgaatagtctgaagcccgaagatactgcgatctactactgtgccgccgcagcagggtccacctggtacggcacactctacgagtacgactactgggggcagggaaccctggtaaccgtgtcctctctcgagggaggaggcggctccgggggaggcggaagtggaggcggaggatctgggtctggaggaagcggatctggaggctcagggtcagggggctcaggcagtggaggctctttcgaagttcagctcgtggaaagcggtggcggaagtgtgcaggccggaggcagtttgcgcctgagctgcgctgcttccggcgatacatacgggtcttactggatgggctggtttaggcaggcacctggacaagaaagagaagctgtggccgctattaacaggggaggtggctataccgtttatgctgattccgtgaagggccgattcacaatctcccgggataacgccaaaaacactctgtacctgcagatgaactcccttaggcccgatgacacagccgattactattgtgcggcctccggcgtgctgggtggtctgcatgaggattggttcaactactgggggcaaggcaccctcgtaaccgtgagtagcacgcgtggaatgaggactgaggatcttcccaaagctgtcgtctttctcgaaccccaatggtatcgggtgctcgaaaaagactctgtgacactgaaatgccaaggggcctactctcccgaggacaactccacacagtggtttcataatgagtccctcatcagctctcaggccagctcttatttcattgatgccgctacagtggacgactccggcgagtatcggtgtcagaccaatctgtctacactgtctgaccccgtgcagcttgaggtccacattggatggttgctcttgcaagccccacgctgggttttcaaagaggaagatccaatccatctgcggtgccacagctggaaaaacaccgctctccacaaagtcacatacctgcaaaatggcaaaggacgcaaatacttccatcacaattccgatttttacattccgaaggctaccctgaaagacagcggcagctatttctgccggggactcgtcggctccaagaatgtgtcctccgaaaccgtgaatatcacgattacccaaggactggctgtgcctacaatctctagcttctttccgcctggataccaagtctccttctgtcttgtgatggtcctcctgtttgctgtggacacaggactgtacttttccgtgaaaacgaacatccgcagctccacacgcgattggaaagatcacaagtttaaatggcgcaaagatccccaggacaag

SEQ ID NO: 5090 - DNA, 1608 bp, Artificial Sequence
  Synthetic Polynucleotide
atggccttaccagtgaccgccttgctcctgccgctggccttgctgctccacgccgccaggccggaggtgcaactggtggaaagcggcggaggcctggtgcaggctggcggatctctgagactgagctgtgccgccagcggcatcaccttcagcatcaacacaatgggctggtacagacaggcccctggcaagcagagggaactggtggccctgatctccagcatcggcgacacctactacgccgacagcgtgaagggccggttcaccatcagccgggacaacgccaagaacaccgtgtacctccagatgaacagcctgaagcccgaggacaccgccgtgtactactgcaagcggttcagaacagccgcccagggcaccgattattggggccagggaacacaagtgaccgtgtcctctctcgagggaggaggcggctccgggggaggcggaagtggaggcggaggatctgggtctggaggaagcggatctggaggctcagggtcagggggctcaggcagtggaggctctttcgaagtgcaactggtggaatctgggggcggactggtgcagccaggcggaagtctgaggctgtcttgtgccgcctccggcagcatcttcggcttcaacgacatggcctggtatcggcaggctcccggaaaacagcgcgagctggtggctctgattagcagagtgggcgtgaccagcagcgccgactctgtgaagggcagattcacaatctccagagtgaacgccaaggatacagtgtacctccagatgaactctctgaaacctgaggatacagcagtgtactattgctacatggaccagcggctggacggcagcacactggcctactggggacagggaactcaagtgacagtgtctagcacgcgtggaatgaggactgaggatcttcccaaagctgtcgtctttctcgaaccccaatggtatcgggtgctcgaaaaagactctgtgacactgaaatgccaaggggcctactctcccgaggacaactccacacagtggtttcataatgagtccctcatcagctctcaggccagctcttatttcattgatgccgctacagtggacgactccggcgagtatcggtgtcagaccaatctgtctacactgtctgaccccgtgcagcttgaggtccacattggatggttgctcttgcaagccccacgctgggttttcaaagaggaagatccaatccatctgcggtgccacagctggaaaaacaccgctctccacaaagtcacatacctgcaaaatggcaaaggacgcaaatacttccatcacaattccgatttttacattccgaaggctaccctgaaagacagcggcagctatttctgccggggactcgtcggctccaagaatgtgtcctccgaaaccgtgaatatcacgattacccaaggactggctgtgcctacaatctctagcttctttccgcctggataccaagtctccttctgtcttgtgatggtcctcctgtttgctgtggacacaggactgtacttttccgtgaaaacgaacatccgcagctccacacgcgattggaaagatcacaagtttaaatggcgcaaagatccccaggacaag

SEQ ID NO: 5091 - DNA, 1509 bp, Artificial Sequence; identical to SEQ ID NO: 4906
  Synthetic Polynucleotide

SEQ ID NO: 5092 - DNA, 1623 bp, Artificial Sequence
  Synthetic Polynucleotide
atggccttaccagtgaccgccttgctcctgccgctggccttgctgctccacgccgccaggccggacgtgcaactcgtggaatccggcggaggcctggtgcagcctggcggatctctgagactgagctgtgccgccagcggctctatcggcggactgaatgccatggcctggtacagacaggcccctggcaaagaacgggaactggtggccggcatctttggcgtgggcagcaccagatacgccgacagcgtgaagggccggttcaccatcagccgggacaacagcaagaacaccgtgtacctgcagatgaacagcctgcggcccgaggataccgccgtgtactactgcagaatgtccagcgtgaccagaggctccagcgactactggggccagggaacacttgtgaccgtgtccagtctcgagggaggaggcggctccgggggaggcggaagtggaggcggaggatctgggtctggaggaagcggatctggaggctcagggtcagggggctcaggcagtggaggctctttcgaagtgcaactggtggaatctggaggctctctggtgcagccagggggaagcctgagactgtcttgtgccgcttccggcttcaccttcgacgactacgccatgagctgggtgcgccaggtgccaggcaaaggcctggaatgggtgtccagcatcaactggagcggcacccacaccgattacgccgactccgtgaaaggcagattcacaatcagcagaaacaacgccaacaataccctgtacctgcagatgaactccctgaagtctgaggatacagcagtgtattattgcgccaagaactggcgggacgccggcaccacttggtttgagaaaagcggctctgccggacagggaacccaagtgacagtgtcctccacgcgtggaatgaggactgaggatcttcccaaagctgtcgtctttctcgaaccccaatggtatcgggtgctcgaaaaagactctgtgacactgaaatgccaaggggcctactctcccgaggacaactccacacagtggtttcataatgagtccctcatcagctctcaggccagctcttatttcattgatgccgctacagtggacgactccggcgagtatcggtgtcagaccaatctgtctacactgtctgaccccgtgcagcttgaggtccacattggatggttgctcttgcaagccccacgctgggttttcaaagaggaagatccaatccatctgcggtgccacagctggaaaaacaccgctctccacaaagtcacatacctgcaaaatggcaaaggacgcaaatacttccatcacaattccgatttttacattccgaaggctaccctgaaagacagcggcagctatttctgccggggactcgtcggctccaagaatgtgtcctccgaaaccgtgaatatcacgattacccaaggactggctgtgcctacaatctctagcttctttccgcctggataccaagtctccttctgtcttgtgatggtcctcctgtttgctgtggacacaggactgtacttttccgtgaaaacgaacatccgcagctccacacgcgattggaaagatcacaagtttaaatggcgcaaagatccccaggacaag

SEQ ID NO: 5093 - DNA, 1647 bp, Artificial Sequence
  Synthetic Polynucleotide
atggccttaccagtgaccgccttgctcctgccgctggccttgctgctccacgccgccaggccggatgttcagttggtggagtctggtggcggtttggtgcagccaggtggctccctgcgactcagttgtgcagcctccgggttcattctggattactacgctattggttggtttcgacaggcccccggaaaggagagagagggcgtgctctgcattgatgccagcgacgacattacctactacgccgattctgtgaagggccgcttcaccatcagtagagacaatagcaagaatacagtctacctgcagatgaactccctgcgcccagaagacactgccgtctactactgtgctacccctatcgggctttcttcctcttgccttctcgaatatgactacgattactgggggcaggggacgctggtcaccgtgtctagcctcgagggaggtagcggctccgggggaggcggaagtggaggcggaggatctgggtctggaggaagcggatctggaggctcagggtcagggggctcaggcagtggaggctctttcgaagtgcaactggtggagtccggcggtggactggtacagcctgggggttcactgcgcctgtcctgcgccgccagcggaagaacctattacctcaatgctatgggttggttccgccaggccccaggaaaggagcgcgagttcgtggcggctattgactggtccgaggggaacaaggactatgctgattccgtgaagggcaggtttaccatcagccgggataattcaaaaaatactgtttatttgcagatgaactctcttagaccagaagacactgctgtctattactgcgccgctgacacccctccttggggaccactgatttatatcgaaagctatgattcctgggggcagggcacactcgtcaccgtgagtagcacgcgtggaatgaggactgaggatcttcccaaagctgtcgtctttctcgaaccccaatggtatcgggtgctcgaaaaagactctgtgacactgaaatgccaaggggcctactctcccgaggacaactccacacagtggtttcataatgagtccctcatcagctctcaggccagctcttatttcattgatgccgctacagtggacgactccggcgagtatcggtgtcagaccaatctgtctacactgtctgaccccgtgcagcttgaggtccacattggatggttgctcttgcaagccccacgctgggttttcaaagaggaagatccaatccatctgcggtgccacagctggaaaaacaccgctctccacaaagtcacatacctgcaaaatggcaaaggacgcaaatacttccatcacaattccgatttttacattccgaaggctaccctgaaagacagcggcagctatttctgccggggactcgtcggctccaagaatgtgtcctccgaaaccgtgaatatcacgattacccaaggactggctgtgcctacaatctctagcttctttccgcctggataccaagtctccttctgtcttgtgatggtcctcctgtttgctgtggacacaggactgtacttttccgtgaaaacgaacatccgcagctccacacgcgattggaaagatcacaagtttaaatggcgcaaagatccccaggacaag

SEQ ID NO: 5094 - DNA, 1596 bp, Artificial Sequence
  Synthetic Polynucleotide
atggccttaccagtgaccgccttgctcctgccgctggccttgctgctccacgccgccaggccgcaggtgcaactggtgcagtctggcggagggctggtgcagccagggggatctctgagactgagctgtgccgccagcgacttcgacttcgccgcctacgagatgagctgggtgcgccaggctcctggacagggactggaatgggtggccatcatcagccacgacggcatcgacaagtattacaccgacagcgtgaagggccggttcaccatcagccgggacaacagcaagaacaccctgtacctgcagatgaataccctgcgggccgaggacaccgccacctactattgcctgagactgggagccgtgggccagggcacacttgtgacagtgtctagcctcgagggaggaggcggctccgggggaggcggaagtggaggcggaggatctgggtctggaggaagcggatctggaggctcagggtcagggggctcaggcagtggaggcagcttcgaacaggtgcaactggtgcagagcggaggcggactggtgcagcctgggggcagtctgaggctgtcttgtgccgcctccgatttcgccttcgatgattacgagatgtcttgggtgcggcaggccccaggcaaagccctggaatggatcggcgacatcaaccacagcggcaccaccatctacaaccccagcctgaagtccagagtgaccatctccagagacaactccaagaatactctgtacctgcagatgaacacactgagagccgaagatacagccatctactactgcgccagaccccactacggcgactacagcgacgccttcgacatctggggccagggaaccatggtcaccgtgtcctctacgcgtggaatgaggactgaggatcttcccaaagctgtcgtctttctcgaaccccaatggtatcgggtgctcgaaaaagactctgtgacactgaaatgccaaggggcctactctcccgaggacaactccacacagtggtttcataatgagtccctcatcagctctcaggccagctcttatttcattgatgccgctacagtggacgactccggcgagtatcggtgtcagaccaatctgtctacactgtctgaccccgtgcagcttgaggtccacattggatggttgctcttgcaagccccacgctgggttttcaaagaggaagatccaatccatctgcggtgccacagctggaaaaacaccgctctccacaaagtcacatacctgcaaaatggcaaaggacgcaaatacttccatcacaattccgatttttacattccgaaggctaccctgaaagacagcggcagctatttctgccggggactcgtcggctccaagaatgtgtcctccgaaaccgtgaatatcacgattacccaaggactggctgtgcctacaatctctagcttctttccgcctggataccaagtctccttctgtcttgtgatggtcctcctgtttgctgtggacacaggactgtacttttccgtgaaaacgaacatccgcagctccacacgcgattggaaagatcacaagtttaaatggcgcaaagatccccaggacaag

SEQ ID NO: 5095 - DNA, 1140 bp, Artificial Sequence
  Synthetic Polynucleotide
atggccttaccagtgaccgccttgctcctgccgctggccttgctgctccacgccgccaggccgcaagtgaagctggaagagtctggcggaggactggtgcaggctggaagaagcctgagactgtcttgtgccgccagcgagcacacctttagctctcacgtgatgggctggttcagacaggcccctggcaaagaaagggaaagcgtggccgttatcggctggcgggatattagcaccagctacgccgatagcgtgaagggcagattcaccatcagccgggacaacgccaagaaaaccctgtacctccagatgaacagcctgaagccagaggacaccgccgtgtactactgcgccgccagaagaattgacgccgccgactttgattcttggggccagggaacccaagtgaccgtttctagcacgcgtggaatgaggactgaggatcttcccaaagctgtcgtctttctcgaaccccaatggtatcgggtgctcgaaaaagactctgtgacactgaaatgccaaggggcctactctcccgaggacaactccacacagtggtttcataatgagtccctcatcagctctcaggccagctcttatttcattgatgccgctacagtggacgactccggcgagtatcggtgtcagaccaatctgtctacactgtctgaccccgtgcagcttgaggtccacattggatggttgctcttgcaagccccacgctgggttttcaaagaggaagatccaatccatctgcggtgccacagctggaaaaacaccgctctccacaaagtcacatacctgcaaaatggcaaaggacgcaaatacttccatcacaattccgatttttacattccgaaggctaccctgaaagacagcggcagctatttctgccggggactcgtcggctccaagaatgtgtcctccgaaaccgtgaatatcacgattacccaaggactggctgtgcctacaatctctagcttctttccgcctggataccaagtctccttctgtcttgtgatggtcctcctgtttgctgtggacacaggactgtacttttccgtgaaaacgaacatccgcagctccacacgcgattggaaagatcacaagtttaaatggcgcaaagatccccaggacaag

SEQ ID NO: 5096 - DNA, 1137 bp, Artificial Sequence
  Synthetic Polynucleotide
atggccttaccagtgaccgccttgctcctgccgctggccttgctgctccacgccgccaggccggaagtgcaactggttgaatccggtggcggcctggtgcaagcaggcggatctctcagacttagctgtgccgcctccggcagaaccttcacaatgggatggtttaggcaggctccagggaaagagagagagttcgtcgccgccatctctctgtctcccacactggcctactacgccgagtctgtgaaaggccggttcaccatctccagagataatgccaagaacaccgtggtgctgcaaatgaactctctgaaacccgaggatacagccctgtactattgtgccgctgaccggaagtccgtgatgagcatcagacccgattactggggacagggcacacaagtcacagtgtcctctacgcgtggaatgaggactgaggatcttcccaaagctgtcgtctttctcgaaccccaatggtatcgggtgctcgaaaaagactctgtgacactgaaatgccaaggggcctactctcccgaggacaactccacacagtggtttcataatgagtccctcatcagctctcaggccagctcttatttcattgatgccgctacagtggacgactccggcgagtatcggtgtcagaccaatctgtctacactgtctgaccccgtgcagcttgaggtccacattggatggttgctcttgcaagccccacgctgggttttcaaagaggaagatccaatccatctgcggtgccacagctggaaaaacaccgctctccacaaagtcacatacctgcaaaatggcaaaggacgcaaatacttccatcacaattccgatttttacattccgaaggctaccctgaaagacagcggcagctatttctgccggggactcgtcggctccaagaatgtgtcctccgaaaccgtgaatatcacgattacccaaggactggctgtgcctacaatctctagcttctttccgcctggataccaagtctccttctgtcttgtgatggtcctcctgtttgctgtggacacaggactgtacttttccgtgaaaacgaacatccgcagctccacacgcgattggaaagatcacaagtttaaatggcgcaaagatccccaggacaag

SEQ ID NO: 5097 - DNA, 1539 bp, Artificial Sequence
  Synthetic Polynucleotide
atggccttaccagtgaccgccttgctcctgccgctggccttgctgctccacgccgccaggccgcaagtgaagctggaagagtctggcggaggactggtgcaggctggaagaagcctgagactgtcttgtgccgccagcgagcacacctttagctctcacgtgatgggctggttcagacaggcccctggcaaagaaagggaaagcgtggccgttatcggctggcgggatattagcaccagctacgccgatagcgtgaagggcagattcaccatcagccgggacaacgccaagaaaaccctgtacctccagatgaacagcctgaagccagaggacaccgccgtgtactactgcgccgccagaagaattgacgccgccgactttgattcttggggccagggaacccaagtgaccgtttctagcggaggcggtggaagtggcggcggtggttcaggcggcggaggatctgaagtgcaactggttgaatccggtggcggcctggtgcaagcaggcggatctctcagacttagctgtgccgcctccggcagaaccttcacaatgggatggtttaggcaggctccagggaaagagagagagttcgtcgccgccatctctctgtctcccacactggcctactacgccgagtctgtgaaaggccggttcaccatctccagagataatgccaagaacaccgtggtgctgcaaatgaactctctgaaacccgaggatacagccctgtactattgtgccgctgaccggaagtccgtgatgagcatcagacccgattactggggacagggcacacaagtcacagtgtcctctacgcgtggaatgaggactgaggatcttcccaaagctgtcgtctttctcgaaccccaatggtatcgggtgctcgaaaaagactctgtgacactgaaatgccaaggggcctactctcccgaggacaactccacacagtggtttcataatgagtccctcatcagctctcaggccagctcttatttcattgatgccgctacagtggacgactccggcgagtatcggtgtcagaccaatctgtctacactgtctgaccccgtgcagcttgaggtccacattggatggttgctcttgcaagccccacgctgggttttcaaagaggaagatccaatccatctgcggtgccacagctggaaaaacaccgctctccacaaagtcacatacctgcaaaatggcaaaggacgcaaatacttccatcacaattccgatttttacattccgaaggctaccctgaaagacagcggcagctatttctgccggggactcgtcggctccaagaatgtgtcctccgaaaccgtgaatatcacgattacccaaggactggctgtgcctacaatctctagcttctttccgcctggataccaagtctccttctgtcttgtgatggtcctcctgtttgctgtggacacaggactgtacttttccgtgaaaacgaacatccgcagctccacacgcgattggaaagatcacaagtttaaatggcgcaaagatccccaggacaag

SEQ ID NO: 5098 - DNA, 1131 bp, Artificial Sequence
  Synthetic Polynucleotide
atggccttaccagtgaccgccttgctcctgccgctggccttgctgctccacgccgccaggccggaggtgcaactggttgagtctggcggaggactggttcaggcaggcggatctctgagactgagctgtatcgccaccggcaaggtgttcagcatctacgacatgggctggtacagacaggcccctggcaagcagagagagctggttgccgagatcacaagcagcggcaccacacactacgacgacttcgtgtccggcagattcaccatcagccgggacaacgccaagaacaccgtgtacctccagatgaacaccctgaaggccgaggacaccgccgtgtactactgtagagccaaccacgtgttcggcggcagctattggggacagggaacccaagtgacagtgtctagtacgcgtggaatgaggactgaggatcttcccaaagctgtcgtctttctcgaaccccaatggtatcgggtgctcgaaaaagactctgtgacactgaaatgccaaggggcctactctcccgaggacaactccacacagtggtttcataatgagtccctcatcagctctcaggccagctcttatttcattgatgccgctacagtggacgactccggcgagtatcggtgtcagaccaatctgtctacactgtctgaccccgtgcagcttgaggtccacattggatggttgctcttgcaagccccacgctgggttttcaaagaggaagatccaatccatctgcggtgccacagctggaaaaacaccgctctccacaaagtcacatacctgcaaaatggcaaaggacgcaaatacttccatcacaattccgatttttacattccgaaggctaccctgaaagacagcggcagctatttctgccggggactcgtcggctccaagaatgtgtcctccgaaaccgtgaatatcacgattacccaaggactggctgtgcctacaatctctagcttctttccgcctggataccaagtctccttctgtcttgtgatggtcctcctgtttgctgtggacacaggactgtacttttccgtgaaaacgaacatccgcagctccacacgcgattggaaagatcacaagtttaaatggcgcaaagatccccaggacaag

SEQ ID NO: 5099 - DNA, 1149 bp, Artificial Sequence
  Synthetic Polynucleotide
atggccttaccagtgaccgccttgctcctgccgctggccttgctgctccacgccgccaggccgcaggtgcagcttgttgaaagcggaggtggcctggttcaacctggcggaagcctgagactgtcctgtgaagccagcggctttaccctggactactacgccatcggctggtttagacaagctcccggcaaagagagagagggcgtcatctgcatcagcagatccgacggcagcacctactatgccgacagcgtgaagggacgcttcaccatctccagagacaatgccaaaaagacggtctacctgcaaatgatctccctcaagcctgaggataccgccgcctactattgtgccgctggcgctgattgcagcggctacctgagagactacgagttcagaggccagggcacacaagtgaccgtcagctctacgcgtggaatgaggactgaggatcttcccaaagctgtcgtctttctcgaaccccaatggtatcgggtgctcgaaaaagactctgtgacactgaaatgccaaggggcctactctcccgaggacaactccacacagtggtttcataatgagtccctcatcagctctcaggccagctcttatttcattgatgccgctacagtggacgactccggcgagtatcggtgtcagaccaatctgtctacactgtctgaccccgtgcagcttgaggtccacattggatggttgctcttgcaagccccacgctgggttttcaaagaggaagatccaatccatctgcggtgccacagctggaaaaacaccgctctccacaaagtcacatacctgcaaaatggcaaaggacgcaaatacttccatcacaattccgatttttacattccgaaggctaccctgaaagacagcggcagctatttctgccggggactcgtcggctccaagaatgtgtcctccgaaaccgtgaatatcacgattacccaaggactggctgtgcctacaatctctagcttctttccgcctggataccaagtctccttctgtcttgtgatggtcctcctgtttgctgtggacacaggactgtacttttccgtgaaaacgaacatccgcagctccacacgcgattggaaagatcacaagtttaaatggcgcaaagatccccaggacaag

SEQ ID NO: 5100 - DNA, 1518 bp, Artificial Sequence
  Synthetic Polynucleotide
atggccttaccagtgaccgccttgctcctgccgctggccttgctgctccacgccgccaggccggaggtgcaactggttgagtctggcggaggactggttcaggcaggcggatctctgagactgagctgtatcgccaccggcaaggtgttcagcatctacgacatgggctggtacagacaggcccctggcaagcagagagagctggttgccgagatcacaagcagcggcaccacacactacgacgacttcgtgtccggcagattcaccatcagccgggacaacgccaagaacaccgtgtacctccagatgaacaccctgaaggccgaggacaccgccgtgtactactgtagagccaaccacgtgttcggcggcagctattggggacagggaacccaagtgacagtgtctagtgaggtggccgctttggagaaacaggtgcagcttgttgaaagcggaggtggcctggttcaacctggcggaagcctgagactgtcctgtgaagccagcggctttaccctggactactacgccatcggctggtttagacaagctcccggcaaagagagagagggcgtcatctgcatcagcagatccgacggcagcacctactatgccgacagcgtgaagggacgcttcaccatctccagagacaatgccaaaaagacggtctacctgcaaatgatctccctcaagcctgaggataccgccgcctactattgtgccgctggcgctgattgcagcggctacctgagagactacgagttcagaggccagggcacacaagtgaccgtcagctctacgcgtggaatgaggactgaggatcttcccaaagctgtcgtctttctcgaaccccaatggtatcgggtgctcgaaaaagactctgtgacactgaaatgccaaggggcctactctcccgaggacaactccacacagtggtttcataatgagtccctcatcagctctcaggccagctcttatttcattgatgccgctacagtggacgactccggcgagtatcggtgtcagaccaatctgtctacactgtctgaccccgtgcagcttgaggtccacattggatggttgctcttgcaagccccacgctgggttttcaaagaggaagatccaatccatctgcggtgccacagctggaaaaacaccgctctccacaaagtcacatacctgcaaaatggcaaaggacgcaaatacttccatcacaattccgatttttacattccgaaggctaccctgaaagacagcggcagctatttctgccggggactcgtcggctccaagaatgtgtcctccgaaaccgtgaatatcacgattacccaaggactggctgtgcctacaatctctagcttctttccgcctggataccaagtctccttctgtcttgtgatggtcctcctgtttgctgtggacacaggactgtacttttccgtgaaaacgaacatccgcagctccacacgcgattggaaagatcacaagtttaaatggcgcaaagatccccaggacaag

SEQ ID NO: 5101 - DNA, 1167 bp, Artificial Sequence
  Synthetic Polynucleotide
atggccttaccagtgaccgccttgctcctgccgctggccttgctgctccacgccgccaggccgcaagtgaagctggaagagtctggcggcagactggtgcagcctagaggaagcctgagactgtcttgtgccggcagcggcagaacctttagcacatacggcatggcctggttcagacaggcccctggaaaagagagagagttcgtcgccagcaaggccagcatgaactactccggcaggacctactacgccgacagcgtgaagggcagattcacaatcgccagagacaacgccaagaacatggtgttcctccagatgaacaatctgaagcccgaggacaccgccgtgtactattgtgccgctggcacaggctgtagcacctacggctgtttcgacgcccagatcatcgactactggggcaagggcacactggtcacagtttctagcacgcgtggaatgaggactgaggatcttcccaaagctgtcgtctttctcgaaccccaatggtatcgggtgctcgaaaaagactctgtgacactgaaatgccaaggggcctactctcccgaggacaactccacacagtggtttcataatgagtccctcatcagctctcaggccagctcttatttcattgatgccgctacagtggacgactccggcgagtatcggtgtcagaccaatctgtctacactgtctgaccccgtgcagcttgaggtccacattggatggttgctcttgcaagccccacgctgggttttcaaagaggaagatccaatccatctgcggtgccacagctggaaaaacaccgctctccacaaagtcacatacctgcaaaatggcaaaggacgcaaatacttccatcacaattccgatttttacattccgaaggctaccctgaaagacagcggcagctatttctgccggggactcgtcggctccaagaatgtgtcctccgaaaccgtgaatatcacgattacccaaggactggctgtgcctacaatctctagcttctttccgcctggataccaagtctccttctgtcttgtgatggtcctcctgtttgctgtggacacaggactgtacttttccgtgaaaacgaacatccgcagctccacacgcgattggaaagatcacaagtttaaatggcgcaaagatccccaggacaag

SEQ ID NO: 5102 - DNA, 1140 bp, Artificial Sequence
  Synthetic Polynucleotide
atggccttaccagtgaccgccttgctcctgccgctggccttgctgctccacgccgccaggccgcaagtcaaactggaagaaagcggtggcggcctggtgcaacctggcgaatctctgagactgagctgtagcgccagcggctccatcttcaaggtgttcagagtgttcgccatgagctggtacaggcaaggccctggcaagcagagagagctggtcgcctctatcagcagcggcgagacaaccacatacgccgactctgtgaaaggccggttcaccatcagccgggataatgccaagaataccgcctatctccagatggactccctgaagcctgaagatacagctgtgtactactgcaacgccgaccataccttcaccggcgatttttggggccagggaacccaagtgaccgtgtctagtacgcgtggaatgaggactgaggatcttcccaaagctgtcgtctttctcgaaccccaatggtatcgggtgctcgaaaaagactctgtgacactgaaatgccaaggggcctactctcccgaggacaactccacacagtggtttcataatgagtccctcatcagctctcaggccagctcttatttcattgatgccgctacagtggacgactccggcgagtatcggtgtcagaccaatctgtctacactgtctgaccccgtgcagcttgaggtccacattggatggttgctcttgcaagccccacgctgggttttcaaagaggaagatccaatccatctgcggtgccacagctggaaaaacaccgctctccacaaagtcacatacctgcaaaatggcaaaggacgcaaatacttccatcacaattccgatttttacattccgaaggctaccctgaaagacagcggcagctatttctgccggggactcgtcggctccaagaatgtgtcctccgaaaccgtgaatatcacgattacccaaggactggctgtgcctacaatctctagcttctttccgcctggataccaagtctccttctgtcttgtgatggtcctcctgtttgctgtggacacaggactgtacttttccgtgaaaacgaacatccgcagctccacacgcgattggaaagatcacaagtttaaatggcgcaaagatccccaggacaag

SEQ ID NO: 5103 - DNA, 1545 bp, Artificial Sequence
  Synthetic Polynucleotide
atggccttaccagtgaccgccttgctcctgccgctggccttgctgctccacgccgccaggccgcaagtgaagctggaagagtctggcggcagactggtgcagcctagaggaagcctgagactgtcttgtgccggcagcggcagaacctttagcacatacggcatggcctggttcagacaggcccctggaaaagagagagagttcgtcgccagcaaggccagcatgaactactccggcaggacctactacgccgacagcgtgaagggcagattcacaatcgccagagacaacgccaagaacatggtgttcctccagatgaacaatctgaagcccgaggacaccgccgtgtactattgtgccgctggcacaggctgtagcacctacggctgtttcgacgcccagatcatcgactactggggcaagggcacactggtcacagtttctagcgaggtggccgctttggagaaacaagtcaaactggaagaaagcggtggcggcctggtgcaacctggcgaatctctgagactgagctgtagcgccagcggctccatcttcaaggtgttcagagtgttcgccatgagctggtacaggcaaggccctggcaagcagagagagctggtcgcctctatcagcagcggcgagacaaccacatacgccgactctgtgaaaggccggttcaccatcagccgggataatgccaagaataccgcctatctccagatggactccctgaagcctgaagatacagctgtgtactactgcaacgccgaccataccttcaccggcgatttttggggccagggaacccaagtgaccgtgtctagtacgcgtggaatgaggactgaggatcttcccaaagctgtcgtctttctcgaaccccaatggtatcgggtgctcgaaaaagactctgtgacactgaaatgccaaggggcctactctcccgaggacaactccacacagtggtttcataatgagtccctcatcagctctcaggccagctcttatttcattgatgccgctacagtggacgactccggcgagtatcggtgtcagaccaatctgtctacactgtctgaccccgtgcagcttgaggtccacattggatggttgctcttgcaagccccacgctgggttttcaaagaggaagatccaatccatctgcggtgccacagctggaaaaacaccgctctccacaaagtcacatacctgcaaaatggcaaaggacgcaaatacttccatcacaattccgatttttacattccgaaggctaccctgaaagacagcggcagctatttctgccggggactcgtcggctccaagaatgtgtcctccgaaaccgtgaatatcacgattacccaaggactggctgtgcctacaatctctagcttctttccgcctggataccaagtctccttctgtcttgtgatggtcctcctgtttgctgtggacacaggactgtacttttccgtgaaaacgaacatccgcagctccacacgcgattggaaagatcacaagtttaaatggcgcaaagatccccaggacaag

SEQ ID NO: 5104 - DNA, 1134 bp, Artificial Sequence
  Synthetic Polynucleotide
atggccttaccagtgaccgccttgctcctgccgctggccttgctgctccacgccgccaggccgcaagtgaagctggaagagtctggcggagagctggttcaacctggcggacctctgagactgtcttgtgccgccagcggcaacatcttcagcatcaaccggatgggctggtacagacaggcccctggaaaacagagagccttcgtcgcctctatcaccgtgcggggcatcaccaattacgccgactctgtgaagggcagattcaccatcagcgtggacaagagcaagaacaccatctacctccagatgaacgccctgaagcctgaggacaccgccgtgtactactgcaatgccgtgtccagcaacagggaccccgattattggggccagggcacccaagtgacagtgtctagtacgcgtggaatgaggactgaggatcttcccaaagctgtcgtctttctcgaaccccaatggtatcgggtgctcgaaaaagactctgtgacactgaaatgccaaggggcctactctcccgaggacaactccacacagtggtttcataatgagtccctcatcagctctcaggccagctcttatttcattgatgccgctacagtggacgactccggcgagtatcggtgtcagaccaatctgtctacactgtctgaccccgtgcagcttgaggtccacattggatggttgctcttgcaagccccacgctgggttttcaaagaggaagatccaatccatctgcggtgccacagctggaaaaacaccgctctccacaaagtcacatacctgcaaaatggcaaaggacgcaaatacttccatcacaattccgatttttacattccgaaggctaccctgaaagacagcggcagctatttctgccggggactcgtcggctccaagaatgtgtcctccgaaaccgtgaatatcacgattacccaaggactggctgtgcctacaatctctagcttctttccgcctggataccaagtctccttctgtcttgtgatggtcctcctgtttgctgtggacacaggactgtacttttccgtgaaaacgaacatccgcagctccacacgcgattggaaagatcacaagtttaaatggcgcaaagatccccaggacaag

SEQ ID NO: 5105 - DNA, 1170 bp, Artificial Sequence
  Synthetic Polynucleotide
atggccttaccagtgaccgccttgctcctgccgctggccttgctgctccacgccgccaggccgcctgttcaactggttgaatctggcggcggactggtgcaggctggcgatagtctcagactgagctgtgccgcctccggcagaacatttggcatcggcacaatgggatggttccggcagcctcctggaaaagaacgcgaatttgtggccgccatcagatggtctacaggcggcaccagatacgccgacagcgtgaaaggccggtttaccatcagcagagacaacgccaagctgaccgtggatctccagatggatagcctgaaaccagaggatacagccgtctattactgcgccgctgacaggctgagcctggatctgtctggcagataccactacaaccctgccgtgtacgactactggggacagggaacacaagtcaccgtgtcctctacgcgtggaatgaggactgaggatcttcccaaagctgtcgtctttctcgaaccccaatggtatcgggtgctcgaaaaagactctgtgacactgaaatgccaaggggcctactctcccgaggacaactccacacagtggtttcataatgagtccctcatcagctctcaggccagctcttatttcattgatgccgctacagtggacgactccggcgagtatcggtgtcagaccaatctgtctacactgtctgaccccgtgcagcttgaggtccacattggatggttgctcttgcaagccccacgctgggttttcaaagaggaagatccaatccatctgcggtgccacagctggaaaaacaccgctctccacaaagtcacatacctgcaaaatggcaaaggacgcaaatacttccatcacaattccgatttttacattccgaaggctaccctgaaagacagcggcagctatttctgccggggactcgtcggctccaagaatgtgtcctccgaaaccgtgaatatcacgattacccaaggactggctgtgcctacaatctctagcttctttccgcctggataccaagtctccttctgtcttgtgatggtcctcctgtttgctgtggacacaggactgtacttttccgtgaaaacgaacatccgcagctccacacgcgattggaaagatcacaagtttaaatggcgcaaagatccccaggacaag

SEQ ID NO: 5106 - DNA, 1566 bp, Artificial Sequence
  Synthetic Polynucleotide
atggccttaccagtgaccgccttgctcctgccgctggccttgctgctccacgccgccaggccgcaagtgaagctggaagagtctggcggagagctggttcaacctggcggacctctgagactgtcttgtgccgccagcggcaacatcttcagcatcaaccggatgggctggtacagacaggcccctggaaaacagagagccttcgtcgcctctatcaccgtgcggggcatcaccaattacgccgactctgtgaagggcagattcaccatcagcgtggacaagagcaagaacaccatctacctccagatgaacgccctgaagcctgaggacaccgccgtgtactactgcaatgccgtgtccagcaacagggaccccgattattggggccagggcacccaagtgacagtgtctagtggaggcggtggaagtggcggcggtggttcaggcggcggaggatctcctgttcaactggttgaatctggcggcggactggtgcaggctggcgatagtctcagactgagctgtgccgcctccggcagaacatttggcatcggcacaatgggatggttccggcagcctcctggaaaagaacgcgaatttgtggccgccatcagatggtctacaggcggcaccagatacgccgacagcgtgaaaggccggtttaccatcagcagagacaacgccaagctgaccgtggatctccagatggatagcctgaaaccagaggatacagccgtctattactgcgccgctgacaggctgagcctggatctgtctggcagataccactacaaccctgccgtgtacgactactggggacagggaacacaagtcaccgtgtcctctacgcgtggaatgaggactgaggatcttcccaaagctgtcgtctttctcgaaccccaatggtatcgggtgctcgaaaaagactctgtgacactgaaatgccaaggggcctactctcccgaggacaactccacacagtggtttcataatgagtccctcatcagctctcaggccagctcttatttcattgatgccgctacagtggacgactccggcgagtatcggtgtcagaccaatctgtctacactgtctgaccccgtgcagcttgaggtccacattggatggttgctcttgcaagccccacgctgggttttcaaagaggaagatccaatccatctgcggtgccacagctggaaaaacaccgctctccacaaagtcacatacctgcaaaatggcaaaggacgcaaatacttccatcacaattccgatttttacattccgaaggctaccctgaaagacagcggcagctatttctgccggggactcgtcggctccaagaatgtgtcctccgaaaccgtgaatatcacgattacccaaggactggctgtgcctacaatctctagcttctttccgcctggataccaagtctccttctgtcttgtgatggtcctcctgtttgctgtggacacaggactgtacttttccgtgaaaacgaacatccgcagctccacacgcgattggaaagatcacaagtttaaatggcgcaaagatccccaggacaag

SEQ ID NO: 5107 - DNA, 1140 bp, Artificial Sequence
  Synthetic Polynucleotide
atggccttaccagtgaccgccttgctcctgccgctggccttgctgctccacgccgccaggccggccgtgcaactggttgaatctggcggaggactggtgcaggctggcgattctctgagactgacctgtacagccagcggcagagccttcagcacctacttcatggcctggttcagacaggcccctggcaaagagagagagttcgtcgccggaatcgcttggagcggaggctctacagcctacgccgattctgtgaagggcagattcaccatcagccgggacaacgccaagaacaccgtgtacctccagatgaacagcctgaagtccgaggacaccgccgtgtactactgtgccagcagaggcatcgaggtggaagagtttggagcctggggccagggaacccaagtgacagtttcttctacgcgtggaatgaggactgaggatcttcccaaagctgtcgtctttctcgaaccccaatggtatcgggtgctcgaaaaagactctgtgacactgaaatgccaaggggcctactctcccgaggacaactccacacagtggtttcataatgagtccctcatcagctctcaggccagctcttatttcattgatgccgctacagtggacgactccggcgagtatcggtgtcagaccaatctgtctacactgtctgaccccgtgcagcttgaggtccacattggatggttgctcttgcaagccccacgctgggttttcaaagaggaagatccaatccatctgcggtgccacagctggaaaaacaccgctctccacaaagtcacatacctgcaaaatggcaaaggacgcaaatacttccatcacaattccgatttttacattccgaaggctaccctgaaagacagcggcagctatttctgccggggactcgtcggctccaagaatgtgtcctccgaaaccgtgaatatcacgattacccaaggactggctgtgcctacaatctctagcttctttccgcctggataccaagtctccttctgtcttgtgatggtcctcctgtttgctgtggacacaggactgtacttttccgtgaaaacgaacatccgcagctccacacgcgattggaaagatcacaagtttaaatggcgcaaagatccccaggacaag

SEQ ID NO: 5108 - DNA, 1143 bp, Artificial Sequence
  Synthetic Polynucleotide
atggccttaccagtgaccgccttgctcctgccgctggccttgctgctccacgccgccaggccgcaggttcaactggtggaaagtggcggtggcttggtgcaagcaggcggctctcttagactgtcttgtgctgcctctggcggcaccctgagcaagaataccgtggcatggtttaggcaggctcccggaaaagagcggggctttgtcgccagcatcacctgggatggcagaaccacctactacgccgacagcgtgaaaggccggttcaccatctccagagataatgccaagaatacggtctacttgcaaatgaactccctgaagcctgaagatacagccgtgtacgtgtgcgccgatctcggcaaatggcctgctggacctgccgattattggggacagggcacacaagtcaccgtgtcctctacgcgtggaatgaggactgaggatcttcccaaagctgtcgtctttctcgaaccccaatggtatcgggtgctcgaaaaagactctgtgacactgaaatgccaaggggcctactctcccgaggacaactccacacagtggtttcataatgagtccctcatcagctctcaggccagctcttatttcattgatgccgctacagtggacgactccggcgagtatcggtgtcagaccaatctgtctacactgtctgaccccgtgcagcttgaggtccacattggatggttgctcttgcaagccccacgctgggttttcaaagaggaagatccaatccatctgcggtgccacagctggaaaaacaccgctctccacaaagtcacatacctgcaaaatggcaaaggacgcaaatacttccatcacaattccgatttttacattccgaaggctaccctgaaagacagcggcagctatttctgccggggactcgtcggctccaagaatgtgtcctccgaaaccgtgaatatcacgattacccaaggactggctgtgcctacaatctctagcttctttccgcctggataccaagtctccttctgtcttgtgatggtcctcctgtttgctgtggacacaggactgtacttttccgtgaaaacgaacatccgcagctccacacgcgattggaaagatcacaagtttaaatggcgcaaagatccccaggacaag

SEQ ID NO: 5109 - DNA, 30 bp, Artificial Sequence
  Synthetic Polynucleotide
gggggggggggggggggggggggggggggg

SEQ ID NO: 5110 - DNA, 1155 bp, Artificial Sequence
  Synthetic Polynucleotide
atggccttaccagtgaccgccttgctcctgccgctggccttgctgctccacgccgccaggccgggctctgacctgggcatcaagctgctgttcgccgctgccaagggccaggacgacgaagtgcggattctgctggctgctggggccgacgtgaacgccaaggatttcgagggctacacccccctgcacgtggccgcctatgatggacacctggaaatcgtggaagtgctgctgaaggctggcgctgatgtgaatgccaaagacagccagggccggacccctctgcatgaagccgcctacagcggccatctggaaattgtggaagtgctgctgaaagccggggcagacgtgaacgctcaggacgacgctggcgagacaccagccgatctggctgcagcttggggccacgaagatatcgccgaggtgctgcagaagacgcgtggaatgaggactgaggatcttcccaaagctgtcgtctttctcgaaccccaatggtatcgggtgctcgaaaaagactctgtgacactgaaatgccaaggggcctactctcccgaggacaactccacacagtggtttcataatgagtccctcatcagctctcaggccagctcttatttcattgatgccgctacagtggacgactccggcgagtatcggtgtcagaccaatctgtctacactgtctgaccccgtgcagcttgaggtccacattggatggttgctcttgcaagccccacgctgggttttcaaagaggaagatccaatccatctgcggtgccacagctggaaaaacaccgctctccacaaagtcacatacctgcaaaatggcaaaggacgcaaatacttccatcacaattccgatttttacattccgaaggctaccctgaaagacagcggcagctatttctgccggggactcgtcggctccaagaatgtgtcctccgaaaccgtgaatatcacgattacccaaggactggctgtgcctacaatctctagcttctttccgcctggataccaagtctccttctgtcttgtgatggtcctcctgtttgctgtggacacaggactgtacttttccgtgaaaacgaacatccgcagctccacacgcgattggaaagatcacaagtttaaatggcgcaaagatccccaggacaag

SEQ ID NO: 5111 - DNA, 1161 bp, Artificial Sequence
  Synthetic Polynucleotide
atggccttaccagtgaccgccttgctcctgccgctggccttgctgctccacgccgccaggccgagaagcgatctgggaaagaagctgctggaagctgccagagccggacaggatgatgaagtgcgcatcctgatggcaaacggcgcagatgtgaacgcaaaggacgagtacggcctgacccccctgtacctggctacagcccacgggcacctggaaattgtggaagtgctgctgaagaacggcgctgacgtgaacgccgtggacgccatcggctttaccccactgcatctggccgctttcatcgggcatctcgaaatcgcagaggtgctgctgaaacacggggccgatgtgaatgcccaggacaagttcggcaagaccgccttcgacatcagcatcggcaacggcaacgaggacctggccgagatcctgcagaaactgaacacgcgtggaatgaggactgaggatcttcccaaagctgtcgtctttctcgaaccccaatggtatcgggtgctcgaaaaagactctgtgacactgaaatgccaaggggcctactctcccgaggacaactccacacagtggtttcataatgagtccctcatcagctctcaggccagctcttatttcattgatgccgctacagtggacgactccggcgagtatcggtgtcagaccaatctgtctacactgtctgaccccgtgcagcttgaggtccacattggatggttgctcttgcaagccccacgctgggttttcaaagaggaagatccaatccatctgcggtgccacagctggaaaaacaccgctctccacaaagtcacatacctgcaaaatggcaaaggacgcaaatacttccatcacaattccgatttttacattccgaaggctaccctgaaagacagcggcagctatttctgccggggactcgtcggctccaagaatgtgtcctccgaaaccgtgaatatcacgattacccaaggactggctgtgcctacaatctctagcttctttccgcctggataccaagtctccttctgtcttgtgatggtcctcctgtttgctgtggacacaggactgtacttttccgtgaaaacgaacatccgcagctccacacgcgattggaaagatcacaagtttaaatggcgcaaagatccccaggacaag

SEQ ID NO: 5112 - DNA, 957 bp, Artificial Sequence
  Synthetic Polynucleotide
atggccttaccagtgaccgccttgctcctgccgctggccttgctgctccacgccgccaggccggtggacaacaagttcaacaaagagcggtacagcgcctactacgagatttggcaactgcccaacctgaacgtgcggcagaaggccgccttcatcggatctctgcaggacgaccctagccagagcgccaatctgctggccgaggccaagaagctgaacgacgcccaggcccctaaaacgcgtggaatgaggactgaggatcttcccaaagctgtcgtctttctcgaaccccaatggtatcgggtgctcgaaaaagactctgtgacactgaaatgccaaggggcctactctcccgaggacaactccacacagtggtttcataatgagtccctcatcagctctcaggccagctcttatttcattgatgccgctacagtggacgactccggcgagtatcggtgtcagaccaatctgtctacactgtctgaccccgtgcagcttgaggtccacattggatggttgctcttgcaagccccacgctgggttttcaaagaggaagatccaatccatctgcggtgccacagctggaaaaacaccgctctccacaaagtcacatacctgcaaaatggcaaaggacgcaaatacttccatcacaattccgatttttacattccgaaggctaccctgaaagacagcggcagctatttctgccggggactcgtcggctccaagaatgtgtcctccgaaaccgtgaatatcacgattacccaaggactggctgtgcctacaatctctagcttctttccgcctggataccaagtctccttctgtcttgtgatggtcctcctgtttgctgtggacacaggactgtacttttccgtgaaaacgaacatccgcagctccacacgcgattggaaagatcacaagtttaaatggcgcaaagatccccaggacaag

SEQ ID NO: 5113 - DNA, 936 bp, Artificial Sequence
  Synthetic Polynucleotide
atggccttaccagtgaccgccttgctcctgccgctggccttgctgctccacgccgccaggccgtacgccaaagagatgcggaacgcctactgggagatcgccctgctgcccaatctgaccaaccagcagaagagagcccccatcagaaagctgtacgacgacccctcccagagcagcgagctgctgtctgaggctaaaaaactgaacgatagccagacgcgtggaatgaggactgaggatcttcccaaagctgtcgtctttctcgaaccccaatggtatcgggtgctcgaaaaagactctgtgacactgaaatgccaaggggcctactctcccgaggacaactccacacagtggtttcataatgagtccctcatcagctctcaggccagctcttatttcattgatgccgctacagtggacgactccggcgagtatcggtgtcagaccaatctgtctacactgtctgaccccgtgcagcttgaggtccacattggatggttgctcttgcaagccccacgctgggttttcaaagaggaagatccaatccatctgcggtgccacagctggaaaaacaccgctctccacaaagtcacatacctgcaaaatggcaaaggacgcaaatacttccatcacaattccgatttttacattccgaaggctaccctgaaagacagcggcagctatttctgccggggactcgtcggctccaagaatgtgtcctccgaaaccgtgaatatcacgattacccaaggactggctgtgcctacaatctctagcttctttccgcctggataccaagtctccttctgtcttgtgatggtcctcctgtttgctgtggacacaggactgtacttttccgtgaaaacgaacatccgcagctccacacgcgattggaaagatcacaagtttaaatggcgcaaagatccccaggacaag

SEQ ID NO: 5114 - DNA, 936 bp, Artificial Sequence
  Synthetic Polynucleotide
atggccttaccagtgaccgccttgctcctgccgctggccttgctgctccacgccgccaggccgtatgccaaagaaatgtggattgcctgggaggaaatccgcaacctgcctaatctgaatggctggcagatgaccgcctttatcgctaagctgctggatgaccccagccagtcctctgagctgctgagcgaagcaaagaaactgaatgactcccagacgcgtggaatgaggactgaggatcttcccaaagctgtcgtctttctcgaaccccaatggtatcgggtgctcgaaaaagactctgtgacactgaaatgccaaggggcctactctcccgaggacaactccacacagtggtttcataatgagtccctcatcagctctcaggccagctcttatttcattgatgccgctacagtggacgactccggcgagtatcggtgtcagaccaatctgtctacactgtctgaccccgtgcagcttgaggtccacattggatggttgctcttgcaagccccacgctgggttttcaaagaggaagatccaatccatctgcggtgccacagctggaaaaacaccgctctccacaaagtcacatacctgcaaaatggcaaaggacgcaaatacttccatcacaattccgatttttacattccgaaggctaccctgaaagacagcggcagctatttctgccggggactcgtcggctccaagaatgtgtcctccgaaaccgtgaatatcacgattacccaaggactggctgtgcctacaatctctagcttctttccgcctggataccaagtctccttctgtcttgtgatggtcctcctgtttgctgtggacacaggactgtacttttccgtgaaaacgaacatccgcagctccacacgcgattggaaagatcacaagtttaaatggcgcaaagatccccaggacaag

SEQ ID NO: 5115 - DNA, 1050 bp, Artificial Sequence
  Synthetic Polynucleotide
atggccttaccagtgaccgccttgctcctgccgctggccttgctgctccacgccgccaggccgctgccagccccgaagaatttggtcgtttcccgtgtcactgaggactctgcacgtctgagctggaccgcaccggacgcggcgttcgacagctttgcaatcggctactgggagtgggatgatgacggcgaggccattgtgctgaccgttccgggtagcgagcgcagctacgatctgaccggtctgaagccgggtacggaatatccggtgtatattgcgggcgtgaagggtggccagtggagcttcccgctgagcgcgatctttaccaccacgcgtggaatgaggactgaggatcttcccaaagctgtcgtctttctcgaaccccaatggtatcgggtgctcgaaaaagactctgtgacactgaaatgccaaggggcctactctcccgaggacaactccacacagtggtttcataatgagtccctcatcagctctcaggccagctcttatttcattgatgccgctacagtggacgactccggcgagtatcggtgtcagaccaatctgtctacactgtctgaccccgtgcagcttgaggtccacattggatggttgctcttgcaagccccacgctgggttttcaaagaggaagatccaatccatctgcggtgccacagctggaaaaacaccgctctccacaaagtcacatacctgcaaaatggcaaaggacgcaaatacttccatcacaattccgatttttacattccgaaggctaccctgaaagacagcggcagctatttctgccggggactcgtcggctccaagaatgtgtcctccgaaaccgtgaatatcacgattacccaaggactggctgtgcctacaatctctagcttctttccgcctggataccaagtctccttctgtcttgtgatggtcctcctgtttgctgtggacacaggactgtacttttccgtgaaaacgaacatccgcagctccacacgcgattggaaagatcacaagtttaaatggcgcaaagatccccaggacaag

SEQ ID NO: 5116 - DNA, 1056 bp, Artificial Sequence
  Synthetic Polynucleotide
atggccttaccagtgaccgccttgctcctgccgctggccttgctgctccacgccgccaggccgctgccggctccgaaaaacctggtcgtttcccgtgtcactgaagattctgcacgcttgagctgggcgatcgacgagcagcgtgactggtttgagagcttcctgattcagtatcaagaatcggaaaaagttggcgaggccatcgtgctgaccgttccgggtagcgagcgcagctatgatctgacgggtctgaagccaggcaccgagtatacggtgagcatttacggtgtctaccatgtgtaccgtagcaatccgctgagcgcgatcttcaccaccacgcgtggaatgaggactgaggatcttcccaaagctgtcgtctttctcgaaccccaatggtatcgggtgctcgaaaaagactctgtgacactgaaatgccaaggggcctactctcccgaggacaactccacacagtggtttcataatgagtccctcatcagctctcaggccagctcttatttcattgatgccgctacagtggacgactccggcgagtatcggtgtcagaccaatctgtctacactgtctgaccccgtgcagcttgaggtccacattggatggttgctcttgcaagccccacgctgggttttcaaagaggaagatccaatccatctgcggtgccacagctggaaaaacaccgctctccacaaagtcacatacctgcaaaatggcaaaggacgcaaatacttccatcacaattccgatttttacattccgaaggctaccctgaaagacagcggcagctatttctgccggggactcgtcggctccaagaatgtgtcctccgaaaccgtgaatatcacgattacccaaggactggctgtgcctacaatctctagcttctttccgcctggataccaagtctccttctgtcttgtgatggtcctcctgtttgctgtggacacaggactgtacttttccgtgaaaacgaacatccgcagctccacacgcgattggaaagatcacaagtttaaatggcgcaaagatccccaggacaag

SEQ ID NO: 5117 - DNA, 1050 bp, Artificial Sequence
  Synthetic Polynucleotide
atggccttaccagtgaccgccttgctcctgccgctggccttgctgctccacgccgccaggccgctgccagccccgaaaaacttagttgtctcccgcgtgaccgaagattctgctcgtctgagctggactgcaccggacgcggcgttcgacagctttccgattggctactgggagtgggatgatgacggtgaagcgatcgtgctgaccgttccgggtagcgagcgtagctatgacctgacgggtttgaaacctggtaccgagtatcacgtttacattgcgggcgtcaagggtggccagtggtcgttcccgctgagcgcaatctttacgaccacgcgtggaatgaggactgaggatcttcccaaagctgtcgtctttctcgaaccccaatggtatcgggtgctcgaaaaagactctgtgacactgaaatgccaaggggcctactctcccgaggacaactccacacagtggtttcataatgagtccctcatcagctctcaggccagctcttatttcattgatgccgctacagtggacgactccggcgagtatcggtgtcagaccaatctgtctacactgtctgaccccgtgcagcttgaggtccacattggatggttgctcttgcaagccccacgctgggttttcaaagaggaagatccaatccatctgcggtgccacagctggaaaaacaccgctctccacaaagtcacatacctgcaaaatggcaaaggacgcaaatacttccatcacaattccgatttttacattccgaaggctaccctgaaagacagcggcagctatttctgccggggactcgtcggctccaagaatgtgtcctccgaaaccgtgaatatcacgattacccaaggactggctgtgcctacaatctctagcttctttccgcctggataccaagtctccttctgtcttgtgatggtcctcctgtttgctgtggacacaggactgtacttttccgtgaaaacgaacatccgcagctccacacgcgattggaaagatcacaagtttaaatggcgcaaagatccccaggacaag

SEQ ID NO: 5118 - DNA, 1065 bp, Artificial Sequence
  Synthetic Polynucleotide
atggccttaccagtgaccgccttgctcctgccgctggccttgctgctccacgccgccaggccgctgcccgctcctaagaatctggtggtgtccgaagtgaccgaggacagcgctagactgagctgggatgatccctgggccttctacgagagcttcctgatccagtaccaagagagcgagaaagtcggcgaggccatcgtgcttacagtgcctggaagcgagagaagctacgacctgacaggcctgaagcctggcaccgagtacaccgtgtctatctacggcgtgcacaacgtgtacaaggacaccaacatgcggggcctgcctctgagcgccatctttacaacaacgcgtggaatgaggactgaggatcttcccaaagctgtcgtctttctcgaaccccaatggtatcgggtgctcgaaaaagactctgtgacactgaaatgccaaggggcctactctcccgaggacaactccacacagtggtttcataatgagtccctcatcagctctcaggccagctcttatttcattgatgccgctacagtggacgactccggcgagtatcggtgtcagaccaatctgtctacactgtctgaccccgtgcagcttgaggtccacattggatggttgctcttgcaagccccacgctgggttttcaaagaggaagatccaatccatctgcggtgccacagctggaaaaacaccgctctccacaaagtcacatacctgcaaaatggcaaaggacgcaaatacttccatcacaattccgatttttacattccgaaggctaccctgaaagacagcggcagctatttctgccggggactcgtcggctccaagaatgtgtcctccgaaaccgtgaatatcacgattacccaaggactggctgtgcctacaatctctagcttctttccgcctggataccaagtctccttctgtcttgtgatggtcctcctgtttgctgtggacacaggactgtacttttccgtgaaaacgaacatccgcagctccacacgcgattggaaagatcacaagtttaaatggcgcaaagatccccaggacaag

SEQ ID NO: 5119 - DNA, 1050 bp, Artificial Sequence
  Synthetic Polynucleotide
atggccttaccagtgaccgccttgctcctgccgctggccttgctgctccacgccgccaggccgttgcctgctccaaaaaacctggtcgtcagcagagtgacagaggactccgccagactgtcttggacagcccctgatgccgccttcgacagcttctggatcagatacttcgagttcctcggcagcggagaagccattgtgctgaccgttccaggcagcgagagatcctatgatctgaccggactgaagcccggaacagagtatgtggtcaacatcatgggcgtgaaaggcggcaagatcagccctcctctgtccgccattttcaccaccacgcgtggaatgaggactgaggatcttcccaaagctgtcgtctttctcgaaccccaatggtatcgggtgctcgaaaaagactctgtgacactgaaatgccaaggggcctactctcccgaggacaactccacacagtggtttcataatgagtccctcatcagctctcaggccagctcttatttcattgatgccgctacagtggacgactccggcgagtatcggtgtcagaccaatctgtctacactgtctgaccccgtgcagcttgaggtccacattggatggttgctcttgcaagccccacgctgggttttcaaagaggaagatccaatccatctgcggtgccacagctggaaaaacaccgctctccacaaagtcacatacctgcaaaatggcaaaggacgcaaatacttccatcacaattccgatttttacattccgaaggctaccctgaaagacagcggcagctatttctgccggggactcgtcggctccaagaatgtgtcctccgaaaccgtgaatatcacgattacccaaggactggctgtgcctacaatctctagcttctttccgcctggataccaagtctccttctgtcttgtgatggtcctcctgtttgctgtggacacaggactgtacttttccgtgaaaacgaacatccgcagctccacacgcgattggaaagatcacaagtttaaatggcgcaaagatccccaggacaag

SEQ ID NO: 5120 - DNA, 1362 bp, Artificial Sequence
  Synthetic Polynucleotide
atggccttaccagtgaccgccttgctcctgccgctggccttgctgctccacgccgccaggccgctgcccgctcctaagaatctggtggtgtccgaagtgaccgaggacagcgctagactgagctgggatgatccctgggccttctacgagagcttcctgatccagtaccaagagagcgagaaagtcggcgaggccatcgtgcttacagtgcctggaagcgagagaagctacgacctgacaggcctgaagcctggcaccgagtacaccgtgtctatctacggcgtgcacaacgtgtacaaggacaccaacatgcggggcctgcctctgagcgccatctttacaacagctcccgctcctgctccagcaccagctccattgcctgctccaaaaaacctggtcgtcagcagagtgacagaggactccgccagactgtcttggacagcccctgatgccgccttcgacagcttctggatcagatacttcgagttcctcggcagcggagaagccattgtgctgaccgttccaggcagcgagagatcctatgatctgaccggactgaagcccggaacagagtatgtggtcaacatcatgggcgtgaaaggcggcaagatcagccctcctctgtccgccattttcaccaccacgcgtggaatgaggactgaggatcttcccaaagctgtcgtctttctcgaaccccaatggtatcgggtgctcgaaaaagactctgtgacactgaaatgccaaggggcctactctcccgaggacaactccacacagtggtttcataatgagtccctcatcagctctcaggccagctcttatttcattgatgccgctacagtggacgactccggcgagtatcggtgtcagaccaatctgtctacactgtctgaccccgtgcagcttgaggtccacattggatggttgctcttgcaagccccacgctgggttttcaaagaggaagatccaatccatctgcggtgccacagctggaaaaacaccgctctccacaaagtcacatacctgcaaaatggcaaaggacgcaaatacttccatcacaattccgatttttacattccgaaggctaccctgaaagacagcggcagctatttctgccggggactcgtcggctccaagaatgtgtcctccgaaaccgtgaatatcacgattacccaaggactggctgtgcctacaatctctagcttctttccgcctggataccaagtctccttctgtcttgtgatggtcctcctgtttgctgtggacacaggactgtacttttccgtgaaaacgaacatccgcagctccacacgcgattggaaagatcacaagtttaaatggcgcaaagatccccaggacaag

SEQ ID NO: 5121 - DNA, 1053 bp, Artificial Sequence
  Synthetic Polynucleotide
atggccttaccagtgaccgccttgctcctgccgctggccttgctgctccacgccgccaggccgatgctgcccgctcctaagaatctggtggtgtccagaatcaccgaggacagcgccagactgtcttggacagctcctgatgccgccttcgacagcttccccatccggtacatcgagacactgatctggggcgaagccatctggctggatgtgcctggaagcgagagaagctacgacctgaccggactgaagcctggcacagagtatgccgtggtcatcaccggcgtgaaaggcggcagattctctagccctctggtggcctctttcaccaccacgcgtggaatgaggactgaggatcttcccaaagctgtcgtctttctcgaaccccaatggtatcgggtgctcgaaaaagactctgtgacactgaaatgccaaggggcctactctcccgaggacaactccacacagtggtttcataatgagtccctcatcagctctcaggccagctcttatttcattgatgccgctacagtggacgactccggcgagtatcggtgtcagaccaatctgtctacactgtctgaccccgtgcagcttgaggtccacattggatggttgctcttgcaagccccacgctgggttttcaaagaggaagatccaatccatctgcggtgccacagctggaaaaacaccgctctccacaaagtcacatacctgcaaaatggcaaaggacgcaaatacttccatcacaattccgatttttacattccgaaggctaccctgaaagacagcggcagctatttctgccggggactcgtcggctccaagaatgtgtcctccgaaaccgtgaatatcacgattacccaaggactggctgtgcctacaatctctagcttctttccgcctggataccaagtctccttctgtcttgtgatggtcctcctgtttgctgtggacacaggactgtacttttccgtgaaaacgaacatccgcagctccacacgcgattggaaagatcacaagtttaaatggcgcaaagatccccaggacaag

SEQ ID NO: 5122 - DNA, 30 bp, Artificial Sequence; identical to SEQ ID NO: 5109
  Synthetic Polynucleotide

SEQ ID NO: 5123 - DNA, 2481 bp, Artificial Sequence
  Synthetic Polynucleotide
atggccttaccagtgaccgccttgctcctgccgctggccttgctgctccacgccgccaggccggagtgggtcaagttcgccaagccttgcagagaaggcgaggacaacagcaagcggaaccctatcgccaagatcaccagcgactaccaggccacacagaagatcacctaccggatctctggcgtgggcatcgaccagcctccattcggcatcttcgtggtggacaagaacaccggcgacatcaacatcaccgccatcgtggacagagaggaaacccctagcttcctgattacctgtagagccctgaacgcccagggcctcgatgtggaaaagcctctgatcctgaccgtgaagatcctggacatcaacgacaaccctccagtgttcagccagcagattttcatgggcgagatcgaggaaaacagcgccagcaacagcctggtcatgatcctgaatgccaccgacgccgacgagcccaaccacctgaatagcaagatcgccttcaagatcgtgtcccaagagcctgccggcacacccatgtttctgctgtccagaaataccggcgaagtgcggaccctgaccaatagcctggatagagagcaggccagcagctacagactggtggtgtctggcgctgacaaggatggcgagggactgagcacccagtgcgagtgcaacatcaaagtgaaggacgtgaacgacaacttccccatgttccgggacagccagtatagcgcccggatcgaagagaacatcctgagcagcgagctgctgcggttccaagtgaccgacctggacgaagagtacaccgacaactggctggccgtgtacttcttcaccagcggcaacgaaggcaactggttcgagatccagacagaccccaggaccaacgagggcatcctgaaggttgtgaaggccctggactacgagcagctccagagcgtgaagctgtctatcgccgtgaagaacaaggccgagttccaccagtccgtgatctcccggtacagagtgcagagcacccctgtgaccatccaagtgattaacgtgcgcgagggcattgccttcagacccgccagcaagaccttcaccgtgcagaagggcatcagcagcaagaaactggtggactacatcctgggcacctatcaggccatcgacgaggacacaaacaaagccgcctccaacgtgaaatacgtgatgggcagaaacgacggcggctacctgatgatcgactccaagaccgccgagatcaagttcgtgaagaatatgaaccgggactccaccttcatcgtgaacaagaccatcacagccgaggtgctggctatcgacgagtataccggcaagaccagcaccggcacagtgtatgtgcgggtgcccgacttcaacgataactgccctacagccgtgctggaaaaggacgccgtgtgtagctctagccctagcgtggtcgtgtccgccagaacactgaacaacagatacacaggcccctacacattcgccctggaagatcagcctgtgaagctgcctgccgtgtggtccatcaccacactgaatgctacaagcgccctgctgagagcccaagagcaaattcctcctggcgtgtaccacatcagcctggtgctgacagacagccagaacaatagatgcgagatgcctcggagcctgacactggaagtgtgccagtgcgacaacagaggcatctgcggcacaagctaccccacaacaagccccggcacaagatacggcagacctcactctggaagaacgcgtggaatgaggactgaggatcttcccaaagctgtcgtctttctcgaaccccaatggtatcgggtgctcgaaaaagactctgtgacactgaaatgccaaggggcctactctcccgaggacaactccacacagtggtttcataatgagtccctcatcagctctcaggccagctcttatttcattgatgccgctacagtggacgactccggcgagtatcggtgtcagaccaatctgtctacactgtctgaccccgtgcagcttgaggtccacattggatggttgctcttgcaagccccacgctgggttttcaaagaggaagatccaatccatctgcggtgccacagctggaaaaacaccgctctccacaaagtcacatacctgcaaaatggcaaaggacgcaaatacttccatcacaattccgatttttacattccgaaggctaccctgaaagacagcggcagctatttctgccggggactcgtcggctccaagaatgtgtcctccgaaaccgtgaatatcacgattacccaaggactggctgtgcctacaatctctagcttctttccgcctggataccaagtctccttctgtcttgtgatggtcctcctgtttgctgtggacacaggactgtacttttccgtgaaaacgaacatccgcagctccacacgcgattggaaagatcacaagtttaaatggcgcaaagatccccaggacaag

SEQ ID NO: 5124 - DNA, 1704 bp, Artificial Sequence
  Synthetic Polynucleotide
atggccttaccagtgaccgccttgctcctgccgctggccttgctgctccacgccgccaggccgatggccttaccagtgaccgccttgctcctgccgctggccttgctgctccacgccgccaggccgctgttcaatcaagaggtgcagatccctctgaccgagagctactgtggcccctgtcctaagaactggatctgctacaagaacaactgctaccagttcttcgacgagagcaagaattggtacgagagccaggccagctgcatgagccagaatgccagcctgctgaaggtgtacagcaaagaggaccaggacctgctgaaactggtcaagagctaccactggatgggccttgtgcacatccccaccaatggctcttggcagtgggaggacggcagcattctgagccctaacctgctgaccatcatcgagatgcagaagggcgactgcgccctgtacgccagcagctttaagggctacatcgagaattgcagcaccccgaacacctacatctgtatgcagagaaccgttggcggaggcggaagtggaggcggaggatctggcggcggaggctctgacctctttaatcaagaagtccagattccactcaccgaatcctactgcggaccttgtccaaaaaattggatttgttataagaacaactgttatcaattctttgatgagtctaaaaattggtatgagtcccaggcttcctgcatgtctcagaacgcttctctgctgaaagtctactctaaagaagatcaggatctcctgaagctcgtcaagtcttatcattggatggggctcgtccacattcctaccaacggaagctggcaatgggaagatggctccatcctgtctccaaatctgctcacgattattgaaatgcagaaaggggattgtgctctctacgccagctccttcaagggatatattgagaactgtagcacgcccaatacttatatctgtatgcaacggaccgtgacgcgtggaatgaggactgaggatcttcccaaagctgtcgtctttctcgaaccccaatggtatcgggtgctcgaaaaagactctgtgacactgaaatgccaaggggcctactctcccgaggacaactccacacagtggtttcataatgagtccctcatcagctctcaggccagctcttatttcattgatgccgctacagtggacgactccggcgagtatcggtgtcagaccaatctgtctacactgtctgaccccgtgcagcttgaggtccacattggatggttgctcttgcaagccccacgctgggttttcaaagaggaagatccaatccatctgcggtgccacagctggaaaaacaccgctctccacaaagtcacatacctgcaaaatggcaaaggacgcaaatacttccatcacaattccgatttttacattccgaaggctaccctgaaagacagcggcagctatttctgccggggactcgtcggctccaagaatgtgtcctccgaaaccgtgaatatcacgattacccaaggactggctgtgcctacaatctctagcttctttccgcctggataccaagtctccttctgtcttgtgatggtcctcctgtttgctgtggacacaggactgtacttttccgtgaaaacgaacatccgcagctccacacgcgattggaaagatcacaagtttaaatggcgcaaagatccccaggacaag

SEQ ID NO: 5125 - DNA, 1344 bp, Artificial Sequence
  Synthetic Polynucleotide
atggccttaccagtgaccgccttgctcctgccgctggccttgctgctccacgccgccaggccgatggagctgactgatttgctcctggcggccatgcttcttgcagtggcaagactaactctgtccagccccgtagctcctgcctgtgaccccagactcctaaataaactgctgcgtgactcccacctccttcacagccgactgagtcagtgtcccgacgtggaccctttgtctatccctgttctgctgcctgctgtggactttagcctgggagaatggaaaacccagacggaacagagcaaggcacaggacattctaggggcagtgtcccttctactggagggagtgatggcagcacgaggacagttggaaccctcctgcctctcatccctcctgggacagctttctgggcaggttcgcctcctcttgggggccctgcagggcctcctaggaacccagcttcctctacagggcaggaccacagctcacaaggaccccaatgccctcttcttgagcttgcaacaactgcttcggggaaaggtgcgcttcctgcttctggtagaaggtcccaccctctgtgtcagacggaccctgccaaccacagctgtcccaagcagtacttctacgcgtggaatgaggactgaggatcttcccaaagctgtcgtctttctcgaaccccaatggtatcgggtgctcgaaaaagactctgtgacactgaaatgccaaggggcctactctcccgaggacaactccacacagtggtttcataatgagtccctcatcagctctcaggccagctcttatttcattgatgccgctacagtggacgactccggcgagtatcggtgtcagaccaatctgtctacactgtctgaccccgtgcagcttgaggtccacattggatggttgctcttgcaagccccacgctgggttttcaaagaggaagatccaatccatctgcggtgccacagctggaaaaacaccgctctccacaaagtcacatacctgcaaaatggcaaaggacgcaaatacttccatcacaattccgatttttacattccgaaggctaccctgaaagacagcggcagctatttctgccggggactcgtcggctccaagaatgtgtcctccgaaaccgtgaatatcacgattacccaaggactggctgtgcctacaatctctagcttctttccgcctggataccaagtctccttctgtcttgtgatggtcctcctgtttgctgtggacacaggactgtacttttccgtgaaaacgaacatccgcagctccacacgcgattggaaagatcacaagtttaaatggcgcaaagatccccaggacaag

SEQ ID NO: 5126 - DNA, 942 bp, Artificial Sequence
  Synthetic Polynucleotide
atggccttaccagtgaccgccttgctcctgccgctggccttgctgctccacgccgccaggccgatggaccccgacctggaaatcagagccgccttcctgcggcagagaaacacagccctgagaacagaggtggccgagctggaacaagaggtgcagcggctggaaaacgaggtgtcccagtacgagacaagatacggccctctcggaggcggaaaaacgcgtacgcgtggaatgaggactgaggatcttcccaaagctgtcgtctttctcgaaccccaatggtatcgggtgctcgaaaaagactctgtgacactgaaatgccaaggggcctactctcccgaggacaactccacacagtggtttcataatgagtccctcatcagctctcaggccagctcttatttcattgatgccgctacagtggacgactccggcgagtatcggtgtcagaccaatctgtctacactgtctgaccccgtgcagcttgaggtccacattggatggttgctcttgcaagccccacgctgggttttcaaagaggaagatccaatccatctgcggtgccacagctggaaaaacaccgctctccacaaagtcacatacctgcaaaatggcaaaggacgcaaatacttccatcacaattccgatttttacattccgaaggctaccctgaaagacagcggcagctatttctgccggggactcgtcggctccaagaatgtgtcctccgaaaccgtgaatatcacgattacccaaggactggctgtgcctacaatctctagcttctttccgcctggataccaagtctccttctgtcttgtgatggtcctcctgtttgctgtggacacaggactgtacttttccgtgaaaacgaacatccgcagctccacacgcgattggaaagatcacaagtttaaatggcgcaaagatccccaggacaag

SEQ ID NO: 5127 - DNA, 867 bp, Artificial Sequence
  Synthetic Polynucleotide
atggccttaccagtgaccgccttgctcctgccgctggccttgctgctccacgccgccaggccggaagttgctgccctcgagaaggaggtagcagctttggaaaaagaagtcgcagcccttgagaaagaagttgcggctctggagaagacgcgtggaatgaggactgaggatcttcccaaagctgtcgtctttctcgaaccccaatggtatcgggtgctcgaaaaagactctgtgacactgaaatgccaaggggcctactctcccgaggacaactccacacagtggtttcataatgagtccctcatcagctctcaggccagctcttatttcattgatgccgctacagtggacgactccggcgagtatcggtgtcagaccaatctgtctacactgtctgaccccgtgcagcttgaggtccacattggatggttgctcttgcaagccccacgctgggttttcaaagaggaagatccaatccatctgcggtgccacagctggaaaaacaccgctctccacaaagtcacatacctgcaaaatggcaaaggacgcaaatacttccatcacaattccgatttttacattccgaaggctaccctgaaagacagcggcagctatttctgccggggactcgtcggctccaagaatgtgtcctccgaaaccgtgaatatcacgattacccaaggactggctgtgcctacaatctctagcttctttccgcctggataccaagtctccttctgtcttgtgatggtcctcctgtttgctgtggacacaggactgtacttttccgtgaaaacgaacatccgcagctccacacgcgattggaaagatcacaagtttaaatggcgcaaagatccccaggacaag

SEQ ID NO: 5128 - DNA, 1641 bp, Artificial Sequence
  Synthetic Polynucleotide
atggccttaccagtgaccgccttgctcctgccgctggccttgctgctccacgccgccaggccgctgttcaatcaagaggtgcagatccctctgaccgagagctactgtggcccctgtcctaagaactggatctgctacaagaacaactgctaccagttcttcgacgagagcaagaattggtacgagagccaggccagctgcatgagccagaatgccagcctgctgaaggtgtacagcaaagaggaccaggacctgctgaaactggtcaagagcgcccactggatgggccttgtgcacatccccaccaatggctcttggcagtgggaggacggcagcattctgagccctaacctgctgaccatcatcgagatgcagaagggcgactgcgccctgtacgccagcagctttaagggcttcatcgagaattgcagcaccccgaacacctacatctgtatgcagagaaccgttggcggaggcggaagtggaggcggaggatctggcggcggaggctctgacctctttaatcaagaagtccagattccactcaccgaatcctactgcggaccttgtccaaaaaattggatttgttataagaacaactgttatcaattctttgatgagtctaaaaattggtatgagtcccaggcttcctgcatgtctcagaacgcttctctgctgaaagtctactctaaagaagatcaggatctcctgaagctcgtcaagtctgcccattggatggggctcgtccacattcctaccaacggaagctggcaatgggaagatggctccatcctgtctccaaatctgctcacgattattgaaatgcagaaaggggattgtgctctctacgccagctccttcaagggatttattgagaactgtagcacgcccaatacttatatctgtatgcaacggaccgtgacgcgtggaatgaggactgaggatcttcccaaagctgtcgtctttctcgaaccccaatggtatcgggtgctcgaaaaagactctgtgacactgaaatgccaaggggcctactctcccgaggacaactccacacagtggtttcataatgagtccctcatcagctctcaggccagctcttatttcattgatgccgctacagtggacgactccggcgagtatcggtgtcagaccaatctgtctacactgtctgaccccgtgcagcttgaggtccacattggatggttgctcttgcaagccccacgctgggttttcaaagaggaagatccaatccatctgcggtgccacagctggaaaaacaccgctctccacaaagtcacatacctgcaaaatggcaaaggacgcaaatacttccatcacaattccgatttttacattccgaaggctaccctgaaagacagcggcagctatttctgccggggactcgtcggctccaagaatgtgtcctccgaaaccgtgaatatcacgattacccaaggactggctgtgcctacaatctctagcttctttccgcctggataccaagtctccttctgtcttgtgatggtcctcctgtttgctgtggacacaggactgtacttttccgtgaaaacgaacatccgcagctccacacgcgattggaaagatcacaagtttaaatggcgcaaagatccccaggacaag

SEQ ID NO: 5129 - DNA, 1641 bp, Artificial Sequence
  Synthetic Polynucleotide
atggccttaccagtgaccgccttgctcctgccgctggccttgctgctccacgccgccaggccgctgttcaatcaagaggtgcagatccctctgaccgagagctactgtggcccctgtcctaagaactggatctgctacaagaacaactgctaccagttcttcgacgagagcaagaattggtacgagagccaggccagctgcatgagccagaatgccagcctgctgaaggtgtacagcaaagaggaccaggacctgctgaaactggtcaagagcgcccactggatgggccttgtgcacatccccaccaatggctcttggcagtgggaggacggcagcattctgagccctaacctgctgaccatcatcgagatgcagaagggcgactgcgccctgtacgccagcagctttaagggctacatcgagaattgcagcaccccgaacacctacatctgtatgcagagaaccgtttctggcggaggcggctctggaggaggcggaagtggcggcggaggcgacctctttaatcaagaagtccagattccactcaccgaatcctactgcggaccttgtccaaaaaattggatttgttataagaacaactgttatcaattctttgatgagtctaaaaattggtatgagtcccaggcttcctgcatgtctcagaacgcttctctgctgaaagtctactctaaagaagatcaggatctcctgaagctcgtcaagtctgcccattggatggggctcgtccacattcctaccaacggaagctggcaatgggaagatggctccatcctgtctccaaatctgctcacgattattgaaatgcagaaaggggattgtgctctctacgccagctccttcaagggatatattgagaactgtagcacgcccaatacttatatctgtatgcaacggaccgtgacgcgtggaatgaggactgaggatcttcccaaagctgtcgtctttctcgaaccccaatggtatcgggtgctcgaaaaagactctgtgacactgaaatgccaaggggcctactctcccgaggacaactccacacagtggtttcataatgagtccctcatcagctctcaggccagctcttatttcattgatgccgctacagtggacgactccggcgagtatcggtgtcagaccaatctgtctacactgtctgaccccgtgcagcttgaggtccacattggatggttgctcttgcaagccccacgctgggttttcaaagaggaagatccaatccatctgcggtgccacagctggaaaaacaccgctctccacaaagtcacatacctgcaaaatggcaaaggacgcaaatacttccatcacaattccgatttttacattccgaaggctaccctgaaagacagcggcagctatttctgccggggactcgtcggctccaagaatgtgtcctccgaaaccgtgaatatcacgattacccaaggactggctgtgcctacaatctctagcttctttccgcctggataccaagtctccttctgtcttgtgatggtcctcctgtttgctgtggacacaggactgtacttttccgtgaaaacgaacatccgcagctccacacgcgattggaaagatcacaagtttaaatggcgcaaagatccccaggacaag

SEQ ID NO: 5130 - DNA, 30 bp, Artificial Sequence; identical to SEQ ID NO: 5109
  Synthetic Polynucleotide

SEQ ID NO: 5131 - DNA, 981 bp, Artificial Sequence
  Synthetic Polynucleotide
atggccttaccagtgaccgccttgctcctgccgctggccttgctgctccacgccgccaggccggaagtgcagctgcttgaaagtggcggcggactgattcagcctggcggatctctgagactgagctgtgccgccagcggcttcaccttttctagccacgccatgacctgggtccgacaggcacctggaaaagggcttgaatgggtgtccgccatcagcggctctggcgattacacacactacgccgacagcgtgaagggcagattcaccatcagcagagacaacagcaagaacaccgtgtacctccagatgaacagcctgagagccgaggacagcgccgtgtattattgcgccaaggatgaggatggcggcagcctgcttggacacagaggacaaggcaccctggtcaccgtttcttccacgcgtggaggtggtggctccgagcctcacagcctgagctacgacatcacagtgatccccaagttcagacccggaccacgttggtgcgctgtgcagggacaagtggacgagaaaaccttcctgcactacgactgcggcaacaagaccgtgacacccgtgtctccactgggcaagaaactgaacgtgaccaccgcctggaaggcccagaatcctgtgctgagagaagtggtggacatcctgaccgagcagctgtgggacattcagctggaaaactacacccctaaagagcccctgacactccaggccagaatgagctgtgaacagaaggccgagggccacagctctggctcttggcagttcagcttcgacggccagattttcctgctgttcgacagcgagaagcggatgtggaccacagtgcatcccggcgctcgcaagatgaaggaaaagtgggagaacgacaaggtggtggctaccctgctgtggggctggtctatgggagattgcatcggctggctggaagatttcctgatgggcatggacagcaccctggaaccttct

SEQ ID NO: 5132 - DNA, 981 bp, Artificial Sequence
  Synthetic Polynucleotide
atggccttaccagtgaccgccttgctcctgccgctggccttgctgctccacgccgccaggccggaagtgcagctgcttgaaagtggcggcggactgattcagcctggcggatctctgagactgagctgtgccgccagcggcttcaccttttctagccacgccatgacctgggtccgacaggcacctggaaaagggcttgaatgggtgtccgccatcagcggctctggcgattacacacactacgccgacagcgtgaagggcagattcaccatcagcagagacaacagcaagaacaccgtgtacctccagatgaacagcctgagagccgaggacagcgccgtgtattattgcgccaaggatgaggatggcggcagcctgcttggacacagaggacaaggcaccctggtcaccgtttcttccacgcgtggaggtggtggctccgagcctcacagcctgagctacgacatcacagtgatccccaagttcagacccggaccacgttggtgcgctgtgcagggacaagtggacgagaaaaccttcctgcactacgactgcggcaacaagaccgtgacacccgtgtctccactgggcaagaaactgaacgtgaccaccgcctggaaggcccagaatcctgtgctgagagaagtggtggacatcctgaccgagcagctgtgggacattcagctggaaaactacacccctaaagagcccctgacactccaggccagaatgagctgtgaacagaaggccgagggccacagctctggctcttggcagttcagcttcgacggccagattttcctgctgttcgacagcgagaagcggatgtggaccacagtgcatcccggcgctcgcaagatgaaggaaaagtgggagaacgacaaggtggtggctaccaagctgtacctgtggtctatgggcgactgcatcggctggctggaagatttcctgatgggcatggacagcaccctggaaccttct

SEQ ID NO: 5133 - DNA, 30 bp, Artificial Sequence; identical to SEQ ID NO: 5109
  Synthetic Polynucleotide

SEQ ID NO: 5134 - DNA, 3147 bp, Artificial Sequence
  Synthetic Polynucleotide
atggccttaccagtgaccgccttgctcctgccgctggccttgctgctccacgccgccaggccggacatccagatgacacagactacatcctccctgtctgcctctctgggagacagagtcaccatcagttgcagggcaagtcaggacattagtaagtacctgaactggtatcagcagaaaccagatggaactgttaaactcctgatctaccatacatcaagattacactcaggagtcccatcaaggttcagtggcagtgggtctggaacagattattctctcaccattagcaacctggagcaagaagatattgccacttacttttgccaacagggtaatacgcttccgtacacgttcggaggggggaccaagctggagatcacactcgaggacctgaagaacgtgttcccacctgaggtggccgtgttcgagcctagcgaggccgagatcagccacacccagaaagccaccctcgtgtgcctggctaccggcttctaccccgaccatgtggaactgtcttggtgggtcaacggcaaagaggtgcacagcggcgtgtctaccgacccccagccactgaaagaacagcccgccctgaacgacagccggtactgcctgagcagcagactgagagtgtccgccaccttctggcagaacccccggaaccacttcagatgccaggtgcagttctacggcctgagcgagaacgacgagtggacccaggacagagccaagcccgtgacccagatcgtgtctgccgaagcctggggcagagccgattgcggatcccagagcttcggcctgctggaccccaagctgtgctacctgctggatggcatcctgttcatctacggcgtgatcctgaccgccctgttcctgagagtgaagttcagcagaagcgccgacgcccctgcctaccagcagggacagaaccaactgtacaacgagctgaacctgggcagacgggaagagtacgacgtgctggacaagcggagaggcagggaccctgagatgggcggaaagccccagcggagaaagaacccccaggaaggactgtataacgaactccagaaagacaagatggccgaagcctacagcgagatcggcatgaagggcgagcggagaagaggcaagggccacgatggcctgtaccagggcctgagcaccgccaccaaggacacctatgacgccctgcacatgcaggccctgcctccaagaagggccaagcgatctggatctggagcaacaaacttctcactactcaaacaagcaggtgacgtggaggagaatcccgggcctactagtatggactggatttggcgcatccttttccttgtcggcgctgctaccggcgcgcattccttcgaagtgaaactgcaggagtcaggacctggcctggtggcgccctcacagagcctgtccgtcacatgcactgtctcaggggtctcattacccgactatggtgtaagctggattcgccagcctccacgaaagggtctggagtggctgggagtaatatggggtagtgaaaccacatactataattcagctctcaaatccagactgaccatcatcaaggacaactccaagagccaagttttcttaaaaatgaacagtctgcaaactgatgacacagccatttactactgtgccaaacattattactacggtggtagctatgctatggactactggggccaaggaacctcagtcaccgtctcctcaacgcgtatccagaaccctgatcctgccgtgtaccagctgcgggatagcaagagcagcgacaagagcgtgtgtctgttcaccgacttcgacagccagaccaacgtgtcccagagcaaggactccgacgtgtacatcaccgataagaccgtgctggacatgcggagcatggacttcaagagcaactccgccgtggcctggtccaacaagtccgatttcgcctgcgccaacgccttcaacaacagcattatccccgaggacacattcttcccaagccccgagagcagctgcggtacccagagttttgggttgttggaccctaaattgtgctatctgttggacggaatcctgttcatttacggagtgatcctgaccgcattgttcctgcgggttaagttttccagatccgcagacgcacccgcttaccaacaagggcagaaccaactctacaatgaacttaatttggggcggagggaagagtacgacgttctggacaaaaggaggggacgagatcccgagatgggcggaaagcctcagcgaaggaagaatccgcaagaggggctttataacgaactccagaaagataaaatggcagaagcctatagtgagattgggatgaagggagaaaggaggaggggtaaaggtcacgatgggttgtaccaaggattgagcacagccactaaagatacctatgatgcgctccacatgcaggccctgccgccaagacgcgccaagagaagcggatctggcgtgaagcagaccctgaatttcgacctgctgaagctggctggcgacgtggaatccaacccaggcccttctagaggccatatgaccgagtacaagcccacggtgcgcctcgccacccgcgacgacgtccccagggccgtacgcaccctcgccgccgcgttcgccgactaccccgccacgcgccacaccgtcgatccggaccgccacatcgagcgggtcaccgagctgcaagaactcttcctcacgcgcgtcgggctcgacatcggcaaggtgtgggtcgcggacgacggcgccgcggtggcggtctggaccacgccggagagcgtcgaagcgggggcggtgttcgccgagatcggcccgcgcatggccgagttgagcggttcccggctggccgcgcagcaacagatggaaggcctcctggcgccgcaccggcccaaggagcccgcgtggttcctggccaccgtcggcgtctcgcccgaccaccagggcaagggtctgggcagcgccgtcgtgctccccggagtggaggcggccgagcgcgccggggtgcccgccttcctggagacctccgcgccccgcaacctccccttctacgagcggctcggcttcaccgtcaccgccgacgtcgaggtgcccgaaggaccgcgcacctggtgcatgacccgcaagcccggtgcctga

SEQ ID NO: 5135 - DNA, 3147 bp, Artificial Sequence
  Synthetic Polynucleotide
atggccttaccagtgaccgccttgctcctgccgctggccttgctgctccacgccgccaggccggacatccagatgacacagactacatcctccctgtctgcctctctgggagacagagtcaccatcagttgcagggcaagtcaggacattagtaagtacctgaactggtatcagcagaaaccagatggaactgttaaactcctgatctaccatacatcaagattacactcaggagtcccatcaaggttcagtggcagtgggtctggaacagattattctctcaccattagcaacctggagcaagaagatattgccacttacttttgccaacagggtaatacgcttccgtacacgttcggaggggggaccaagctggagatcacactcgaggacctgaagaacgtgttcccacctgaggtggccgtgttcgagcctagcaaggccgagatcgcccacacccagaaagccaccctcgtgtgcctggctaccggcttctaccccgaccatgtggaactgtcttggtgggtcaacggcaaagaggtgcacagcggcgtgtgtaccgacccccagccactgaaagaacagcccgccctgaacgacagccggtactgcctgagcagcagactgagagtgtccgccaccttctggcagaacccccggaaccacttcagatgccaggtgcagttctacggcctgagcgagaacgacgagtggacccaggacagagccaagcccgtgacccagatcgtgtctgccgaagcctggggcagagccgattgcggatcccagagcttcggcctgctggaccccaagctgtgctacctgctggatggcatcctgttcatctacggcgtgatcctgaccgccctgttcctgagagtgaagttcagcagaagcgccgacgcccctgcctaccagcagggacagaaccaactgtacaacgagctgaacctgggcagacgggaagagtacgacgtgctggacaagcggagaggcagggaccctgagatgggcggaaagccccagcggagaaagaacccccaggaaggactgtataacgaactccagaaagacaagatggccgaagcctacagcgagatcggcatgaagggcgagcggagaagaggcaagggccacgatggcctgtaccagggcctgagcaccgccaccaaggacacctatgacgccctgcacatgcaggccctgcctccaagaagggccaagcgatctggatctggagcaacaaacttctcactactcaaacaagcaggtgacgtggaggagaatcccgggcctactagtatggactggatttggcgcatccttttccttgtcggcgctgctaccggcgcgcattccttcgaagtgaaactgcaggagtcaggacctggcctggtggcgccctcacagagcctgtccgtcacatgcactgtctcaggggtctcattacccgactatggtgtaagctggattcgccagcctccacgaaagggtctggagtggctgggagtaatatggggtagtgaaaccacatactataattcagctctcaaatccagactgaccatcatcaaggacaactccaagagccaagttttcttaaaaatgaacagtctgcaaactgatgacacagccatttactactgtgccaaacattattactacggtggtagctatgctatggactactggggccaaggaacctcagtcaccgtctcctcaacgcgtatccagaaccctgatcctgccgtgtaccagctgcgggatagcaagagcagcgacaagagcgtgtgtctgttcaccgacttcgacagccagaccaacgtgtcccagagcaaggactccgacgtgtacatcaccgataagtgcgtgctggacatgcggagcatggacttcaagagcaactccgccgtggcctggtccaacaagtccgatttcgcctgcgccaacgccttcaacaacagcattatccccgaggacacattcttcccaagcagcgacgtgccctgcggtacccagagttttgggttgttggaccctaaattgtgctatctgttggacggaatcctgttcatttacggagtgatcctgaccgcattgttcctgcgggttaagttttccagatccgcagacgcacccgcttaccaacaagggcagaaccaactctacaatgaacttaatttggggcggagggaagagtacgacgttctggacaaaaggaggggacgagatcccgagatgggcggaaagcctcagcgaaggaagaatccgcaagaggggctttataacgaactccagaaagataaaatggcagaagcctatagtgagattgggatgaagggagaaaggaggaggggtaaaggtcacgatgggttgtaccaaggattgagcacagccactaaagatacctatgatgcgctccacatgcaggccctgccgccaagacgcgccaagagaagcggatctggcgtgaagcagaccctgaatttcgacctgctgaagctggctggcgacgtggaatccaacccaggcccttctagaggccatatgaccgagtacaagcccacggtgcgcctcgccacccgcgacgacgtccccagggccgtacgcaccctcgccgccgcgttcgccgactaccccgccacgcgccacaccgtcgatccggaccgccacatcgagcgggtcaccgagctgcaagaactcttcctcacgcgcgtcgggctcgacatcggcaaggtgtgggtcgcggacgacggcgccgcggtggcggtctggaccacgccggagagcgtcgaagcgggggcggtgttcgccgagatcggcccgcgcatggccgagttgagcggttcccggctggccgcgcagcaacagatggaaggcctcctggcgccgcaccggcccaaggagcccgcgtggttcctggccaccgtcggcgtctcgcccgaccaccagggcaagggtctgggcagcgccgtcgtgctccccggagtggaggcggccgagcgcgccggggtgcccgccttcctggagacctccgcgccccgcaacctccccttctacgagcggctcggcttcaccgtcaccgccgacgtcgaggtgcccgaaggaccgcgcacctggtgcatgacccgcaagcccggtgcctga

SEQ ID NO: 5136 - DNA, 3360 bp, Artificial Sequence
  Synthetic Polynucleotide
atggccttaccagtgaccgccttgctcctgccgctggccttgctgctccacgccgccaggccggacatccagatgacacagactacatcctccctgtctgcctctctgggagacagagtcaccatcagttgcagggcaagtcaggacattagtaagtacctgaactggtatcagcagaaaccagatggaactgttaaactcctgatctaccatacatcaagattacactcaggagtcccatcaaggttcagtggcagtgggtctggaacagattattctctcaccattagcaacctggagcaagaagatattgccacttacttttgccaacagggtaatacgcttccgtacacgttcggaggggggaccaagctggagatcacactcgaggggaaaccaattcccaaccctcttctgggactggattcaaccggcagcggcgaggacctgaagaacgtgttcccacctgaggtggccgtgttcgagcctagcgaggccgagatcagccacacccagaaagccaccctcgtgtgcctggctaccggcttctaccccgaccatgtggaactgtcttggtgggtcaacggcaaagaggtgcacagcggcgtgtctaccgacccccagccactgaaagaacagcccgccctgaacgacagccggtactgcctgagcagcagactgagagtgtccgccaccttctggcagaacccccggaaccacttcagatgccaggtgcagttctacggcctgagcgagaacgacgagtggacccaggacagagccaagcccgtgacccagatcgtgtctgccgaagcctggggcagagccgattgcggatcccagagcttcggcctgctggaccccaagctgtgctacctgctggatggcatcctgttcatctacggcgtgatcctgaccgccctgttcctgagagtgaagttcagcagaagcgccgacgcccctgcctaccagcagggacagaaccaactgtacaacgagctgaacctgggcagacgggaagagtacgacgtgctggacaagcggagaggcagggaccctgagatgggcggaaagccccagcggagaaagaacccccaggaaggactgtataacgaactccagaaagacaagatggccgaagcctacagcgagatcggcatgaagggcgagcggagaagaggcaagggccacgatggcctgtaccagggcctgagcaccgccaccaaggacacctatgacgccctgcacatgcaggccctgcctccaagaagggccaagcgatctggatctggagcaacaaacttctcactactcaaacaagcaggtgacgtggaggagaatcccgggcctactagtatggactggatttggcgcatccttttccttgtcggcgctgctaccggcgcgcattccttcgaagtgaaactgcaggagtcaggacctggcctggtggcgccctcacagagcctgtccgtcacatgcactgtctcaggggtctcattacccgactatggtgtaagctggattcgccagcctccacgaaagggtctggagtggctgggagtaatatggggtagtgaaaccacatactataattcagctctcaaatccagactgaccatcatcaaggacaactccaagagccaagttttcttaaaaatgaacagtctgcaaactgatgacacagccatttactactgtgccaaacattattactacggtggtagctatgctatggactactggggccaaggaacctcagtcaccgtctcctcaacgcgtgagcagaaactgatctcggaagaggatgggagcggcatccagaaccctgatcctgccgtgtaccagctgcgggatagcaagagcagcgacaagagcgtgtgtctgttcaccgacttcgacagccagaccaacgtgtcccagagcaaggactccgacgtgtacatcaccgataagaccgtgctggacatgcggagcatggacttcaagagcaactccgccgtggcctggtccaacaagtccgatttcgcctgcgccaacgccttcaacaacagcattatccccgaggacacattcttcccaagccccgagagcagctgcggtacccagagttttgggttgttggaccctaaattgtgctatctgttggacggaatcctgttcatttacggagtgatcctgaccgcattgttcctgaggagcaagcggtcacggctgctccacagcgattacatgaatatgacaccacgaagaccgggtcctactcgcaaacactaccaaccctacgcacctccccgcgactttgcagcgtaccgatctcgggttaagttttccagatccgcagacgcacccgcttaccaacaagggcagaaccaactctacaatgaacttaatttggggcggagggaagagtacgacgttctggacaaaaggaggggacgagatcccgagatgggcggaaagcctcagcgaaggaagaatccgcaagaggggctttataacgaactccagaaagataaaatggcagaagcctatagtgagattgggatgaagggagaaaggaggaggggtaaaggtcacgatgggttgtaccaaggattgagcacagccactaaagatacctatgatgcgctccacatgcaggccctgccgccaagacgcgccaagagaagcggatctggcgtgaagcagaccctgaatttcgacctgctgaagctggctggcgacgtggaatccaacccaggcccttctagaggccatatgaccgagtacaagcccacggtgcgcctcgccacccgcgacgacgtccccagggccgtacgcaccctcgccgccgcgttcgccgactaccccgccacgcgccacaccgtcgatccggaccgccacatcgagcgggtcaccgagctgcaagaactcttcctcacgcgcgtcgggctcgacatcggcaaggtgtgggtcgcggacgacggcgccgcggtggcggtctggaccacgccggagagcgtcgaagcgggggcggtgttcgccgagatcggcccgcgcatggccgagttgagcggttcccggctggccgcgcagcaacagatggaaggcctcctggcgccgcaccggcccaaggagcccgcgtggttcctggccaccgtcggcgtctcgcccgaccaccagggcaagggtctgggcagcgccgtcgtgctccccggagtggaggcggccgagcgcgccggggtgcccgccttcctggagacctccgcgccccgcaacctccccttctacgagcggctcggcttcaccgtcaccgccgacgtcgaggtgcccgaaggaccgcgcacctggtgcatgacccgcaagcccggtgcctga

SEQ ID NO: 5137 - DNA, 3492 bp, Artificial Sequence
  Synthetic Polynucleotide
atggccttaccagtgaccgccttgctcctgccgctggccttgctgctccacgccgccaggccggacatccagatgacacagactacatcctccctgtctgcctctctgggagacagagtcaccatcagttgcagggcaagtcaggacattagtaagtacctgaactggtatcagcagaaaccagatggaactgttaaactcctgatctaccatacatcaagattacactcaggagtcccatcaaggttcagtggcagtgggtctggaacagattattctctcaccattagcaacctggagcaagaagatattgccacttacttttgccaacagggtaatacgcttccgtacacgttcggaggggggaccaagctggagatcacactcgaggggaaaccaattcccaaccctcttctgggactggattcaaccggcagcggcgaggacctgaagaacgtgttcccacctgaggtggccgtgttcgagcctagcgaggccgagatcagccacacccagaaagccaccctcgtgtgcctggctaccggcttctaccccgaccatgtggaactgtcttggtgggtcaacggcaaagaggtgcacagcggcgtgtctaccgacccccagccactgaaagaacagcccgccctgaacgacagccggtactgcctgagcagcagactgagagtgtccgccaccttctggcagaacccccggaaccacttcagatgccaggtgcagttctacggcctgagcgagaacgacgagtggacccaggacagagccaagcccgtgacccagatcgtgtctgccgaagcctggggcagagccgattgcggatcccagagcttcggcctgctggaccccaagctgtgctacctgctggatggcatcctgttcatctacggcgtgatcctgaccgccctgttcctgaaacggggcagaaagaaactcctgtatatattcaaacaaccatttatgagaccagtacaaactactcaagaggaagatggctgtagctgccgatttccagaagaagaagaaggaggatgtgaactgagagtgaagttcagcagaagcgccgacgcccctgcctaccagcagggacagaaccaactgtacaacgagctgaacctgggcagacgggaagagtacgacgtgctggacaagcggagaggcagggaccctgagatgggcggaaagccccagcggagaaagaacccccaggaaggactgtataacgaactccagaaagacaagatggccgaagcctacagcgagatcggcatgaagggcgagcggagaagaggcaagggccacgatggcctgtaccagggcctgagcaccgccaccaaggacacctatgacgccctgcacatgcaggccctgcctccaagaagggccaagcgatctggatctggagcaacaaacttctcactactcaaacaagcaggtgacgtggaggagaatcccgggcctactagtatggactggatttggcgcatccttttccttgtcggcgctgctaccggcgcgcattccttcgaagtgaaactgcaggagtcaggacctggcctggtggcgccctcacagagcctgtccgtcacatgcactgtctcaggggtctcattacccgactatggtgtaagctggattcgccagcctccacgaaagggtctggagtggctgggagtaatatggggtagtgaaaccacatactataattcagctctcaaatccagactgaccatcatcaaggacaactccaagagccaagttttcttaaaaatgaacagtctgcaaactgatgacacagccatttactactgtgccaaacattattactacggtggtagctatgctatggactactggggccaaggaacctcagtcaccgtctcctcaacgcgtgagcagaaactgatctcggaagaggatctggggagcggcatccagaaccctgatcctgccgtgtaccagctgcgggatagcaagagcagcgacaagagcgtgtgtctgttcaccgacttcgacagccagaccaacgtgtcccagagcaaggactccgacgtgtacatcaccgataagaccgtgctggacatgcggagcatggacttcaagagcaactccgccgtggcctggtccaacaagtccgatttcgcctgcgccaacgccttcaacaacagcattatccccgaggacacattcttcccaagccccgagagcagctgcggtacccagagttttgggttgttggaccctaaattgtgctatctgttggacggaatcctgttcatttacggagtgatcctgaccgcattgttcctgaagagaggccggaagaagctgctgtacatcttcaagcagcctttcatgcggcccgtgcagaccacccaggaagaggacggctgctcctgccggttccccgaggaagaagaaggcggctgcgagctgcgggttaagttttccagatccgcagacgcacccgcttaccaacaagggcagaaccaactctacaatgaacttaatttggggcggagggaagagtacgacgttctggacaaaaggaggggacgagatcccgagatgggcggaaagcctcagcgaaggaagaatccgcaagaggggctttataacgaactccagaaagataaaatggcagaagcctatagtgagattgggatgaagggagaaaggaggaggggtaaaggtcacgatgggttgtaccaaggattgagcacagccactaaagatacctatgatgcgctccacatgcaggccctgccgccaagacgcgccaagagaagcggatctggcgtgaagcagaccctgaatttcgacctgctgaagctggctggcgacgtggaatccaacccaggcccttctagaggccatatgaccgagtacaagcccacggtgcgcctcgccacccgcgacgacgtccccagggccgtacgcaccctcgccgccgcgttcgccgactaccccgccacgcgccacaccgtcgatccggaccgccacatcgagcgggtcaccgagctgcaagaactcttcctcacgcgcgtcgggctcgacatcggcaaggtgtgggtcgcggacgacggcgccgcggtggcggtctggaccacgccggagagcgtcgaagcgggggcggtgttcgccgagatcggcccgcgcatggccgagttgagcggttcccggctggccgcgcagcaacagatggaaggcctcctggcgccgcaccggcccaaggagcccgcgtggttcctggccaccgtcggcgtctcgcccgaccaccagggcaagggtctgggcagcgccgtcgtgctccccggagtggaggcggccgagcgcgccggggtgcccgccttcctggagacctccgcgccccgcaacctccccttctacgagcggctcggcttcaccgtcaccgccgacgtcgaggtgcccgaaggaccgcgcacctggtgcatgacccgcaagcccggtgcctga

SEQ ID NO: 5138 - DNA, 3483 bp, Artificial Sequence
  Synthetic Polynucleotide
atggccttaccagtgaccgccttgctcctgccgctggccttgctgctccacgccgccaggccggacatccagatgacacagactacatcctccctgtctgcctctctgggagacagagtcaccatcagttgcagggcaagtcaggacattagtaagtacctgaactggtatcagcagaaaccagatggaactgttaaactcctgatctaccatacatcaagattacactcaggagtcccatcaaggttcagtggcagtgggtctggaacagattattctctcaccattagcaacctggagcaagaagatattgccacttacttttgccaacagggtaatacgcttccgtacacgttcggaggggggaccaagctggagatcacactcgaggggaaaccaattcccaaccctcttctgggactggattcaaccggcagcggcgaggacctgaagaacgtgttcccacctgaggtggccgtgttcgagcctagcgaggccgagatcagccacacccagaaagccaccctcgtgtgcctggctaccggcttctaccccgaccatgtggaactgtcttggtgggtcaacggcaaagaggtgcacagcggcgtgtctaccgacccccagccactgaaagaacagcccgccctgaacgacagccggtactgcctgagcagcagactgagagtgtccgccaccttctggcagaacccccggaaccacttcagatgccaggtgcagttctacggcctgagcgagaacgacgagtggacccaggacagagccaagcccgtgacccagatcgtgtctgccgaagcctggggcagagccgattgcggatcccagagcttcggcctgctggaccccaagctgtgctacctgctggatggcatcctgttcatctacggcgtgatcctgaccgccctgttcctgaggagtaagaggagcaggctcctgcacagtgactacatgaacatgactccacgccgccccggacccacccgcaagcattaccagccctatgccccaccacgcgacttcgcagcctatcgctccagagtgaagttcagcagaagcgccgacgcccctgcctaccagcagggacagaaccaactgtacaacgagctgaacctgggcagacgggaagagtacgacgtgctggacaagcggagaggcagggaccctgagatgggcggaaagccccagcggagaaagaacccccaggaaggactgtataacgaactccagaaagacaagatggccgaagcctacagcgagatcggcatgaagggcgagcggagaagaggcaagggccacgatggcctgtaccagggcctgagcaccgccaccaaggacacctatgacgccctgcacatgcaggccctgcctccaagaagggccaagcgatctggatctggagcaacaaacttctcactactcaaacaagcaggtgacgtggaggagaatcccgggcctactagtatggactggatttggcgcatccttttccttgtcggcgctgctaccggcgcgcattccttcgaagtgaaactgcaggagtcaggacctggcctggtggcgccctcacagagcctgtccgtcacatgcactgtctcaggggtctcattacccgactatggtgtaagctggattcgccagcctccacgaaagggtctggagtggctgggagtaatatggggtagtgaaaccacatactataattcagctctcaaatccagactgaccatcatcaaggacaactccaagagccaagttttcttaaaaatgaacagtctgcaaactgatgacacagccatttactactgtgccaaacattattactacggtggtagctatgctatggactactggggccaaggaacctcagtcaccgtctcctcaacgcgtgagcagaaactgatctcggaagaggatgggagcggcatccagaaccctgatcctgccgtgtaccagctgcgggatagcaagagcagcgacaagagcgtgtgtctgttcaccgacttcgacagccagaccaacgtgtcccagagcaaggactccgacgtgtacatcaccgataagaccgtgctggacatgcggagcatggacttcaagagcaactccgccgtggcctggtccaacaagtccgatttcgcctgcgccaacgccttcaacaacagcattatccccgaggacacattcttcccaagccccgagagcagctgcggtacccagagttttgggttgttggaccctaaattgtgctatctgttggacggaatcctgttcatttacggagtgatcctgaccgcattgttcctgaggagcaagcggtcacggctgctccacagcgattacatgaatatgacaccacgaagaccgggtcctactcgcaaacactaccaaccctacgcacctccccgcgactttgcagcgtaccgatctcgggttaagttttccagatccgcagacgcacccgcttaccaacaagggcagaaccaactctacaatgaacttaatttggggcggagggaagagtacgacgttctggacaaaaggaggggacgagatcccgagatgggcggaaagcctcagcgaaggaagaatccgcaagaggggctttataacgaactccagaaagataaaatggcagaagcctatagtgagattgggatgaagggagaaaggaggaggggtaaaggtcacgatgggttgtaccaaggattgagcacagccactaaagatacctatgatgcgctccacatgcaggccctgccgccaagacgcgccaagagaagcggatctggcgtgaagcagaccctgaatttcgacctgctgaagctggctggcgacgtggaatccaacccaggcccttctagaggccatatgaccgagtacaagcccacggtgcgcctcgccacccgcgacgacgtccccagggccgtacgcaccctcgccgccgcgttcgccgactaccccgccacgcgccacaccgtcgatccggaccgccacatcgagcgggtcaccgagctgcaagaactcttcctcacgcgcgtcgggctcgacatcggcaaggtgtgggtcgcggacgacggcgccgcggtggcggtctggaccacgccggagagcgtcgaagcgggggcggtgttcgccgagatcggcccgcgcatggccgagttgagcggttcccggctggccgcgcagcaacagatggaaggcctcctggcgccgcaccggcccaaggagcccgcgtggttcctggccaccgtcggcgtctcgcccgaccaccagggcaagggtctgggcagcgccgtcgtgctccccggagtggaggcggccgagcgcgccggggtgcccgccttcctggagacctccgcgccccgcaacctccccttctacgagcggctcggcttcaccgtcaccgccgacgtcgaggtgcccgaaggaccgcgcacctggtgcatgacccgcaagcccggtgcctga

SEQ ID NO: 5139 - DNA, 3156 bp, Artificial Sequence
  Synthetic Polynucleotide
atggccttaccagtgaccgccttgctcctgccgctggccttgctgctccacgccgccaggccggacatccagatgacacagagccctagcagcctgtctgccagcgtgggagacagagtgaccatcacatgcaaggccagcgaccacatcaacaactggctggcctggtatcagcagaagcctggacaggcccctaagctgctgatctacggcgctaccacactggaaacaggcgtgcccagcagattttctggcagcggctctggcaccgactacaccctgacaatatccagcctccagcctgaggacttcgccacctactactgtcagcagagctggaacaccccttggacattcggccagggcaccaagctggaaatcaagagactcgaggacctgaagaacgtgttcccacctgaggtggccgtgttcgagcctagcaaggccgagatcgcccacacccagaaagccaccctcgtgtgcctggctaccggcttctaccccgaccatgtggaactgtcttggtgggtcaacggcaaagaggtgcacagcggcgtgtgtaccgacccccagccactgaaagaacagcccgccctgaacgacagccggtactgcctgagcagcagactgagagtgtccgccaccttctggcagaacccccggaaccacttcagatgccaggtgcagttctacggcctgagcgagaacgacgagtggacccaggacagagccaagcccgtgacccagatcgtgtctgccgaagcctggggcagagccgattgcggatcccagagcttcggcctgctggaccccaagctgtgctacctgctggatggcatcctgttcatctacggcgtgatcctgaccgccctgttcctgagagtgaagttcagcagaagcgccgacgcccctgcctaccagcagggacagaaccaactgtacaacgagctgaacctgggcagacgggaagagtacgacgtgctggacaagcggagaggcagggaccctgagatgggcggaaagccccagcggagaaagaacccccaggaaggactgtataacgaactccagaaagacaagatggccgaagcctacagcgagatcggcatgaagggcgagcggagaagaggcaagggccacgatggcctgtaccagggcctgagcaccgccaccaaggacacctatgacgccctgcacatgcaggccctgcctccaagaagggccaagcgatctggatctggagcaacaaacttctcactactcaaacaagcaggtgacgtggaggagaatcccgggcctactagtatggactggatttggcgcatccttttccttgtcggcgctgctaccggcgcgcattccttcgaacaagttcagcttcaacagcctggcgctgagctggtcaaacctggcgcttctgtgaagatgagctgcaaagccagcggctacgccttcagcagctactggatcaactggatgaagcagaaacccggccagggactcgaatggatcggccaaatctatcccggcgacggcgacaccaactacaacggcaagttcaagggcagagccacactgaccgccgatacctctagcagcacagcctacatgcagctgagcagcctgaccagcgaagatagcgccgtgtacttctgtgcccggtccatcacaacagtcgtgggctgcgctatggactattggggccagggaacaagcgtgaccgtgtctagtacgcgtatccagaaccctgatcctgccgtgtaccagctgcgggatagcaagagcagcgacaagagcgtgtgtctgttcaccgacttcgacagccagaccaacgtgtcccagagcaaggactccgacgtgtacatcaccgataagtgcgtgctggacatgcggagcatggacttcaagagcaactccgccgtggcctggtccaacaagtccgatttcgcctgcgccaacgccttcaacaacagcattatccccgaggacacattcttcccaagcagcgacgtgccctgcggtacccagagttttgggttgttggaccctaaattgtgctatctgttggacggaatcctgttcatttacggagtgatcctgaccgcattgttcctgcgggttaagttttccagatccgcagacgcacccgcttaccaacaagggcagaaccaactctacaatgaacttaatttggggcggagggaagagtacgacgttctggacaaaaggaggggacgagatcccgagatgggcggaaagcctcagcgaaggaagaatccgcaagaggggctttataacgaactccagaaagataaaatggcagaagcctatagtgagattgggatgaagggagaaaggaggaggggtaaaggtcacgatgggttgtaccaaggattgagcacagccactaaagatacctatgatgcgctccacatgcaggccctgccgccaagacgcgccaagagaagcggatctggcgtgaagcagaccctgaatttcgacctgctgaagctggctggcgacgtggaatccaacccaggcccttctagaggccatatgaccgagtacaagcccacggtgcgcctcgccacccgcgacgacgtccccagggccgtacgcaccctcgccgccgcgttcgccgactaccccgccacgcgccacaccgtcgatccggaccgccacatcgagcgggtcaccgagctgcaagaactcttcctcacgcgcgtcgggctcgacatcggcaaggtgtgggtcgcggacgacggcgccgcggtggcggtctggaccacgccggagagcgtcgaagcgggggcggtgttcgccgagatcggcccgcgcatggccgagttgagcggttcccggctggccgcgcagcaacagatggaaggcctcctggcgccgcaccggcccaaggagcccgcgtggttcctggccaccgtcggcgtctcgcccgaccaccagggcaagggtctgggcagcgccgtcgtgctccccggagtggaggcggccgagcgcgccggggtgcccgccttcctggagacctccgcgccccgcaacctccccttctacgagcggctcggcttcaccgtcaccgccgacgtcgaggtgcccgaaggaccgcgcacctggtgcatgacccgcaagcccggtgcctga

SEQ ID NO: 5140 - DNA, 2181 bp, Artificial Sequence
  Synthetic Polynucleotide
atggccttaccagtgaccgccttgctcctgccgctggccttgctgctccacgccgccaggccggacatccagatgacacagagccctagcagcctgtctgccagcgtgggagacagagtgaccatcacatgcaaggccagcgaccacatcaacaactggctggcctggtatcagcagaagcctggacaggcccctaagctgctgatctacggcgctaccacactggaaacaggcgtgcccagcagattttctggcagcggctctggcaccgactacaccctgacaatatccagcctccagcctgaggacttcgccacctactactgtcagcagagctggaacaccccttggacattcggccagggcaccaagctggaaatcaagagaggcggaggcggaagtggaggcggaggatctggcggcggaggctctcaagttcagcttcaacagcctggcgctgagctggtcaaacctggcgcttctgtgaagatgagctgcaaagccagcggctacgccttcagcagctactggatcaactggatgaagcagaaacccggccagggactcgaatggatcggccaaatctatcccggcgacggcgacaccaactacaacggcaagttcaagggcagagccacactgaccgccgatacctctagcagcacagcctacatgcagctgagcagcctgaccagcgaagatagcgccgtgtacttctgtgcccggtccatcacaacagtcgtgggctgcgctatggactattggggccagggaacaagcgtgaccgtgtctagtacgcgtgagcagaaactgatctcggaagaggatctggcgaagcccaccacgacgccagcgccgcgaccaccaacaccggcgcccaccatcgcgtcgcagcccctgtccctgcgcccagaggcgtgccggccagcggcggggggcgcagtgcacacgagggggctggacttcgcctgtgacatctacatctgggcgcccttggccgggacttgtggggtccttctcctgtcactggttatcaccctttactgcaaacggggcagaaagaaactcctgtatatattcaaacaaccatttatgagaccagtacaaactactcaagaggaagatggctgtagctgccgatttccagaagaagaagaaggaggatgtgaactgagagtgaagttcagcaggagcgcagacgcccccgcgtaccagcagggccagaaccagctctataacgagctgaatctaggacgaagagaggagtacgatgttttggacaagagacgtggccgggaccctgagatggggggaaagccgagaaggaagaaccctcaggaaggcctgtacaatgaactgcagaaagataagatggcggaggcctacagtgagattgggatgaaaggcgagcgccggaggggcaaggggcacgatggcctttaccagggtctcagtacagccaccaaggacacctacgacgcccttcacatgcaggccctgccccctcgctctagtggctccggcgagggcagaggaagtctactaacctgcggagatgtggaagaaaatcctggcccacatatgaccgagtacaagcccacggtgcgcctcgccacccgcgacgacgtccccagggccgtacgcaccctcgccgccgcgttcgccgactaccccgccacgcgccacaccgtcgatccggaccgccacatcgagcgggtcaccgagctgcaagaactcttcctcacgcgcgtcgggctcgacatcggcaaggtgtgggtcgcggacgacggcgccgcggtggcggtctggaccacgccggagagcgtcgaagcgggggcggtgttcgccgagatcggcccgcgcatggccgagttgagcggttcccggctggccgcgcagcaacagatggaaggcctcctggcgccgcaccggcccaaggagcccgcgtggttcctggccaccgtcggcgtctcgcccgaccaccagggcaagggtctgggcagcgccgtcgtgctccccggagtggaggcggccgagcgcgccggggtgcccgccttcctggagacctccgcgccccgcaacctccccttctacgagcggctcggcttcaccgtcaccgccgacgtcgaggtgcccgaaggaccgcgcacctggtgcatgacccgcaagcccggtgcctga

SEQ ID NO: 5141 - DNA, 2175 bp, Artificial Sequence
  Synthetic Polynucleotide
atggccttaccagtgaccgccttgctcctgccgctggccttgctgctccacgccgccaggccggacatccagatgacacagactacatcctccctgtctgcctctctgggagacagagtcaccatcagttgcagggcaagtcaggacattagtaaatatttaaattggtatcagcagaaaccagatggaactgttaaactcctgatctaccatacatcaagattacactcaggagtcccatcaaggttcagtggcagtgggtctggaacagattattctctcaccattagcaacctggagcaagaagatattgccacttacttttgccaacagggtaatacgcttccgtacacgttcggaggggggaccaagctggagatcacaggtggcggtggctcgggcggtggtgggtcgggtggcggcggatctgaggtgaaactgcaggagtcaggacctggcctggtggcgccctcacagagcctgtccgtcacatgcactgtctcaggggtctcattacccgactatggtgtaagctggattcgccagcctccacgaaagggtctggagtggctgggagtaatatggggtagtgaaaccacatactataattcagctctcaaatccagactgaccatcatcaaggacaactccaagagccaagttttcttaaaaatgaacagtctgcaaactgatgacacagccatttactactgtgccaaacattattactacggtggtagctatgctatggactactggggtcaaggaacctcagtcaccgtctcctcacgcgtagagcagaaactgatctcggaagaggatctggcgaagcccaccacgacgccagcgccgcgaccaccaacaccggcgcccaccatcgcgtcgcagcccctgtccctgcgcccagaggcgtgccggccagcggcggggggcgcagtgcacacgagggggctggacttcgcctgtgacatctacatctgggcgcccttggccgggacttgtggggtccttctcctgtcactggttatcaccctttactgcaaacggggcagaaagaaactcctgtatatattcaaacaaccatttatgagaccagtacaaactactcaagaggaagatggctgtagctgccgatttccagaagaagaagaaggaggatgtgaactgagagtgaagttcagcaggagcgcagacgcccccgcgtaccagcagggccagaaccagctctataacgagctgaatctaggacgaagagaggagtacgatgttttggacaagagacgtggccgggaccctgagatggggggaaagccgagaaggaagaaccctcaggaaggcctgtacaatgaactgcagaaagataagatggcggaggcctacagtgagattgggatgaaaggcgagcgccggaggggcaaggggcacgatggcctttaccagggtctcagtacagccaccaaggacacctacgacgcccttcacatgcaggccctgccccctcgctctagtggctccggcgagggcagaggaagtctactaacctgcggagatgtggaagaaaatcctggcccacatatgaccgagtacaagcccacggtgcgcctcgccacccgcgacgacgtccccagggccgtacgcaccctcgccgccgcgttcgccgactaccccgccacgcgccacaccgtcgatccggaccgccacatcgagcgggtcaccgagctgcaagaactcttcctcacgcgcgtcgggctcgacatcggcaaggtgtgggtcgcggacgacggcgccgcggtggcggtctggaccacgccggagagcgtcgaagcgggggcggtgttcgccgagatcggcccgcgcatggccgagttgagcggttcccggctggccgcgcagcaacagatggaaggcctcctggcgccgcaccggcccaaggagcccgcgtggttcctggccaccgtcggcgtctcgcccgaccaccagggcaagggtctgggcagcgccgtcgtgctccccggagtggaggcggccgagcgcgccggggtgcccgccttcctggagacctccgcgccccgcaacctccccttctacgagcggctcggcttcaccgtcaccgccgacgtcgaggtgcccgaaggaccgcgcacctggtgcatgacccgcaagcccggtgcctga

SEQ ID NO: 5142 - DNA, 30 bp, Artificial Sequence; identical to SEQ ID NO: 5109
  Synthetic Polynucleotide

SEQ ID NO: 5143 - DNA, 30 bp, Artificial Sequence; identical to SEQ ID NO: 5109
  Synthetic Polynucleotide

SEQ ID NO: 5144 - DNA, 30 bp, Artificial Sequence; identical to SEQ ID NO: 5109
  Synthetic Polynucleotide

SEQ ID NO: 5145 - DNA, 30 bp, Artificial Sequence; identical to SEQ ID NO: 5109
  Synthetic Polynucleotide

SEQ ID NO: 5146 - DNA, 30 bp, Artificial Sequence; identical to SEQ ID NO: 5109
  Synthetic Polynucleotide

SEQ ID NO: 5147 - DNA, 30 bp, Artificial Sequence; identical to SEQ ID NO: 5109
  Synthetic Polynucleotide

SEQ ID NO: 5148 - DNA, 30 bp, Artificial Sequence; identical to SEQ ID NO: 5109
  Synthetic Polynucleotide

SEQ ID NO: 5149 - DNA, 30 bp, Artificial Sequence; identical to SEQ ID NO: 5109
  Synthetic Polynucleotide

SEQ ID NO: 5150 - DNA, 30 bp, Artificial Sequence; identical to SEQ ID NO: 5109
  Synthetic Polynucleotide

SEQ ID NO: 5151 - protein, 512 aa, Artificial Sequence
  Synthetic Polypeptide
MALPVTALLLPLALLLHAARPDVQMIQTPDSLAVSLGQRATISCRASESVDNYGISFMHWYQQKPGQSPKLLIYRASNLESGIPARFSGSGSRTDFTLTINPVETDDVATYYCQQNNKDPPTFGGGTKLEIKGGGGSGGGGSGGGGSGGGGSQVQLQQSGAELVKPGASVKISCKASGYAFSSYWMNWVKQRPGKGLEWIGQIYPGDGDTTYNGKFKGKATLTADKSSSTVYMQLNSLTSEDSAVYFCVRYYYGSSGYFDYWGQGTTLTVSSTRGMRTEDLPKAVVFLEPQWYRVLEKDSVTLKCQGAYSPEDNSTQWFHNESLISSQASSYFIDAATVDDSGEYRCQTNLSTLSDPVQLEVHIGWLLLQAPRWVFKEEDPIHLRCHSWKNTALHKVTYLQNGKGRKYFHHNSDFYIPKATLKDSGSYFCRGLVGSKNVSSETVNITITQGLAVPTISSFFPPGYQVSFCLVMVLLFAVDTGLYFSVKTNIRSSTRDWKDHKFKWRKDPQDK

SEQ ID NO: 5152 - protein, 503 aa, Artificial Sequence
  Synthetic Polypeptide
MALPVTALLLPLALLLHAARPDVQMIQTPSSLSASLGDRVTISCRASQDIGNYLNWYQQKPDGTVKLLIYYTSRLHSGVPSRFSGSGSGTEYSLTISNLEQEDIATYFCQQGSALPPTFGGGTKLEINGGGGSGGGGSGGGGSALQLQQSGAELVRPGASVTLSCKASGYTFTDYEMHWVKQTPVHGLEWIGAIDPETGGTAYNQKFEGKAILTADKSSSTAYMELRSLTSEDSPVYYCARRRYYGSSSFDYWGQGTTLTVSSTRGMRTEDLPKAVVFLEPQWYRVLEKDSVTLKCQGAYSPEDNSTQWFHNESLISSQASSYFIDAATVDDSGEYRCQTNLSTLSDPVQLEVHIGWLLLQAPRWVFKEEDPIHLRCHSWKNTALHKVTYLQNGKGRKYFHHNSDFYIPKATLKDSGSYFCRGLVGSKNVSSETVNITITQGLAVPTISSFFPPGYQVSFCLVMVLLFAVDTGLYFSVKTNIRSSTRDWKDHKFKWRKDPQDK

SEQ ID NO: 5153 - protein, 505 aa, Artificial Sequence
  Synthetic Polypeptide
MALPVTALLLPLALLLHAARPDIVLTQSPATLSLSPGDRATISCRASESVTILGSHLIYWYQQKPGQPPRLLIQLASNVQTGVPARFSGSGSRTDFTLTISSVEPEDFAVYYCLQSRTIPRTFGQGTKLEIKRGGGGSGGGGSGGGGSQVQLVQSGPEVKKPGESVKISCKASGYTFRHYSMNWVKQAPGQGLKWMGRINTESGVPIYADDFKGRFSFTVDTSASTAYLEISSLTSEDTAVYFCSNDYLYSLDFWGQGTTLTVSSTRGMRTEDLPKAVVFLEPQWYRVLEKDSVTLKCQGAYSPEDNSTQWFHNESLISSQASSYFIDAATVDDSGEYRCQTNLSTLSDPVQLEVHIGWLLLQAPRWVFKEEDPIHLRCHSWKNTALHKVTYLQNGKGRKYFHHNSDFYIPKATLKDSGSYFCRGLVGSKNVSSETVNITITQGLAVPTISSFFPPGYQVSFCLVMVLLFAVDTGLYFSVKTNIRSSTRDWKDHKFKWRKDPQDK

SEQ ID NO: 5154 - protein, 505 aa, Artificial Sequence
  Synthetic Polypeptide
MALPVTALLLPLALLLHAARPDIQMTQSPSSLSASVGDRVTITCSASQDISNYLNWYQQKPGKAPKLLIYYTSNLHSGVPSRFSGSGSGTDFTLTISSLQPEDFATYYCQQYRKLPWTFGQGTKLEIKRGGGGSGGGGSGGGGSQVQLVQSGAEVKKPGSSVKVSCKASGGTFSNYWMHWVRQAPGQGLEWMGATYRGHSDTYYNQKFKGRVTITADKSTSTAYMELSSLRSEDTAVYYCARGAIYDGYDVLDNWGQGTLVTVSSTRGMRTEDLPKAVVFLEPQWYRVLEKDSVTLKCQGAYSPEDNSTQWFHNESLISSQASSYFIDAATVDDSGEYRCQTNLSTLSDPVQLEVHIGWLLLQAPRWVFKEEDPIHLRCHSWKNTALHKVTYLQNGKGRKYFHHNSDFYIPKATLKDSGSYFCRGLVGSKNVSSETVNITITQGLAVPTISSFFPPGYQVSFCLVMVLLFAVDTGLYFSVKTNIRSSTRDWKDHKFKWRKDPQDK

SEQ ID NO: 5155 - protein, 510 aa, Artificial Sequence
  Synthetic Polypeptide
MALPVTALLLPLALLLHAARPDIVMTQSPDSLAVSLGERATINCESSQSLLNSGNQKNYLTWYQQKPGQPPKPLIYWASTRESGVPDRFSGSGSGTDFTLTISSLQAEDVAVYYCQNDYSYPYTFGQGTKLEIKRGGGGSGGGGSGGGGSEVQLVQSGAEVKKPGESLKISCKGSGYSFTDYYMKWARQMPGKGLEWMGDIIPSNGATFYNQKFKGQVTISADKSISTTYLQWSSLKASDTAMYYCARSHLLRASWFAYWGQGTMVTVSSTRGMRTEDLPKAVVFLEPQWYRVLEKDSVTLKCQGAYSPEDNSTQWFHNESLISSQASSYFIDAATVDDSGEYRCQTNLSTLSDPVQLEVHIGWLLLQAPRWVFKEEDPIHLRCHSWKNTALHKVTYLQNGKGRKYFHHNSDFYIPKATLKDSGSYFCRGLVGSKNVSSETVNITITQGLAVPTISSFFPPGYQVSFCLVMVLLFAVDTGLYFSVKTNIRSSTRDWKDHKFKWRKDPQDK

SEQ ID NO: 5156 - protein, 505 aa, Artificial Sequence
  Synthetic Polypeptide
MALPVTALLLPLALLLHAARPDIQMTQSTSSLSASLGDRVTISCSASQGINNYLNWYQQKPDGTVELLIYYTSTLQSGVPSRFSGSGSGTDYSLTISNLEPEDIGTYYCQQYSKLPRTFGGGTKLEIKGGGGSGGGGSGGGGSQVQLQQSGSELMMPGASVKISCKATGYTFSNYWIEWVKQRPGHGLEWIGEILPGTGRTIYNEKFKGKATFTADISSNTVQMQLSSLTSEDSAVYYCARRDYYGNFYYAMDYWGQGTSVTVSSTRGMRTEDLPKAVVFLEPQWYRVLEKDSVTLKCQGAYSPEDNSTQWFHNESLISSQASSYFIDAATVDDSGEYRCQTNLSTLSDPVQLEVHIGWLLLQAPRWVFKEEDPIHLRCHSWKNTALHKVTYLQNGKGRKYFHHNSDFYIPKATLKDSGSYFCRGLVGSKNVSSETVNITITQGLAVPTISSFFPPGYQVSFCLVMVLLFAVDTGLYFSVKTNIRSSTRDWKDHKFKWRKDPQDK

SEQ ID NO: 5157 - protein, 500 aa, Artificial Sequence
  Synthetic Polypeptide
MALPVTALLLPLALLLHAARPDIQMTQSPASLSVSVGETVTITCRASENIYSNLAWYQQKQGKSPQLLVYAATNLADGVPSRFSGSGSGTQYSLKINSLQSEDFGSYYCQHFWGTWTFGGGTTLEIKGGGGSGGGGSGGGGSEVQLQQSGPELVKPGASVKMSCKASGYTFTDYYMKWMKQSHGKSLEWIGDINPNNGGTTYNQKFKGKATLTVDKSSSTAYMQLNSLTSEDSAVYYCARDYGYGYFDYWGQGTTLTVSSTRGMRTEDLPKAVVFLEPQWYRVLEKDSVTLKCQGAYSPEDNSTQWFHNESLISSQASSYFIDAATVDDSGEYRCQTNLSTLSDPVQLEVHIGWLLLQAPRWVFKEEDPIHLRCHSWKNTALHKVTYLQNGKGRKYFHHNSDFYIPKATLKDSGSYFCRGLVGSKNVSSETVNITITQGLAVPTISSFFPPGYQVSFCLVMVLLFAVDTGLYFSVKTNIRSSTRDWKDHKFKWRKDPQDK

SEQ ID NO: 5158 - protein, 504 aa, Artificial Sequence
  Synthetic Polypeptide
MALPVTALLLPLALLLHAARPDEIVLTQSPATLSLSPGERATLSCSASSSVSYMHWYQQKPGQAPRLLIYDTSKLASGIPARFSGSGSGTDFTLTISSLEPEDVAVYYCFQGSVYPFTFGQGTKLEIKRGGGGSGGGGSGGGGSQVQLQESGPGLVKPSQTLSLTCTVSGGSISTSGMGVGWIRQHPGKGLEWIGHIWWDDDKRYNPALKSRVTISVDTSKNQFSLKLSSVTAADTAVYYCARMELWSYYFDYWGQGTLVTVSSTRGMRTEDLPKAVVFLEPQWYRVLEKDSVTLKCQGAYSPEDNSTQWFHNESLISSQASSYFIDAATVDDSGEYRCQTNLSTLSDPVQLEVHIGWLLLQAPRWVFKEEDPIHLRCHSWKNTALHKVTYLQNGKGRKYFHHNSDFYIPKATLKDSGSYFCRGLVGSKNVSSETVNITITQGLAVPTISSFFPPGYQVSFCLVMVLLFAVDTGLYFSVKTNIRSSTRDWKDHKFKWRKDPQDK

SEQ ID NO: 5159 - protein, 503 aa, Artificial Sequence
  Synthetic Polypeptide
MALPVTALLLPLALLLHAARPDIQMTQTTSSLSASLGDRVTISCRASQDISKYLNWYQQKPDGTVKLLIYHTSRLHSGVPSRFSGSGSGTDYSLTISNLEQEDIATYFCQQGNTLPYTFGGGTKLEITGGGGSGGGGSGGGGSEVKLQESGPGLVAPSQSLSVTCTVSGVSLPDYGVSWIRQPPRKGLEWLGVIWGSETTYYNSALKSRLTIIKDNSKSQVFLKMNSLQTDDTAIYYCAKHYYYGGSYAMDYWGQGTSVTVSSTRGMRTEDLPKAVVFLEPQWYRVLEKDSVTLKCQGAYSPEDNSTQWFHNESLISSQASSYFIDAATVDDSGEYRCQTNLSTLSDPVQLEVHIGWLLLQAPRWVFKEEDPIHLRCHSWKNTALHKVTYLQNGKGRKYFHHNSDFYIPKATLKDSGSYFCRGLVGSKNVSSETVNITITQGLAVPTISSFFPPGYQVSFCLVMVLLFAVDTGLYFSVKTNIRSSTRDWKDHKFKWRKDPQDK

SEQ ID NO: 5160 - protein, 503 aa, Artificial Sequence
  Synthetic Polypeptide
MALPVTALLLPLALLLHAARPEIVMTQSPATLSLSPGERATLSCRASQDISKYLNWYQQKPGQAPRLLIYHTSRLHSGIPARFSGSGSGTDYTLTISSLQPEDFAVYFCQQGNTLPYTFGQGTKLEIKGGGGSGGGGSGGGGSQVQLQESGPGLVKPSETLSLTCTVSGVSLPDYGVSWIRQPPGKGLEWIGVIWGSETTYYNSSLKSRVTISKDNSKNQVSLKLSSVTAADTAVYYCAKHYYYGGSYAMDYWGQGTLVTVSSTRGMRTEDLPKAVVFLEPQWYRVLEKDSVTLKCQGAYSPEDNSTQWFHNESLISSQASSYFIDAATVDDSGEYRCQTNLSTLSDPVQLEVHIGWLLLQAPRWVFKEEDPIHLRCHSWKNTALHKVTYLQNGKGRKYFHHNSDFYIPKATLKDSGSYFCRGLVGSKNVSSETVNITITQGLAVPTISSFFPPGYQVSFCLVMVLLFAVDTGLYFSVKTNIRSSTRDWKDHKFKWRKDPQDK

SEQ ID NO: 5161 - protein, 505 aa, Artificial Sequence
  Synthetic Polypeptide
MALPVTALLLPLALLLHAARPEIVLTQSPATLSLSPGERATLSCRASQSVSSYLAWYQQKPGQAPRLLIYDASNRATGIPARFSGSGSGTDFTLTISSLEPEDFAVYYCQQRSNWPITFGQGTRLEIKGGGGSGGGGSGGGGSEVQLVESGGGLVQPGRSLRLSCAASGFTFNDYAMHWVRQAPGKGLEWVSTISWNSGSIGYADSVKGRFTISRDNAKKSLYLQMNSLRAEDTALYYCAKDIQYGNYYYGMDVWGQGTTVTVSSTRGMRTEDLPKAVVFLEPQWYRVLEKDSVTLKCQGAYSPEDNSTQWFHNESLISSQASSYFIDAATVDDSGEYRCQTNLSTLSDPVQLEVHIGWLLLQAPRWVFKEEDPIHLRCHSWKNTALHKVTYLQNGKGRKYFHHNSDFYIPKATLKDSGSYFCRGLVGSKNVSSETVNITITQGLAVPTISSFFPPGYQVSFCLVMVLLFAVDTGLYFSVKTNIRSSTRDWKDHKFKWRKDPQDK

SEQ ID NO: 5162 - protein, 508 aa, Artificial Sequence
  Synthetic Polypeptide
MALPVTALLLPLALLLHAARPDIVMTQTPLSLPVTPGEPASISCRSSKSLLHSNGITYLYWYLQKPGQSPQLLIYQMSNLVSGVPDRFSGSGSGTDFTLKISRVEAEDVGVYYCAQNLELPYTFGGGTKVEIKRGGGGSGGGGSGGGGSQVQLVQSGAEVKKPGSSVKVSCKASGYAFSYSWINWVRQAPGQGLEWMGRIFPGDGDTDYNGKFKGRVTITADKSTSTAYMELSSLRSEDTAVYYCARNVFDGYWLVYWGQGTLVTVSSTRGMRTEDLPKAVVFLEPQWYRVLEKDSVTLKCQGAYSPEDNSTQWFHNESLISSQASSYFIDAATVDDSGEYRCQTNLSTLSDPVQLEVHIGWLLLQAPRWVFKEEDPIHLRCHSWKNTALHKVTYLQNGKGRKYFHHNSDFYIPKATLKDSGSYFCRGLVGSKNVSSETVNITITQGLAVPTISSFFPPGYQVSFCLVMVLLFAVDTGLYFSVKTNIRSSTRDWKDHKFKWRKDPQDK

SEQ ID NO: 5163 - protein, 509 aa, Artificial Sequence
  Synthetic Polypeptide
MALPVTALLLPLALLLHAARPDIQMTQSPSSLSASVGDRVTITCRSSQSIVHSVGNTFLEWYQQKPGKAPKLLIYKVSNRFSGVPSRFSGSGSGTDFTLTISSLQPEDFATYYCFQGSQFPYTFGQGTKVEIKRGGGGSGGGGSGGGGSEVQLVESGGGLVQPGGSLRLSCAASGYEFSRSWMNWVRQAPGKGLEWVGRIYPGDGDTNYSGKFKGRFTISADTSKNTAYLQMNSLRAEDTAVYYCARDGSSWDWYFDVWGQGTLVTVSSTRGMRTEDLPKAVVFLEPQWYRVLEKDSVTLKCQGAYSPEDNSTQWFHNESLISSQASSYFIDAATVDDSGEYRCQTNLSTLSDPVQLEVHIGWLLLQAPRWVFKEEDPIHLRCHSWKNTALHKVTYLQNGKGRKYFHHNSDFYIPKATLKDSGSYFCRGLVGSKNVSSETVNITITQGLAVPTISSFFPPGYQVSFCLVMVLLFAVDTGLYFSVKTNIRSSTRDWKDHKFKWRKDPQDK

SEQ ID NO: 5164 - protein, 503 aa, Artificial Sequence
  Synthetic Polypeptide
MALPVTALLLPLALLLHAARPEIVLTQSPGTLSLSPGERATLSCRASQSVGGYLAWYQQKPGQAPRLLIYDASNRATGIPARFSGSGSGTDFTLTISSLEPEDFAVYYCQQRNNWPPMYTFGQGTKLEIKRGGGGSGGGGSGGGGSQVQLVQSGAEVKKPGSSVKVSCKASGGTFSSYAISWVRQAPGQGLEWMGGIIPILGTANYAQKFQGRVTITADESTSTAYMELSSLRSEDTAVYYCARWGGGAFDIWGQGTMVTVSSTRGMRTEDLPKAVVFLEPQWYRVLEKDSVTLKCQGAYSPEDNSTQWFHNESLISSQASSYFIDAATVDDSGEYRCQTNLSTLSDPVQLEVHIGWLLLQAPRWVFKEEDPIHLRCHSWKNTALHKVTYLQNGKGRKYFHHNSDFYIPKATLKDSGSYFCRGLVGSKNVSSETVNITITQGLAVPTISSFFPPGYQVSFCLVMVLLFAVDTGLYFSVKTNIRSSTRDWKDHKFKWRKDPQDK

SEQ ID NO: 5165 - protein, 500 aa, Artificial Sequence
  Synthetic Polypeptide
MALPVTALLLPLALLLHAARPDIQMTQSPATIENTSLSASVGDRVTITCRASQGISSWLTWYQQKPEKAPKSLIYAASSLQSGVPSRFSGSGSGTDFTLTISSLQPEDFATYYCQQYDSYPITFGQGTRLEIKGGGGSGGGGSGGGGSQVQLQQWGAGLLKPSETLSLTCAVYGGSFSAYYWSWIRQPPGKGLEWIGDINHGGGTNYNPSLKSRVTISVDTSKNQFSLKLNSVTAADTAVYYCASLTAYWGQGSLVTVSSTRGMRTEDLPKAVVFLEPQWYRVLEKDSVTLKCQGAYSPEDNSTQWFHNESLISSQASSYFIDAATVDDSGEYRCQTNLSTLSDPVQLEVHIGWLLLQAPRWVFKEEDPIHLRCHSWKNTALHKVTYLQNGKGRKYFHHNSDFYIPKATLKDSGSYFCRGLVGSKNVSSETVNITITQGLAVPTISSFFPPGYQVSFCLVMVLLFAVDTGLYFSVKTNIRSSTRDWKDHKFKWRKDPQDK

SEQ ID NO: 5166 - protein, 504 aa, Artificial Sequence
  Synthetic Polypeptide
MALPVTALLLPLALLLHAARPEIVLTQSPDSLAVSLGERATINCKASQSVDFDGDSYLNWYQQKPGQPPKVLIYAASTLQSGVPSRFSGSGSGTDFTLTINSLEAEDAATYYCQQSNEDPWTFGGGTKVEIKGGGGSGGGGSGGGGSQVQLVQSGAEVKKPGASVKVSCKVSGYTFTDYYITWVRQAPGQALEWMGWIYPGSGNTKYSQKFQGRFVFSVDTSASTAYLQLSSLKAEDTAVYYCANYGNYWFAYWGQGTLVTVSSTRGMRTEDLPKAVVFLEPQWYRVLEKDSVTLKCQGAYSPEDNSTQWFHNESLISSQASSYFIDAATVDDSGEYRCQTNLSTLSDPVQLEVHIGWLLLQAPRWVFKEEDPIHLRCHSWKNTALHKVTYLQNGKGRKYFHHNSDFYIPKATLKDSGSYFCRGLVGSKNVSSETVNITITQGLAVPTISSFFPPGYQVSFCLVMVLLFAVDTGLYFSVKTNIRSSTRDWKDHKFKWRKDPQDK

SEQ ID NO: 5167 - protein, 502 aa, Artificial Sequence
  Synthetic Polypeptide
MALPVTALLLPLALLLHAARPDIQMTQSPSSLSASVGDRVTITCRASQGISSWLAWYQQKPEKAPKSLIYAASSLQSGVPSRFSGSGSGTDFTLTISSLQPEDFATYYCQQYNSYPPTFGGGTKVEIKGGGGSGGGGSGGGGSEVQLVQSGGGLVHPGGSLRLSCAGSGFAFSSSTMHWIRQAPGKGLEWISLIGSGGGIYYGDSVKGRFTISRDNAKNSLYLQMNSLRAEDMAVYYCVRGYFDWVDYFDYWGQGTLVTVSSTRGMRTEDLPKAVVFLEPQWYRVLEKDSVTLKCQGAYSPEDNSTQWFHNESLISSQASSYFIDAATVDDSGEYRCQTNLSTLSDPVQLEVHIGWLLLQAPRWVFKEEDPIHLRCHSWKNTALHKVTYLQNGKGRKYFHHNSDFYIPKATLKDSGSYFCRGLVGSKNVSSETVNITITQGLAVPTISSFFPPGYQVSFCLVMVLLFAVDTGLYFSVKTNIRSSTRDWKDHKFKWRKDPQDK

SEQ ID NO: 5168 - protein, 508 aa, Artificial Sequence
  Synthetic Polypeptide
MALPVTALLLPLALLLHAARPDVVMTQSPLSLPVTLGQPASISCRSSQSIVHSDGNTYLEWYQQRPGQSPRRLIYKVSNRFSGVPDRFSGSGSGTDFTLKISRVEAEDVGVYYCFQGSHAPWTFGGGTKVEIKGGGGSGGGGSGGGGSEVQLVESGGGLVQPGGSLRLSCAASGFTFSSYGMHWVRQAPGKGLEWVAYITTRSSTIYYADSVKGRFTISRDNAKNSLYLQMNSLRAEDTAVYYCTREPLTGYYAMDYWGQGTSVTVSSTRGMRTEDLPKAVVFLEPQWYRVLEKDSVTLKCQGAYSPEDNSTQWFHNESLISSQASSYFIDAATVDDSGEYRCQTNLSTLSDPVQLEVHIGWLLLQAPRWVFKEEDPIHLRCHSWKNTALHKVTYLQNGKGRKYFHHNSDFYIPKATLKDSGSYFCRGLVGSKNVSSETVNITITQGLAVPTISSFFPPGYQVSFCLVMVLLFAVDTGLYFSVKTNIRSSTRDWKDHKFKWRKDPQDK

SEQ ID NO: 5169 - protein, 498 aa, Artificial Sequence
  Synthetic Polypeptide
MALPVTALLLPLALLLHAARPQIVLTQSPALMSASPGEKVTMTCSASSSVRYMYWYQQKPRSSPKPWIHLTSNLASGVPARFSGSGSGTSYSLTISSMEAEDAATYYCQQWSSHPFTFGSGTKLEIKGGGGSGGGGSGGGGSDVQLQESGPGLVKPSQSLSLTCTVTGFSITSDYSWNWIRQFPGNKLEWMGYISYSGHTSYNPSLESRISITRDTSKNQFFLQLNSVTTEDTATYYCTRGNWDVVYWGQGTLVTVSATRGMRTEDLPKAVVFLEPQWYRVLEKDSVTLKCQGAYSPEDNSTQWFHNESLISSQASSYFIDAATVDDSGEYRCQTNLSTLSDPVQLEVHIGWLLLQAPRWVFKEEDPIHLRCHSWKNTALHKVTYLQNGKGRKYFHHNSDFYIPKATLKDSGSYFCRGLVGSKNVSSETVNITITQGLAVPTISSFFPPGYQVSFCLVMVLLFAVDTGLYFSVKTNIRSSTRDWKDHKFKWRKDPQDK

SEQ ID NO: 5170 - protein, 507 aa, Artificial Sequence
  Synthetic Polypeptide
MALPVTALLLPLALLLHAARPEIVLTQSPGSLAVSPGERVTMSCKSSQSVFFSSSQKNYLAWYQQIPGQSPRLLIYWASTRESGVPDRFTGSGSGTDFTLTISSVQPEDLAIYYCHQYLSSRTFGQGTKLEIKRGGGGSGGGGSGGGGSQVQLQQPGAEVVKPGASVKMSCKASGYTFTSYYIHWIKQTPGQGLEWVGVIYPGNDDISYNQKFQGKATLTADKSSTTAYMQLSSLTSEDSAVYYCAREVRLRYFDVWGQGTTVTVSSTRGMRTEDLPKAVVFLEPQWYRVLEKDSVTLKCQGAYSPEDNSTQWFHNESLISSQASSYFIDAATVDDSGEYRCQTNLSTLSDPVQLEVHIGWLLLQAPRWVFKEEDPIHLRCHSWKNTALHKVTYLQNGKGRKYFHHNSDFYIPKATLKDSGSYFCRGLVGSKNVSSETVNITITQGLAVPTISSFFPPGYQVSFCLVMVLLFAVDTGLYFSVKTNIRSSTRDWKDHKFKWRKDPQDK

SEQ ID NO: 5171 - protein, 511 aa, Artificial Sequence
  Synthetic Polypeptide
MALPVTALLLPLALLLHAARPDIVMTQSPDSLTVSLGERTTINCKSSQSVLDSSKNKNSLAWYQQKPGQPPKLLLSWASTRESGIPDRFSGSGSGTDFTLTIDSLQPEDSATYYCQQSAHFPITFGQGTRLEIKGGGGSGGGGSGGGGSQVQLVQSGAEVKKPGASVKVSCKASGYTFTNYGMNWVKQAPGQGLKWMGWINTYTGEPTYADDFKGRVTMTSDTSTSTAYLELHNLRSDDTAVYYCARWSWSDGYYVYFDYWGQGTTVTVSSTRGMRTEDLPKAVVFLEPQWYRVLEKDSVTLKCQGAYSPEDNSTQWFHNESLISSQASSYFIDAATVDDSGEYRCQTNLSTLSDPVQLEVHIGWLLLQAPRWVFKEEDPIHLRCHSWKNTALHKVTYLQNGKGRKYFHHNSDFYIPKATLKDSGSYFCRGLVGSKNVSSETVNITITQGLAVPTISSFFPPGYQVSFCLVMVLLFAVDTGLYFSVKTNIRSSTRDWKDHKFKWRKDPQDK

SEQ ID NO: 5172 - protein, 511 aa, Artificial Sequence
  Synthetic Polypeptide
MALPVTALLLPLALLLHAARPDVLLTQSPLSLPVTLGQPASISCRSSQTIVHSNGNTYLEWFQQRPGQSPRLLIYQVSNRFSGVPDRFSGSGSGTDFTLKISRVEAEDVGVYYCFQGSHVPRTFGGGTKVEIKRGGGGSGGGGSGGGGSQIQLVQSGSELKKPGASVKVSCKASGYTFTNYGMNWVRQAPGQGLKWMGWINTNTGEPKYAEEFKGRFALSLDTSVSTAYLQINSLKAEDTAVYFCARGYGNYARGAWLAYWGQGTLVTVSSTRGMRTEDLPKAVVFLEPQWYRVLEKDSVTLKCQGAYSPEDNSTQWFHNESLISSQASSYFIDAATVDDSGEYRCQTNLSTLSDPVQLEVHIGWLLLQAPRWVFKEEDPIHLRCHSWKNTALHKVTYLQNGKGRKYFHHNSDFYIPKATLKDSGSYFCRGLVGSKNVSSETVNITITQGLAVPTISSFFPPGYQVSFCLVMVLLFAVDTGLYFSVKTNIRSSTRDWKDHKFKWRKDPQDK

SEQ ID NO: 5173 - protein, 506 aa, Artificial Sequence
  Synthetic Polypeptide
MALPVTALLLPLALLLHAARPDHIVLTQSPSSLSASLGDRVTISCRASQDISTYLNWYQQKPDGTVKLLIFYTSRLHAGVPSRFSGSGSGTHHSLTISNLEQEDIATYFCQQGNSLPFTFGSGTKLEIKRGGGGSGGGGSGGGGSQVQLKESGPELEKPGASVKISCKASGYSFTAYSMNWVKQNNGMSLEWIGSIDPYYGDTKYAQKFKGKATLTVDKASSTAYLQLKSLTSEDSAVYYCARRMITTGDWYFDVWGAGTTVTVSSTRGMRTEDLPKAVVFLEPQWYRVLEKDSVTLKCQGAYSPEDNSTQWFHNESLISSQASSYFIDAATVDDSGEYRCQTNLSTLSDPVQLEVHIGWLLLQAPRWVFKEEDPIHLRCHSWKNTALHKVTYLQNGKGRKYFHHNSDFYIPKATLKDSGSYFCRGLVGSKNVSSETVNITITQGLAVPTISSFFPPGYQVSFCLVMVLLFAVDTGLYFSVKTNIRSSTRDWKDHKFKWRKDPQDK

SEQ ID NO: 5174 - protein, 506 aa, Artificial Sequence; identical to SEQ ID NO: 5173
  Synthetic Polypeptide

SEQ ID NO: 5175 - protein, 506 aa, Artificial Sequence
  Synthetic Polypeptide
MALPVTALLLPLALLLHAARPDIVMTQSPDSLAVSLGERATINCRASKSVSTSGYSFMHWYQQKPGQPPKLLIYLASNLESGVPDRFSGSGSGTDFTLTISSLQAEDVAVYYCQHSREVPWTFGQGTKVEIKRGGGGSGGGGSGGGGSQVQLVQSGAEVKKPGASVKVSCKASGYTFTNYGMNWVRQAPGQGLEWMGWINTYTGEPTYADAFKGRFAFSLDTSTSTAYLQINSLRSDDTAVYYCARDYGDYGMDYWGQGTTVTVSSTRGMRTEDLPKAVVFLEPQWYRVLEKDSVTLKCQGAYSPEDNSTQWFHNESLISSQASSYFIDAATVDDSGEYRCQTNLSTLSDPVQLEVHIGWLLLQAPRWVFKEEDPIHLRCHSWKNTALHKVTYLQNGKGRKYFHHNSDFYIPKATLKDSGSYFCRGLVGSKNVSSETVNITITQGLAVPTISSFFPPGYQVSFCLVMVLLFAVDTGLYFSVKTNIRSSTRDWKDHKFKWRKDPQDK

SEQ ID NO: 5176 - protein, 502 aa, Artificial Sequence
  Synthetic Polypeptide
MALPVTALLLPLALLLHAARPDIVMTQTPLTLSVTIGQPASISCKSSQSLLDSDGKTYLNWLLQRPGQSPERLIYLVSKLDSGVPDRFTGSGSGTDFTLKISRVEAEDLGVYCCWQGTHFPYTFGGGTKVEIKGGGGGSGGGGSGGGGSQVQLQQPGAELVRPGASVKLSCKASGYTFTSYWMNWVKQRPGQGLEWIGMIDPSDSETHYNHIFKDKATLTVDKSSSTAYLQLSSLTSEDSAVYYCARNLYLWGQGTSVTVSSTRGMRTEDLPKAVVFLEPQWYRVLEKDSVTLKCQGAYSPEDNSTQWFHNESLISSQASSYFIDAATVDDSGEYRCQTNLSTLSDPVQLEVHIGWLLLQAPRWVFKEEDPIHLRCHSWKNTALHKVTYLQNGKGRKYFHHNSDFYIPKATLKDSGSYFCRGLVGSKNVSSETVNITITQGLAVPTISSFFPPGYQVSFCLVMVLLFAVDTGLYFSVKTNIRSSTRDWKDHKFKWRKDPQDK

SEQ ID NO: 5177 - protein, 505 aa, Artificial Sequence
  Synthetic Polypeptide
MALPVTALLLPLALLLHAARPDIQLTQSPSSLSASVGDRVTITCKASQSVDYEGDSFLNWYQQKPGKAPKLLIYAASNLESGVPSRFSGSGSGTDFTLTISSLQPEDFATYYCQQSNEDPLTFGQGTKVEIKRGGGGSGGGGSGGGGSEVQLVESGGGLVQPGGSLRLSCAASGYTFSSYWIEWVRQAPGKGLEWIGEILPGGGDTNYNEIFKGRATFSADTSKNTAYLQMNSLRAEDTAVYYCTRRVPIRLDYWGQGTLVTVSSTRGMRTEDLPKAVVFLEPQWYRVLEKDSVTLKCQGAYSPEDNSTQWFHNESLISSQASSYFIDAATVDDSGEYRCQTNLSTLSDPVQLEVHIGWLLLQAPRWVFKEEDPIHLRCHSWKNTALHKVTYLQNGKGRKYFHHNSDFYIPKATLKDSGSYFCRGLVGSKNVSSETVNITITQGLAVPTISSFFPPGYQVSFCLVMVLLFAVDTGLYFSVKTNIRSSTRDWKDHKFKWRKDPQDK

SEQ ID NO: 5178 - protein, 513 aa, Artificial Sequence
  Synthetic Polypeptide
MALPVTALLLPLALLLHAARPDIVMSQSPSSLAVSVGEKVTMSCKSSQSLLHSSNQKNYLAWYQQKPGQSPKVLIYWASTRESGVPDRFTGSGSGTDFTLTITSVKSEDLAVYYCQQYYSYPWTFGGGTRLEIKRGGGGSGGGGSGGGGSEVQLQQSVAELVKPGASVKMSCKVSGYTLTDHTIHWMKQRPEQGLEWIGYIYPRDGITGYNEKFKGKATLTADTSSSTAYMQLNSLTSEDSAVYFCARWGYSYRNYAYYYDYWGQGTTLTVSSTRGMRTEDLPKAVVFLEPQWYRVLEKDSVTLKCQGAYSPEDNSTQWFHNESLISSQASSYFIDAATVDDSGEYRCQTNLSTLSDPVQLEVHIGWLLLQAPRWVFKEEDPIHLRCHSWKNTALHKVTYLQNGKGRKYFHHNSDFYIPKATLKDSGSYFCRGLVGSKNVSSETVNITITQGLAVPTISSFFPPGYQVSFCLVMVLLFAVDTGLYFSVKTNIRSSTRDWKDHKFKWRKDPQDK

SEQ ID NO: 5179 - protein, 510 aa, Artificial Sequence
  Synthetic Polypeptide
MALPVTALLLPLALLLHAARPEIVLTQSPGTLSLSPGERATLSCRASQSVSSSYLAWYQQKPGQAPRLLIYGTSSRATGIPDRFSGSGSGTDFTLTISRLEPEDFAVYYCQQYGSSPFTFGGGTKVEIKRGGGGSGGGGSGGGGSQVQLQESGPGLAKPSETLSLTCTVSGDSITSYYWSWIRQPPGKGLEWIGYIYYSGSTNYNPSLKSRVTISVDTSKNQFSLKLSSVTAADTAVYYCARDQRRIAAAGTHFYGMDVWGQGTTVTVSSTRGMRTEDLPKAVVFLEPQWYRVLEKDSVTLKCQGAYSPEDNSTQWFHNESLISSQASSYFIDAATVDDSGEYRCQTNLSTLSDPVQLEVHIGWLLLQAPRWVFKEEDPIHLRCHSWKNTALHKVTYLQNGKGRKYFHHNSDFYIPKATLKDSGSYFCRGLVGSKNVSSETVNITITQGLAVPTISSFFPPGYQVSFCLVMVLLFAVDTGLYFSVKTNIRSSTRDWKDHKFKWRKDPQDK

SEQ ID NO: 5180 - protein, 500 aa, Artificial Sequence
  Synthetic Polypeptide
MALPVTALLLPLALLLHAARPDIQMTQSPSSLSASVGDRVTITCRASQSISLWLNWYQQKPGKAPKLLIYAASTLQSGVPSRFSGSGSGTDFTLTISSLQPEDFATYYCQQYYTSPYTFGQGTKVEIKRGGGGSGGGGSGGGGSQVQLLESGGGLVQPGGSLRLSCAASGFTFSSYAMSWVRQAPGKGLEWVSVIRSSGSSTYYADSVKGRFTISRDNSKNTLYLQMNSLRAEDTAVYYCARGGGYFDYWGQGTLVTVSSTRGMRTEDLPKAVVFLEPQWYRVLEKDSVTLKCQGAYSPEDNSTQWFHNESLISSQASSYFIDAATVDDSGEYRCQTNLSTLSDPVQLEVHIGWLLLQAPRWVFKEEDPIHLRCHSWKNTALHKVTYLQNGKGRKYFHHNSDFYIPKATLKDSGSYFCRGLVGSKNVSSETVNITITQGLAVPTISSFFPPGYQVSFCLVMVLLFAVDTGLYFSVKTNIRSSTRDWKDHKFKWRKDPQDK

SEQ ID NO: 5181 - protein, 503 aa, Artificial Sequence
  Synthetic Polypeptide
MALPVTALLLPLALLLHAARPDIQMTQSPSSLSASVGDRVTITCRASQSISSYLNWYQQKPGKAPKLLIYAVSTLQSGVPSRFSGSGSGTDFTLTISSLQPEDFATYYCQQSGTFPPTTFGQGTKVEIKRGGGGSGGGGSGGGGSQVQLLESGGGLVQPGGSLRLSCAASGFTFSSHGMHWVRQAPGKGLEWVSVISGSGSNTGYADSVKGRFTISRDNSKNTLYLQMNSLRAEDTAVYYCARQWGSYAFDSWGQGTLVTVSSTRGMRTEDLPKAVVFLEPQWYRVLEKDSVTLKCQGAYSPEDNSTQWFHNESLISSQASSYFIDAATVDDSGEYRCQTNLSTLSDPVQLEVHIGWLLLQAPRWVFKEEDPIHLRCHSWKNTALHKVTYLQNGKGRKYFHHNSDFYIPKATLKDSGSYFCRGLVGSKNVSSETVNITITQGLAVPTISSFFPPGYQVSFCLVMVLLFAVDTGLYFSVKTNIRSSTRDWKDHKFKWRKDPQDK

SEQ ID NO: 5182 - protein, 495 aa, Artificial Sequence
  Synthetic Polypeptide
MALPVTALLLPLALLLHAARPMTQSPKFLLVSAGDRVTLTCKASQSVNNDVYWYQQEPGQSPKLLIYWASTRESGVPDRFTGSGSGTDFTLTISSVQAEDLAVYYCKQSYNLYTFGGGTKLEIKRGGGGSGGGGSGGGGSESGRGLVQPGGSRKLSCAASGFTFSTSGMHWVRQAPEKGLEWVAYISSGSTTIYHADTVKGRFTISRDNPKNTLFLQMTSLRSEDTAMYYCCARSGQFGNYFDYWGQGTTLTVSSTRGMRTEDLPKAVVFLEPQWYRVLEKDSVTLKCQGAYSPEDNSTQWFHNESLISSQASSYFIDAATVDDSGEYRCQTNLSTLSDPVQLEVHIGWLLLQAPRWVFKEEDPIHLRCHSWKNTALHKVTYLQNGKGRKYFHHNSDFYIPKATLKDSGSYFCRGLVGSKNVSSETVNITITQGLAVPTISSFFPPGYQVSFCLVMVLLFAVDTGLYFSVKTNIRSSTRDWKDHKFKWRKDPQDK

SEQ ID NO: 5183 - protein, 500 aa, Artificial Sequence
  Synthetic Polypeptide
MALPVTALLLPLALLLHAARPQSPSSLAVSAGEKVTMSCKSSQSLLNSRTRKNYLAWYQQKPGQSPKLLIYWASTRESGVPDRFTGSGSGTDFTLTISSVQAEDLAVYYCKQSNLYTFGGGTKLEIKGGGGSGGGGSGGGGSQVQLEESGPELVKPGASVKLSCKASGYTFTEYIIHWVKQRSGQGLEWIGWFYPGSGSIKYNEKFKDKATLTADKSSSTVYMELSGLTSEDSAVYFCARHDGYSYFDYWGQGTTLTVSSTRGMRTEDLPKAVVFLEPQWYRVLEKDSVTLKCQGAYSPEDNSTQWFHNESLISSQASSYFIDAATVDDSGEYRCQTNLSTLSDPVQLEVHIGWLLLQAPRWVFKEEDPIHLRCHSWKNTALHKVTYLQNGKGRKYFHHNSDFYIPKATLKDSGSYFCRGLVGSKNVSSETVNITITQGLAVPTISSFFPPGYQVSFCLVMVLLFAVDTGLYFSVKTNIRSSTRDWKDHKFKWRKDPQDK

SEQ ID NO: 5184 - protein, 503 aa, Artificial Sequence
  Synthetic Polypeptide
MALPVTALLLPLALLLHAARPDIQMTQSPSSLSASLGERVSLTCRATQELSGYLSWLQQKPDGTIKRLIYAASTLDSGVPKRFSGNRSGSDYSLTISSLESEDFADYYCLQYAIYPYTFGGGTKLEIKGGGGSGGGGSGGGGSEVQLQQSGPELVKPGASVKMSCKASGYTFTSYFIHWVKQKPGQGLEWIGFINPYNDGSKYNEKFKGKATLTSDKSSSTAYMELSSLTSEDSAVYYCTRDDGYYGYAMDYWGQGTSVTVSSTRGMRTEDLPKAVVFLEPQWYRVLEKDSVTLKCQGAYSPEDNSTQWFHNESLISSQASSYFIDAATVDDSGEYRCQTNLSTLSDPVQLEVHIGWLLLQAPRWVFKEEDPIHLRCHSWKNTALHKVTYLQNGKGRKYFHHNSDFYIPKATLKDSGSYFCRGLVGSKNVSSETVNITITQGLAVPTISSFFPPGYQVSFCLVMVLLFAVDTGLYFSVKTNIRSSTRDWKDHKFKWRKDPQDK

SEQ ID NO: 5185 - protein, 508 aa, Artificial Sequence
  Synthetic Polypeptide
MALPVTALLLPLALLLHAARPDTIVLTQSPASLAVSLGQRATISCRASESVDSYGNSFMHWYQQKPGQPPKLLIYLASNLESGVPARFSGSGSRTDFTLTIDPVEADDAATYYCQQNNYDPWTFGGGTKLEIKGGGGSGGGGSGGGGSEVQLQQSGPELVKPGASVKMSCKASGYTFTSYVMHWVKQKPGQGLEWIGYINPYNDGTKYNEKFKGKATLTSDTSSSTAYMELNSLTSEDSAVYFCARPIYFDNDYFDYWGQGTTLKVSSTRGMRTEDLPKAVVFLEPQWYRVLEKDSVTLKCQGAYSPEDNSTQWFHNESLISSQASSYFIDAATVDDSGEYRCQTNLSTLSDPVQLEVHIGWLLLQAPRWVFKEEDPIHLRCHSWKNTALHKVTYLQNGKGRKYFHHNSDFYIPKATLKDSGSYFCRGLVGSKNVSSETVNITITQGLAVPTISSFFPPGYQVSFCLVMVLLFAVDTGLYFSVKTNIRSSTRDWKDHKFKWRKDPQDK

SEQ ID NO: 5186 - protein, 502 aa, Artificial Sequence
  Synthetic Polypeptide
MALPVTALLLPLALLLHAARPDIQMTQSPSSLSASVGDRVTITCKASQDVGIAVAWYQQKPGKVPKLLIYWASTRHTGVPDRFSGSGSGTDFTLTISSLQPEDVATYYCQQYSSYPYTFGQGTKVEIKGGGGSGGGGSGGGGSEVQLVESGGGLVQPGGSLRLSCAASGFDFSRYWMSWVRQAPGKGLEWIGEINPDSSTINYAPSLKDKFIISRDNAKNSLYLQMNSLRAEDTAVYYCARPDGNYWYFDVWGQGTLVTVSSTRGMRTEDLPKAVVFLEPQWYRVLEKDSVTLKCQGAYSPEDNSTQWFHNESLISSQASSYFIDAATVDDSGEYRCQTNLSTLSDPVQLEVHIGWLLLQAPRWVFKEEDPIHLRCHSWKNTALHKVTYLQNGKGRKYFHHNSDFYIPKATLKDSGSYFCRGLVGSKNVSSETVNITITQGLAVPTISSFFPPGYQVSFCLVMVLLFAVDTGLYFSVKTNIRSSTRDWKDHKFKWRKDPQDK

SEQ ID NO: 5187 - protein, 503 aa, Artificial Sequence
  Synthetic Polypeptide
MALPVTALLLPLALLLHAARPDIVMTQSQKSMSTSVGDRVSITCKASQDVITGVAWYQQKPGQSPKLLIYSASYRYTGVPDRFTGSGSGTDFTFTISNVQAEDLAVYYCQQHYSTPLTFGAGTKLELKGGGGSGGGGSGGGGSQVQLQQPGAELVRPGASVKLSCKASGYSFTTYWMNWVKQRPGQGLEWIGMIHPSDSETRLNQKFKDKATLTVDKSSSTAYMQLSSPTSEDSAVYYCARSTMIATRAMDYWGQGTSVTVSSTRGMRTEDLPKAVVFLEPQWYRVLEKDSVTLKCQGAYSPEDNSTQWFHNESLISSQASSYFIDAATVDDSGEYRCQTNLSTLSDPVQLEVHIGWLLLQAPRWVFKEEDPIHLRCHSWKNTALHKVTYLQNGKGRKYFHHNSDFYIPKATLKDSGSYFCRGLVGSKNVSSETVNITITQGLAVPTISSFFPPGYQVSFCLVMVLLFAVDTGLYFSVKTNIRSSTRDWKDHKFKWRKDPQDK

SEQ ID NO: 5188 - protein, 509 aa, Artificial Sequence
  Synthetic Polypeptide
MALPVTALLLPLALLLHAARPQSVLTQPPSVSGAPGQRVTISCTGSGSNIGAPYDVSWYQQLPGTAPKLLIYHNNKRPSGVPDRFSGSKSGTSASLAITGLQAEDEADYYCATVEAGLSGSVFGGGTKLTVLGAGGGGSGGGGSGGGGSQVQLVQSGAEVKKPGASVKVSCKVSGYTLTELSIHWVRQAPGKGLEWMGGFDPEENEIVYAQRFQGRVTMTEDTSTDTAYMELSSLRSEDTAVYYCAIVGSFSPLTLGLWGQGTMVTVSSTRGMRTEDLPKAVVFLEPQWYRVLEKDSVTLKCQGAYSPEDNSTQWFHNESLISSQASSYFIDAATVDDSGEYRCQTNLSTLSDPVQLEVHIGWLLLQAPRWVFKEEDPIHLRCHSWKNTALHKVTYLQNGKGRKYFHHNSDFYIPKATLKDSGSYFCRGLVGSKNVSSETVNITITQGLAVPTISSFFPPGYQVSFCLVMVLLFAVDTGLYFSVKTNIRSSTRDWKDHKFKWRKDPQDK

SEQ ID NO: 5189 - protein, 509 aa, Artificial Sequence
  Synthetic Polypeptide
MALPVTALLLPLALLLHAARPQSVLTQPPSVSGAPGQRVTISCTGSGSNIGAPYDVSWYQQLPGTAPKLLIYHNNKRPSGVPDRFSGSKSGTSASLAITGLQAEDEADYYCQSYDSSSISTIFGGGTKLTVLGAGGGGSGGGGSGGGGSQVQLVQSGAEVKKPGASVKVSCKVSGYTLTELSIHWVRQAPGKGLEWMGGFDPEENEIVYAQRFQGRVTMTEDTSTDTAYMELSSLRSEDTAVYYCAIVGSFSGIAYRPWGQGTMVTVSSTRGMRTEDLPKAVVFLEPQWYRVLEKDSVTLKCQGAYSPEDNSTQWFHNESLISSQASSYFIDAATVDDSGEYRCQTNLSTLSDPVQLEVHIGWLLLQAPRWVFKEEDPIHLRCHSWKNTALHKVTYLQNGKGRKYFHHNSDFYIPKATLKDSGSYFCRGLVGSKNVSSETVNITITQGLAVPTISSFFPPGYQVSFCLVMVLLFAVDTGLYFSVKTNIRSSTRDWKDHKFKWRKDPQDK

SEQ ID NO: 5190 - protein, 507 aa, Artificial Sequence
  Synthetic Polypeptide
MALPVTALLLPLALLLHAARPDIQMTQSPSSLSASVGDRVTITCSASSSVSYMYWYQQKPGKAPKLLIYLTSNLASGVPSRFSGSGSGTDFTLTISSLQPEDFATYYCQQWRSNPFTFGQGTKLEIKRGGGGSGGGGSGGGGSQITLKESGPTLVKPTQTLTLTCTFSGFSLSTSGMGVGWIRQPPGKALEWLAHIWWDDVKRYSPSLKSRLTITKDTSKNQVVLTMTNMDPVDTATYYCARIVSFDNDVVSAMDYWGQGTLVTVSSTRGMRTEDLPKAVVFLEPQWYRVLEKDSVTLKCQGAYSPEDNSTQWFHNESLISSQASSYFIDAATVDDSGEYRCQTNLSTLSDPVQLEVHIGWLLLQAPRWVFKEEDPIHLRCHSWKNTALHKVTYLQNGKGRKYFHHNSDFYIPKATLKDSGSYFCRGLVGSKNVSSETVNITITQGLAVPTISSFFPPGYQVSFCLVMVLLFAVDTGLYFSVKTNIRSSTRDWKDHKFKWRKDPQDK

SEQ ID NO: 5191 - protein, 502 aa, Artificial Sequence
  Synthetic Polypeptide
MALPVTALLLPLALLLHAARPEIVMTQSPATLSVSPGERATLSCKASQSVSNDVVWYQQKPGQAPRLLIYYASNRYTGIPARFSGSGSGTEFTLTISSLQSEDFAVYYCQQDYTSPWTFGQGTKLEIKRGGGGSGGGGSGGGGSQVQLVQSGAEVKKPGASVKVSCKASGYTFTNYGMNWVRQAPGQGLEWMGWINTYTGEPTYADDFKGRVTMTTDTSTSTAYMELRSLRSDDTAVYYCARIGDSSPSDYWGQGTLVTVSSTRGMRTEDLPKAVVFLEPQWYRVLEKDSVTLKCQGAYSPEDNSTQWFHNESLISSQASSYFIDAATVDDSGEYRCQTNLSTLSDPVQLEVHIGWLLLQAPRWVFKEEDPIHLRCHSWKNTALHKVTYLQNGKGRKYFHHNSDFYIPKATLKDSGSYFCRGLVGSKNVSSETVNITITQGLAVPTISSFFPPGYQVSFCLVMVLLFAVDTGLYFSVKTNIRSSTRDWKDHKFKWRKDPQDK

SEQ ID NO: 5192 - protein, 502 aa, Artificial Sequence
  Synthetic Polypeptide
MALPVTALLLPLALLLHAARPDILLTQSPVILSVSPGERVSFSCRASQSIGTNIHWYQQRTNGSPRLLIKYASESISGIPSRFSGSGSGTDFTLSINSVESEDIADYYCQQNNNWPTTFGAGTKLELKGGGGSGGGGSGGGGSQVQLKQSGPGLVQPSQSLSITCTVSGFSLTNYGVHWVRQSPGKGLEWLGVIWSGGNTDYNTPFTSRLSINKDNSKSQVFFKMNSLQSNDTAIYYCARALTYYDYEFAYWGQGTLVTVSATRGMRTEDLPKAVVFLEPQWYRVLEKDSVTLKCQGAYSPEDNSTQWFHNESLISSQASSYFIDAATVDDSGEYRCQTNLSTLSDPVQLEVHIGWLLLQAPRWVFKEEDPIHLRCHSWKNTALHKVTYLQNGKGRKYFHHNSDFYIPKATLKDSGSYFCRGLVGSKNVSSETVNITITQGLAVPTISSFFPPGYQVSFCLVMVLLFAVDTGLYFSVKTNIRSSTRDWKDHKFKWRKDPQDK

SEQ ID NO: 5193 - protein, 502 aa, Artificial Sequence
  Synthetic Polypeptide
MALPVTALLLPLALLLHAARPEIQLVQSGAEVKKPGESLRISCKGSGFNIEDYYIHWVRQMPGKGLEWMGRIDPENDETKYGPIFQGHVTISADTSINTVYLQWSSLKASDTAMYYCAFRGGVYWGQGTTVTVSSGGGGSGGGGSGGGGSDVVMTQSPDSLAVSLGERATINCKSSQSLLDSDGKTYLNWLQQKPGQPPKRLISLVSKLDSGVPDRFSGSGSGTDFTLTISSLQAEDVAVYYCWQGTHFPGTFGGGTKVEIKTRGMRTEDLPKAVVFLEPQWYRVLEKDSVTLKCQGAYSPEDNSTQWFHNESLISSQASSYFIDAATVDDSGEYRCQTNLSTLSDPVQLEVHIGWLLLQAPRWVFKEEDPIHLRCHSWKNTALHKVTYLQNGKGRKYFHHNSDFYIPKATLKDSGSYFCRGLVGSKNVSSETVNITITQGLAVPTISSFFPPGYQVSFCLVMVLLFAVDTGLYFSVKTNIRSSTRDWKDHKFKWRKDPQDK

SEQ ID NO: 5194 - protein, 510 aa, Artificial Sequence
  Synthetic Polypeptide
MALPVTALLLPLALLLHAARPELQMTQSPSSLSASVGDRVTITCRASQSISSYLNWYQQKPGQPPKLLIYWASTRESGVPDRFSGSESGTNYTLTISSLQPEDFATYFCQQSDSLPITFGQGTRLDIQGGGGSGGGGSGGGGSEVQLLESGGGVVQPGRSLRLSCAASGFTFSSYGMHWVRQAPGKGLEWVAVISYDGSNKYYADSVKGRFTISRDNSKNTLYLQMNSLRAEDTAVYYCAKDMGWGSGWRPYYYYGMDVWGQGTTVTVSSTRGMRTEDLPKAVVFLEPQWYRVLEKDSVTLKCQGAYSPEDNSTQWFHNESLISSQASSYFIDAATVDDSGEYRCQTNLSTLSDPVQLEVHIGWLLLQAPRWVFKEEDPIHLRCHSWKNTALHKVTYLQNGKGRKYFHHNSDFYIPKATLKDSGSYFCRGLVGSKNVSSETVNITITQGLAVPTISSFFPPGYQVSFCLVMVLLFAVDTGLYFSVKTNIRSSTRDWKDHKFKWRKDPQDK

SEQ ID NO: 5195 - protein, 509 aa, Artificial Sequence
  Synthetic Polypeptide
MALPVTALLLPLALLLHAARPELVMTQSPSSLTVTAGEKVTMSCKSSQSLLNSGNQKNYLTWYQQKPGQPPKLLIYWASTRESGVPDRFTGSGSGTDFTLTISSVQAEDLAVYYCQNDYSYPLTFGAGTKLEIKGGGGSGGGGSGGGGSEVQLLEQSGAELVRPGTSVKISCKASGYAFTNYWLGWVKQRPGHGLEWIGDIFPGSGNIHYNEKFKGKATLTADKSSSTAYMQLSSLTFEDSAVYFCARLRNWDEPMDYWGQGTTVTVSSTRGMRTEDLPKAVVFLEPQWYRVLEKDSVTLKCQGAYSPEDNSTQWFHNESLISSQASSYFIDAATVDDSGEYRCQTNLSTLSDPVQLEVHIGWLLLQAPRWVFKEEDPIHLRCHSWKNTALHKVTYLQNGKGRKYFHHNSDFYIPKATLKDSGSYFCRGLVGSKNVSSETVNITITQGLAVPTISSFFPPGYQVSFCLVMVLLFAVDTGLYFSVKTNIRSSTRDWKDHKFKWRKDPQDK

SEQ ID NO: 5196 - protein, 507 aa, Artificial Sequence
  Synthetic Polypeptide
MALPVTALLLPLALLLHAARPDIQMTQSPSSLSASVGDRVTITCRASQSISSYLNWYQQKPGKAPKLLIYAASSLQSGVPSRFSGSGSGTDFTLTISSLQPEDLATYYCQQSYSTPFTFGPGTKVDIKGGGGSGGGGSGGGGSVHEVQLVQSGAEVKKPGSSVKVSCKASGGTFSSYAISWVRQAPGQGLEWMGGIIPIFGTANYAQKFQGRVTITADKSTSTAYMELSSLRSEDTAVYYCATFALFGFREQAFDIWGQGTTVTVSSTRGMRTEDLPKAVVFLEPQWYRVLEKDSVTLKCQGAYSPEDNSTQWFHNESLISSQASSYFIDAATVDDSGEYRCQTNLSTLSDPVQLEVHIGWLLLQAPRWVFKEEDPIHLRCHSWKNTALHKVTYLQNGKGRKYFHHNSDFYIPKATLKDSGSYFCRGLVGSKNVSSETVNITITQGLAVPTISSFFPPGYQVSFCLVMVLLFAVDTGLYFSVKTNIRSSTRDWKDHKFKWRKDPQDK

SEQ ID NO: 5197 - protein, 501 aa, Artificial Sequence
  Synthetic Polypeptide
MALPVTALLLPLALLLHAARPYIHVTQSPSSLSVSIGDRVTINCQTSQGVGSDLHWYQHKPGRAPKLLIHHASSVEDGVPSRFSGTGFHTSFNLTINDLQADDIGTYYCQVLQSFGRGSRLDTKGGGGSGGGGSGGGGSRAHLVQSGTAMKKPGASVRVSCQTSGYTFTAHILFWFRQAPGRGLEWVGWIKPQYGAVNFGGGFRDRVTLTRDVYREIAYMDIRGLKPDDTAVYYCARDRSYGDSSWALDAWGQGTTVVVSATRGMRTEDLPKAVVFLEPQWYRVLEKDSVTLKCQGAYSPEDNSTQWFHNESLISSQASSYFIDAATVDDSGEYRCQTNLSTLSDPVQLEVHIGWLLLQAPRWVFKEEDPIHLRCHSWKNTALHKVTYLQNGKGRKYFHHNSDFYIPKATLKDSGSYFCRGLVGSKNVSSETVNITITQGLAVPTISSFFPPGYQVSFCLVMVLLFAVDTGLYFSVKTNIRSSTRDWKDHKFKWRKDPQDK

SEQ ID NO: 5198 - protein, 506 aa, Artificial Sequence
  Synthetic Polypeptide
MALPVTALLLPLALLLHAARPDIVLTQSPLSLAVSLGQPAIISCKASQSVSFAGTSLMHWYHQKPGQQPRLLIYRASNLEAGVPDRFSGSGSKTDFTLTISPVEAEDAATYYCQQSREYPYTFGGGTKLEIKRGGGGSGGGGSGGGGSQVQLVQSGAEVVKPGASVKISCKASGYTFTGYFMNWVKQSPGQSLEWIGRIHPYDGDTFYNQKFQGKATLTVDKSSNTAHMELLSLTSEDFAVYYCTRYDGSRAMDYWGQGTTVTVSSTRGMRTEDLPKAVVFLEPQWYRVLEKDSVTLKCQGAYSPEDNSTQWFHNESLISSQASSYFIDAATVDDSGEYRCQTNLSTLSDPVQLEVHIGWLLLQAPRWVFKEEDPIHLRCHSWKNTALHKVTYLQNGKGRKYFHHNSDFYIPKATLKDSGSYFCRGLVGSKNVSSETVNITITQGLAVPTISSFFPPGYQVSFCLVMVLLFAVDTGLYFSVKTNIRSSTRDWKDHKFKWRKDPQDK

SEQ ID NO: 5199 - protein, 502 aa, Artificial Sequence
  Synthetic Polypeptide
MALPVTALLLPLALLLHAARPDVVMTQTPLSLPVTPGEPASISCRSSQSLVHRNGNTYLHWYLQKPGQSPKLLIHKVSNRFSGVPDRFSGSGSGTDFTLKISRVEAEDLGVYFCSQSTHVPPLTFGAGTKLELKGGGGSGGGGSGGGGSEVQLVQSGAEVEKPGASVKISCKASGSSFTGYNMNWVRQNIGKSLEWIGAIDPYYGGTSYNQKFKGRATLTVDKSTSTAYMHLKSLRSEDTAVYYCVSGMEYWGQGTSVTVSSTRGMRTEDLPKAVVFLEPQWYRVLEKDSVTLKCQGAYSPEDNSTQWFHNESLISSQASSYFIDAATVDDSGEYRCQTNLSTLSDPVQLEVHIGWLLLQAPRWVFKEEDPIHLRCHSWKNTALHKVTYLQNGKGRKYFHHNSDFYIPKATLKDSGSYFCRGLVGSKNVSSETVNITITQGLAVPTISSFFPPGYQVSFCLVMVLLFAVDTGLYFSVKTNIRSSTRDWKDHKFKWRKDPQDK

SEQ ID NO: 5200 - protein, 500 aa, Artificial Sequence
  Synthetic Polypeptide
MALPVTALLLPLALLLHAARPEIVMTQTPATLSVSAGERVTITCKASQSVSNDVTWYQQKPGQAPRLLIYSASNRYSGVPARFSGSGYGTEFTFTISSVQSEDFAVYFCQQDYSSFGQGTKLEIKRGGGGSGGGGSGGGGSQVQLVESGPGVVQPGRSLRISCAVSGFSVTNYGVHWVRQPPGKGLEWLGVIWAGGITNYNSAFMSRLTISKDNSKNTVYLQMNSLRAEDTAMYYCASRGGHYGYALDYWGQGTLVTVSSTRGMRTEDLPKAVVFLEPQWYRVLEKDSVTLKCQGAYSPEDNSTQWFHNESLISSQASSYFIDAATVDDSGEYRCQTNLSTLSDPVQLEVHIGWLLLQAPRWVFKEEDPIHLRCHSWKNTALHKVTYLQNGKGRKYFHHNSDFYIPKATLKDSGSYFCRGLVGSKNVSSETVNITITQGLAVPTISSFFPPGYQVSFCLVMVLLFAVDTGLYFSVKTNIRSSTRDWKDHKFKWRKDPQDK

SEQ ID NO: 5201 - protein, 503 aa, Artificial Sequence
  Synthetic Polypeptide
MALPVTALLLPLALLLHAARPDIQMTQTASSLPASLGDRVTISCSASQDISNYLNWYQQKPDGTVKLLIFYSSNLHSGVPSRFSGGGSGTDYSLTISNLEPEDIATYFCHQYSKLPWTFGGGTKLEIKRGGGGSGGGGSGGGGSEVTLVESGGDFVKPGGSLKVSCAASGFAFSHYAMSWVRQTPAKRLEWVAYISSGGSGTYYSDSVKGRFTISRDNAKNTLYLQMRSLRSEDSAMYFCTRVKLGTYYFDSWGQGTTLTVSSTRGMRTEDLPKAVVFLEPQWYRVLEKDSVTLKCQGAYSPEDNSTQWFHNESLISSQASSYFIDAATVDDSGEYRCQTNLSTLSDPVQLEVHIGWLLLQAPRWVFKEEDPIHLRCHSWKNTALHKVTYLQNGKGRKYFHHNSDFYIPKATLKDSGSYFCRGLVGSKNVSSETVNITITQGLAVPTISSFFPPGYQVSFCLVMVLLFAVDTGLYFSVKTNIRSSTRDWKDHKFKWRKDPQDK

SEQ ID NO: 5202 - protein, 505 aa, Artificial Sequence
  Synthetic Polypeptide
MALPVTALLLPLALLLHAARPQFVLTQSPSASAALGASAKLTCTLSSAHKTYTIDWYQQQKGKAPRYLIQVKSDGTYTKATGVPDRFSGSSSGADRYLIIPSVQADDEADYYCGTDYTGGYVFGGGTQLTVTGGGGSGGGGSGGGGSEQLKESGGGLFKPTDTLTLTCTVSGFSLSYYGVNWVRQAPGNGLEWIGTIGGSGDTYYASWAKSRSTIIRNTNENTVTLKMTSLTAADTATYFCVRYANIGYEYFNVWGPGTLVTVSSTRGMRTEDLPKAVVFLEPQWYRVLEKDSVTLKCQGAYSPEDNSTQWFHNESLISSQASSYFIDAATVDDSGEYRCQTNLSTLSDPVQLEVHIGWLLLQAPRWVFKEEDPIHLRCHSWKNTALHKVTYLQNGKGRKYFHHNSDFYIPKATLKDSGSYFCRGLVGSKNVSSETVNITITQGLAVPTISSFFPPGYQVSFCLVMVLLFAVDTGLYFSVKTNIRSSTRDWKDHKFKWRKDPQDK

SEQ ID NO: 5203 - protein, 504 aa, Artificial Sequence
  Synthetic Polypeptide
MALPVTALLLPLALLLHAARPDIQMTQSPSSLSASVGDRVTITCRASQGISSWLAWYQQKPEKAPKSLIYAASSLQSGVPSRFSGSGSGTDFTLTISSLQPEDFATYYCQQYNSYPPTFGGGTKVEIKGGGGSGGGGSGGGGSEVQLVESGGGLVQPGESLRLSCVASGFTFSRYKMNWVRQAPGKGLEWVSYISRSGRDIYYADSVKGRFTISRDNAKNSLYLQMNSLRDEDTAVYYCAGTVTTYYYFGMDVWGHGTTVTVSSTRGMRTEDLPKAVVFLEPQWYRVLEKDSVTLKCQGAYSPEDNSTQWFHNESLISSQASSYFIDAATVDDSGEYRCQTNLSTLSDPVQLEVHIGWLLLQAPRWVFKEEDPIHLRCHSWKNTALHKVTYLQNGKGRKYFHHNSDFYIPKATLKDSGSYFCRGLVGSKNVSSETVNITITQGLAVPTISSFFPPGYQVSFCLVMVLLFAVDTGLYFSVKTNIRSSTRDWKDHKFKWRKDPQDK

SEQ ID NO: 5204 - protein, 503 aa, Artificial Sequence
  Synthetic Polypeptide
MALPVTALLLPLALLLHAARPQSVVTQPPSMSAAPGQQVTISCSGGNSNIERNYVSWYLQLPGTAPKLVIFDNDRRPSGIPDRFSGSKSGTSATLGITGLQTGDEADYYCGTWDSSLRGWVFGGGTKLTVLGGGGGSGGGGSGGGGSEVQLVESGGGLIQPGGSLRLSCAASGFTFSNYAMNWVRQAPGKGLEWVSTINGRGSSTIYADSVKGRFTISRDNSKNTLYLQMNSLRAEDTATYYCARYISRGLGDSWGQGTLVTVTRGMRTEDLPKAVVFLEPQWYRVLEKDSVTLKCQGAYSPEDNSTQWFHNESLISSQASSYFIDAATVDDSGEYRCQTNLSTLSDPVQLEVHIGWLLLQAPRWVFKEEDPIHLRCHSWKNTALHKVTYLQNGKGRKYFHHNSDFYIPKATLKDSGSYFCRGLVGSKNVSSETVNITITQGLAVPTISSFFPPGYQVSFCLVMVLLFAVDTGLYFSVKTNIRSSTRDWKDHKFKWRKDPQDK

SEQ ID NO: 5205 - protein, 504 aa, Artificial Sequence
  Synthetic Polypeptide
MALPVTALLLPLALLLHAARPQSVLTQPPSASGTPGQRVTISCSGSRSNVGGNYVFWYQQVPGATPKLLIYRSNQRPSGVPDRFAGSKSGSSASLAISGLRSEDEADYYCATWDDSLSGFVFGTGTKVTVLGGGGGSGGGGSGGGGSEVQLVESGGGLVKPGGSLRLSCAASGFTFSDYYMSWIRQAPGKGLEWVSYISSSGSTIYYADSVKGRFTISRDNAKNSLYLQMNSLRAEDTAVYYCARGYGKAYDQWGQGTLVTVSSTRGMRTEDLPKAVVFLEPQWYRVLEKDSVTLKCQGAYSPEDNSTQWFHNESLISSQASSYFIDAATVDDSGEYRCQTNLSTLSDPVQLEVHIGWLLLQAPRWVFKEEDPIHLRCHSWKNTALHKVTYLQNGKGRKYFHHNSDFYIPKATLKDSGSYFCRGLVGSKNVSSETVNITITQGLAVPTISSFFPPGYQVSFCLVMVLLFAVDTGLYFSVKTNIRSSTRDWKDHKFKWRKDPQDK

SEQ ID NO: 5206 - protein, 503 aa, Artificial Sequence
  Synthetic Polypeptide
MALPVTALLLPLALLLHAARPDIQMTQSPSSLSASVGDRVTITCRASQDVNTAVAWYQQKPGKAPKLLIYSASFLESGVPSRFSGSRSGTDFTLTISSLQPEDFATYYCQQHYTTPPTFGQTKVEIKRGGGGSGGGGSGGGGSEVQLVESGGGLVQPGGSLRLSCAASGFNIKDTYIHWVRQAPGKGLEWVARIYPTNGYTRYADSVKGRFTISADTSKNTAYLQMNSLRAEDTAVYYCSRWGGDGFYAMDVWGQGTLVTVSSTRGMRTEDLPKAVVFLEPQWYRVLEKDSVTLKCQGAYSPEDNSTQWFHNESLISSQASSYFIDAATVDDSGEYRCQTNLSTLSDPVQLEVHIGWLLLQAPRWVFKEEDPIHLRCHSWKNTALHKVTYLQNGKGRKYFHHNSDFYIPKATLKDSGSYFCRGLVGSKNVSSETVNITITQGLAVPTISSFFPPGYQVSFCLVMVLLFAVDTGLYFSVKTNIRSSTRDWKDHKFKWRKDPQDK

SEQ ID NO: 5207 - protein, 516 aa, Artificial Sequence
  Synthetic Polypeptide
MALPVTALLLPLALLLHAARPQSALTQPPSASGSPGQSITISCTGTSNNFVSWYQQHAGKAPKLVIYDVNKRPSGVPDRFSGSKSGNTASLTVSGLQTDDEAVYYCGSLVGNWDVIFGGGTKLTVLGGGGSGGGGSGGGGSQPQLQESGPTLVEASETLSLTCAVSGDSTAACNSFWGWVRQPPGKGLEWVGSLSHCASYWNRGWTYHNPSLKSRLTLALDTPKNLVFLKLNSVTAADTATYYCARFGGEVLRYTDWPKPAWVDLWGRGTLVTVSSTRGMRTEDLPKAVVFLEPQWYRVLEKDSVTLKCQGAYSPEDNSTQWFHNESLISSQASSYFIDAATVDDSGEYRCQTNLSTLSDPVQLEVHIGWLLLQAPRWVFKEEDPIHLRCHSWKNTALHKVTYLQNGKGRKYFHHNSDFYIPKATLKDSGSYFCRGLVGSKNVSSETVNITITQGLAVPTISSFFPPGYQVSFCLVMVLLFAVDTGLYFSVKTNIRSSTRDWKDHKFKWRKDPQDK

SEQ ID NO: 5208 - protein, 511 aa, Artificial Sequence
  Synthetic Polypeptide
MALPVTALLLPLALLLHAARPELVLTQSPGTLSLSAGERATLSCRASQSVSSGSLAWYQQKPGQAPRLLIYGASTRATGIPDRFSGSGSGTDFTLTIGRLEPEDLAVYYCQQYGTSPYTFGQGTKLEIGGGGSGGGGSGGGGSLEQSGAEVKKPGSSVQVSCKASGGTFSMYGFNWVRQAPGHGLEWMGGIIPIFGTSNYAQKFRGRVTFTADQATSTAYMELTNLRSDDTAVYYCARDFGPDWEDGDSYDGSGRGFFDFWGQGTLVTVSSTRGMRTEDLPKAVVFLEPQWYRVLEKDSVTLKCQGAYSPEDNSTQWFHNESLISSQASSYFIDAATVDDSGEYRCQTNLSTLSDPVQLEVHIGWLLLQAPRWVFKEEDPIHLRCHSWKNTALHKVTYLQNGKGRKYFHHNSDFYIPKATLKDSGSYFCRGLVGSKNVSSETVNITITQGLAVPTISSFFPPGYQVSFCLVMVLLFAVDTGLYFSVKTNIRSSTRDWKDHKFKWRKDPQDK

SEQ ID NO: 5209 - protein, 491 aa, Artificial Sequence
  Synthetic Polypeptide
MALPVTALLLPLALLLHAARPDIQMTQSPSSLSASVGDRVTITCQASQDINNYLNWYQQKPGKAPKLLIYDASNLQTGVPSRFSGSGSGTDFTFTIEDIATYYCQQYTFGPGTKVDIKGGGGSGGGGSGGGGSEVQLLESGGGLVQPGGSLRLSCAASGFTFSWYSMTWVRQAPGKGLEWVSSIVPWGDFTQYADSVKGRFTISRDNSKNTLYLQMNSLRAEDTAVYYCAKGPGWGSFDLWGRGTLVTVSSTRGMRTEDLPKAVVFLEPQWYRVLEKDSVTLKCQGAYSPEDNSTQWFHNESLISSQASSYFIDAATVDDSGEYRCQTNLSTLSDPVQLEVHIGWLLLQAPRWVFKEEDPIHLRCHSWKNTALHKVTYLQNGKGRKYFHHNSDFYIPKATLKDSGSYFCRGLVGSKNVSSETVNITITQGLAVPTISSFFPPGYQVSFCLVMVLLFAVDTGLYFSVKTNIRSSTRDWKDHKFKWRKDPQDK

SEQ ID NO: 5210 - protein, 501 aa, Artificial Sequence
  Synthetic Polypeptide
MALPVTALLLPLALLLHAARPDIQMTQSPSSLSASVGDRVTITCTASLSVSSTYLHWYQQKPGSSPKLWIYSTSNLASGVPSRFSGSGSGTSYTLTISSLQPEDFATYYCHQYHRSPLTFGGGTKVEIKRGGGGSGGGGSGGGGSEVQLVESGGGLVQPGGSLRLSCAASGFSLTKYGVHWVRQAPGKGLEWVGVKWAGGSTDYNSALMSRFTISKDNAKNSLYLQMNSLRAEDTAVYYCARDHRDAMDYWGQGTLVTVSSTRGMRTEDLPKAVVFLEPQWYRVLEKDSVTLKCQGAYSPEDNSTQWFHNESLISSQASSYFIDAATVDDSGEYRCQTNLSTLSDPVQLEVHIGWLLLQAPRWVFKEEDPIHLRCHSWKNTALHKVTYLQNGKGRKYFHHNSDFYIPKATLKDSGSYFCRGLVGSKNVSSETVNITITQGLAVPTISSFFPPGYQVSFCLVMVLLFAVDTGLYFSVKTNIRSSTRDWKDHKFKWRKDPQDK

SEQ ID NO: 5211 - protein, 505 aa, Artificial Sequence
  Synthetic Polypeptide
MALPVTALLLPLALLLHAARPDIQMTQSPSSLSASVGDRVTITCKASQDVGTAVAWYQQKPGKAPKLLIYSASYRSTGVPSRFSGSGSGTDFTLTISSLQPEDFATYYCQHHYSAPWTFGGGTKVEIKGGGGSGGGGSGGGGSEVQLVESGGGLVQPGGSLRLSCAASGFTFSRNGMSWVRQAPGKGLEWVATVSSGGSYIYYADSVKGRFTISRDNAKNSLYLQMNSLRAEDTAVYYCARQGTTALATRFFDVWGQGTLVTVSSTRGMRTEDLPKAVVFLEPQWYRVLEKDSVTLKCQGAYSPEDNSTQWFHNESLISSQASSYFIDAATVDDSGEYRCQTNLSTLSDPVQLEVHIGWLLLQAPRWVFKEEDPIHLRCHSWKNTALHKVTYLQNGKGRKYFHHNSDFYIPKATLKDSGSYFCRGLVGSKNVSSETVNITITQGLAVPTISSFFPPGYQVSFCLVMVLLFAVDTGLYFSVKTNIRSSTRDWKDHKFKWRKDPQDK

SEQ ID NO: 5212 - protein, 501 aa, Artificial Sequence
  Synthetic Polypeptide
MALPVTALLLPLALLLHAARPDIQMTQSFSSLSASVGDRVTITCRASQDISNYLNWYQQKPGKAPKLLIYYTSRLHSGVPSRFSGSGSGTDYTLTISSLQPEDFATYFCQQGNTLPWTFGGGTKLEIKRGGGGSGGGGSGGGGSEVQLVQSGGGLVQSGGSLRLSCRASGYTFTRYWMLWVRQRPGKGLEWVAEINPRNDRTNYNEKFKTRFTISVDRSKNTLYLQMDSLRAEDTAVYFCALGGGYAMDYWGQGTLVTVSSTRGMRTEDLPKAVVFLEPQWYRVLEKDSVTLKCQGAYSPEDNSTQWFHNESLISSQASSYFIDAATVDDSGEYRCQTNLSTLSDPVQLEVHIGWLLLQAPRWVFKEEDPIHLRCHSWKNTALHKVTYLQNGKGRKYFHHNSDFYIPKATLKDSGSYFCRGLVGSKNVSSETVNITITQGLAVPTISSFFPPGYQVSFCLVMVLLFAVDTGLYFSVKTNIRSSTRDWKDHKFKWRKDPQDK

SEQ ID NO: 5213 - protein, 501 aa, Artificial Sequence
  Synthetic Polypeptide
MALPVTALLLPLALLLHAARPDIQMTQSPPSLSASVGGKVTITCKASQDIDRYMAWYQDKPGKGPKLLIHDTSTLQPGIPSRFSGSGSGRDYSFSISNLEPEDIATYYCLQYDNLWTFGGGTKLEIKRGGGGSGGGGSGGGGSQVQLVQSGAELVKPGASVKMSCKASGYIFTNYNIHWVKKSPGQGLEWIGAIYPGNGDAPYSQKFQDRATLTADTSSSTTYMELSSLTSEDSAVYYCVRANWDVAFAYWGQGTLVSVSSTRGMRTEDLPKAVVFLEPQWYRVLEKDSVTLKCQGAYSPEDNSTQWFHNESLISSQASSYFIDAATVDDSGEYRCQTNLSTLSDPVQLEVHIGWLLLQAPRWVFKEEDPIHLRCHSWKNTALHKVTYLQNGKGRKYFHHNSDFYIPKATLKDSGSYFCRGLVGSKNVSSETVNITITQGLAVPTISSFFPPGYQVSFCLVMVLLFAVDTGLYFSVKTNIRSSTRDWKDHKFKWRKDPQDK

SEQ ID NO: 5214 - protein, 502 aa, Artificial Sequence
  Synthetic Polypeptide
MALPVTALLLPLALLLHAARPDIQMTQSPASLSASVGETVTITCRVSGNIHNYLAWYQQKQGKSPQLLVYNAKTLADGVPSRFSGSGSGTQYSLKINSLQPEDFGSYYCQHFWSNPYTFGGGTKLEIKGGGGSGGGGSGGGGSQVQLQQSGASVKVSCKASELVRPGTGYAFTNYLIEWVKQRPGQGLEWIGVINPGSGGTNYNEKFKGKATLTADKSSSTAYMQLSSLTSDDSAVYFCARYRSYDWYFDVWGAGTTVTVSSTRGMRTEDLPKAVVFLEPQWYRVLEKDSVTLKCQGAYSPEDNSTQWFHNESLISSQASSYFIDAATVDDSGEYRCQTNLSTLSDPVQLEVHIGWLLLQAPRWVFKEEDPIHLRCHSWKNTALHKVTYLQNGKGRKYFHHNSDFYIPKATLKDSGSYFCRGLVGSKNVSSETVNITITQGLAVPTISSFFPPGYQVSFCLVMVLLFAVDTGLYFSVKTNIRSSTRDWKDHKFKWRKDPQDK

SEQ ID NO: 5215 - protein, 502 aa, Artificial Sequence
  Synthetic Polypeptide
MALPVTALLLPLALLLHAARPDIQMTQSPASLSASVGETVTIICRASVNIYSYLAWYQQKQGKSPQLLVYNAKILAEGVPSRFSGSGSGTQFSLKINSLQPEDFGSYYCQHHYGTFTFGSGTKLEIKRGGGGSGGGGSGGGGSQVQLKESGPGLVAPSQSLSITCTISGFSLTSYGVHWVRQPPGKGLEWLVVIWSDGSTTYNSALKSRLSISKDNSKSQVFLKMNSLQTDDTAIYYCASHYGSTLAFASWGHGTLVTVSAATRGMRTEDLPKAVVFLEPQWYRVLEKDSVTLKCQGAYSPEDNSTQWFHNESLISSQASSYFIDAATVDDSGEYRCQTNLSTLSDPVQLEVHIGWLLLQAPRWVFKEEDPIHLRCHSWKNTALHKVTYLQNGKGRKYFHHNSDFYIPKATLKDSGSYFCRGLVGSKNVSSETVNITITQGLAVPTISSFFPPGYQVSFCLVMVLLFAVDTGLYFSVKTNIRSSTRDWKDHKFKWRKDPQDK

SEQ ID NO: 5216 - protein, 510 aa, Artificial Sequence
  Synthetic Polypeptide
MALPVTALLLPLALLLHAARPDIVMTQSHKFMSTSVGDRVSVTCKASQNVGNNVAWYQQKPGQSPKVLIYSASYRYSGVPDRFTGSGSGTDFTLTISNVQSEDLAEYFCQQYNTYPFTFGSGTKLEIKGGGGSGGGGSGGGGSEVQLEESGGGLVQPGGSMKLSCVASGFTFSNYWMNWVRQSPEKGLEWVAEIRFKSHNYATHFAESVKGRFTISRDDSKSSVYLQMNNLRAEDTGIYYCTRRIGNSDYDWWYFDVWGAGTSVTVSSASTRGMRTEDLPKAVVFLEPQWYRVLEKDSVTLKCQGAYSPEDNSTQWFHNESLISSQASSYFIDAATVDDSGEYRCQTNLSTLSDPVQLEVHIGWLLLQAPRWVFKEEDPIHLRCHSWKNTALHKVTYLQNGKGRKYFHHNSDFYIPKATLKDSGSYFCRGLVGSKNVSSETVNITITQGLAVPTISSFFPPGYQVSFCLVMVLLFAVDTGLYFSVKTNIRSSTRDWKDHKFKWRKDPQDK

SEQ ID NO: 5217 - protein, 502 aa, Artificial Sequence
  Synthetic Polypeptide
MALPVTALLLPLALLLHAARPDIQMTQSSSSFSVSLGDRVTITCKASEDIYIRLAWYQQKPGNAPRLLISAATSLETGIPSRFSGSGSGEDYTLTITSLQTEDVATYYCQQYWTTPWTFGGGTKLEIKRGGGGSGGGGSGGGGSDVQLQESGPGLVKPSQSLSLTCTVTGYSITIDYTWNWIRQFPGNKLEWMGYITYSGSTDYNPSLKSRSSITRDTSMNQFFLQLNSVTTEDTATYYCARLGRRYALDYWGQGTSVTVSSTRGMRTEDLPKAVVFLEPQWYRVLEKDSVTLKCQGAYSPEDNSTQWFHNESLISSQASSYFIDAATVDDSGEYRCQTNLSTLSDPVQLEVHIGWLLLQAPRWVFKEEDPIHLRCHSWKNTALHKVTYLQNGKGRKYFHHNSDFYIPKATLKDSGSYFCRGLVGSKNVSSETVNITITQGLAVPTISSFFPPGYQVSFCLVMVLLFAVDTGLYFSVKTNIRSSTRDWKDHKFKWRKDPQDK

SEQ ID NO: 5218 - protein, 501 aa, Artificial Sequence
  Synthetic Polypeptide
MALPVTALLLPLALLLHAARPDVQLQESGPGLVKPSQSLSLTCTVTGYSITSDYTWNWIRQFPGNKLEWMGYITYSGSTSYNPSLKSRNSITRDTSKNQFFLQLNSVTTEDTATYYCARLGRRYTMDYWGQGTSVTVSSGGGGSGGGGSGGGGSDIQMTQSSSSFSVSLGDRVTITCMASEDIYIRLAWYQQKPGNAPRLLISAATSLETGVPSRFSGSGSGKDYTLSITSLQTEDVGTYYCQQYWSSPWTFGGGTKLEINTRGMRTEDLPKAVVFLEPQWYRVLEKDSVTLKCQGAYSPEDNSTQWFHNESLISSQASSYFIDAATVDDSGEYRCQTNLSTLSDPVQLEVHIGWLLLQAPRWVFKEEDPIHLRCHSWKNTALHKVTYLQNGKGRKYFHHNSDFYIPKATLKDSGSYFCRGLVGSKNVSSETVNITITQGLAVPTISSFFPPGYQVSFCLVMVLLFAVDTGLYFSVKTNIRSSTRDWKDHKFKWRKDPQDK

SEQ ID NO: 5219 - protein, 501 aa, Artificial Sequence
  Synthetic Polypeptide
MALPVTALLLPLALLLHAARPDIQMTQSSSSFSVSLGDRVTITCMASEDIYIRLAWYQQKPGNAPRLLISAATSLETGVPSRFSGSGSGKDYTLSITSLQTEDVGTYYCQQYWSSPWTFGGGTKLEINGGGGSGGGGSGGGGSDVQLQESGPGLVKPSQSLSLTCTVTGYSITSDYTWNWIRQFPGNKLEWMGYITYSGSTSYNPSLKSRNSITRDTSKNQFFLQLNSVTTEDTATYYCARLGRRYTMDYWGQGTSVTVSSTRGMRTEDLPKAVVFLEPQWYRVLEKDSVTLKCQGAYSPEDNSTQWFHNESLISSQASSYFIDAATVDDSGEYRCQTNLSTLSDPVQLEVHIGWLLLQAPRWVFKEEDPIHLRCHSWKNTALHKVTYLQNGKGRKYFHHNSDFYIPKATLKDSGSYFCRGLVGSKNVSSETVNITITQGLAVPTISSFFPPGYQVSFCLVMVLLFAVDTGLYFSVKTNIRSSTRDWKDHKFKWRKDPQDK

SEQ ID NO: 5220 - protein, 503 aa, Artificial Sequence
  Synthetic Polypeptide
MALPVTALLLPLALLLHAARPDQIVLTQSPAIMSASPGEKVTISCSASSSVSYMYWYQQKPGSSPKPWIYRTSNLASGVPARFSGSGSGTSYSLTISNMEAEDAAAYYCQQYHSYPTTFGGGTKLEVKGGGGSGGGGSGGGGSEVQLVESGGGLVQPKGSLKLSCAASGFSFNTYAMNWVRQAPGKGLEWIAHIRSKSNNFATYYADSVKDRFSISRDASENILFLQMNNLKTEDTAMYYCVRQGGDFPMDYWGQGTSVTVSSTRGMRTEDLPKAVVFLEPQWYRVLEKDSVTLKCQGAYSPEDNSTQWFHNESLISSQASSYFIDAATVDDSGEYRCQTNLSTLSDPVQLEVHIGWLLLQAPRWVFKEEDPIHLRCHSWKNTALHKVTYLQNGKGRKYFHHNSDFYIPKATLKDSGSYFCRGLVGSKNVSSETVNITITQGLAVPTISSFFPPGYQVSFCLVMVLLFAVDTGLYFSVKTNIRSSTRDWKDHKFKWRKDPQDK

SEQ ID NO: 5221 - protein, 504 aa, Artificial Sequence
  Synthetic Polypeptide
MALPVTALLLPLALLLHAARPDIQMTQSPSSLSASVGDRVTITCRASQSISSYLNWYQQKPGKAPKLLIYDASNLETGVPSRFSGSGSGTDFTFTISSLQPEDIATYYCQQYDNLPLTFGGGTKVDIKRGGGGSGGGGSGGGGSQVQLVESGGGVVQPGRSLRLSCAASGFTFSSYAMHWVRQAPGKGLEWVAVISYDGSNKYYADSVKGRFTISRDNSKNTLYLQMNSLRAEDTAVYYCARAHNSSSWSFDYWGQGTLVTVSSTRGMRTEDLPKAVVFLEPQWYRVLEKDSVTLKCQGAYSPEDNSTQWFHNESLISSQASSYFIDAATVDDSGEYRCQTNLSTLSDPVQLEVHIGWLLLQAPRWVFKEEDPIHLRCHSWKNTALHKVTYLQNGKGRKYFHHNSDFYIPKATLKDSGSYFCRGLVGSKNVSSETVNITITQGLAVPTISSFFPPGYQVSFCLVMVLLFAVDTGLYFSVKTNIRSSTRDWKDHKFKWRKDPQDK

SEQ ID NO: 5222 - protein, 513 aa, Artificial Sequence
  Synthetic Polypeptide
MALPVTALLLPLALLLHAARPDVVMTQSPLSLPVSLGDQASISCRSSQRLVHSNGNTYLHWYLQKPGQSPKLLIYRVSNRFPGVPDRFSGSGSGTDFTLKISRVEAEDLGIYFCSQSTHVPYTFGGGTKLEIKRGGGGSGGGGSGGGGSEVRLQQSGPDLIKPGASVKMSCKASGYTFTGYVMHWVKQRPGQGLEWIGFINPYNDDIQSNERFRGKATLTSDKSSTTAYMELSSLTSEDSAVYYCARGAGYNFDGAYRFFDFWGQGTTLTVSSTRGMRTEDLPKAVVFLEPQWYRVLEKDSVTLKCQGAYSPEDNSTQWFHNESLISSQASSYFIDAATVDDSGEYRCQTNLSTLSDPVQLEVHIGWLLLQAPRWVFKEEDPIHLRCHSWKNTALHKVTYLQNGKGRKYFHHNSDFYIPKATLKDSGSYFCRGLVGSKNVSSETVNITITQGLAVPTISSFFPPGYQVSFCLVMVLLFAVDTGLYFSVKTNIRSSTRDWKDHKFKWRKDPQDK

SEQ ID NO: 5223 - protein, 504 aa, Artificial Sequence
  Synthetic Polypeptide
MALPVTALLLPLALLLHAARPSYELTQPPSVSVSPGQTATISCSGDQLGGKYGHWYQKKPGQSPVLVLYQDRKRPAGIPERFSGSSSGNTITLTISGTQAVDEADYYCQAWDTNLGGVFGGGTKVTVLGQGGGGSGGGGSGGGGSQVQLVESGAEVKKPGASVKVSCKASGYTFTGYYMHWVRQAPGQGLEWMGRINPNSGGTNYAQKFQGRVTMTRDTSISTAYMELSRLRSDDTAVYYCASPRGRGSAFDIWGQGTLVTVSSTRGMRTEDLPKAVVFLEPQWYRVLEKDSVTLKCQGAYSPEDNSTQWFHNESLISSQASSYFIDAATVDDSGEYRCQTNLSTLSDPVQLEVHIGWLLLQAPRWVFKEEDPIHLRCHSWKNTALHKVTYLQNGKGRKYFHHNSDFYIPKATLKDSGSYFCRGLVGSKNVSSETVNITITQGLAVPTISSFFPPGYQVSFCLVMVLLFAVDTGLYFSVKTNIRSSTRDWKDHKFKWRKDPQDK

SEQ ID NO: 5224 - protein, 507 aa, Artificial Sequence
  Synthetic Polypeptide
MALPVTALLLPLALLLHAARPNFMLTQPHSVSESPGKTVTISCTRSSGSIASKYVQWYQQRPGSSPTTVIYEDNQRPSGVPDRFSGSIDTSSNSASLTISGLRTEDEADYYCHSYDSNNHSVFGGGTKVTVLGQGGGGSGGGGSGGGGSEVQLVESGGGVVQPGGSLRLSCAASGFTFSSYAMSWVRQAPGKGLEWVSAISGSGGSTYYADSVKGRFSISRDNSKNTLYLQMNSLRAEDTAVYYCARTRSSGAFDIWGQGTLVTVSSTRGMRTEDLPKAVVFLEPQWYRVLEKDSVTLKCQGAYSPEDNSTQWFHNESLISSQASSYFIDAATVDDSGEYRCQTNLSTLSDPVQLEVHIGWLLLQAPRWVFKEEDPIHLRCHSWKNTALHKVTYLQNGKGRKYFHHNSDFYIPKATLKDSGSYFCRGLVGSKNVSSETVNITITQGLAVPTISSFFPPGYQVSFCLVMVLLFAVDTGLYFSVKTNIRSSTRDWKDHKFKWRKDPQDK

SEQ ID NO: 5225 - protein, 503 aa, Artificial Sequence
  Synthetic Polypeptide
MALPVTALLLPLALLLHAARPDIQMNQSPSSLSASLGDTITITCHASQNINVWLSWYQQKPGNIPKLLIYKASNLHTGVPSRFSGSGSGTGFTITISSLQPEDIATYYCQQGQSYPWTFGGGTKLEIKRGGGGSGGGGSGGGGSEVQLQQSGPELVKPGASVKISCKASGYSFTGYFMNWVKQSHGKSLEYIGRFNPYNGETLYNQKFKGKATLTVDKSSSTVHMELLSVTSEDSAVYYCGRSGNDDAMDYWGQGTSVTVSSATRGMRTEDLPKAVVFLEPQWYRVLEKDSVTLKCQGAYSPEDNSTQWFHNESLISSQASSYFIDAATVDDSGEYRCQTNLSTLSDPVQLEVHIGWLLLQAPRWVFKEEDPIHLRCHSWKNTALHKVTYLQNGKGRKYFHHNSDFYIPKATLKDSGSYFCRGLVGSKNVSSETVNITITQGLAVPTISSFFPPGYQVSFCLVMVLLFAVDTGLYFSVKTNIRSSTRDWKDHKFKWRKDPQDK

SEQ ID NO: 5226 - protein, 500 aa, Artificial Sequence
  Synthetic Polypeptide
MALPVTALLLPLALLLHAARPDILLTQSPAILSVSPGERVSFSCRASQNIGTSIHWYQQRTNGSPRLLIKYASESVSGIPSRFSGSGSGTDFTLSINSVESEDIADYYCQHTNSWPTTFGGGTKLEIKRGGGGSGGGGSGGGGSQVQLQQSDAELVKPGASVKISCKASGYTFTDHAIHWVKQKPEQGLEWIGYFSPGNGDIKYNEKFKGKATLTADKSSSTAYMQLNSLTSEDSAVYFCKRSYGNYDYWGQGTTLTVSSTRGMRTEDLPKAVVFLEPQWYRVLEKDSVTLKCQGAYSPEDNSTQWFHNESLISSQASSYFIDAATVDDSGEYRCQTNLSTLSDPVQLEVHIGWLLLQAPRWVFKEEDPIHLRCHSWKNTALHKVTYLQNGKGRKYFHHNSDFYIPKATLKDSGSYFCRGLVGSKNVSSETVNITITQGLAVPTISSFFPPGYQVSFCLVMVLLFAVDTGLYFSVKTNIRSSTRDWKDHKFKWRKDPQDK

SEQ ID NO: 5227 - protein, 505 aa, Artificial Sequence
  Synthetic Polypeptide
MALPVTALLLPLALLLHAARPDIVMTQSPDSLAVSLGERATINCKSSQSLLNSGDQKNYLTWYQQKPGQPPKLLIYWASTRESGVPDRFSGSGSGTDFTLTISSLQAEDVAVYYCQNDYSYPLTFGQGTKVEIKGGGGSGGGGSGGGGSQVQLVQSGAEVKKTGSSVKVSCKASGYTFTDHAIHVWRQAPGQALEWMGHFSPGNTDIKYNDKFKGRVTLTVDRSMSTAYMELSSLRSEDTAMYYCKTSTFFFDYWGQGTMVTVSSTRGMRTEDLPKAVVFLEPQWYRVLEKDSVTLKCQGAYSPEDNSTQWFHNESLISSQASSYFIDAATVDDSGEYRCQTNLSTLSDPVQLEVHIGWLLLQAPRWVFKEEDPIHLRCHSWKNTALHKVTYLQNGKGRKYFHHNSDFYIPKATLKDSGSYFCRGLVGSKNVSSETVNITITQGLAVPTISSFFPPGYQVSFCLVMVLLFAVDTGLYFSVKTNIRSSTRDWKDHKFKWRKDPQDK

SEQ ID NO: 5228 - protein, 504 aa, Artificial Sequence
  Synthetic Polypeptide
MALPVTALLLPLALLLHAARPDIQMTQSPSSLSASVGDRVTITCKASQDVSIAVAWYQQKPGKAPKVLIYSASYRYTGVPDRFSGSGSGTDFTFTISSLQPEDIAVYYCQQHYITPLTFGGGTKVEIKGGGGSGGGGSGGGGSQIQLVQSGHEVKKPGASVKVSCKASGYTFTNYGMNWVRQAPGQGLEWMGWINTKTGEPTYAEEFKGRFVFSLETSASTAYLQISSLKAEDTAMYFCGRGGYGSSYWYFDVWGQGTTVTVSSTRGMRTEDLPKAVVFLEPQWYRVLEKDSVTLKCQGAYSPEDNSTQWFHNESLISSQASSYFIDAATVDDSGEYRCQTNLSTLSDPVQLEVHIGWLLLQAPRWVFKEEDPIHLRCHSWKNTALHKVTYLQNGKGRKYFHHNSDFYIPKATLKDSGSYFCRGLVGSKNVSSETVNITITQGLAVPTISSFFPPGYQVSFCLVMVLLFAVDTGLYFSVKTNIRSSTRDWKDHKFKWRKDPQDK

SEQ ID NO: 5229 - protein, 507 aa, Artificial Sequence
  Synthetic Polypeptide
MALPVTALLLPLALLLHAARPQAVVTQPPSASGTPGQRVTISCSGSSSNIGSNTVNWYQQVPGTAPKLLIYSNNQRPSGVPDRFSGSKSGTSASLAISGLQSEDEADYYCAAWDDSLNGWVFGGGTKLTVLGGGGSGGGGSGGGGSQMQLVQSGAEVKEPGESLRISCKGSGYSFTNFWISWVRQMPGKGLEWMGRVDPGYSYSTYSPSFQGHVTISADKSTSTAYLQWNSLKASDTAMYYCARVQYSGYYDWFDPWGQGTLVTVSSTRGMRTEDLPKAVVFLEPQWYRVLEKDSVTLKCQGAYSPEDNSTQWFHNESLISSQASSYFIDAATVDDSGEYRCQTNLSTLSDPVQLEVHIGWLLLQAPRWVFKEEDPIHLRCHSWKNTALHKVTYLQNGKGRKYFHHNSDFYIPKATLKDSGSYFCRGLVGSKNVSSETVNITITQGLAVPTISSFFPPGYQVSFCLVMVLLFAVDTGLYFSVKTNIRSSTRDWKDHKFKWRKDPQDK

SEQ ID NO: 5230 - protein, 501 aa, Artificial Sequence
  Synthetic Polypeptide
MALPVTALLLPLALLLHAARPDIQMTQSPSTLSASVGDRVTITCRASQNINKWLAWYQQRPGKAPQLLIYKASSLESGVPSRFSGSGSGTEYTLTISSLQPDDFATYYCQQYNSYATFGQGTKVEIKRGGGGSGGGGSGGGGSQVQLVQSGAEVKKPGESLKISCKGSGYNFSNKWIGWVRQLPGRGLEWIAIIYPGYSDITYSPSFQGRVTISADTSINTAYLHWHSLKASDTAMYYCVRHTALAGFDYWGLGTLVTVSSTRGMRTEDLPKAVVFLEPQWYRVLEKDSVTLKCQGAYSPEDNSTQWFHNESLISSQASSYFIDAATVDDSGEYRCQTNLSTLSDPVQLEVHIGWLLLQAPRWVFKEEDPIHLRCHSWKNTALHKVTYLQNGKGRKYFHHNSDFYIPKATLKDSGSYFCRGLVGSKNVSSETVNITITQGLAVPTISSFFPPGYQVSFCLVMVLLFAVDTGLYFSVKTNIRSSTRDWKDHKFKWRKDPQDK

SEQ ID NO: 5231 - protein, 506 aa, Artificial Sequence
  Synthetic Polypeptide
MALPVTALLLPLALLLHAARPQSVVTQPPSVSVAPGKTARITCGRNNIGSKSVHWYQQKPGQAPVLVVYDDSDRPSGIPERFSGSNSGNTATLTISRVEAGDEADYYCQVWDSSSDHVVFGGGTKLTVLGGGGGSGGGGSGGGGSEVQLVQSGGGVVRPGGSLRLSCAASGFTFDDYGMSWVRQAPGKGLEWVSGINWNGGSTGYADSVRGRFTISRDNAKNSLYLQMNSLRAEDTALYYCARERGYGYHDPHDYWGQGTLVTVSSTRGMRTEDLPKAVVFLEPQWYRVLEKDSVTLKCQGAYSPEDNSTQWFHNESLISSQASSYFIDAATVDDSGEYRCQTNLSTLSDPVQLEVHIGWLLLQAPRWVFKEEDPIHLRCHSWKNTALHKVTYLQNGKGRKYFHHNSDFYIPKATLKDSGSYFCRGLVGSKNVSSETVNITITQGLAVPTISSFFPPGYQVSFCLVMVLLFAVDTGLYFSVKTNIRSSTRDWKDHKFKWRKDPQDK

SEQ ID NO: 5232 - protein, 505 aa, Artificial Sequence
  Synthetic Polypeptide
MALPVTALLLPLALLLHAARPDIVLTQSPASLAVSLGQRATISCRASESVDNYGNTFMHWYQQKPGQPPKLLIYRASNLESGIPARFSGSGSRTDFTLTINPVEADDVATYYCQQSNEDPPTFGAGTKLELKGGGGSGGGGSGGGGSQIQLVQSGPELKKPGETVKISCKASGYIFTNYGMNWVKQAPGKSFKWMGWINTYTGESTYSADFKGRFAFSLETSASTAYLHINDLKNEDTATYFCARSGGYDPMDYWGQGTSVTVSSTRGMRTEDLPKAVVFLEPQWYRVLEKDSVTLKCQGAYSPEDNSTQWFHNESLISSQASSYFIDAATVDDSGEYRCQTNLSTLSDPVQLEVHIGWLLLQAPRWVFKEEDPIHLRCHSWKNTALHKVTYLQNGKGRKYFHHNSDFYIPKATLKDSGSYFCRGLVGSKNVSSETVNITITQGLAVPTISSFFPPGYQVSFCLVMVLLFAVDTGLYFSVKTNIRSSTRDWKDHKFKWRKDPQDK

SEQ ID NO: 5233 - protein, 503 aa, Artificial Sequence
  Synthetic Polypeptide
MALPVTALLLPLALLLHAARPEIVLTQSPGTLSLSPGERATLSCRASQSVSNTYLAWYHQRPGQAPRLLIYGASSRATGIPDRFSGSGSGTDFALTISSLEPEDFAVYYCQQYSNSWTFGQGTKVEIKRGGGGSGGGGSGGGGSQVQLVESGGGVVQPGRSLRLSCAASGFTFSSYDMHWVRQAPGKGLEWVAVISYDGTNEYYADSVKGRFTISRDTSKNTLYLQMNSLRAEDTAVYYCARERYFDWSFDYWGQGTLVSVSSTRGMRTEDLPKAVVFLEPQWYRVLEKDSVTLKCQGAYSPEDNSTQWFHNESLISSQASSYFIDAATVDDSGEYRCQTNLSTLSDPVQLEVHIGWLLLQAPRWVFKEEDPIHLRCHSWKNTALHKVTYLQNGKGRKYFHHNSDFYIPKATLKDSGSYFCRGLVGSKNVSSETVNITITQGLAVPTISSFFPPGYQVSFCLVMVLLFAVDTGLYFSVKTNIRSSTRDWKDHKFKWRKDPQDK

SEQ ID NO: 5234 - protein, 502 aa, Artificial Sequence
  Synthetic Polypeptide
MALPVTALLLPLALLLHAARPELTQDPAVSVALGQTVRITCQGDSLRSNYANWYQQKPGQAPVLVIYGQNNRPSGIPDRFSGSSSGNTASLTITGAQAADEADYYCDSRVSTGNHVVFGGGTKLTVLGQGGGGSGGGGSGGGGSEVQLVQSGAEVKKPGASVKVSCKASGYTFTSYAMHWVRQAPGQRLEWMGWINAGNGNTKYSQKFQGRVTITRDTSASTAYMELSSLRSEDTAVYYCARDISYGSFDYWGQGTLVTVSSTRGMRTEDLPKAVVFLEPQWYRVLEKDSVTLKCQGAYSPEDNSTQWFHNESLISSQASSYFIDAATVDDSGEYRCQTNLSTLSDPVQLEVHIGWLLLQAPRWVFKEEDPIHLRCHSWKNTALHKVTYLQNGKGRKYFHHNSDFYIPKATLKDSGSYFCRGLVGSKNVSSETVNITITQGLAVPTISSFFPPGYQVSFCLVMVLLFAVDTGLYFSVKTNIRSSTRDWKDHKFKWRKDPQDK

SEQ ID NO: 5235 - protein, 498 aa, Artificial Sequence
  Synthetic Polypeptide
MALPVTALLLPLALLLHAARPDIQMTQSPSSLSASVGDRVTITCSATSSISYMHWYQQKPGKAPKGWIYDTSKLAHGVPSRFSGSGSGTDFTLTISSLQPEDFATYYCHQRRSYPFTFGQGTKVEIKGGGGSGGGGSGGGGSEVQLVQSGAEVKKPGASVKVSCKASGYTFTNFWIHWVRQAPGQGLEWIGEIDPSDSYTNYNQKFKGRVTITRDTSTSTAYLELSSLRSEDTAVYYCAREITTVDYWGQGTLVTVSSTRGMRTEDLPKAVVFLEPQWYRVLEKDSVTLKCQGAYSPEDNSTQWFHNESLISSQASSYFIDAATVDDSGEYRCQTNLSTLSDPVQLEVHIGWLLLQAPRWVFKEEDPIHLRCHSWKNTALHKVTYLQNGKGRKYFHHNSDFYIPKATLKDSGSYFCRGLVGSKNVSSETVNITITQGLAVPTISSFFPPGYQVSFCLVMVLLFAVDTGLYFSVKTNIRSSTRDWKDHKFKWRKDPQDK

SEQ ID NO: 5236 - protein, 505 aa, Artificial Sequence
  Synthetic Polypeptide
MALPVTALLLPLALLLHAARPDIQMTQSPSSLSASVGDRVTITCKASQGFNKYVAWYQQKPGKAPKLLIYYTSTLQPGVPSRFSGSGSGRDYTLTISSLQPEDFATYYCLQYGNLLYAFGQGTKVEIKRGGGGSGGGGSGGGGSEVQLVQSGAEVKKPGASVKVSCKASGYTFTSYWIGWVRQAPGQGLEWIGDIYPGGGYTNYNEKFKGRVTITRDTSTSTAYLELSSLRSEDTAVYYCARLDGSSYRGAMDSWGQGTLVTVSSTRGMRTEDLPKAVVFLEPQWYRVLEKDSVTLKCQGAYSPEDNSTQWFHNESLISSQASSYFIDAATVDDSGEYRCQTNLSTLSDPVQLEVHIGWLLLQAPRWVFKEEDPIHLRCHSWKNTALHKVTYLQNGKGRKYFHHNSDFYIPKATLKDSGSYFCRGLVGSKNVSSETVNITITQGLAVPTISSFFPPGYQVSFCLVMVLLFAVDTGLYFSVKTNIRSSTRDWKDHKFKWRKDPQDK

SEQ ID NO: 5237 - protein, 501 aa, Artificial Sequence
  Synthetic Polypeptide
MALPVTALLLPLALLLHAARPDIQMTQSPSSLSASVGDRVTITCRASQDIRYYLNWYQQKPGKAPKLLIYVASSLQSGVPSRFSGSGSGTEFTLTVSSLQPEDFATYYCLQVYSTPRTFGQGTKVEIKGGGGSGGGGSGGGGSEVQLVESGGGLAKPGGSLRLSCAASGFRFTFNNYYMDWVRQAPGQGLEWVSRISSSGDPTWYADSVKGRFTISRENAKNTLFLQMNSLRAEDTAVYYCASLTTGSDSWGQGVLVTVSSTRGMRTEDLPKAVVFLEPQWYRVLEKDSVTLKCQGAYSPEDNSTQWFHNESLISSQASSYFIDAATVDDSGEYRCQTNLSTLSDPVQLEVHIGWLLLQAPRWVFKEEDPIHLRCHSWKNTALHKVTYLQNGKGRKYFHHNSDFYIPKATLKDSGSYFCRGLVGSKNVSSETVNITITQGLAVPTISSFFPPGYQVSFCLVMVLLFAVDTGLYFSVKTNIRSSTRDWKDHKFKWRKDPQDK

SEQ ID NO: 5238 - protein, 502 aa, Artificial Sequence
  Synthetic Polypeptide
MALPVTALLLPLALLLHAARPEIVMTQSPATLSVSPGERATLSCRASQSVSRNLAWYQQKPGQAPRLLIYGASTRATGIPARFSGSGSGTEFTLTIGSLQSEDFAVYYCQQYKTWPRTFGQGTNVEIKGGGGSGGGGSGGGGSQVQLQQWGAGLLKPSETLSLTCAVFGGSFSGYYWSWIRQPPGKGLEWIGEINHRGNTNDNPSLKSRVTISVDTSKNQFALKLSSVTAADTAVYYCARERGYTYGNFDHWGQGTLVTVSSTRGMRTEDLPKAVVFLEPQWYRVLEKDSVTLKCQGAYSPEDNSTQWFHNESLISSQASSYFIDAATVDDSGEYRCQTNLSTLSDPVQLEVHIGWLLLQAPRWVFKEEDPIHLRCHSWKNTALHKVTYLQNGKGRKYFHHNSDFYIPKATLKDSGSYFCRGLVGSKNVSSETVNITITQGLAVPTISSFFPPGYQVSFCLVMVLLFAVDTGLYFSVKTNIRSSTRDWKDHKFKWRKDPQDK

SEQ ID NO: 5239 - protein, 508 aa, Artificial Sequence
  Synthetic Polypeptide
MALPVTALLLPLALLLHAARPDIQMTQSPSSLSASVGDRVTITCKASKNIRSYLAWYQQKPGKAPKLLIYSGSTLHSGVPSRFSGSGSGTDFTLTISSLQPEDFATYYCQQHHEYPLTFGQGTKVEIKRGGGGSGGGGSGGGGSQVQLQESGPGLVKPSETLSLTCTVSGYTITSGYDWSWIRQPPGKGLEWIGYINYGGSTNYKPSLGSRVTISVDTSKNQFSLKLSSVTAADTAVYYCARYNEYKSYIYDWYFDFWGQGTLVTVSSTRGMRTEDLPKAVVFLEPQWYRVLEKDSVTLKCQGAYSPEDNSTQWFHNESLISSQASSYFIDAATVDDSGEYRCQTNLSTLSDPVQLEVHIGWLLLQAPRWVFKEEDPIHLRCHSWKNTALHKVTYLQNGKGRKYFHHNSDFYIPKATLKDSGSYFCRGLVGSKNVSSETVNITITQGLAVPTISSFFPPGYQVSFCLVMVLLFAVDTGLYFSVKTNIRSSTRDWKDHKFKWRKDPQDK

SEQ ID NO: 5240 - protein, 510 aa, Artificial Sequence
  Synthetic Polypeptide
MALPVTALLLPLALLLHAARPQSVVTQPPSVSAAPGQKVTISCSGSSSNIGNNYVSWYQQLPGTAPKLLIYDNNKRPSGIPDRFSGSKSGTSATLGITGLQTGDEADYYCGTWDGSLYTMLFGGGTKLTVLGGGGSGGGGSGGGGSEVQLVESGGGLVKPGGSLRLSCAASGFTFSNAWMSWVRQAPGKGLEWVGFIRSKAYGGTTEYAASVKGRFTISRDDSKSIAYLQMNNLKTEDTAVYYCARDGLYSSSWYDSDYWGQGTLVTVSSTRGMRTEDLPKAVVFLEPQWYRVLEKDSVTLKCQGAYSPEDNSTQWFHNESLISSQASSYFIDAATVDDSGEYRCQTNLSTLSDPVQLEVHIGWLLLQAPRWVFKEEDPIHLRCHSWKNTALHKVTYLQNGKGRKYFHHNSDFYIPKATLKDSGSYFCRGLVGSKNVSSETVNITITQGLAVPTISSFFPPGYQVSFCLVMVLLFAVDTGLYFSVKTNIRSSTRDWKDHKFKWRKDPQDK

SEQ ID NO: 5241 - protein, 515 aa, Artificial Sequence
  Synthetic Polypeptide
MALPVTALLLPLALLLHAARPQSVLTQPPSVSGAPGQRVTISCTGSSSNIGAGYDVHWYQQLPGTAPKLLIFGNSNRPSGVPDRFSGFKSGTSASLAITGLQAEDEADYFCQSYDSSLSGSGVFGTGTKVTVLGGGGGSGGGGSGGGGSQMQLVQSGGGLVQPGRSLRLSCAASGFTFDDYAMHWVRQAPGKGLEWVSGISWNSGSIGYADSVKGRFTISRDNAKNSLYLQMNSLRAEDTALYYCAKDIHSGSYYGLLYYAMDVWGQGTTVTVSSTRGMRTEDLPKAVVFLEPQWYRVLEKDSVTLKCQGAYSPEDNSTQWFHNESLISSQASSYFIDAATVDDSGEYRCQTNLSTLSDPVQLEVHIGWLLLQAPRWVFKEEDPIHLRCHSWKNTALHKVTYLQNGKGRKYFHHNSDFYIPKATLKDSGSYFCRGLVGSKNVSSETVNITITQGLAVPTISSFFPPGYQVSFCLVMVLLFAVDTGLYFSVKTNIRSSTRDWKDHKFKWRKDPQDK

SEQ ID NO: 5242 - protein, 515 aa, Artificial Sequence
  Synthetic Polypeptide
MALPVTALLLPLALLLHAARPLPVLTQPPSASGTPGQRVTISCSGRSSNIGSNSVNWYRQLPGAAPKLLIYSNNQRPPGVPVRFSGSKSGTSASLAISGLQSEDEATYYCATWDDNLNVHYVFGTGTKVTVLGSRGGGGSGGGGSGGGGSLEMAQVQLVQSGAEVKKPGSSVKVSCKASGGTFSSYAISWVRQAPGQGLEWMGRIIPILGIANYAQKFQGRVTITADKSTSTAYMELSSLRSEDTAVYYCARGGYYSHDMWSEDWGQGTLVTVSSTRGMRTEDLPKAVVFLEPQWYRVLEKDSVTLKCQGAYSPEDNSTQWFHNESLISSQASSYFIDAATVDDSGEYRCQTNLSTLSDPVQLEVHIGWLLLQAPRWVFKEEDPIHLRCHSWKNTALHKVTYLQNGKGRKYFHHNSDFYIPKATLKDSGSYFCRGLVGSKNVSSETVNITITQGLAVPTISSFFPPGYQVSFCLVMVLLFAVDTGLYFSVKTNIRSSTRDWKDHKFKWRKDPQDK

SEQ ID NO: 5243 - protein, 504 aa, Artificial Sequence
  Synthetic Polypeptide
MALPVTALLLPLALLLHAARPDIVLTQSPASLAVSLGERATINCRASESVSVIGAHLIHWYQQKPGQPPKLLIYLASNLETGVPARFSGSGSGTDFTLTISSLQAEDAAIYYCLQSRIFPRTFGQGTKLEIKGGGGSGGGGSGGGGSQVQLVQSGSELKKPGESVKISCKASGYTFTDYSINWVKQAPGQGLKWMGWINTETREPAYAYDFRGRFVFSLDTSASTAYLQISSLKAEDTAVYFCALDYSYAMDYWGQGTLVTVSSTRGMRTEDLPKAVVFLEPQWYRVLEKDSVTLKCQGAYSPEDNSTQWFHNESLISSQASSYFIDAATVDDSGEYRCQTNLSTLSDPVQLEVHIGWLLLQAPRWVFKEEDPIHLRCHSWKNTALHKVTYLQNGKGRKYFHHNSDFYIPKATLKDSGSYFCRGLVGSKNVSSETVNITITQGLAVPTISSFFPPGYQVSFCLVMVLLFAVDTGLYFSVKTNIRSSTRDWKDHKFKWRKDPQDK

SEQ ID NO: 5244 - protein, 505 aa, Artificial Sequence
  Synthetic Polypeptide
MALPVTALLLPLALLLHAARPDIVLTQSPATLSLSPGDRATLSCRASESVTILGSHLIYWYQQKPGQAPRLLIQLASNVQTGIPARFSGSGSRTDFTLTISSLEPEDFAVYYCLQSRTIPRTFGQGTKLEIKRGGGGSGGGGSGGGGSQVQLVQSGSELKKPGESVKISCKASGYTFTHYSMNWVRQAPGQGLEWMGRINTETGEPLYADDFKGRFVFSLDTSASTAYLQISSLKAEDTAVYYCSNDYLYSLDYWGQGTLVTVSSTRGMRTEDLPKAVVFLEPQWYRVLEKDSVTLKCQGAYSPEDNSTQWFHNESLISSQASSYFIDAATVDDSGEYRCQTNLSTLSDPVQLEVHIGWLLLQAPRWVFKEEDPIHLRCHSWKNTALHKVTYLQNGKGRKYFHHNSDFYIPKATLKDSGSYFCRGLVGSKNVSSETVNITITQGLAVPTISSFFPPGYQVSFCLVMVLLFAVDTGLYFSVKTNIRSSTRDWKDHKFKWRKDPQDK

SEQ ID NO: 5245 - protein, 509 aa, Artificial Sequence
  Synthetic Polypeptide
MALPVTALLLPLALLLHAARPDFVMTQSPDSLAVSLGERVTMSCKSSQSLLNSGNQKNYLTWYQQKPGQPPKLLIYWASTRESGVPDRFSGSGSGTDFTLTISSLQAEDVAVYYCQNDYSYPYTFGQGTKLEIKGGGGSGGGGSGGGGSEVQLVQSGAELKKPGASVKVSCKASGYTFTDYYMKWVRQAPGQGLEWIGDIIPSNGATFYNQKFKGRVTITVDKSTSTAYMELSSLRSEDTAVYYCARSHLLRASWFAYWGQGTLVTVSSTRGMRTEDLPKAVVFLEPQWYRVLEKDSVTLKCQGAYSPEDNSTQWFHNESLISSQASSYFIDAATVDDSGEYRCQTNLSTLSDPVQLEVHIGWLLLQAPRWVFKEEDPIHLRCHSWKNTALHKVTYLQNGKGRKYFHHNSDFYIPKATLKDSGSYFCRGLVGSKNVSSETVNITITQGLAVPTISSFFPPGYQVSFCLVMVLLFAVDTGLYFSVKTNIRSSTRDWKDHKFKWRKDPQDK

SEQ ID NO: 5246 - protein, 509 aa, Artificial Sequence
  Synthetic Polypeptide
MALPVTALLLPLALLLHAARPDFVMTQSPDSLAVSLGERVTMSCKSSQSLLNSGNQKNYLTWYQQKPGQPPKLLIYWASTRESGVPDRFSGSGSGTDFTLTISSLQAEDVAVYYCQNDYSYPYTFGQGTKLEIKGGGGSGGGGSGGGGSQVQLVQSGAELKKPGASVKVSCKASGYTFTDYYMKWVRQAPGQGLEWIGDIIPSNGATFYNQKFKGRVTITVDKSTSTAYMELSSLRSEDTAVYYCARSHLLRASWFAYWGQGTLVTVSSTRGMRTEDLPKAVVFLEPQWYRVLEKDSVTLKCQGAYSPEDNSTQWFHNESLISSQASSYFIDAATVDDSGEYRCQTNLSTLSDPVQLEVHIGWLLLQAPRWVFKEEDPIHLRCHSWKNTALHKVTYLQNGKGRKYFHHNSDFYIPKATLKDSGSYFCRGLVGSKNVSSETVNITITQGLAVPTISSFFPPGYQVSFCLVMVLLFAVDTGLYFSVKTNIRSSTRDWKDHKFKWRKDPQDK

SEQ ID NO: 5247 - protein, 499 aa, Artificial Sequence
  Synthetic Polypeptide
MALPVTALLLPLALLLHAARPDVQITQSPSYLAASPGETITINCRASKSISKDLAWYQEKPGKTNKLLIYSGSTLQSGIPSRFSGSGSGTDFTLTISSLEPEDFAMYYCQQHNKYPYTFGGGTKLEIKRGGGGSGGGGSGGGGSQVQLQQPGAELVRPGASVKLSCKASGYTFTSYWMNWVKQRPDQGLEWIGRIDPYDSETHYNQKFKDKAILTVDKSSSTAYMQLSSLTSEDSAVYYCARGNWDDYWGQGTTLTVSSTRGMRTEDLPKAVVFLEPQWYRVLEKDSVTLKCQGAYSPEDNSTQWFHNESLISSQASSYFIDAATVDDSGEYRCQTNLSTLSDPVQLEVHIGWLLLQAPRWVFKEEDPIHLRCHSWKNTALHKVTYLQNGKGRKYFHHNSDFYIPKATLKDSGSYFCRGLVGSKNVSSETVNITITQGLAVPTISSFFPPGYQVSFCLVMVLLFAVDTGLYFSVKTNIRSSTRDWKDHKFKWRKDPQDK

SEQ ID NO: 5248 - protein, 501 aa, Artificial Sequence
  Synthetic Polypeptide
MALPVTALLLPLALLLHAARPEIVLTQSPTSMTASPGEQVTITCRASSSINYMHWYQQKPGASPRPWIYETSKLASGVPDRFSGSASGTSYSLTINNMEAEDAATYYCQQWNYPSWTFGGGTKLELKGGGGSGGGGSGGGGSEVQLVESGGGLVQPGRSLKLSCAASGFTFSDYNMAWVRQAPKKGLEWVATILYDGGRTYYRGSVKGRFTISRDNAKSTLYLRMDSLRSEDTATYYCATHSRGTDYFDYWGQGVMVTVSSTRGMRTEDLPKAVVFLEPQWYRVLEKDSVTLKCQGAYSPEDNSTQWFHNESLISSQASSYFIDAATVDDSGEYRCQTNLSTLSDPVQLEVHIGWLLLQAPRWVFKEEDPIHLRCHSWKNTALHKVTYLQNGKGRKYFHHNSDFYIPKATLKDSGSYFCRGLVGSKNVSSETVNITITQGLAVPTISSFFPPGYQVSFCLVMVLLFAVDTGLYFSVKTNIRSSTRDWKDHKFKWRKDPQDK

SEQ ID NO: 5249 - protein, 510 aa, Artificial Sequence
  Synthetic Polypeptide
MALPVTALLLPLALLLHAARPDIVMTQSPSSLAVSEGETVTINCKSSQSFLSSGDGKNYVAWYQYKPGQSPKLLIYWASTRQSGVPDRFIGSGSGTDFTLTISTVQAEDLAIYYCQQYYDTPLTFGSGTKLEIKGGGGSGGGGSGGGGSEVKLQESGPSLVQSSQTLSLTCTVSGFSLTSYHIHWVRQTPGKGLEWMGVMWSDGDTSYNSALKSRLSISRDTSQSQVFLKMNSLQTEDTATYYCARGYYSSYLYLWFAYWGQGTLVTVSSTRGMRTEDLPKAVVFLEPQWYRVLEKDSVTLKCQGAYSPEDNSTQWFHNESLISSQASSYFIDAATVDDSGEYRCQTNLSTLSDPVQLEVHIGWLLLQAPRWVFKEEDPIHLRCHSWKNTALHKVTYLQNGKGRKYFHHNSDFYIPKATLKDSGSYFCRGLVGSKNVSSETVNITITQGLAVPTISSFFPPGYQVSFCLVMVLLFAVDTGLYFSVKTNIRSSTRDWKDHKFKWRKDPQDK

SEQ ID NO: 5250 - protein, 514 aa, Artificial Sequence
  Synthetic Polypeptide
MALPVTALLLPLALLLHAARPDVLMTQTPVSLPVSLGGQVSISCRSSQSLVHSDGDTYLHWYLQKPGQSPQLLIYRVSNRFSGVPDRFSGSGSGTDFTLKISRVEPEDLGLYYCLQTTHFPPWTFGGGTKLEMKGGGGSGGGGSGGGGSQVQLQQSGPELRRPGSSVRLSCKASGYRIKDFLIHWIKNRPEHGLEWIGWIDPEDGETKYAQKFQTKATLTADTSSNTAYMQLSSLTSEDTATYFCARWGDVYYGLMRGHVMDAWGQGTSVTVSSTRGMRTEDLPKAVVFLEPQWYRVLEKDSVTLKCQGAYSPEDNSTQWFHNESLISSQASSYFIDAATVDDSGEYRCQTNLSTLSDPVQLEVHIGWLLLQAPRWVFKEEDPIHLRCHSWKNTALHKVTYLQNGKGRKYFHHNSDFYIPKATLKDSGSYFCRGLVGSKNVSSETVNITITQGLAVPTISSFFPPGYQVSFCLVMVLLFAVDTGLYFSVKTNIRSSTRDWKDHKFKWRKDPQDK

SEQ ID NO: 5251 - protein, 510 aa, Artificial Sequence
  Synthetic Polypeptide
MALPVTALLLPLALLLHAARPDIVMTQAAPSIPVTPGESVSISCRSSKSLLNSNGNTYLYWFLQRPGQSPQLLIYRMSNLASGVPDRFSGSGSGTAFTLRISRVEAEDVGVYYCMQHLEYPFTFGAGTKLELKRGGGGSGGGGSGGGGSEVQLQQSGPELIKPGASVKMSCKASGYTFTSYVMHWVKQKPGQGLEWIGYINPYNDGTKYNEKFKGKATLTSDKSSSTAYMELSSLTSEDSAVYYCARGTYYYGSRVFDYWGQGTTLTVSSTRGMRTEDLPKAVVFLEPQWYRVLEKDSVTLKCQGAYSPEDNSTQWFHNESLISSQASSYFIDAATVDDSGEYRCQTNLSTLSDPVQLEVHIGWLLLQAPRWVFKEEDPIHLRCHSWKNTALHKVTYLQNGKGRKYFHHNSDFYIPKATLKDSGSYFCRGLVGSKNVSSETVNITITQGLAVPTISSFFPPGYQVSFCLVMVLLFAVDTGLYFSVKTNIRSSTRDWKDHKFKWRKDPQDK

SEQ ID NO: 5252 - protein, 510 aa, Artificial Sequence; identical to SEQ ID NO: 5251
  Synthetic Polypeptide

SEQ ID NO: 5253 - protein, 528 aa, Artificial Sequence
  Synthetic Polypeptide
MALPVTALLLPLALLLHAARPINIYNAEPANPSEKNSPEFDIVMTQSPATLSLSPGERATLSCRSSKSLQNVNGNTYLYWFQQKPGQSPQLLIYRMSNLNSGVPDRFSGSGSGTEFTLTISSLEPEDFAVYYCMQHLEYPITFGAGTKLEIKGGGGSGGGGSGGGGSEVQLVESGGGLVKPGGSLKLSCAASGYTFTSYVMHWVRQAPGKGLEWIGYINPYNDGTKYNEKFQGRVTISSDKSISTAYMELSSLRSEDTAMYYCARGTYYYGTRVFDYWGQGTLVTVSSTRGMRTEDLPKAVVFLEPQWYRVLEKDSVTLKCQGAYSPEDNSTQWFHNESLISSQASSYFIDAATVDDSGEYRCQTNLSTLSDPVQLEVHIGWLLLQAPRWVFKEEDPIHLRCHSWKNTALHKVTYLQNGKGRKYFHHNSDFYIPKATLKDSGSYFCRGLVGSKNVSSETVNITITQGLAVPTISSFFPPGYQVSFCLVMVLLFAVDTGLYFSVKTNIRSSTRDWKDHKFKWRKDPQDK

SEQ ID NO: 5254 - protein, 505 aa, Artificial Sequence
  Synthetic Polypeptide
MALPVTALLLPLALLLHAARPDIQMTQSPSSLSASVGDRVTITCKASDHINNWLAWYQQKPGQAPKLLIYGATTLETGVPSRFSGSGSGTDYTLTISSLQPEDFATYYCQQSWNTPWTFGQGTKLEIKRGGGGSGGGGSGGGGSQVQLQQPGAELVKPGASVKMSCKASGYAFSSYWINWMKQKPGQGLEWIGQIYPGDGDTNYNGKFKGRATLTADTSSSTAYMQLSSLTSEDSAVYFCARSITTVVGCAMDYWGQGTSVTVSSTRGMRTEDLPKAVVFLEPQWYRVLEKDSVTLKCQGAYSPEDNSTQWFHNESLISSQASSYFIDAATVDDSGEYRCQTNLSTLSDPVQLEVHIGWLLLQAPRWVFKEEDPIHLRCHSWKNTALHKVTYLQNGKGRKYFHHNSDFYIPKATLKDSGSYFCRGLVGSKNVSSETVNITITQGLAVPTISSFFPPGYQVSFCLVMVLLFAVDTGLYFSVKTNIRSSTRDWKDHKFKWRKDPQDK

SEQ ID NO: 5255 - protein, 507 aa, Artificial Sequence
  Synthetic Polypeptide
MALPVTALLLPLALLLHAARPQIVLSQSPAILSASPGEKVTMTCRASSSVSYMHWYQQKPGSSPKPWIYATSNLASGVPARFSGSGSGTSYSFTISRVEAEDAATYYCQQWTFNPPTFGGGTRLEIKRTVAAGGGGSGGGGSGGGGSQAYLQQSGAELVRPGASVKMSCKASGYTFTSYNMHWVKQTPRQGLEWIGGIYPGNGDTSYNQKFKGKATLTVGKSSSTAYMQLSSLTSEDSAVYFCARYDYNYAMDYWGQGTSVTVSSASTRGMRTEDLPKAVVFLEPQWYRVLEKDSVTLKCQGAYSPEDNSTQWFHNESLISSQASSYFIDAATVDDSGEYRCQTNLSTLSDPVQLEVHIGWLLLQAPRWVFKEEDPIHLRCHSWKNTALHKVTYLQNGKGRKYFHHNSDFYIPKATLKDSGSYFCRGLVGSKNVSSETVNITITQGLAVPTISSFFPPGYQVSFCLVMVLLFAVDTGLYFSVKTNIRSSTRDWKDHKFKWRKDPQDK

SEQ ID NO: 5256 - protein, 506 aa, Artificial Sequence
  Synthetic Polypeptide
MALPVTALLLPLALLLHAARPDEIVLTQSPATLSLSPGERATLSCRASQSVSSYLAWYQQKPGQAPRLLIYDASNRATGIPARFSGSGSGTDFTLTISSLEPEDFAVYYCQQRSNWPITFGQGTRLEIKGGGGSGGGGSGGGGSEVQLVESGGGLVQPDRSLRLSCAASGFTFHDYAMHWVRQAPGKGLEWVSTISWNSGTIGYADSVKGRFTISRDNAKNSLYLQMNSLRAEDTALYYCAKDIQYGNYYYGMDVWGQGTTVTVSSTRGMRTEDLPKAVVFLEPQWYRVLEKDSVTLKCQGAYSPEDNSTQWFHNESLISSQASSYFIDAATVDDSGEYRCQTNLSTLSDPVQLEVHIGWLLLQAPRWVFKEEDPIHLRCHSWKNTALHKVTYLQNGKGRKYFHHNSDFYIPKATLKDSGSYFCRGLVGSKNVSSETVNITITQGLAVPTISSFFPPGYQVSFCLVMVLLFAVDTGLYFSVKTNIRSSTRDWKDHKFKWRKDPQDK

SEQ ID NO: 5257 - protein, 500 aa, Artificial Sequence
  Synthetic Polypeptide
MALPVTALLLPLALLLHAARPDIQMTQSPSSLSASVGDRVTINCKASQDINSYLSWFQQKPGKAPKTLIYRANRLVDGVPSRFSGSGSGQDYTLTISSLQPEDFATYYCLQYDEFPLTFGGGTKVEIKGGGGSGGGGSGGGGSQVQLVQSGAEVKKPGASVKVSCKASGYTFTNYDINWVRQAPGQGLEWIGWIYPGDGSTKYNEKFKAKATLTADTSTSTAYMELRSLRSDDTAVYYCASGYEDAMDYWGQGTTVTVSSTRGMRTEDLPKAVVFLEPQWYRVLEKDSVTLKCQGAYSPEDNSTQWFHNESLISSQASSYFIDAATVDDSGEYRCQTNLSTLSDPVQLEVHIGWLLLQAPRWVFKEEDPIHLRCHSWKNTALHKVTYLQNGKGRKYFHHNSDFYIPKATLKDSGSYFCRGLVGSKNVSSETVNITITQGLAVPTISSFFPPGYQVSFCLVMVLLFAVDTGLYFSVKTNIRSSTRDWKDHKFKWRKDPQDK

SEQ ID NO: 5258 - protein, 502 aa, Artificial Sequence
  Synthetic Polypeptide
MALPVTALLLPLALLLHAARPDIVMTQTPLSLSVTPGQPASISCKSSQSLLDGDGKTYLNWLLQKPGQSPQRLIYLVSKLDSGVPDRFSGSGSGTDFTLKISRVEAEDVGVYYCWQGTHFPRTFGQGTKLEIKGGGGSGGGGSGGGGSQVQLVQSGAEVKKPGASVKVSCKASGYTFKDTYIHWVRQAPGQGLEWMGRIDPANGNTKYDPKFQGRVTMTRDTSISTAYMELSRLRSDDTAVYYCARRGGVDWGQGTLVTVSSTRGMRTEDLPKAVVFLEPQWYRVLEKDSVTLKCQGAYSPEDNSTQWFHNESLISSQASSYFIDAATVDDSGEYRCQTNLSTLSDPVQLEVHIGWLLLQAPRWVFKEEDPIHLRCHSWKNTALHKVTYLQNGKGRKYFHHNSDFYIPKATLKDSGSYFCRGLVGSKNVSSETVNITITQGLAVPTISSFFPPGYQVSFCLVMVLLFAVDTGLYFSVKTNIRSSTRDWKDHKFKWRKDPQDK

SEQ ID NO: 5259 - protein, 503 aa, Artificial Sequence
  Synthetic Polypeptide
MALPVTALLLPLALLLHAARPDIQMTQSPSSLSASVGDRVTITCKASQDVSTAVAWFQQKPGKAPKLLIYSPSYRYTGVPSRFSGSGSGTDFTLTISSLQPEDFTYYCQQLYSTPYTFGQGTKVEIKGGGGSGGGGSGGGGSEVQLVQSGAEVKKPGASVKVSCKASGYTFTDYYLDVVVRQAPGQGLEWIGRVNPYNGGTIYNQKFKGRVTLTRDTSTSTAYLELSSLRSEDTAVYYCARDHYRYDPLLDYWGQGTLVTVSSTRGMRTEDLPKAVVFLEPQWYRVLEKDSVTLKCQGAYSPEDNSTQWFHNESLISSQASSYFIDAATVDDSGEYRCQTNLSTLSDPVQLEVHIGWLLLQAPRWVFKEEDPIHLRCHSWKNTALHKVTYLQNGKGRKYFHHNSDFYIPKATLKDSGSYFCRGLVGSKNVSSETVNITITQGLAVPTISSFFPPGYQVSFCLVMVLLFAVDTGLYFSVKTNIRSSTRDWKDHKFKWRKDPQDK

SEQ ID NO: 5260 - protein, 509 aa, Artificial Sequence
  Synthetic Polypeptide
MALPVTALLLPLALLLHAARPDIQMTQSPSSLSASVGDRVTITCRASQSVSTSSYNYMHWYQQKPGKPPKLLIKYASNLESGVPSRFSGSGSGTDFTLTISSLQPEDFATYYCQHSWEIPLTFGQGTKVEIKGGGGSGGGGSGGGGSEVQLVQSGAEVKKPGASVKVSCKASGYSFTDYYMHWVRQAPGQGLEWIGRINPYNGAAFYSQNFKDRVTLTVDTSTSTAYLELSSLRSEDTAVYYCAIERGADLEGYAMDYWGQGTLVTVSSTRGMRTEDLPKAVVFLEPQWYRVLEKDSVTLKCQGAYSPEDNSTQWFHNESLISSQASSYFIDAATVDDSGEYRCQTNLSTLSDPVQLEVHIGWLLLQAPRWVFKEEDPIHLRCHSWKNTALHKVTYLQNGKGRKYFHHNSDFYIPKATLKDSGSYFCRGLVGSKNVSSETVNITITQGLAVPTISSFFPPGYQVSFCLVMVLLFAVDTGLYFSVKTNIRSSTRDWKDHKFKWRKDPQDK

SEQ ID NO: 5261 - protein, 507 aa, Artificial Sequence
  Synthetic Polypeptide
MALPVTALLLPLALLLHAARPEIVLTQSPATLSASPGERVTLTCRASSNVISSYVHWYQQKPGSSPRLFLYSTSNLASGVPSRFSGSGSGTDFTFTISSLEAEDAATYYCQQYSGYPLTFGQGTRLEIKGGGGSGGGGSGGGGSQVQLQESGPGLVKPSETLSLTCAVSGYSITSAYYWNWIRQPPGKGLEWIGYISYDGRNNYNPSLKNRITINPDTSKNQFSLQLNSVTPEDTAVYYCAREGDYDVGNYYAMDYWGQGTLVTVSSTRGMRTEDLPKAVVFLEPQWYRVLEKDSVTLKCQGAYSPEDNSTQWFHNESLISSQASSYFIDAATVDDSGEYRCQTNLSTLSDPVQLEVHIGWLLLQAPRWVFKEEDPIHLRCHSWKNTALHKVTYLQNGKGRKYFHHNSDFYIPKATLKDSGSYFCRGLVGSKNVSSETVNITITQGLAVPTISSFFPPGYQVSFCLVMVLLFAVDTGLYFSVKTNIRSSTRDWKDHKFKWRKDPQDK

SEQ ID NO: 5262 - protein, 507 aa, Artificial Sequence
  Synthetic Polypeptide
MALPVTALLLPLALLLHAARPEIVLTQSPATLSLSPGERATLSCRASSNVISSYVHWYQQKPGQAPRLLIYSTSNLASGIPARFSGSGSGTDFTLTISSLEPEDFAVYYCQQYSGYPLTFGQGTRLEIKGGGGSGGGGSGGGGSEVQLVESGGGLVQPGRSLRLSCAASGYSITSAYYWNWVRQAPGKGLEWVSYISYDGRNNYNPSLKNRFTISRDNAKKSLYLQMNSLRAEDTALYYCAKEGDYDVGNYYAMDYWGQGTTVTVSSTRGMRTEDLPKAVVFLEPQWYRVLEKDSVTLKCQGAYSPEDNSTQWFHNESLISSQASSYFIDAATVDDSGEYRCQTNLSTLSDPVQLEVHIGWLLLQAPRWVFKEEDPIHLRCHSWKNTALHKVTYLQNGKGRKYFHHNSDFYIPKATLKDSGSYFCRGLVGSKNVSSETVNITITQGLAVPTISSFFPPGYQVSFCLVMVLLFAVDTGLYFSVKTNIRSSTRDWKDHKFKWRKDPQDK

SEQ ID NO: 5263 - protein, 516 aa, Artificial Sequence
  Synthetic Polypeptide
MALPVTALLLPLALLLHAARPDVVMTQTPLSLPVSLGDQASISCRSSQSLVHSNGNTYLRWYLQKPGQSPKVLIYKVSNRVSGVPDRFSGSGSGTDFTLKINRVEAEDLGVYFCSQSTHVPWTFGGGTKLEIKSSADDAKKDAAKKDDAKKDDAKKDGGVKLDETGGGLVQPGGAMKLSCVTSGFTFGHYWMNWVRQSPEKGLEWVAQFRNKPYNYETYYSDSVKGRFTISRDDSKSSVYLQMNNLRVEDTGIYYCTGASYGMEYLGQGTSVTVSTTRGMRTEDLPKAVVFLEPQWYRVLEKDSVTLKCQGAYSPEDNSTQWFHNESLISSQASSYFIDAATVDDSGEYRCQTNLSTLSDPVQLEVHIGWLLLQAPRWVFKEEDPIHLRCHSWKNTALHKVTYLQNGKGRKYFHHNSDFYIPKATLKDSGSYFCRGLVGSKNVSSETVNITITQGLAVPTISSFFPPGYQVSFCLVMVLLFAVDTGLYFSVKTNIRSSTRDWKDHKFKWRKDPQDK

SEQ ID NO: 5264 - protein, 512 aa, Artificial Sequence
  Synthetic Polypeptide
MALPVTALLLPLALLLHAARPQVQLVESGGNLVQPGGSLRLSCAASGFTFGSFSMSWVRQAPGGGLEWVAGLSARSSLTHYADSVKGRFTISRDNAKNSVYLQMNSLRVEDTAVYYCARRSYDSSGYWGHFYSYMDVWGQGTLVTVSGGGGSGGGGSGGGGSSVLTQPSSVSAAPGQKVTISCSGSTSNIGNNYVSWYQQHPGKAPKLMIYDVSKRPSGVPDRFSGSKSGNSASLDISGLQSEDEADYYCAAWDDSLSEFLFGTGTKLTVLGTRGMRTEDLPKAVVFLEPQWYRVLEKDSVTLKCQGAYSPEDNSTQWFHNESLISSQASSYFIDAATVDDSGEYRCQTNLSTLSDPVQLEVHIGWLLLQAPRWVFKEEDPIHLRCHSWKNTALHKVTYLQNGKGRKYFHHNSDFYIPKATLKDSGSYFCRGLVGSKNVSSETVNITITQGLAVPTISSFFPPGYQVSFCLVMVLLFAVDTGLYFSVKTNIRSSTRDWKDHKFKWRKDPQDK

SEQ ID NO: 5265 - protein, 503 aa, Artificial Sequence
  Synthetic Polypeptide
MALPVTALLLPLALLLHAARPQSVVTQPPSVSGAPGQRVTISCTGSSSNIGAGYDVHWYQQLPGTAPKLLIYGNSNRPSGVPDRFSGSKSGTSASLAITGLQAEDEADYYCQSYDSSLSGSYVFGTGTKLTVLGGGGGSGGGGSGGGGSEVQLVETGGNLVQPGASLRLSCAASGFSFSGTAMHWVRQAPGKGLEWVSTISSTGRSTYYRDSVKGRFTISRDNSKNTLYLQMNSLRGEDTAVYYCARVSFDYWGQGTLVTVSSTRGMRTEDLPKAVVFLEPQWYRVLEKDSVTLKCQGAYSPEDNSTQWFHNESLISSQASSYFIDAATVDDSGEYRCQTNLSTLSDPVQLEVHIGWLLLQAPRWVFKEEDPIHLRCHSWKNTALHKVTYLQNGKGRKYFHHNSDFYIPKATLKDSGSYFCRGLVGSKNVSSETVNITITQGLAVPTISSFFPPGYQVSFCLVMVLLFAVDTGLYFSVKTNIRSSTRDWKDHKFKWRKDPQDK

SEQ ID NO: 5266 - protein, 505 aa, Artificial Sequence
  Synthetic Polypeptide
MALPVTALLLPLALLLHAARPQSVVTQPASVSGSPGQSITISCTGTSSDVGGYNYVSWYQQHPGKAPKLMIYDVSKRPSGVSNRFSGSKSGNTASLTISGLQAEDEADYYCSSYTSSSTLVFGGGTKLTVLGGGGGSGGGGSGGGGSEVQLVESGGAFVQPGGSLRLSCAASGFTFSSYAMTWVRQAPGKGLEWVSTISGRGRSTFYADSVKGRFTISRDNSKNTLYLQMNSLRAEDTAVYYCARYYHAGAFDLWGQGTLVTVSSTRGMRTEDLPKAVVFLEPQWYRVLEKDSVTLKCQGAYSPEDNSTQWFHNESLISSQASSYFIDAATVDDSGEYRCQTNLSTLSDPVQLEVHIGWLLLQAPRWVFKEEDPIHLRCHSWKNTALHKVTYLQNGKGRKYFHHNSDFYIPKATLKDSGSYFCRGLVGSKNVSSETVNITITQGLAVPTISSFFPPGYQVSFCLVMVLLFAVDTGLYFSVKTNIRSSTRDWKDHKFKWRKDPQDK

SEQ ID NO: 5267 - protein, 507 aa, Artificial Sequence
  Synthetic Polypeptide
MALPVTALLLPLALLLHAARPDVVMTQSPSSLSASVGDRVTITCQSSLDISHYLNWYQQKPGKAPKLLIYDASNLETGVPSRFSGSGSGTHFTFTISSLQPEDFATYYCQQYDNLPLTFGGGTKLEIKRGGGGSGGGGSGGGGSQVQLVQSGGGVVQPGGSLRVSCAASGVTLSDYGMHWVRQAPGKGLEWVAFIRNDGSDKYYADSVKGRFTISRDNSEKTVSLQMSSLRAEDTAVYYCAKNGESGPLDYWYLDLWGRGTLVTVSSTRGMRTEDLPKAVVFLEPQWYRVLEKDSVTLKCQGAYSPEDNSTQWFHNESLISSQASSYFIDAATVDDSGEYRCQTNLSTLSDPVQLEVHIGWLLLQAPRWVFKEEDPIHLRCHSWKNTALHKVTYLQNGKGRKYFHHNSDFYIPKATLKDSGSYFCRGLVGSKNVSSETVNITITQGLAVPTISSFFPPGYQVSFCLVMVLLFAVDTGLYFSVKTNIRSSTRDWKDHKFKWRKDPQDK

SEQ ID NO: 5268 - protein, 514 aa, Artificial Sequence
  Synthetic Polypeptide
MALPVTALLLPLALLLHAARPDVMLTQTPLSLPVSLGDQASISCRSSQSILHSTGDTYLEWYLQKPGQSPKLLINKVSNRLSGVPDRFSGSGSGTDFTLKISRVEAEDLGVYYCFQGSHVPWTFGGGTKLEIKRADAAPTVSIFPGGGGSGGGGSGGGGSQVKLQQSGPSLVKPGASVKMSCKASGYTFTDFYMKWVKQSHGKSLEWIGDINPNIGDTFYNQKFKGKATLTVDKSSSTAYMQLNSLTSEDSAVYFCSVGYFDVWGAGTTVTVSSTRGMRTEDLPKAVVFLEPQWYRVLEKDSVTLKCQGAYSPEDNSTQWFHNESLISSQASSYFIDAATVDDSGEYRCQTNLSTLSDPVQLEVHIGWLLLQAPRWVFKEEDPIHLRCHSWKNTALHKVTYLQNGKGRKYFHHNSDFYIPKATLKDSGSYFCRGLVGSKNVSSETVNITITQGLAVPTISSFFPPGYQVSFCLVMVLLFAVDTGLYFSVKTNIRSSTRDWKDHKFKWRKDPQDK

SEQ ID NO: 5269 - protein, 514 aa, Artificial Sequence
  Synthetic Polypeptide
MALPVTALLLPLALLLHAARPLPVLTQPPSVSVAPGKTARITCGGNNIGSKSVHWYQQKPGQAPVLVVYDDSDRPSGIPERFSGSNSGNTATLTISRVEAGDEADYYCQVWDSSSDYVVFGGGTKLTVLGGGGSGGGGSGGGGSEVQLVQSGAEVKKPGESLKISCKGSGYSFTSYWIGWVRQMPGKGLEWMGIIYPGDSDTRYSPSFQGQVTISADKSISTAYLQWSSLKASDTAMYYCARQVWGWQGGMYPRSNWWYNLDSWGQGTLVTVSSTRGMRTEDLPKAVVFLEPQWYRVLEKDSVTLKCQGAYSPEDNSTQWFHNESLISSQASSYFIDAATVDDSGEYRCQTNLSTLSDPVQLEVHIGWLLLQAPRWVFKEEDPIHLRCHSWKNTALHKVTYLQNGKGRKYFHHNSDFYIPKATLKDSGSYFCRGLVGSKNVSSETVNITITQGLAVPTISSFFPPGYQVSFCLVMVLLFAVDTGLYFSVKTNIRSSTRDWKDHKFKWRKDPQDK

SEQ ID NO: 5270 - protein, 507 aa, Artificial Sequence
  Synthetic Polypeptide
MALPVTALLLPLALLLHAARPELVMTQSPASLAVSLGQRATISCRASESVDSYGKSFMHWYQLKPGQPPKLLIYRASNLESGVPARFSGSGSRTDFTLTIDPVEADDAATYYCQQNNEDPWTFGGGTKLEIKGGGGSGGGGSGGGGSEVQLEQSGPELVKPGASVKMSCKASGYTFTNYYMKWVKQSHGKSLEWIGDLNPNNGDTFYNQKFKGKATLTVDKSSNTAYMQLNSLTSEDSAVYYCARTGRYEENAMDYWGQGTSVTVSSTRGMRTEDLPKAVVFLEPQWYRVLEKDSVTLKCQGAYSPEDNSTQWFHNESLISSQASSYFIDAATVDDSGEYRCQTNLSTLSDPVQLEVHIGWLLLQAPRWVFKEEDPIHLRCHSWKNTALHKVTYLQNGKGRKYFHHNSDFYIPKATLKDSGSYFCRGLVGSKNVSSETVNITITQGLAVPTISSFFPPGYQVSFCLVMVLLFAVDTGLYFSVKTNIRSSTRDWKDHKFKWRKDPQDK

SEQ ID NO: 5271 - protein, 505 aa, Artificial Sequence; identical to SEQ ID NO: 5244
  Synthetic Polypeptide

SEQ ID NO: 5272 - protein, 505 aa, Artificial Sequence; identical to SEQ ID NO: 5153
  Synthetic Polypeptide

SEQ ID NO: 5273 - protein, 501 aa, Artificial Sequence
  Synthetic Polypeptide
MALPVTALLLPLALLLHAARPDVVMTQSPSSLSASVGDRVTITCMASEDIYIRLAWYQQKPGNAPKLLIYAATSLETGVPSRFSGSGSGTDFTLTISSLQPEDFATYYCQQYWSSPWTFGGGTKVEIKGGGGSGGGGSGGGGSQVQLQESGPGLVKPSQTLSLTCTVSGYSITSDYTWNWIRQPPGNGLEWIGYITYSGSTSYNPSLKSRVLISVDTSKNQVSLKLSSVTAADTAVYYCARLGRRYTMDYWGQGTTVTVSSTRGMRTEDLPKAVVFLEPQWYRVLEKDSVTLKCQGAYSPEDNSTQWFHNESLISSQASSYFIDAATVDDSGEYRCQTNLSTLSDPVQLEVHIGWLLLQAPRWVFKEEDPIHLRCHSWKNTALHKVTYLQNGKGRKYFHHNSDFYIPKATLKDSGSYFCRGLVGSKNVSSETVNITITQGLAVPTISSFFPPGYQVSFCLVMVLLFAVDTGLYFSVKTNIRSSTRDWKDHKFKWRKDPQDK

SEQ ID NO: 5274 - protein, 506 aa, Artificial Sequence
  Synthetic Polypeptide
MALPVTALLLPLALLLHAARPEVQLVESGGGLVQPGRSLRLSCAASGFTFDDYAMHWVRQAPGKGLEWVSGISWNSGSIGYADSVKGRFTISRDNAKNSLYLQMNSLRAEDTALYYCAKDKGGGYYDFWSGSDYWGQGTLVTVSSGGGGSGGGGSGGGGSSSELTQDPAVSVALGQTVRITCQGDSLRSYYASWYQQKPGQAPVLVIYGKNNRPSGIPDRFSGSSSGNTASLTITGAQAEDEADYYCNSRDSSGWVFGGGTKLTVLTRGMRTEDLPKAVVFLEPQWYRVLEKDSVTLKCQGAYSPEDNSTQWFHNESLISSQASSYFIDAATVDDSGEYRCQTNLSTLSDPVQLEVHIGWLLLQAPRWVFKEEDPIHLRCHSWKNTALHKVTYLQNGKGRKYFHHNSDFYIPKATLKDSGSYFCRGLVGSKNVSSETVNITITQGLAVPTISSFFPPGYQVSFCLVMVLLFAVDTGLYFSVKTNIRSSTRDWKDHKFKWRKDPQDK

SEQ ID NO: 5275 - protein, 515 aa, Artificial Sequence
  Synthetic Polypeptide
MALPVTALLLPLALLLHAARPEVQLQQSGPGLVKPSQTLSLTCAISGDSVLSNSDTWNWIRQSPSRGLEWLGRTYHRSTWYDDYASSVRGRVSINVDTSKNQYSLQLNAVTPEDTGVYYCARDRLQDGNSWSDAFDVWGQGTMVTVSSGGGGSGGGGSGGGGSQSALTQPASVSGSPGQSITISCTGTSSDVGGYNYVSWYQQHPGKAPKLMIYDVSNRPSGVSNRFSGSKSGNTASLTISGLQAEDEADYYCSSYTSSSTLVYVFGTGTKVTVLTRGMRTEDLPKAVVFLEPQWYRVLEKDSVTLKCQGAYSPEDNSTQWFHNESLISSQASSYFIDAATVDDSGEYRCQTNLSTLSDPVQLEVHIGWLLLQAPRWVFKEEDPIHLRCHSWKNTALHKVTYLQNGKGRKYFHHNSDFYIPKATLKDSGSYFCRGLVGSKNVSSETVNITITQGLAVPTISSFFPPGYQVSFCLVMVLLFAVDTGLYFSVKTNIRSSTRDWKDHKFKWRKDPQDK

SEQ ID NO: 5276 - protein, 513 aa, Artificial Sequence
  Synthetic Polypeptide
MALPVTALLLPLALLLHAARPQVQLVQSGAEVKKPGASVKVSCKASGYTFTSYDINWVRQATGQGLEWMGWMNPNSGNTGYAQKFQGRVTMTRNTSISTAYMELSSLRSEDTAVYYCARGDSNYWSYYGMDVWGQGTLVTVSSGGGGSGGGGSGGGGSGGGGSQSVLTQPRSVSGSPGQSVTISCTGTSSDVGGYNYVSWYQQHPGEAPKLIIYDADKRPSGISNRFSSGKSGNTASLTISGLQVEDEADYYCCSYAGGSTWVFGGGTKVTVLTRGMRTEDLPKAVVFLEPQWYRVLEKDSVTLKCQGAYSPEDNSTQWFHNESLISSQASSYFIDAATVDDSGEYRCQTNLSTLSDPVQLEVHIGWLLLQAPRWVFKEEDPIHLRCHSWKNTALHKVTYLQNGKGRKYFHHNSDFYIPKATLKDSGSYFCRGLVGSKNVSSETVNITITQGLAVPTISSFFPPGYQVSFCLVMVLLFAVDTGLYFSVKTNIRSSTRDWKDHKFKWRKDPQDK

SEQ ID NO: 5277 - protein, 515 aa, Artificial Sequence
  Synthetic Polypeptide
MALPVTALLLPLALLLHAARPEVQLQQSGPGLVKPSQTLSLTCAISGDSVSSNSAAWNWIRQSPSRGLEWLGRTYYRSKWYSDYAVSVKSRITINPDTSKNQFSLQLNSVTPEDTAVYYCARDPYDFWSGYPDAFDIWGQGTMVTVSSGGGGSGGGGSGGGGSQSALTQPASVSGSPGQSITISCTGTSSDVGGYNYVSWYQQHPGKAPKVIISEVNNRPSGVSHRFSGSKSGNTASLTISGLQAEDEADYFCSSYTSGRTLYVFGTGSKVTVLGTRGMRTEDLPKAVVFLEPQWYRVLEKDSVTLKCQGAYSPEDNSTQWFHNESLISSQASSYFIDAATVDDSGEYRCQTNLSTLSDPVQLEVHIGWLLLQAPRWVFKEEDPIHLRCHSWKNTALHKVTYLQNGKGRKYFHHNSDFYIPKATLKDSGSYFCRGLVGSKNVSSETVNITITQGLAVPTISSFFPPGYQVSFCLVMVLLFAVDTGLYFSVKTNIRSSTRDWKDHKFKWRKDPQDK

SEQ ID NO: 5278 - protein, 514 aa, Artificial Sequence
  Synthetic Polypeptide
MALPVTALLLPLALLLHAARPEVQLQQSGPGLVKPSQTLSLTCAISGDSMLSNSDTWNWIRQSPSRGLEWLGRTYHRSTWYDDYASSVRGRVSINVDTSKNQYSLQLNAVTPEDTGVYYCARVRLQDGNSWSDAFDVWGQGTMVTVSSGGGGSGGGGSGGGGSQSALTQPASASGSPGQSVTISCTGTSSDVGGYNYVSWYQQHPGKAPKLMIYDVSNRPSGVSNRFSGSKSGNTASLTISGLQAEDEADYYCSSYTSSSTLYVFGTGTQLTVLTRGMRTEDLPKAVVFLEPQWYRVLEKDSVTLKCQGAYSPEDNSTQWFHNESLISSQASSYFIDAATVDDSGEYRCQTNLSTLSDPVQLEVHIGWLLLQAPRWVFKEEDPIHLRCHSWKNTALHKVTYLQNGKGRKYFHHNSDFYIPKATLKDSGSYFCRGLVGSKNVSSETVNITITQGLAVPTISSFFPPGYQVSFCLVMVLLFAVDTGLYFSVKTNIRSSTRDWKDHKFKWRKDPQDK

SEQ ID NO: 5279 - protein, 505 aa, Artificial Sequence
  Synthetic Polypeptide
MALPVTALLLPLALLLHAARPEIVLTQSPATLSLSPGERATLSCSASSSVSYMYWYQQKPGQAPRLLIYRTSNLASGIPARFSGSGSGTDFTLTISSLEPEDFAVYYCQQYHSYPTTFGQGTKVEIKRTVGGGGSGGGGSGGGGSEVQLVESGGGLVQPGGSLRLSCAASGFSFNTYAMNWVRQAPGKGLEWVSHIRSKSNNFATYYADSVKDRFTISRDNAKNSLYLQMNSLRAEDTAVYYCARQGGDFPMDYWGQGTLVTVSSTRGMRTEDLPKAVVFLEPQWYRVLEKDSVTLKCQGAYSPEDNSTQWFHNESLISSQASSYFIDAATVDDSGEYRCQTNLSTLSDPVQLEVHIGWLLLQAPRWVFKEEDPIHLRCHSWKNTALHKVTYLQNGKGRKYFHHNSDFYIPKATLKDSGSYFCRGLVGSKNVSSETVNITITQGLAVPTISSFFPPGYQVSFCLVMVLLFAVDTGLYFSVKTNIRSSTRDWKDHKFKWRKDPQDK

SEQ ID NO: 5280 - protein, 501 aa, Artificial Sequence
  Synthetic Polypeptide
MALPVTALLLPLALLLHAARPDVVMTQSPSSLSASVGDRVTITCKASEDIYIRLAWYQQKPGKAPKLLIYAATSLETGVPSRFSGSGSGTDFTLTISSLQPEDFATYYCQQYWTTPWTFGGGTKVEIKGGGGSGGGGSGGGGSQVQLQESGPGLVKPSQTLSLTCTVSGYSITIDYTWNWIRQPPGKGLEWIGYITYSGSTDYNPSLKSRVLISVDTSKNQVSLKLSSVTAADTAVYYCARLGRRYALDYWGQGTTVTVSSTRGMRTEDLPKAVVFLEPQWYRVLEKDSVTLKCQGAYSPEDNSTQWFHNESLISSQASSYFIDAATVDDSGEYRCQTNLSTLSDPVQLEVHIGWLLLQAPRWVFKEEDPIHLRCHSWKNTALHKVTYLQNGKGRKYFHHNSDFYIPKATLKDSGSYFCRGLVGSKNVSSETVNITITQGLAVPTISSFFPPGYQVSFCLVMVLLFAVDTGLYFSVKTNIRSSTRDWKDHKFKWRKDPQDK

SEQ ID NO: 5281 - protein, 506 aa, Artificial Sequence
  Synthetic Polypeptide
MALPVTALLLPLALLLHAARPDIQLTQSPSFLSASVGDRVTITCRASQGISTDLNWYQQKPGKAPKLLIYAASNLESGVPSRFSGSGSGTEFTLTISSLQPEDFATYYCQQSYNWPYTFGGGTKVEIKRGGGGSGGGGSGGGGSEVQLVESGGGLVKPGGSLRLSCAASGFTFSNFEMNWVRQAPGKGLEWVSGISSNGRYINYADSVKGRFTISRDNAKNSLYLQMNSLRAEDTAVYYCARVVDFDQDYNGFDYWGQGTLVTVSSTRGMRTEDLPKAVVFLEPQWYRVLEKDSVTLKCQGAYSPEDNSTQWFHNESLISSQASSYFIDAATVDDSGEYRCQTNLSTLSDPVQLEVHIGWLLLQAPRWVFKEEDPIHLRCHSWKNTALHKVTYLQNGKGRKYFHHNSDFYIPKATLKDSGSYFCRGLVGSKNVSSETVNITITQGLAVPTISSFFPPGYQVSFCLVMVLLFAVDTGLYFSVKTNIRSSTRDWKDHKFKWRKDPQDK

SEQ ID NO: 5282 - protein, 504 aa, Artificial Sequence
  Synthetic Polypeptide
MALPVTALLLPLALLLHAARPDIQLTQSPSFLSASVGDRVTITCSLSLGISTWRDWFPPRLGRGLEPLTYAASTLQSGVPSRFSGSGSGTEFTLTISSLQPEDFATYYCQQLNSYPLTFGGGTKVEIKRGGGGSGGGGSGGGGSEVQLVESGGGLVKPGGSLRLSCAASGFTFSTYGMSWVRQAPGKGLEWVAYINNGSGYIYYADSVKGRFTISRDNAKNSLYLQMNSLRAEDTAVYYCARGQWWSGGDFDYWGQGTLVTVSSTRGMRTEDLPKAVVFLEPQWYRVLEKDSVTLKCQGAYSPEDNSTQWFHNESLISSQASSYFIDAATVDDSGEYRCQTNLSTLSDPVQLEVHIGWLLLQAPRWVFKEEDPIHLRCHSWKNTALHKVTYLQNGKGRKYFHHNSDFYIPKATLKDSGSYFCRGLVGSKNVSSETVNITITQGLAVPTISSFFPPGYQVSFCLVMVLLFAVDTGLYFSVKTNIRSSTRDWKDHKFKWRKDPQDK

SEQ ID NO: 5283 - protein, 506 aa, Artificial Sequence
  Synthetic Polypeptide
MALPVTALLLPLALLLHAARPDIQMTQTTSSLSASLGDRVTISCRASQDISNYLNWYQQKPDGTVKLLIYYTSILHSGVPSRFSGSGSGTDYSLTISNLEQEDFATYFCQQGNTLPWTFGGGTKLEIKAGGGGSGGGGSGGGGSEVQLVESGGGLVKPGGSLKLSCAASGFAFSIYDMSWVRQTPEKRLEWVAYISSGGGTYYPDTVKGRFTISRDNAKNTLYLQMSSLKSEDTAMYYCARHSGYGTHWGVLFAYWGQGTLVTVSATRGMRTEDLPKAVVFLEPQWYRVLEKDSVTLKCQGAYSPEDNSTQWFHNESLISSQASSYFIDAATVDDSGEYRCQTNLSTLSDPVQLEVHIGWLLLQAPRWVFKEEDPIHLRCHSWKNTALHKVTYLQNGKGRKYFHHNSDFYIPKATLKDSGSYFCRGLVGSKNVSSETVNITITQGLAVPTISSFFPPGYQVSFCLVMVLLFAVDTGLYFSVKTNIRSSTRDWKDHKFKWRKDPQDK

SEQ ID NO: 5284 - protein, 516 aa, Artificial Sequence
  Synthetic Polypeptide
MALPVTALLLPLALLLHAARPDIVMTQSPDSLAVSLGERATINCKSSQSLLYRSNQKNYLAWYQQKPGQPPKLLIYWASTRESGVPDRFSGSGSGTDFTLTISSLQAEDVAVYYCQQYYNYPRTFGQGTKVEIKRTVGGGGSGGGGSGGGGSEVQLLESGGGLVQPGGSLRLSCAASGYSITSDYAWNWVRQAPGKGLEWVSYISNSGSTSYNPSLKSRFTISRDNSKNTLYLQMNSLRAEDTAVYYCAKERNYDYDDYYYAMDYWGQGTLVTVSSTRGMRTEDLPKAVVFLEPQWYRVLEKDSVTLKCQGAYSPEDNSTQWFHNESLISSQASSYFIDAATVDDSGEYRCQTNLSTLSDPVQLEVHIGWLLLQAPRWVFKEEDPIHLRCHSWKNTALHKVTYLQNGKGRKYFHHNSDFYIPKATLKDSGSYFCRGLVGSKNVSSETVNITITQGLAVPTISSFFPPGYQVSFCLVMVLLFAVDTGLYFSVKTNIRSSTRDWKDHKFKWRKDPQDK

SEQ ID NO: 5285 - protein, 509 aa, Artificial Sequence
  Synthetic Polypeptide
MALPVTALLLPLALLLHAARPDVVMTQSPLSLPVTLGQPASISCRSSQSLLHSSGNTYLEWYQQRPGQSPRPLIYKISTRFSGVPDRFSGSGSGTDFTLKISRVEAEDVGVYYCFQGSHVPYTFGGGTKVEIKRGGGGSGGGGSGGGGSQVQLVQSGAEVKKPGASVKVSCKASGLTIEDYYMHWVRQAPGQGLEWMGWIDPENGDTEYGPKFQGRVTMTRDTSINTAYMELSRLRSDDTAVYYCAVHNAHYGTWFAYWGQGTLVTVSSTRGMRTEDLPKAVVFLEPQWYRVLEKDSVTLKCQGAYSPEDNSTQWFHNESLISSQASSYFIDAATVDDSGEYRCQTNLSTLSDPVQLEVHIGWLLLQAPRWVFKEEDPIHLRCHSWKNTALHKVTYLQNGKGRKYFHHNSDFYIPKATLKDSGSYFCRGLVGSKNVSSETVNITITQGLAVPTISSFFPPGYQVSFCLVMVLLFAVDTGLYFSVKTNIRSSTRDWKDHKFKWRKDPQDK

SEQ ID NO: 5286 - protein, 501 aa, Artificial Sequence
  Synthetic Polypeptide
MALPVTALLLPLALLLHAARPDIQMTQSPSSLSASVGDRVTITCRASENIYSNLAWYQQKPGKAPKLLIYAATNLADGVPSRFSGSGSGTDFTLTISSLQPEDFATYYCQHFWGTPTFGQGTKVEIKRTVGGGGSGGGGSGGGGSEVQLVESGGGLVQPGGSLRLSCAASGFSLTNYGVHWVRQAPGKGLEWVSVIWSGGSTDYNAAFISRFTISADTSKNTAYLQMNSLRAEDTAVYYCARELIHAMDNWGQGTLVTVSSTRGMRTEDLPKAVVFLEPQWYRVLEKDSVTLKCQGAYSPEDNSTQWFHNESLISSQASSYFIDAATVDDSGEYRCQTNLSTLSDPVQLEVHIGWLLLQAPRWVFKEEDPIHLRCHSWKNTALHKVTYLQNGKGRKYFHHNSDFYIPKATLKDSGSYFCRGLVGSKNVSSETVNITITQGLAVPTISSFFPPGYQVSFCLVMVLLFAVDTGLYFSVKTNIRSSTRDWKDHKFKWRKDPQDK

SEQ ID NO: 5287 - protein, 508 aa, Artificial Sequence
  Synthetic Polypeptide
MALPVTALLLPLALLLHAARPDFVMTQSPLSLPVTPGEPASISCRSSQSIVHSNGNTYLEWYLQKPGQSPQLLIYKVSNRFSGVPDRFSGSGSGTDFTLKISRVEAEDVGVYYCFQGSHVPLTFGQGTKLEIKRGGGGSGGGGSGGGGSEVQLVESGAEVKKPGASVKVSCKASGYTFTSYWIHWVRQAPGQGLEWMGENDPSNGRTNYNEKFKNRVTLTVDTSISTAYMELSRLRSDDTAVYYCARGPNYFYSMDYWGQGTMVTVSSTRGMRTEDLPKAVVFLEPQWYRVLEKDSVTLKCQGAYSPEDNSTQWFHNESLISSQASSYFIDAATVDDSGEYRCQTNLSTLSDPVQLEVHIGWLLLQAPRWVFKEEDPIHLRCHSWKNTALHKVTYLQNGKGRKYFHHNSDFYIPKATLKDSGSYFCRGLVGSKNVSSETVNITITQGLAVPTISSFFPPGYQVSFCLVMVLLFAVDTGLYFSVKTNIRSSTRDWKDHKFKWRKDPQDK

SEQ ID NO: 5288 - protein, 501 aa, Artificial Sequence
  Synthetic Polypeptide
MALPVTALLLPLALLLHAARPDIQLTQSPSFLSASVGDRVTITCSARSSISFMYWYQQKPGKAPKLLIYDTSNLASGVPSRFSGSGSGTEFTLTISSLEAEDAATYYCQQWSSYPLTFGQGTKLEIKGGGGSGGGGSGGGGSQVQLVQSGAEVKKPGASVKVSCKASGYTFTGSWMNWVRQAPGQGLEWIGRIYPGDGETNYNGKFKDRVTITADKSTSTAYMELSSLRSEDTAVYYCARIYGNNVYFDVWGQGTTVTVSSTRGMRTEDLPKAVVFLEPQWYRVLEKDSVTLKCQGAYSPEDNSTQWFHNESLISSQASSYFIDAATVDDSGEYRCQTNLSTLSDPVQLEVHIGWLLLQAPRWVFKEEDPIHLRCHSWKNTALHKVTYLQNGKGRKYFHHNSDFYIPKATLKDSGSYFCRGLVGSKNVSSETVNITITQGLAVPTISSFFPPGYQVSFCLVMVLLFAVDTGLYFSVKTNIRSSTRDWKDHKFKWRKDPQDK

SEQ ID NO: 5289 - protein, 509 aa, Artificial Sequence
  Synthetic Polypeptide
MALPVTALLLPLALLLHAARPQLVLTQSPSASASLGSSVKLTCTLSSGHKTDTIDWYQQQPGKAPRYLMKLEGSGSYNKGSGVPDRFSGSSSGADWYLTISSLQSEDEADYYCGTDYPGNYLFGGGTQLTVLGGGGGSGGGGSGGGGSQEQLVESGGGLVQPGGSLRLSCAASGFTFSDYYMSWIRQAPGKGLEWVATIYPSSGKTYYADSAKGRLTISSDNAKDSLYLQMNSLRAEDTAVYYCTRDSYADDAALFDIWGQGTTVTVSSTRGMRTEDLPKAVVFLEPQWYRVLEKDSVTLKCQGAYSPEDNSTQWFHNESLISSQASSYFIDAATVDDSGEYRCQTNLSTLSDPVQLEVHIGWLLLQAPRWVFKEEDPIHLRCHSWKNTALHKVTYLQNGKGRKYFHHNSDFYIPKATLKDSGSYFCRGLVGSKNVSSETVNITITQGLAVPTISSFFPPGYQVSFCLVMVLLFAVDTGLYFSVKTNIRSSTRDWKDHKFKWRKDPQDK

SEQ ID NO: 5290 - protein, 504 aa, Artificial Sequence
  Synthetic Polypeptide
MALPVTALLLPLALLLHAARPDIVLTQSPPSLAMSLGKRATISCRASESVTILGSHLIHWYQQKPGQPPTLLIQLASNVQTGVPARFSGSGSRTDFTLTIDPVEEDDVAVYYCLQSRTIPRTFGGGTKLEIKGGGGSGGGGSGGGGSQIQLVQSGPELKKPGETVKISCKASGYTFTDYSINWVKRAPGKGLKWMGWINTETREPAYAYDFRGRFAFSLETSASTAYLQINNLKYEDTATYFCALDYSYAMDYWGQGTSVTVSSTRGMRTEDLPKAVVFLEPQWYRVLEKDSVTLKCQGAYSPEDNSTQWFHNESLISSQASSYFIDAATVDDSGEYRCQTNLSTLSDPVQLEVHIGWLLLQAPRWVFKEEDPIHLRCHSWKNTALHKVTYLQNGKGRKYFHHNSDFYIPKATLKDSGSYFCRGLVGSKNVSSETVNITITQGLAVPTISSFFPPGYQVSFCLVMVLLFAVDTGLYFSVKTNIRSSTRDWKDHKFKWRKDPQDK

SEQ ID NO: 5291 - protein, 508 aa, Artificial Sequence
  Synthetic Polypeptide
MALPVTALLLPLALLLHAARPQVQLQESGPGLVKPSQTLSLTCTVSGGSISSGGFYWSWIRQHPGKGLEWIGYIHHSGSTHYNPSLKSRVTISIDTSKNLFSLRLSSVTAADTAVYYCASLVYCGGDCYSGFDYWGQGTLVTVSSGGGGSGGGGSGGGGSDIQLTQSPSSLSASVGDRVSFTCQASQDINNFLNWYQQKPGKAPKLLIYDASNLETGVPSRFSGSGSGTDFTFTISSLQPEDIATYYCQQYGNLPFTFGGGTKVEIKRTRGMRTEDLPKAVVFLEPQWYRVLEKDSVTLKCQGAYSPEDNSTQWFHNESLISSQASSYFIDAATVDDSGEYRCQTNLSTLSDPVQLEVHIGWLLLQAPRWVFKEEDPIHLRCHSWKNTALHKVTYLQNGKGRKYFHHNSDFYIPKATLKDSGSYFCRGLVGSKNVSSETVNITITQGLAVPTISSFFPPGYQVSFCLVMVLLFAVDTGLYFSVKTNIRSSTRDWKDHKFKWRKDPQDK

SEQ ID NO: 5292 - protein, 506 aa, Artificial Sequence
  Synthetic Polypeptide
MALPVTALLLPLALLLHAARPQVQLQESGPGLVKPSETLSLTCTVSGGSISSYYWSWIRQPPGKGLEWIGYIYYSGSTNYNPSLKSRVTISVDTSKNQFSLKLSSVTAADTAVYYCVSLVYCGGDCYSGFDYWGQGTLVTVSSGGGGSGGGGSGGGGSDIQLTQSPSSLSASVGDRVSFTCQASQDINNFLNWYQQKPGKAPKLLIYDASNLETGVPSRFSGSGSGTDFTFTISSLQPEDIATYYCQQYGNLPFTFGGGTKVEIKRTRGMRTEDLPKAVVFLEPQWYRVLEKDSVTLKCQGAYSPEDNSTQWFHNESLISSQASSYFIDAATVDDSGEYRCQTNLSTLSDPVQLEVHIGWLLLQAPRWVFKEEDPIHLRCHSWKNTALHKVTYLQNGKGRKYFHHNSDFYIPKATLKDSGSYFCRGLVGSKNVSSETVNITITQGLAVPTISSFFPPGYQVSFCLVMVLLFAVDTGLYFSVKTNIRSSTRDWKDHKFKWRKDPQDK

SEQ ID NO: 5293 - protein, 511 aa, Artificial Sequence
  Synthetic Polypeptide
MALPVTALLLPLALLLHAARPQVTLKESGPVLVKPTETLTLTCTVSGFSLINARMGVSWIRQPPGKALEWLAHIFSNAEKSYRTSLKSRLTISKDTSKSQVVLTMTNMDPVDTATYYCARIPGYGGNGDYHYYGMDVWGQGTTVTVSSGGGGSGGGGSGGGGSDIQMTQSPSSLSASLGDRVTITCRASQGIRNDLGWYQQKPGKAPKRLIYASSTLQSGVPSRFSGSGSGTEFTLTISSLQPEDFATYYCLQHNNFPWTFGQGTKVEIKRTRGMRTEDLPKAVVFLEPQWYRVLEKDSVTLKCQGAYSPEDNSTQWFHNESLISSQASSYFIDAATVDDSGEYRCQTNLSTLSDPVQLEVHIGWLLLQAPRWVFKEEDPIHLRCHSWKNTALHKVTYLQNGKGRKYFHHNSDFYIPKATLKDSGSYFCRGLVGSKNVSSETVNITITQGLAVPTISSFFPPGYQVSFCLVMVLLFAVDTGLYFSVKTNIRSSTRDWKDHKFKWRKDPQDK

SEQ ID NO: 5294 - protein, 505 aa, Artificial Sequence
  Synthetic Polypeptide
MALPVTALLLPLALLLHAARPQIQLVESGGGVVQPGRSLRLSCVASGFTFKNYGMHWVRQAPGKGLEWVAVIWYDGSNEYYGDPVKGRFTISRDNSKNMLYLQMNSLRADDTAVYYCARSGIAVAGAFDYWGQGTLVTVSSGGGGSGGGGSGGGGSEIVLTQSPDTLSLSPGEKATLSCRASQSVSSSFLAWYQQKPGQAPSLLIYVASRRAAGIPDRFSGSGSGTDFTLTISRLEPEDFGMFYCQHYGRTPFTFGPGTKVDIKRTRGMRTEDLPKAVVFLEPQWYRVLEKDSVTLKCQGAYSPEDNSTQWFHNESLISSQASSYFIDAATVDDSGEYRCQTNLSTLSDPVQLEVHIGWLLLQAPRWVFKEEDPIHLRCHSWKNTALHKVTYLQNGKGRKYFHHNSDFYIPKATLKDSGSYFCRGLVGSKNVSSETVNITITQGLAVPTISSFFPPGYQVSFCLVMVLLFAVDTGLYFSVKTNIRSSTRDWKDHKFKWRKDPQDK

SEQ ID NO: 5295 - protein, 506 aa, Artificial Sequence
  Synthetic Polypeptide
MALPVTALLLPLALLLHAARPDIQLTQSPSFLSASVGDRVTITCRASQGISSYLAWYQQKPGKAPKLLIYAASTLQSGVPSRFSGSGSGTEFTLTISSLQPEDFATYYCQQVNSYPLTFGGGTKVEIKRGGGGSGGGGSGGGGSQLQLQESGPGLVKPSETLSLTCTVSGGSISSSTYYWGWIRQPPGKGLEWIGSIYFTGSTDYNPSLKSRVSISVDTSKNQFSLKLSSVTAADTAVYYCAKEDDSSGYYSFDYWGQGNLVTVSSTRGMRTEDLPKAVVFLEPQWYRVLEKDSVTLKCQGAYSPEDNSTQWFHNESLISSQASSYFIDAATVDDSGEYRCQTNLSTLSDPVQLEVHIGWLLLQAPRWVFKEEDPIHLRCHSWKNTALHKVTYLQNGKGRKYFHHNSDFYIPKATLKDSGSYFCRGLVGSKNVSSETVNITITQGLAVPTISSFFPPGYQVSFCLVMVLLFAVDTGLYFSVKTNIRSSTRDWKDHKFKWRKDPQDK

SEQ ID NO: 5296 - protein, 509 aa, Artificial Sequence
  Synthetic Polypeptide
MALPVTALLLPLALLLHAARPQSALTQPRSVSGSPGHSVTISCTGTSSDVGDYNYVSWYQQRPGKVPKLLIYDVSKRPSGVPDRFSGSKSGNTASLTISGLQAEDEAIYFCASYAGNYNVVFGGGTKLTVLGQGGGGSGGGGSGGGGSQVQLVQSGSELKKPGASVKVSCKASGYTFNTYAMNWVRQAPGQGLEWMGWINTNTGNPTYAQGFTGRFVFSLDTSVSTAYLQISSLKAEDTAVYYCARRYFDWLLGAFDIWGQGTMVTVSSTRGMRTEDLPKAVVFLEPQWYRVLEKDSVTLKCQGAYSPEDNSTQWFHNESLISSQASSYFIDAATVDDSGEYRCQTNLSTLSDPVQLEVHIGWLLLQAPRWVFKEEDPIHLRCHSWKNTALHKVTYLQNGKGRKYFHHNSDFYIPKATLKDSGSYFCRGLVGSKNVSSETVNITITQGLAVPTISSFFPPGYQVSFCLVMVLLFAVDTGLYFSVKTNIRSSTRDWKDHKFKWRKDPQDK

SEQ ID NO: 5297 - protein, 501 aa, Artificial Sequence
  Synthetic Polypeptide
MALPVTALLLPLALLLHAARPDIQMTQSPSSLSASVGDRVTITCSASQGINNYLNWYQQKPGKAPKLLIHYTSGLHAGVPSRFSGSGSGTDYTLTISSLQPEDVATYYCQQYSILPWTFGGGTKVEIKRGGGGSGGGGSGGGGSQVQLVQSGAEVKKPGSSVKVSCKASGYAFSSSWMNWVRQAPGQGLEWMGRIYPGDGNTHYAQKFQGRVTLTADKSTSTAYMELSSLRSEDTAVYYCGEGYLDPMDYWGQGTLVTVSSTRGMRTEDLPKAVVFLEPQWYRVLEKDSVTLKCQGAYSPEDNSTQWFHNESLISSQASSYFIDAATVDDSGEYRCQTNLSTLSDPVQLEVHIGWLLLQAPRWVFKEEDPIHLRCHSWKNTALHKVTYLQNGKGRKYFHHNSDFYIPKATLKDSGSYFCRGLVGSKNVSSETVNITITQGLAVPTISSFFPPGYQVSFCLVMVLLFAVDTGLYFSVKTNIRSSTRDWKDHKFKWRKDPQDK

SEQ ID NO: 5298 - protein, 504 aa, Artificial Sequence
  Synthetic Polypeptide
MALPVTALLLPLALLLHAARPEVQLVESGGGLVQPGGSLRLSCAASGYTFTTYWMHWVRQAPGKGLEWVGYIRPSTGYTEYNQKFKDRFTISADTSKNTAYLQMNSLRAEDTAVYYCARSRWLLDYWGQGTLVTVSGGGGSGGGGSGGGGSDIQMTQSPSSLSASVGDRVTITCKSSQSVLYSSNQKNYLAWFQQKPGKAPKLLIYWASTRESGVPSRFSGSGSGTDFTLTISSLQPEDFATYFCHQYLSSYTFGQGTKVEIKRTRGMRTEDLPKAVVFLEPQWYRVLEKDSVTLKCQGAYSPEDNSTQWFHNESLISSQASSYFIDAATVDDSGEYRCQTNLSTLSDPVQLEVHIGWLLLQAPRWVFKEEDPIHLRCHSWKNTALHKVTYLQNGKGRKYFHHNSDFYIPKATLKDSGSYFCRGLVGSKNVSSETVNITITQGLAVPTISSFFPPGYQVSFCLVMVLLFAVDTGLYFSVKTNIRSSTRDWKDHKFKWRKDPQDK

SEQ ID NO: 5299 - protein, 501 aa, Artificial Sequence
  Synthetic Polypeptide
MALPVTALLLPLALLLHAARPDIQMTQSPSSLSASVGDRVTITCRASQDISNYLNWYQQKPGKAPKLLIYYTSRLHSGVPSRFSGSGSGTDFTLTISSLQPEDFATYYCQQGNTLPYTFGQGTKVEIKRGGGGSGGGGSGGGGSEVQLVESGGGLVQPGGSLRLSCAASGFTFSDYFMSWVRQAPGKGLEWVATISNGGTYTYYPDSVKGRFTISRDNSKNTLYLQMNSLRAEDTAVYYCARFDGYIFDYWGQGTLVTVSSTRGMRTEDLPKAVVFLEPQWYRVLEKDSVTLKCQGAYSPEDNSTQWFHNESLISSQASSYFIDAATVDDSGEYRCQTNLSTLSDPVQLEVHIGWLLLQAPRWVFKEEDPIHLRCHSWKNTALHKVTYLQNGKGRKYFHHNSDFYIPKATLKDSGSYFCRGLVGSKNVSSETVNITITQGLAVPTISSFFPPGYQVSFCLVMVLLFAVDTGLYFSVKTNIRSSTRDWKDHKFKWRKDPQDK

SEQ ID NO: 5300 - protein, 508 aa, Artificial Sequence
  Synthetic Polypeptide
MALPVTALLLPLALLLHAARPDIQMTQSPSSLSASVGDRVTITCTASSRVSSSYLHWFQQKPGKAPKLLIYSTSNLASGVPSRFSGSGSGTDFTLTISSLQPEDFATYYCHQYHRSPYTFGQGTKVEIKRGGGGSGGGGSGGGGSEVQLVESGGGLVQPGGSLRLSCAASGYAFSNSWINWVRQAPGKGLEWVGQIYPGDYDTNYNGKFKGRFTISRDKSKNTAYLQMNSLRAEDTAVYYCARGGSIYYGNLGFFDVWGQGTLVTVSSTRGMRTEDLPKAVVFLEPQWYRVLEKDSVTLKCQGAYSPEDNSTQWFHNESLISSQASSYFIDAATVDDSGEYRCQTNLSTLSDPVQLEVHIGWLLLQAPRWVFKEEDPIHLRCHSWKNTALHKVTYLQNGKGRKYFHHNSDFYIPKATLKDSGSYFCRGLVGSKNVSSETVNITITQGLAVPTISSFFPPGYQVSFCLVMVLLFAVDTGLYFSVKTNIRSSTRDWKDHKFKWRKDPQDK

SEQ ID NO: 5301 - protein, 498 aa, Artificial Sequence
  Synthetic Polypeptide
MALPVTALLLPLALLLHAARPDIQMTQSPSSLSASVGDRVTITCSASSSVTYMYWYQQKPGKAPKLLIYDTSNLASGVPSRFSGSGSGTDYTLTISSLQPEDFATYYCQQWSNYPLTFGQGTKVEIKGGGGSGGGGSGGGGSQVQLVQSGAEVKKPGASVKVSCKASGYSFIEYTINWVRQAPGQGLEWIGNIDPYYGTTYYNQMFTGRATLTVDTSISTAYMELSRLRSDDTAVYYCARGSAWFPYWGQGTLVTVSSTRGMRTEDLPKAVVFLEPQWYRVLEKDSVTLKCQGAYSPEDNSTQWFHNESLISSQASSYFIDAATVDDSGEYRCQTNLSTLSDPVQLEVHIGWLLLQAPRWVFKEEDPIHLRCHSWKNTALHKVTYLQNGKGRKYFHHNSDFYIPKATLKDSGSYFCRGLVGSKNVSSETVNITITQGLAVPTISSFFPPGYQVSFCLVMVLLFAVDTGLYFSVKTNIRSSTRDWKDHKFKWRKDPQDK

SEQ ID NO: 5302 - protein, 498 aa, Artificial Sequence
  Synthetic Polypeptide
MALPVTALLLPLALLLHAARPEIVLTQSPSSLSASVGDRVTITCRASENIYSYLAWYQQKPGKAPKLLIYNTKTLGEGVPSRFSGSGSGTDFTLTISSLQPEDFATYYCQHHYGTPFTFGPGTKVDIKGGGGSGGGGSGGGGSQVQLVQSGAEVKKPGASVKVSCKASGYTFSDYWVHWVRQAPGQGLEWMGAIDGSDTFNDYSQKFKGRVTMTRDTSISTAYMELSRLRSDDTAVYYCARGGLLQYWGQGTLVTVSSTRGMRTEDLPKAVVFLEPQWYRVLEKDSVTLKCQGAYSPEDNSTQWFHNESLISSQASSYFIDAATVDDSGEYRCQTNLSTLSDPVQLEVHIGWLLLQAPRWVFKEEDPIHLRCHSWKNTALHKVTYLQNGKGRKYFHHNSDFYIPKATLKDSGSYFCRGLVGSKNVSSETVNITITQGLAVPTISSFFPPGYQVSFCLVMVLLFAVDTGLYFSVKTNIRSSTRDWKDHKFKWRKDPQDK

SEQ ID NO: 5303 - protein, 502 aa, Artificial Sequence
  Synthetic Polypeptide
MALPVTALLLPLALLLHAARPQVQLQQSGPELVKPGASVKISCKASGYAFSSSWMNWVKQRPGKGLEWIGRIYPGDEDTNYSGKFKDKATLTADKSSTTAYMQLSSLTSEDSAVYFCARSLLYGDYLDYWGQGTTLTVSSGGGGSGGGGSGGGGSQIVLTQSPAIMSASPGEKVTMTCSASSSVSYMHWYQQKSGTSPKRWIYDTSKLASGVPDRFSGSGSGTSYFLTINNMEAEDAATYYCQQWNINPLTFGAGTKLELKRTRGMRTEDLPKAVVFLEPQWYRVLEKDSVTLKCQGAYSPEDNSTQWFHNESLISSQASSYFIDAATVDDSGEYRCQTNLSTLSDPVQLEVHIGWLLLQAPRWVFKEEDPIHLRCHSWKNTALHKVTYLQNGKGRKYFHHNSDFYIPKATLKDSGSYFCRGLVGSKNVSSETVNITITQGLAVPTISSFFPPGYQVSFCLVMVLLFAVDTGLYFSVKTNIRSSTRDWKDHKFKWRKDPQDK

SEQ ID NO: 5304 - protein, 505 aa, Artificial Sequence
  Synthetic Polypeptide
MALPVTALLLPLALLLHAARPDIQMTQSSAYLSVSLGGRVTITCKASDHINNWLAWYQHKPGNAPRLLISGATTLETGVPSRFSGSGSGKDYTLSITSLQTEDVATYYCQQSWNTPWTFGGGTKLEIKRGGGGSGGGGSGGGGSQVQLQQSGAELVRPGSSVKISCKASGYAFSSYWVNWMKQRPGQGLEWIGQIYPGDGDTNYNGKFKGRATVTADKSSSTSYMQFSSLTSEDSAVYFCARSITTVVGCAMDYWGQGTSVTVSSTRGMRTEDLPKAVVFLEPQWYRVLEKDSVTLKCQGAYSPEDNSTQWFHNESLISSQASSYFIDAATVDDSGEYRCQTNLSTLSDPVQLEVHIGWLLLQAPRWVFKEEDPIHLRCHSWKNTALHKVTYLQNGKGRKYFHHNSDFYIPKATLKDSGSYFCRGLVGSKNVSSETVNITITQGLAVPTISSFFPPGYQVSFCLVMVLLFAVDTGLYFSVKTNIRSSTRDWKDHKFKWRKDPQDK

SEQ ID NO: 5305 - protein, 504 aa, Artificial Sequence
  Synthetic Polypeptide
MALPVTALLLPLALLLHAARPEVQLLESGGGLVQPGGSLRLSCAASGFTFSSYAMSWVRQAPGKGLEWVSVISGSGGRPNYADSVKGRFTISRDNSKNTLYLQMNSLRDEDTAVYYCAKVDYSNYLFFDYWGQGTLVTVSSGGGGSGGGGSGGGGSEIVLTQSPGTLSLSPGEGATLSCRAGQSVRSSYLGWYQQKPGQAPRLLIYGASSRATGIPDRFSGSGSGTDFTLTISRLEPEDFAVYYCQQYGYSPPTFGGGTKLEIKTRGMRTEDLPKAVVFLEPQWYRVLEKDSVTLKCQGAYSPEDNSTQWFHNESLISSQASSYFIDAATVDDSGEYRCQTNLSTLSDPVQLEVHIGWLLLQAPRWVFKEEDPIHLRCHSWKNTALHKVTYLQNGKGRKYFHHNSDFYIPKATLKDSGSYFCRGLVGSKNVSSETVNITITQGLAVPTISSFFPPGYQVSFCLVMVLLFAVDTGLYFSVKTNIRSSTRDWKDHKFKWRKDPQDK

SEQ ID NO: 5306 - protein, 507 aa, Artificial Sequence
  Synthetic Polypeptide
MALPVTALLLPLALLLHAARPDIVLTQSPPSLAMSLGKRATISCRASESVTILGSHLIHWYQQKPGQPPTLLIQLASNVQTGVPARFSGSGSRTDFTLTIDPVEEDDVAVYYCLQSRTIPRTFGGGTKLEIKGSTSGSGKPGSGEGSTKGQIQLVQSGPELKKPGETVKISCKASGYTFTDYSINWVKRAPGKGLKWMGWINTETREPAYAYDFRGRFAFSLETSASTAYLQINNLKYEDTATYFCALDYSYAMDYWGQGTSVTVSSTRGMRTEDLPKAVVFLEPQWYRVLEKDSVTLKCQGAYSPEDNSTQWFHNESLISSQASSYFIDAATVDDSGEYRCQTNLSTLSDPVQLEVHIGWLLLQAPRWVFKEEDPIHLRCHSWKNTALHKVTYLQNGKGRKYFHHNSDFYIPKATLKDSGSYFCRGLVGSKNVSSETVNITITQGLAVPTISSFFPPGYQVSFCLVMVLLFAVDTGLYFSVKTNIRSSTRDWKDHKFKWRKDPQDK

SEQ ID NO: 5307 - protein, 507 aa, Artificial Sequence
  Synthetic Polypeptide
MALPVTALLLPLALLLHAARPDIQMTQSPSSLSASVGDRVTITCRASSSVSYMHWYQQKPGKAPKLLIYATSNLASGVPSRFSGSGSGTDFTLTISSLQPEDFATYYCQQWTFNPPTFGQGTKLEIKRTVAAGGGGSGGGGSGGGGSQVQLVQSGAEVKKPGASVKVSCKASGYTFTSYNMHWVRQAPGQRLEWMGGIYPGNGDTSYNQKFKGRVTITRDTSASTAYMELSSLRSEDTAVYYCARYDYNYAMDYWGQGTLVTVSSASTRGMRTEDLPKAVVFLEPQWYRVLEKDSVTLKCQGAYSPEDNSTQWFHNESLISSQASSYFIDAATVDDSGEYRCQTNLSTLSDPVQLEVHIGWLLLQAPRWVFKEEDPIHLRCHSWKNTALHKVTYLQNGKGRKYFHHNSDFYIPKATLKDSGSYFCRGLVGSKNVSSETVNITITQGLAVPTISSFFPPGYQVSFCLVMVLLFAVDTGLYFSVKTNIRSSTRDWKDHKFKWRKDPQDK

SEQ ID NO: 5308 - protein, 502 aa, Artificial Sequence
  Synthetic Polypeptide
MALPVTALLLPLALLLHAARPEIVLTQSPGTLSLSPGERATLSCRASQSVSSSYLAWYQQKPGQAPRLLIYGASSRATGIPDRFSGSGSGTDFTLTISRLEPEDFAVYYCQQYHHSPLTFGGGTKVEIKRGGGGSGGGGSGGGGSEVQLVESGGGLVQPGGSLRLSCAASGFTFSGRSMNWVRQAPGKGLEWVSYISSDSRTIYYADSVKGRFTISRDNAKNSLYLQMNSLRAEDTAVYYCARGGHGYFDLWGRGTLVTVSSTRGMRTEDLPKAVVFLEPQWYRVLEKDSVTLKCQGAYSPEDNSTQWFHNESLISSQASSYFIDAATVDDSGEYRCQTNLSTLSDPVQLEVHIGWLLLQAPRWVFKEEDPIHLRCHSWKNTALHKVTYLQNGKGRKYFHHNSDFYIPKATLKDSGSYFCRGLVGSKNVSSETVNITITQGLAVPTISSFFPPGYQVSFCLVMVLLFAVDTGLYFSVKTNIRSSTRDWKDHKFKWRKDPQDK

SEQ ID NO: 5309 - protein, 505 aa, Artificial Sequence
  Synthetic Polypeptide
MALPVTALLLPLALLLHAARPEIVLTQSPGTLSLSPGERATLSCRASQSVSSDYLAWYQQKPGQAPRLLIYGASRRATGIPDRFSGSGSGTDFTLTISRLEPEDFAVYYCQQYVSYWTFGGGTKVEIKRGGGGSGGGGSGGGGSQVQLVESGGGVVQPGRSLRLSCAASGFTFSSYGMHWVRQAPGKGLEWVAGIWWDGSNEKYADSVKGRFTISRDNSKNTLYLQMNSLRAEDTAVYYCAKEAPYYAKDYMDVWGKGTTVTVSSTRGMRTEDLPKAVVFLEPQWYRVLEKDSVTLKCQGAYSPEDNSTQWFHNESLISSQASSYFIDAATVDDSGEYRCQTNLSTLSDPVQLEVHIGWLLLQAPRWVFKEEDPIHLRCHSWKNTALHKVTYLQNGKGRKYFHHNSDFYIPKATLKDSGSYFCRGLVGSKNVSSETVNITITQGLAVPTISSFFPPGYQVSFCLVMVLLFAVDTGLYFSVKTNIRSSTRDWKDHKFKWRKDPQDK

SEQ ID NO: 5310 - protein, 505 aa, Artificial Sequence
  Synthetic Polypeptide
MALPVTALLLPLALLLHAARPDIQMTQSPSSLSASVGDRVTITCRASQDVNTAVAWYQQKPGKAPKLLIYSASFLYSGVPSRFSGSRSGTDFTLTISSLQPEDFATYYCQQHYTTPPTFGQGTKVEIKRTGGGGSGGGGSGGGGSEVQLVESGGGLVQPGGSLRLSCAASGFNIKDTYIHWVRQAPGKGLEWVARIYPTNGYTRYADSVKGRFTISADTSKNTAYLQMNSLRAEDTAVYYCSRWGGWGFYAMDYWGQGTLVTVSSTRGMRTEDLPKAVVFLEPQWYRVLEKDSVTLKCQGAYSPEDNSTQWFHNESLISSQASSYFIDAATVDDSGEYRCQTNLSTLSDPVQLEVHIGWLLLQAPRWVFKEEDPIHLRCHSWKNTALHKVTYLQNGKGRKYFHHNSDFYIPKATLKDSGSYFCRGLVGSKNVSSETVNITITQGLAVPTISSFFPPGYQVSFCLVMVLLFAVDTGLYFSVKTNIRSSTRDWKDHKFKWRKDPQDK

SEQ ID NO: 5311 - protein, 500 aa, Artificial Sequence
  Synthetic Polypeptide
MALPVTALLLPLALLLHAARPQVQLVESGGGLVKPGGSLRLSCAASGFTFSDYYMTWIRQAPGKGLEWISYISSSGSTIYYADSVKGRFTISRDNAKNSLYLQMNSLRAEDTAVYYCARDRNSHFDYWGQGTLVTVSSGGGGSGGGGSGGGGSDIQMTQSPSSVSASVGDRVTITCRASQGITRWLAWYQQKPGKAPKLLIYAASVLQSGVPSRFSGSGSGTDFTLTISSLQPEDFATYYCQQSNSFPRTFGQGTKVEIKTRGMRTEDLPKAVVFLEPQWYRVLEKDSVTLKCQGAYSPEDNSTQWFHNESLISSQASSYFIDAATVDDSGEYRCQTNLSTLSDPVQLEVHIGWLLLQAPRWVFKEEDPIHLRCHSWKNTALHKVTYLQNGKGRKYFHHNSDFYIPKATLKDSGSYFCRGLVGSKNVSSETVNITITQGLAVPTISSFFPPGYQVSFCLVMVLLFAVDTGLYFSVKTNIRSSTRDWKDHKFKWRKDPQDK

SEQ ID NO: 5312 - protein, 500 aa, Artificial Sequence
  Synthetic Polypeptide
MALPVTALLLPLALLLHAARPQVQLVESGGGLVKPGGSLRLSCAASGFTFSDHYMSWIRQAPGKGLEWFSYISSSGGIIYYADSVKGRFTISRDNAKNSLYLQMNSLRAEDTAVYYCARDVGSHFDYWGQGTLVTVSSGGGGSGGGGSGGGGSDIQMTQSPSSVSASVGDRVTITCRASQDISRWLAWYQQKPGKAPKLLISAASRLQSGVPSRFSGSGSGTDFTLTISSLQPEDFAIYYCQQAKSFPRTFGQGTKVEIKTRGMRTEDLPKAVVFLEPQWYRVLEKDSVTLKCQGAYSPEDNSTQWFHNESLISSQASSYFIDAATVDDSGEYRCQTNLSTLSDPVQLEVHIGWLLLQAPRWVFKEEDPIHLRCHSWKNTALHKVTYLQNGKGRKYFHHNSDFYIPKATLKDSGSYFCRGLVGSKNVSSETVNITITQGLAVPTISSFFPPGYQVSFCLVMVLLFAVDTGLYFSVKTNIRSSTRDWKDHKFKWRKDPQDK

SEQ ID NO: 5313 - protein, 512 aa, Artificial Sequence
  Synthetic Polypeptide
MALPVTALLLPLALLLHAARPQVQLVESGGGVVQSGRSLRLSCAASGFTFRNYGMHWVRQAPGKGLEWVAVIWYDGSDKYYADSVRGRFTISRDNSKNTLYLQMNSLRAEDTAVYYCARDGYDILTGNPRDFDYWGQGTLVTVSSGGGGSGGGGSGGGGSDTVMTQTPLSSHVTLGQPASISCRSSQSLVHSDGNTYLSWLQQRPGQPPRLLIYRISRRFSGVPDRFSGSGAGTDFTLEISRVEAEDVGVYYCMQSTHVPRTFGQGTKVEIKTRGMRTEDLPKAVVFLEPQWYRVLEKDSVTLKCQGAYSPEDNSTQWFHNESLISSQASSYFIDAATVDDSGEYRCQTNLSTLSDPVQLEVHIGWLLLQAPRWVFKEEDPIHLRCHSWKNTALHKVTYLQNGKGRKYFHHNSDFYIPKATLKDSGSYFCRGLVGSKNVSSETVNITITQGLAVPTISSFFPPGYQVSFCLVMVLLFAVDTGLYFSVKTNIRSSTRDWKDHKFKWRKDPQDK

SEQ ID NO: 5314 - protein, 505 aa, Artificial Sequence
  Synthetic Polypeptide
MALPVTALLLPLALLLHAARPEVQLVESGGGLVQPGGSLRLSCAASGFPFSSYDMHWVRQATGKGLEWVSAIGTAGATYYPGSVKGRFTISRENAKNSLYLQMNSLRAGDTAVYYCARGDYVWGTYRPLFDYWGQGTLVTVSSGGGGSGGGGSGGGGSDIQLTQSPSFLSASVGDRVTITCWASQGINNYLAWYQQKPGKAPKLLIYAASTLQTGVPSRFSGSGSGTEFTLTISSLQPEDFATYYCQQLNSYPLTFGGGTKVEIKTRGMRTEDLPKAVVFLEPQWYRVLEKDSVTLKCQGAYSPEDNSTQWFHNESLISSQASSYFIDAATVDDSGEYRCQTNLSTLSDPVQLEVHIGWLLLQAPRWVFKEEDPIHLRCHSWKNTALHKVTYLQNGKGRKYFHHNSDFYIPKATLKDSGSYFCRGLVGSKNVSSETVNITITQGLAVPTISSFFPPGYQVSFCLVMVLLFAVDTGLYFSVKTNIRSSTRDWKDHKFKWRKDPQDK

SEQ ID NO: 5315 - protein, 502 aa, Artificial Sequence
  Synthetic Polypeptide
MALPVTALLLPLALLLHAARPQVQLQESGPGLVKPSETLSLTCTVSGASISSFYWSWIRQPPGKGLEWIGYIYYSGTTNYNPSLKSRVTISVDTSKNQFSLKLSSVTAADTAVYYCARIAVAGFFFDYWGQGTLVTVSSGGGGSGGGGSGGGGSEIVLTQSPGTLSLSPGERATLSCRASQSVNKNYLAWYQQKPGQAPRLLIYGASSRATGIPDRFSGSGSGTDFTLTISRLEPEDFAVYYCQQYDRSPLTFGGGTKVEIKTRGMRTEDLPKAVVFLEPQWYRVLEKDSVTLKCQGAYSPEDNSTQWFHNESLISSQASSYFIDAATVDDSGEYRCQTNLSTLSDPVQLEVHIGWLLLQAPRWVFKEEDPIHLRCHSWKNTALHKVTYLQNGKGRKYFHHNSDFYIPKATLKDSGSYFCRGLVGSKNVSSETVNITITQGLAVPTISSFFPPGYQVSFCLVMVLLFAVDTGLYFSVKTNIRSSTRDWKDHKFKWRKDPQDK

SEQ ID NO: 5316 - protein, 511 aa, Artificial Sequence
  Synthetic Polypeptide
MALPVTALLLPLALLLHAARPQVQLVQSGAEVKKPGASVKVSCKASGYTFTNYYMHWVRQAPGLGLEWMGIINPSDGSTSYAQKFQGRVTMTRDTSTNTVYMDLSSLRSEDTAVYYCARGGNSAFYSYYDMDVWGQGTTVTVSSGGGGSGGGGSGGGGSDVVMTQTPLSLPVTLGQPASISCRSSQSLVYRDGNTYLSWFQQRPGQSPRRLIYKVSNWQSGVPDRFSGGGSGTDFTLKISRVEAEDVGVYYCMQGTHWPPTFGQGTKVEIKTRGMRTEDLPKAVVFLEPQWYRVLEKDSVTLKCQGAYSPEDNSTQWFHNESLISSQASSYFIDAATVDDSGEYRCQTNLSTLSDPVQLEVHIGWLLLQAPRWVFKEEDPIHLRCHSWKNTALHKVTYLQNGKGRKYFHHNSDFYIPKATLKDSGSYFCRGLVGSKNVSSETVNITITQGLAVPTISSFFPPGYQVSFCLVMVLLFAVDTGLYFSVKTNIRSSTRDWKDHKFKWRKDPQDK

SEQ ID NO: 5317 - protein, 498 aa, Artificial Sequence
  Synthetic Polypeptide
MALPVTALLLPLALLLHAARPQVQLQQSGPELVKPGASVRISCKASGYTFTTYYIHWVKQRPGQGLEWIGWIYPGNVNTNYNEKFKGKATLTADKSSSTAYMQLTSLTSEDSAVYFCARGVYYFDYWGQGTILTVSSGGGGSGGGGSGGGGSIVMTQTPKFLLVSAGDRVTITCKASQSVNNDVSWFQQKPGQSPTLLIYYASNRYTGVPDRFTGSGYGTDFTFTISTVQAEDLAVYFCQQDYSSPYTFGGGTKLEIKTRGMRTEDLPKAVVFLEPQWYRVLEKDSVTLKCQGAYSPEDNSTQWFHNESLISSQASSYFIDAATVDDSGEYRCQTNLSTLSDPVQLEVHIGWLLLQAPRWVFKEEDPIHLRCHSWKNTALHKVTYLQNGKGRKYFHHNSDFYIPKATLKDSGSYFCRGLVGSKNVSSETVNITITQGLAVPTISSFFPPGYQVSFCLVMVLLFAVDTGLYFSVKTNIRSSTRDWKDHKFKWRKDPQDK

SEQ ID NO: 5318 - protein, 501 aa, Artificial Sequence
  Synthetic Polypeptide
MALPVTALLLPLALLLHAARPQVQLQESGPGLVKPSQTLSLTCTVSGGSINNNNYYWTWIRQHPGKGLEWIGYIYYSGSTFYNPSLKSRVTISVDTSKTQFSLKLSSVTAADTAVYYCAREDTMTGLDVWGQGTTVTVSSGGGGSGGGGSGGGGSDIQMTQSPSSLSASVGDRVTITCRASQSINNYLNWYQQKPGKAPTLLIYAASSLQSGVPSRFSGSRSGTDFTLTISSLQPEDFAAYFCQQTYSNPTFGQGTKVEVKTRGMRTEDLPKAVVFLEPQWYRVLEKDSVTLKCQGAYSPEDNSTQWFHNESLISSQASSYFIDAATVDDSGEYRCQTNLSTLSDPVQLEVHIGWLLLQAPRWVFKEEDPIHLRCHSWKNTALHKVTYLQNGKGRKYFHHNSDFYIPKATLKDSGSYFCRGLVGSKNVSSETVNITITQGLAVPTISSFFPPGYQVSFCLVMVLLFAVDTGLYFSVKTNIRSSTRDWKDHKFKWRKDPQDK

SEQ ID NO: 5319 - protein, 506 aa, Artificial Sequence
  Synthetic Polypeptide
MALPVTALLLPLALLLHAARPSYELTQPPSVSVSPGQTASITCSGDKLGDKYASWYQQKPGQSPVLVIYQDNRRPSGIPERFSGSNSGNTATLTISGTQAMDEADYYCQAWDSDTYVFGTGTKVTVLGQGGGGSGGGGSGGGGSEVQLVQSGAEVKKPGASVKVSCKASGDTFKRYYVHWVRQAPGQGLEWMGIINPSGVSTTYAQKFQGRVTMTRDTSTSTVYMELSSLRSEDTAVYYCAEVRGSGFNYFGMDVWGQGTLVTVSSTRGMRTEDLPKAVVFLEPQWYRVLEKDSVTLKCQGAYSPEDNSTQWFHNESLISSQASSYFIDAATVDDSGEYRCQTNLSTLSDPVQLEVHIGWLLLQAPRWVFKEEDPIHLRCHSWKNTALHKVTYLQNGKGRKYFHHNSDFYIPKATLKDSGSYFCRGLVGSKNVSSETVNITITQGLAVPTISSFFPPGYQVSFCLVMVLLFAVDTGLYFSVKTNIRSSTRDWKDHKFKWRKDPQDK

SEQ ID NO: 5320 - protein, 505 aa, Artificial Sequence
  Synthetic Polypeptide
MALPVTALLLPLALLLHAARPEVQLLESGGGLVQPGGSLRLSCAASGFTFSSYAMSWVRQAPGKGLEVVVSAISGGGGRTYYADSVKGRFTISRDNSKNTLYLQMNSLRAEDTAVYYCAREEMAFRAYRFDIWGQGTLVTVSSGGGGSGGGGSGGGGSDIQMTQSPSSLSASVGDRVTITCRASQSISSYLNWYQQKPGKAPKLLIYAASSLQSGVPSRFSGSGSGTDFTLTISSLQPEDFATYYCQQSYITPLTFGGGTKVEIKTRGMRTEDLPKAVVFLEPQWYRVLEKDSVTLKCQGAYSPEDNSTQWFHNESLISSQASSYFIDAATVDDSGEYRCQTNLSTLSDPVQLEVHIGWLLLQAPRWVFKEEDPIHLRCHSWKNTALHKVTYLQNGKGRKYFHHNSDFYIPKATLKDSGSYFCRGLVGSKNVSSETVNITITQGLAVPTISSFFPPGYQVSFCLVMVLLFAVDTGLYFSVKTNIRSSTRDWKDHKFKWRKDPQDK

SEQ ID NO: 5321 - protein, 513 aa, Artificial Sequence
  Synthetic Polypeptide
MALPVTALLLPLALLLHAARPDIVLTQSPASLAVSLGQGATISCRASKSVSTSGYTYMHWYQQKPGQPPKLLIYLASNLESGVPARFSGSGSGTDFTLNIHPVEEEDAATYYCQHSGELPPSFGGGTKLEIKRAGGGGSGGGGSGGGGSEVQLVESGGDLVKPGGSLKLSCAVSGFTFSSYGMSWVRQTPDKRLEWVATVSSGGTYTYYPDSVKGRFTISRDNAKNTLYLQMSSLKSEDSAMYYCARHRGNYYATYYYAMDYWGQGTSVTVSSTRGMRTEDLPKAVVFLEPQWYRVLEKDSVTLKCQGAYSPEDNSTQWFHNESLISSQASSYFIDAATVDDSGEYRCQTNLSTLSDPVQLEVHIGWLLLQAPRWVFKEEDPIHLRCHSWKNTALHKVTYLQNGKGRKYFHHNSDFYIPKATLKDSGSYFCRGLVGSKNVSSETVNITITQGLAVPTISSFFPPGYQVSFCLVMVLLFAVDTGLYFSVKTNIRSSTRDWKDHKFKWRKDPQDK

SEQ ID NO: 5322 - protein, 507 aa, Artificial Sequence
  Synthetic Polypeptide
MALPVTALLLPLALLLHAARPDIQMTQSPSSLSASVGDRVTITCSASQGIRNYLNWYQQKPGKVPKLLIYYTSRLHSGVPSRFSGSGSGTDFTLTISSLQPEDVATYYCQQYGKLPYTFGQGTKLEIKRTVAAGGGGSGGGGSGGGGSEVQLVESGGGLVQPGGSLRLSCAASGFTFSDAWMDWVRQAPGKGLEWVGEIRSKVNNHETYYAESVKGRFTISRDDSKNSLYLQMNSLKTEDTAVYYCARNDYFDYWGQGTTVTVSSASTRGMRTEDLPKAVVFLEPQWYRVLEKDSVTLKCQGAYSPEDNSTQWFHNESLISSQASSYFIDAATVDDSGEYRCQTNLSTLSDPVQLEVHIGWLLLQAPRWVFKEEDPIHLRCHSWKNTALHKVTYLQNGKGRKYFHHNSDFYIPKATLKDSGSYFCRGLVGSKNVSSETVNITITQGLAVPTISSFFPPGYQVSFCLVMVLLFAVDTGLYFSVKTNIRSSTRDWKDHKFKWRKDPQDK

SEQ ID NO: 5323 - protein, 515 aa, Artificial Sequence
  Synthetic Polypeptide
MALPVTALLLPLALLLHAARPEVQLQESGAEVKKPGSSVKVSCKASGFNIKDTYMHWVRQAPGQGLEWMGRIDPANGNSKYVPKFQGRVTITADESTSTAYMELSSLRSEDTAVYYCAPFGYYVSDYAMAYWGQGTTVTVSSASGGGGSGGGGSGGGGSDIVMTQSPDSLAVSLGERATINCRAGESVDIFGVGFLHWYQQKPGQPPKLLIYRASNLESGVPDRFSGSGSGTDFTLTIRPLQAEDVAVYYCQQTNEDPYTFGQGTKLEIKRTVAATRGMRTEDLPKAVVFLEPQWYRVLEKDSVTLKCQGAYSPEDNSTQWFHNESLISSQASSYFIDAATVDDSGEYRCQTNLSTLSDPVQLEVHIGWLLLQAPRWVFKEEDPIHLRCHSWKNTALHKVTYLQNGKGRKYFHHNSDFYIPKATLKDSGSYFCRGLVGSKNVSSETVNITITQGLAVPTISSFFPPGYQVSFCLVMVLLFAVDTGLYFSVKTNIRSSTRDWKDHKFKWRKDPQDK

SEQ ID NO: 5324 - protein, 508 aa, Artificial Sequence
  Synthetic Polypeptide
MALPVTALLLPLALLLHAARPQVQLVQSGAEVKKPGSSVKVSCKASGGTFSSYAISWVRQAPGQGLEWMGLIIPRYGKARYAQKFQGRVTITADESTSTAYMELSSLRSEDTAVYYCARNWPYYYMDFWGQGTLVTVSSASGGGGSGGGGSGGGGSDIVLTQSPATLSLSPGERATLSCRASQNIVFNLAWYQQKPGQAPRLLIYDASNRATGVPARFSGSGSGTDFTLTISSLEPEDFAVYYCQQKKSMPLTFGQGTKVEIKRTVAATRGMRTEDLPKAVVFLEPQWYRVLEKDSVTLKCQGAYSPEDNSTQWFHNESLISSQASSYFIDAATVDDSGEYRCQTNLSTLSDPVQLEVHIGWLLLQAPRWVFKEEDPIHLRCHSWKNTALHKVTYLQNGKGRKYFHHNSDFYIPKATLKDSGSYFCRGLVGSKNVSSETVNITITQGLAVPTISSFFPPGYQVSFCLVMVLLFAVDTGLYFSVKTNIRSSTRDWKDHKFKWRKDPQDK

SEQ ID NO: 5325 - protein, 511 aa, Artificial Sequence
  Synthetic Polypeptide
MALPVTALLLPLALLLHAARPEVQLVESGGGLVKPGGSLRLSCAASGFTFSNAWMSWVRQAPGKGLEWVGRIKSKTEGGTTDYAAPVKGRFTISRDDSKNTLYLQMNSLKTEDTAVYYCTTPYEWSWYDYWGQGTLVTVSSASGGGGSGGGGSGGGGSQTVVTQEPSLTVSPGGTVTLTCGSSTGAVTTSNYANWVQQKPGQAPRGLIGGTNKRAPGTPARFSGSLLGGKAALTLSGVQPEDEAEYYCALWYSNLWVFGGGTKLTVLTVAATRGMRTEDLPKAVVFLEPQWYRVLEKDSVTLKCQGAYSPEDNSTQWFHNESLISSQASSYFIDAATVDDSGEYRCQTNLSTLSDPVQLEVHIGWLLLQAPRWVFKEEDPIHLRCHSWKNTALHKVTYLQNGKGRKYFHHNSDFYIPKATLKDSGSYFCRGLVGSKNVSSETVNITITQGLAVPTISSFFPPGYQVSFCLVMVLLFAVDTGLYFSVKTNIRSSTRDWKDHKFKWRKDPQDK

SEQ ID NO: 5326 - protein, 511 aa, Artificial Sequence
  Synthetic Polypeptide
MALPVTALLLPLALLLHAARPQVQLVQSGAEVKKPGASVKVSCKASGYTFTSYYMHWVRQAPGQGLEWMGIINPSGGSTSYAQKFQGRVTMTHDTSTSTVYMELSSLRSEDTAVYYCARSFFTGFHLDYWGQGTLVTVSSASGGGGSGGGGSGGGGSEIVLTQSPGTLSLSPGERATLSCRASQSVSSSYLAWYQQKPGQAPRLLIYGASSRATGIPDRFSGSGSGTDFTLTISRLEPEDFAVYYCQQYTNEHYYTFGQGTKVEIKRTVAATRGMRTEDLPKAVVFLEPQWYRVLEKDSVTLKCQGAYSPEDNSTQWFHNESLISSQASSYFIDAATVDDSGEYRCQTNLSTLSDPVQLEVHIGWLLLQAPRWVFKEEDPIHLRCHSWKNTALHKVTYLQNGKGRKYFHHNSDFYIPKATLKDSGSYFCRGLVGSKNVSSETVNITITQGLAVPTISSFFPPGYQVSFCLVMVLLFAVDTGLYFSVKTNIRSSTRDWKDHKFKWRKDPQDK

SEQ ID NO: 5327 - protein, 517 aa, Artificial Sequence
  Synthetic Polypeptide
MALPVTALLLPLALLLHAARPEIVLTQSPATLSLSPGERATLSCSVSSSISSSNLHWYQQKPGQAPRLLIYGTSNLASGIPARFSGSGSGTDFTLTISSLEPEDFAVYYCQQWSSYPHTFGGGTKVEIKRTVAAGGGGSGGGGSGGGGSQVQLVQSGAEVKKPGASVKVSCKASGYTFTNYLIEWVRQAPGQGLEWMGLINPGSGGTNYNEKFKGRVTMTTDTSTSTAYMELRSLRSDDTAVYYCARRSPLGSWIYYAYDGVAYWGQGTLVTVSSASTRGMRTEDLPKAVVFLEPQWYRVLEKDSVTLKCQGAYSPEDNSTQWFHNESLISSQASSYFIDAATVDDSGEYRCQTNLSTLSDPVQLEVHIGWLLLQAPRWVFKEEDPIHLRCHSWKNTALHKVTYLQNGKGRKYFHHNSDFYIPKATLKDSGSYFCRGLVGSKNVSSETVNITITQGLAVPTISSFFPPGYQVSFCLVMVLLFAVDTGLYFSVKTNIRSSTRDWKDHKFKWRKDPQDK

SEQ ID NO: 5328 - protein, 502 aa, Artificial Sequence
  Synthetic Polypeptide
MALPVTALLLPLALLLHAARPDIQMTQSPSSLSASVGDRVTITCKAGQNVGTSVAWYQQKPGKAPKLLIYSASYRYSGVPSRFSGSGSGTDFTLTISSLQPEDFATYYCQQYITYPYTFGQGTKVEIKRTVAAGGGGSGGGGSGGGGSEVQLVESGGGLVQPGGSLRLSCAASGFTFSRYWMSWVRQAPGKGLEWVAEINPDSSTIQYTPSLKARFTLSVDRSKNTLYLQMNSLRAEDTAVYYCARPAYWGQGTLVTVSSASTRGMRTEDLPKAVVFLEPQWYRVLEKDSVTLKCQGAYSPEDNSTQWFHNESLISSQASSYFIDAATVDDSGEYRCQTNLSTLSDPVQLEVHIGWLLLQAPRWVFKEEDPIHLRCHSWKNTALHKVTYLQNGKGRKYFHHNSDFYIPKATLKDSGSYFCRGLVGSKNVSSETVNITITQGLAVPTISSFFPPGYQVSFCLVMVLLFAVDTGLYFSVKTNIRSSTRDWKDHKFKWRKDPQDK

SEQ ID NO: 5329 - protein, 509 aa, Artificial Sequence
  Synthetic Polypeptide
MALPVTALLLPLALLLHAARPDIQMTQSPSSLSASVGDRVTITCSASQDIGNFLNWYQQKPGKAPKLLIYYTSSLYSGVPSRFSGSGSGTDFTLTISSLQPEDFATYYCQQYSKLPLTFGQGTKLEIKRTVAAGGGGSGGGGSGGGGSQVQLVQSGAEVKKPGASVKVSCKASGYTFTGYNIHWVRQAPGQRLEWMGAIYPGNGDTSYKQKFRGRVTITRDTSASTAYMELSSLRSEDTAVYYCARGETARATFAYWGQGTLVTVSSASTRGMRTEDLPKAVVFLEPQWYRVLEKDSVTLKCQGAYSPEDNSTQWFHNESLISSQASSYFIDAATVDDSGEYRCQTNLSTLSDPVQLEVHIGWLLLQAPRWVFKEEDPIHLRCHSWKNTALHKVTYLQNGKGRKYFHHNSDFYIPKATLKDSGSYFCRGLVGSKNVSSETVNITITQGLAVPTISSFFPPGYQVSFCLVMVLLFAVDTGLYFSVKTNIRSSTRDWKDHKFKWRKDPQDK

SEQ ID NO: 5330 - protein, 373 aa, Artificial Sequence
  Synthetic Polypeptide
MALPVTALLLPLALLLHAARPDVQVTQSPSSLSASVGDRVTITCRSSQSLANSYGNTFLSWYLHKPGKAPQLLIYGISNRFSGVPDRFSGSGSGTDFTLTISSLQPEDFATYYCLQGTHQPYTFGQGTKVEIKTRGMRTEDLPKAVVFLEPQWYRVLEKDSVTLKCQGAYSPEDNSTQWFHNESLISSQASSYFIDAATVDDSGEYRCQTNLSTLSDPVQLEVHIGWLLLQAPRWVFKEEDPIHLRCHSWKNTALHKVTYLQNGKGRKYFHHNSDFYIPKATLKDSGSYFCRGLVGSKNVSSETVNITITQGLAVPTISSFFPPGYQVSFCLVMVLLFAVDTGLYFSVKTNIRSSTRDWKDHKFKWRKDPQDK

SEQ ID NO: 5331 - protein, 368 aa, Artificial Sequence
  Synthetic Polypeptide
MALPVTALLLPLALLLHAARPDIQMTQSPSSLSASVGDRVTITCRASQDISNYLNWYQQKPGKAVKLLIYYTSILHSGVPSRFSGSGSGTDYTLTISSLQPEDFATYFCQQGNTLPWTFGGGTKVEIKTRGMRTEDLPKAVVFLEPQWYRVLEKDSVTLKCQGAYSPEDNSTQWFHNESLISSQASSYFIDAATVDDSGEYRCQTNLSTLSDPVQLEVHIGWLLLQAPRWVFKEEDPIHLRCHSWKNTALHKVTYLQNGKGRKYFHHNSDFYIPKATLKDSGSYFCRGLVGSKNVSSETVNITITQGLAVPTISSFFPPGYQVSFCLVMVLLFAVDTGLYFSVKTNIRSSTRDWKDHKFKWRKDPQDK

SEQ ID NO: 5332 - protein, 369 aa, Artificial Sequence
  Synthetic Polypeptide
MALPVTALLLPLALLLHAARPDIVMTQSQRFMTTSVGDRVSVTCKASQSVDSNVAWYQQKPRQSPKALIFSASLRFSGVPARFTGSGSGTDFTLTISNLQSEDLAEYFCQQYNNYPLTFGAGTKLELKRTRGMRTEDLPKAVVFLEPQWYRVLEKDSVTLKCQGAYSPEDNSTQWFHNESLISSQASSYFIDAATVDDSGEYRCQTNLSTLSDPVQLEVHIGWLLLQAPRWVFKEEDPIHLRCHSWKNTALHKVTYLQNGKGRKYFHHNSDFYIPKATLKDSGSYFCRGLVGSKNVSSETVNITITQGLAVPTISSFFPPGYQVSFCLVMVLLFAVDTGLYFSVKTNIRSSTRDWKDHKFKWRKDPQDK

SEQ ID NO: 5333 - protein, 369 aa, Artificial Sequence
  Synthetic Polypeptide
MALPVTALLLPLALLLHAARPDIQMTQSPSSLSASVGDRVTITCRASQDISNYLNWYQQKPGKAPKLLIYYTSILHSGVPSRFSGSGSGTDFTLTISSLQPEDFATYYCQQGNTLPWTFGQGTKVEIKRTRGMRTEDLPKAVVFLEPQWYRVLEKDSVTLKCQGAYSPEDNSTQWFHNESLISSQASSYFIDAATVDDSGEYRCQTNLSTLSDPVQLEVHIGWLLLQAPRWVFKEEDPIHLRCHSWKNTALHKVTYLQNGKGRKYFHHNSDFYIPKATLKDSGSYFCRGLVGSKNVSSETVNITITQGLAVPTISSFFPPGYQVSFCLVMVLLFAVDTGLYFSVKTNIRSSTRDWKDHKFKWRKDPQDK

SEQ ID NO: 5334 - protein, 369 aa, Artificial Sequence
  Synthetic Polypeptide
MALPVTALLLPLALLLHAARPDIQMTQSPSSLSASVGDRVTITCKASDHINNWLAWYQQKPGKAPKLLIYGATTLETGVPSRFSGSGSGTDFTLTISSLQPEDFATYYCQQSWNTPWTFGQGTKVEIKRTRGMRTEDLPKAVVFLEPQWYRVLEKDSVTLKCQGAYSPEDNSTQWFHNESLISSQASSYFIDAATVDDSGEYRCQTNLSTLSDPVQLEVHIGWLLLQAPRWVFKEEDPIHLRCHSWKNTALHKVTYLQNGKGRKYFHHNSDFYIPKATLKDSGSYFCRGLVGSKNVSSETVNITITQGLAVPTISSFFPPGYQVSFCLVMVLLFAVDTGLYFSVKTNIRSSTRDWKDHKFKWRKDPQDK

SEQ ID NO: 5335 - protein, 369 aa, Artificial Sequence
  Synthetic Polypeptide
MALPVTALLLPLALLLHAARPSYVLTQPPSVSVAPGQTARITCGGNNIGSKSVHWYQQPPGQAPVVVVYDDSDRPSGIPERFSGSNSGNTATLTISRVEAGDEAVYYCQVWDSSSDHVVFGGGTKLTVLTRGMRTEDLPKAVVFLEPQWYRVLEKDSVTLKCQGAYSPEDNSTQWFHNESLISSQASSYFIDAATVDDSGEYRCQTNLSTLSDPVQLEVHIGWLLLQAPRWVFKEEDPIHLRCHSWKNTALHKVTYLQNGKGRKYFHHNSDFYIPKATLKDSGSYFCRGLVGSKNVSSETVNITITQGLAVPTISSFFPPGYQVSFCLVMVLLFAVDTGLYFSVKTNIRSSTRDWKDHKFKWRKDPQDK

SEQ ID NO: 5336 - protein, 369 aa, Artificial Sequence
  Synthetic Polypeptide
MALPVTALLLPLALLLHAARPDIQMTQSPSSLSASVGDRVTITCMASEDIYIRLAWYQQKPGKAPKLLIYAATSLETGVPSRFSGSGSGTDFTLTISSLQPEDFATYYCQQYWSSPWTFGQGTKVEIKRTRGMRTEDLPKAVVFLEPQWYRVLEKDSVTLKCQGAYSPEDNSTQWFHNESLISSQASSYFIDAATVDDSGEYRCQTNLSTLSDPVQLEVHIGWLLLQAPRWVFKEEDPIHLRCHSWKNTALHKVTYLQNGKGRKYFHHNSDFYIPKATLKDSGSYFCRGLVGSKNVSSETVNITITQGLAVPTISSFFPPGYQVSFCLVMVLLFAVDTGLYFSVKTNIRSSTRDWKDHKFKWRKDPQDK

SEQ ID NO: 5337 - protein, 373 aa, Artificial Sequence
  Synthetic Polypeptide
MALPVTALLLPLALLLHAARPDIQMTQSPSSVSASVGDRVTITCRASESVDNYGISFMNWYQQKPGKAPKLLISAASNRATGVPSRFSGSGSGTDFTLTISSLQPEDFAIYYCQQSKEVPWTFGQGTKVEIKRTRGMRTEDLPKAVVFLEPQWYRVLEKDSVTLKCQGAYSPEDNSTQWFHNESLISSQASSYFIDAATVDDSGEYRCQTNLSTLSDPVQLEVHIGWLLLQAPRWVFKEEDPIHLRCHSWKNTALHKVTYLQNGKGRKYFHHNSDFYIPKATLKDSGSYFCRGLVGSKNVSSETVNITITQGLAVPTISSFFPPGYQVSFCLVMVLLFAVDTGLYFSVKTNIRSSTRDWKDHKFKWRKDPQDK

SEQ ID NO: 5338 - protein, 373 aa, Artificial Sequence
  Synthetic Polypeptide
MALPVTALLLPLALLLHAARPDIQLTQSPSSLSASVGDRVTITCRASKSVSTSGYSYMHWYQQKPGKAPKLLIYLVSNLESGVPSRFSGSGSGTDFTLTISSLQPEDFATYYCQQFSELPWTFGQGTKVEIKRTRGMRTEDLPKAVVFLEPQWYRVLEKDSVTLKCQGAYSPEDNSTQWFHNESLISSQASSYFIDAATVDDSGEYRCQTNLSTLSDPVQLEVHIGWLLLQAPRWVFKEEDPIHLRCHSWKNTALHKVTYLQNGKGRKYFHHNSDFYIPKATLKDSGSYFCRGLVGSKNVSSETVNITITQGLAVPTISSFFPPGYQVSFCLVMVLLFAVDTGLYFSVKTNIRSSTRDWKDHKFKWRKDPQDK

SEQ ID NO: 5339 - protein, 370 aa, Artificial Sequence
  Synthetic Polypeptide
MALPVTALLLPLALLLHAARPDIQMTQSPSSVSASVGDRVTITCRASQFISSSYLSWYQQKPGKAPKLLISGSSSRATGVPSRFSGSGSGTDFTLTISSLQPEDFAIYYCQQLYSSPMTFGQGTKVEIKRTRGMRTEDLPKAVVFLEPQWYRVLEKDSVTLKCQGAYSPEDNSTQWFHNESLISSQASSYFIDAATVDDSGEYRCQTNLSTLSDPVQLEVHIGWLLLQAPRWVFKEEDPIHLRCHSWKNTALHKVTYLQNGKGRKYFHHNSDFYIPKATLKDSGSYFCRGLVGSKNVSSETVNITITQGLAVPTISSFFPPGYQVSFCLVMVLLFAVDTGLYFSVKTNIRSSTRDWKDHKFKWRKDPQDK

SEQ ID NO: 5340 - protein, 384 aa, Artificial Sequence
  Synthetic Polypeptide
MALPVTALLLPLALLLHAARPQVQLVESGGGLVQAGDSVTLSCTASGRTFSSYALAWFRQRPGKEREFVAGLRWGGPTNYADSVKDRFTISGDSAKHTMYLQMNSLKPEDTAVYYCGYNPGGWAVPSQYEYDSWGQGTQVTVSSTRGMRTEDLPKAVVFLEPQWYRVLEKDSVTLKCQGAYSPEDNSTQWFHNESLISSQASSYFIDAATVDDSGEYRCQTNLSTLSDPVQLEVHIGWLLLQAPRWVFKEEDPIHLRCHSWKNTALHKVTYLQNGKGRKYFHHNSDFYIPKATLKDSGSYFCRGLVGSKNVSSETVNITITQGLAVPTISSFFPPGYQVSFCLVMVLLFAVDTGLYFSVKTNIRSSTRDWKDHKFKWRKDPQDK

SEQ ID NO: 5341 - protein, 379 aa, Artificial Sequence
  Synthetic Polypeptide
MALPVTALLLPLALLLHAARPQVQLQESGGGLAQAGGSLRLSCAASGRTFSMGWFRQAPGKEREFVAAITYSGGSPYYASSVRGRFTISRDNAKNTVYLQMNSLKPEDTAVYYCAANPTYGSDWNAENWGQGTQVTVSSTRGMRTEDLPKAVVFLEPQWYRVLEKDSVTLKCQGAYSPEDNSTQWFHNESLISSQASSYFIDAATVDDSGEYRCQTNLSTLSDPVQLEVHIGWLLLQAPRWVFKEEDPIHLRCHSWKNTALHKVTYLQNGKGRKYFHHNSDFYIPKATLKDSGSYFCRGLVGSKNVSSETVNITITQGLAVPTISSFFPPGYQVSFCLVMVLLFAVDTGLYFSVKTNIRSSTRDWKDHKFKWRKDPQDK

SEQ ID NO: 5342 - protein, 377 aa, Artificial Sequence
  Synthetic Polypeptide
MALPVTALLLPLALLLHAARPEVQLVESGGGLVQPGGSLRLSCAASGFSFSDFWMSWVRQAPGKGLEWVATISQAGSEKDYVDSVKGRFTISRDNAKKSLYLQMNSLRAEDTAVYYCASGVYSFDYRGQGTLVTVSSTRGMRTEDLPKAVVFLEPQWYRVLEKDSVTLKCQGAYSPEDNSTQWFHNESLISSQASSYFIDAATVDDSGEYRCQTNLSTLSDPVQLEVHIGWLLLQAPRWVFKEEDPIHLRCHSWKNTALHKVTYLQNGKGRKYFHHNSDFYIPKATLKDSGSYFCRGLVGSKNVSSETVNITITQGLAVPTISSFFPPGYQVSFCLVMVLLFAVDTGLYFSVKTNIRSSTRDWKDHKFKWRKDPQDK

SEQ ID NO: 5343 - protein, 377 aa, Artificial Sequence
  Synthetic Polypeptide
MALPVTALLLPLALLLHAARPEVQLVESGGGLVQPGGSLRLSCAASGFTFSNYWMSWVRQAPGKGQEWVATINQDGSDKDYVDSVKGRFTISRDNAKKSLYLQMNSLRAEDTAVYYCASGVYSFDYRGQGTLVTVSSTRGMRTEDLPKAVVFLEPQWYRVLEKDSVTLKCQGAYSPEDNSTQWFHNESLISSQASSYFIDAATVDDSGEYRCQTNLSTLSDPVQLEVHIGWLLLQAPRWVFKEEDPIHLRCHSWKNTALHKVTYLQNGKGRKYFHHNSDFYIPKATLKDSGSYFCRGLVGSKNVSSETVNITITQGLAVPTISSFFPPGYQVSFCLVMVLLFAVDTGLYFSVKTNIRSSTRDWKDHKFKWRKDPQDK

SEQ ID NO: 5344 - protein, 377 aa, Artificial Sequence
  Synthetic Polypeptide
MALPVTALLLPLALLLHAARPEVQLVESGGGLVQPGGSLRLSCAASGIDFSRYWMSWVRQAPGKGLEWVATISQAGSEKDYVDSVKGRFTISRDNAKKSLYLQMNSLRAEDTAVYYCASGVYSFDYRGQGTLVTVSSTRGMRTEDLPKAVVFLEPQWYRVLEKDSVTLKCQGAYSPEDNSTQWFHNESLISSQASSYFIDAATVDDSGEYRCQTNLSTLSDPVQLEVHIGWLLLQAPRWVFKEEDPIHLRCHSWKNTALHKVTYLQNGKGRKYFHHNSDFYIPKATLKDSGSYFCRGLVGSKNVSSETVNITITQGLAVPTISSFFPPGYQVSFCLVMVLLFAVDTGLYFSVKTNIRSSTRDWKDHKFKWRKDPQDK

SEQ ID NO: 5345 - protein, 377 aa, Artificial Sequence
  Synthetic Polypeptide
MALPVTALLLPLALLLHAARPEVQLVESGGGLVQPGGSLRLSCAASGIDFSRYWMSWVRQAPGKGQEWVATINQDGSDKDYVDSVKGRFTISRDNAKKSLYLQMNSLRAEDTAVYYCASGVYSFDYRGQGTLVTVSSTRGMRTEDLPKAVVFLEPQWYRVLEKDSVTLKCQGAYSPEDNSTQWFHNESLISSQASSYFIDAATVDDSGEYRCQTNLSTLSDPVQLEVHIGWLLLQAPRWVFKEEDPIHLRCHSWKNTALHKVTYLQNGKGRKYFHHNSDFYIPKATLKDSGSYFCRGLVGSKNVSSETVNITITQGLAVPTISSFFPPGYQVSFCLVMVLLFAVDTGLYFSVKTNIRSSTRDWKDHKFKWRKDPQDK

SEQ ID NO: 5346 - protein, 381 aa, Artificial Sequence
  Synthetic Polypeptide
MALPVTALLLPLALLLHAARPEVQLVESGGGLVQPGGSLRLSCTFSGGTFSSYTMGWFRQAPGKEREFVAEVRWGGVTTYSNSLKDRFSISEDSVKNAVYLQMNSLKPEDTAVYYCAAVRQMYMTVVPDYWGQGTLVTVSSTRGMRTEDLPKAVVFLEPQWYRVLEKDSVTLKCQGAYSPEDNSTQWFHNESLISSQASSYFIDAATVDDSGEYRCQTNLSTLSDPVQLEVHIGWLLLQAPRWVFKEEDPIHLRCHSWKNTALHKVTYLQNGKGRKYFHHNSDFYIPKATLKDSGSYFCRGLVGSKNVSSETVNITITQGLAVPTISSFFPPGYQVSFCLVMVLLFAVDTGLYFSVKTNIRSSTRDWKDHKFKWRKDPQDK

SEQ ID NO: 5347 - protein, 379 aa, Artificial Sequence
  Synthetic Polypeptide
MALPVTALLLPLALLLHAARPEVQLVESGGGLVQAGGSLRLSCAASGRTFSMGWFRQAPGKEREFVAAITYSGGSPYYADSVKGRFTISRDNAKNTVYLQMNSLKPEDTAVYYCAANPTYGSDWNAENWGQGTQVTVSSTRGMRTEDLPKAVVFLEPQWYRVLEKDSVTLKCQGAYSPEDNSTQWFHNESLISSQASSYFIDAATVDDSGEYRCQTNLSTLSDPVQLEVHIGWLLLQAPRWVFKEEDPIHLRCHSWKNTALHKVTYLQNGKGRKYFHHNSDFYIPKATLKDSGSYFCRGLVGSKNVSSETVNITITQGLAVPTISSFFPPGYQVSFCLVMVLLFAVDTGLYFSVKTNIRSSTRDWKDHKFKWRKDPQDK

SEQ ID NO: 5348 - protein, 379 aa, Artificial Sequence
  Synthetic Polypeptide
MALPVTALLLPLALLLHAARPQLQLQESGPGLVKPSETLSLTCTVSGGSISSGDYYWGWIRQPPGKGLEWIGHIYYSGATYYNPSLKSRVTISVDTSRNQFSLKLSSVTAADTAVYYCTRDDSSNWRSRGQGTLVTVSSTRGMRTEDLPKAVVFLEPQWYRVLEKDSVTLKCQGAYSPEDNSTQWFHNESLISSQASSYFIDAATVDDSGEYRCQTNLSTLSDPVQLEVHIGWLLLQAPRWVFKEEDPIHLRCHSWKNTALHKVTYLQNGKGRKYFHHNSDFYIPKATLKDSGSYFCRGLVGSKNVSSETVNITITQGLAVPTISSFFPPGYQVSFCLVMVLLFAVDTGLYFSVKTNIRSSTRDWKDHKFKWRKDPQDK

SEQ ID NO: 5349 - protein, 379 aa, Artificial Sequence
  Synthetic Polypeptide
MALPVTALLLPLALLLHAARPQLQLQESGPGLVKPSETLSLTCTVSGDSISSGDYYWGWIRQPPGKGLEWIGHIYYSGVTYYNPSLKSRVTISVDTSRNQFSLKLSSVTAADTAVYYCTREDSSNWRSRGQGTLVTVSSTRGMRTEDLPKAVVFLEPQWYRVLEKDSVTLKCQGAYSPEDNSTQWFHNESLISSQASSYFIDAATVDDSGEYRCQTNLSTLSDPVQLEVHIGWLLLQAPRWVFKEEDPIHLRCHSWKNTALHKVTYLQNGKGRKYFHHNSDFYIPKATLKDSGSYFCRGLVGSKNVSSETVNITITQGLAVPTISSFFPPGYQVSFCLVMVLLFAVDTGLYFSVKTNIRSSTRDWKDHKFKWRKDPQDK

SEQ ID NO: 5350 - protein, 379 aa, Artificial Sequence
  Synthetic Polypeptide
MALPVTALLLPLALLLHAARPQLQLQESGPGLVKPSETLSLTCTVSGGSISSGDYYWGWIRQPPGKGLEWIGSISYSGSTYYNPSLKSRVTISVDTSRNQFSLKLSSVTAADTAVYYCTREDSSNWRSRGQGTLVTVSSTRGMRTEDLPKAVVFLEPQWYRVLEKDSVTLKCQGAYSPEDNSTQWFHNESLISSQASSYFIDAATVDDSGEYRCQTNLSTLSDPVQLEVHIGWLLLQAPRWVFKEEDPIHLRCHSWKNTALHKVTYLQNGKGRKYFHHNSDFYIPKATLKDSGSYFCRGLVGSKNVSSETVNITITQGLAVPTISSFFPPGYQVSFCLVMVLLFAVDTGLYFSVKTNIRSSTRDWKDHKFKWRKDPQDK

SEQ ID NO: 5351 - protein, 385 aa, Artificial Sequence
  Synthetic Polypeptide
MALPVTALLLPLALLLHAARPQLQLQESGPGLVKPSETLALTCNVSGGSISSSSYYWGWIRQPPGKRLEWIGSIYYSGSTYFNPSLKSRVTISVDTSKNQFSLKLSSVTAADTAVYYCAGGDYYGPVGQWPSDYRGQGTLVTVSSTRGMRTEDLPKAVVFLEPQWYRVLEKDSVTLKCQGAYSPEDNSTQWFHNESLISSQASSYFIDAATVDDSGEYRCQTNLSTLSDPVQLEVHIGWLLLQAPRWVFKEEDPIHLRCHSWKNTALHKVTYLQNGKGRKYFHHNSDFYIPKATLKDSGSYFCRGLVGSKNVSSETVNITITQGLAVPTISSFFPPGYQVSFCLVMVLLFAVDTGLYFSVKTNIRSSTRDWKDHKFKWRKDPQDK

SEQ ID NO: 5352 - protein, 391 aa, Artificial Sequence
  Synthetic Polypeptide
MALPVTALLLPLALLLHAARPEVQLLESGGGLVQPGGSLRLSCAASGFIFSSYAMSWVRQAPGKGQEWVSGVSGTGVNTYYADSVKGRFTISRDNSKNTLYLQMNSLRAEDTAVYYCASGKGWDSGSWYEDYRGQGTLVTVSSTRPRLCLLTRGMRTEDLPKAVVFLEPQWYRVLEKDSVTLKCQGAYSPEDNSTQWFHNESLISSQASSYFIDAATVDDSGEYRCQTNLSTLSDPVQLEVHIGWLLLQAPRWVFKEEDPIHLRCHSWKNTALHKVTYLQNGKGRKYFHHNSDFYIPKATLKDSGSYFCRGLVGSKNVSSETVNITITQGLAVPTISSFFPPGYQVSFCLVMVLLFAVDTGLYFSVKTNIRSSTRDWKDHKFKWRKDPQDK

SEQ ID NO: 5353 - protein, 385 aa, Artificial Sequence
  Synthetic Polypeptide
MALPVTALLLPLALLLHAARPQLQLQESGPGLVKPSETLSLTCTVSGGSVSSSSYYWGWIRQPPGKRLELIGSIYYGGSTYFNPSLKSRVTISVDTSKNQFSLKLSSVTAADTAVYYCAGGDTYGPVGQWPSDYRGQGTLVTVSSTRGMRTEDLPKAVVFLEPQWYRVLEKDSVTLKCQGAYSPEDNSTQWFHNESLISSQASSYFIDAATVDDSGEYRCQTNLSTLSDPVQLEVHIGWLLLQAPRWVFKEEDPIHLRCHSWKNTALHKVTYLQNGKGRKYFHHNSDFYIPKATLKDSGSYFCRGLVGSKNVSSETVNITITQGLAVPTISSFFPPGYQVSFCLVMVLLFAVDTGLYFSVKTNIRSSTRDWKDHKFKWRKDPQDK

SEQ ID NO: 5354 - protein, 383 aa, Artificial Sequence
  Synthetic Polypeptide
MALPVTALLLPLALLLHAARPEVQLLESGGGLVQPGGSLRLSCAASGFIFSIYAMSWVRQAPGKGLEWVSGISGSGVNTYYADSVKGRFIISRDNSRNTVYLQMNSLRADDTAVYHCANGKGWDGNTWYEDYRGQGTLVTVSSTRGMRTEDLPKAVVFLEPQWYRVLEKDSVTLKCQGAYSPEDNSTQWFHNESLISSQASSYFIDAATVDDSGEYRCQTNLSTLSDPVQLEVHIGWLLLQAPRWVFKEEDPIHLRCHSWKNTALHKVTYLQNGKGRKYFHHNSDFYIPKATLKDSGSYFCRGLVGSKNVSSETVNITITQGLAVPTISSFFPPGYQVSFCLVMVLLFAVDTGLYFSVKTNIRSSTRDWKDHKFKWRKDPQDK

SEQ ID NO: 5355 - protein, 378 aa, Artificial Sequence
  Synthetic Polypeptide
MALPVTALLLPLALLLHAARPEVQVLESGGGLVQPGGSLRLSCAASGFTFSNFAMSWVRQAPGKGLEWVSTISGSAGTTDYADSVKGRFTISRDNSKKTLYLQMNSLRVEDTAVYYCADGRGPFFDYRGQGTLVTVSSTRGMRTEDLPKAVVFLEPQWYRVLEKDSVTLKCQGAYSPEDNSTQWFHNESLISSQASSYFIDAATVDDSGEYRCQTNLSTLSDPVQLEVHIGWLLLQAPRWVFKEEDPIHLRCHSWKNTALHKVTYLQNGKGRKYFHHNSDFYIPKATLKDSGSYFCRGLVGSKNVSSETVNITITQGLAVPTISSFFPPGYQVSFCLVMVLLFAVDTGLYFSVKTNIRSSTRDWKDHKFKWRKDPQDK

SEQ ID NO: 5356 - protein, 380 aa, Artificial Sequence
  Synthetic Polypeptide
MALPVTALLLPLALLLHAARPEVQLVESGGGLVQPGGSLRLSCAASGFNIKDTCIGWVRRAPGKEEELVAKICKYSGHTRYADSVKGRFTISADTSKNTAYLQMNSLRAEDTAVYYCAAVSVRDGHYNYWGQGTTVTVSSTRGMRTEDLPKAVVFLEPQWYRVLEKDSVTLKCQGAYSPEDNSTQWFHNESLISSQASSYFIDAATVDDSGEYRCQTNLSTLSDPVQLEVHIGWLLLQAPRWVFKEEDPIHLRCHSWKNTALHKVTYLQNGKGRKYFHHNSDFYIPKATLKDSGSYFCRGLVGSKNVSSETVNITITQGLAVPTISSFFPPGYQVSFCLVMVLLFAVDTGLYFSVKTNIRSSTRDWKDHKFKWRKDPQDK

SEQ ID NO: 5357 - protein, 380 aa, Artificial Sequence
  Synthetic Polypeptide
MALPVTALLLPLALLLHAARPEVQLVESGGGLVQPGGSLRLSCAASGFNIKDTCIGWVRRAPGKEEELVADICPYKGSTRYADSVKGRFTISADTSKNTAYLQMNSLRAEDTAVYYCAIVSARDGYYNYWGQGTTVTVSSTRGMRTEDLPKAVVFLEPQWYRVLEKDSVTLKCQGAYSPEDNSTQWFHNESLISSQASSYFIDAATVDDSGEYRCQTNLSTLSDPVQLEVHIGWLLLQAPRWVFKEEDPIHLRCHSWKNTALHKVTYLQNGKGRKYFHHNSDFYIPKATLKDSGSYFCRGLVGSKNVSSETVNITITQGLAVPTISSFFPPGYQVSFCLVMVLLFAVDTGLYFSVKTNIRSSTRDWKDHKFKWRKDPQDK

SEQ ID NO: 5358 - protein, 380 aa, Artificial Sequence
  Synthetic Polypeptide
MALPVTALLLPLALLLHAARPEVQLLESGGGLVQPGGSLRLSCAASGFTFSSYAMSWVRQAPGKGLEWVSAITGSGGSTYYADSVKGRFTISRDNSKNTLYLQMNSLRAEDTAVYYCAKDEDGGSLLGHRGQGTLVTVSSTRGMRTEDLPKAVVFLEPQWYRVLEKDSVTLKCQGAYSPEDNSTQWFHNESLISSQASSYFIDAATVDDSGEYRCQTNLSTLSDPVQLEVHIGWLLLQAPRWVFKEEDPIHLRCHSWKNTALHKVTYLQNGKGRKYFHHNSDFYIPKATLKDSGSYFCRGLVGSKNVSSETVNITITQGLAVPTISSFFPPGYQVSFCLVMVLLFAVDTGLYFSVKTNIRSSTRDWKDHKFKWRKDPQDK

SEQ ID NO: 5359 - protein, 380 aa, Artificial Sequence
  Synthetic Polypeptide
MALPVTALLLPLALLLHAARPEVQLLESGGGLIQPGGSLRLSCAASGFTFSSHAMTWVRQAPGKGLEWVSAISSGGSYTYYADSVKGRFTISRDNSKNTLYLQMNSLRAEDTAVYYCAKDEDGGSLLGHRGQGTLVTVSSTRGMRTEDLPKAVVFLEPQWYRVLEKDSVTLKCQGAYSPEDNSTQWFHNESLISSQASSYFIDAATVDDSGEYRCQTNLSTLSDPVQLEVHIGWLLLQAPRWVFKEEDPIHLRCHSWKNTALHKVTYLQNGKGRKYFHHNSDFYIPKATLKDSGSYFCRGLVGSKNVSSETVNITITQGLAVPTISSFFPPGYQVSFCLVMVLLFAVDTGLYFSVKTNIRSSTRDWKDHKFKWRKDPQDK

SEQ ID NO: 5360 - protein, 380 aa, Artificial Sequence
  Synthetic Polypeptide
MALPVTALLLPLALLLHAARPEVQLVESGGGLVQPGGSLRLSCAASGFSFSDFWMSWVRQAPGKGLEWVSAISGSGDYTHYADSVKGRFTISRDNSKNTVYLQMNSLRAEDSAVYYCAKDEDGGSLLGHRGQGTLVTVSSTRGMRTEDLPKAVVFLEPQWYRVLEKDSVTLKCQGAYSPEDNSTQWFHNESLISSQASSYFIDAATVDDSGEYRCQTNLSTLSDPVQLEVHIGWLLLQAPRWVFKEEDPIHLRCHSWKNTALHKVTYLQNGKGRKYFHHNSDFYIPKATLKDSGSYFCRGLVGSKNVSSETVNITITQGLAVPTISSFFPPGYQVSFCLVMVLLFAVDTGLYFSVKTNIRSSTRDWKDHKFKWRKDPQDK

SEQ ID NO: 5361 - protein, 382 aa, Artificial Sequence
  Synthetic Polypeptide
MALPVTALLLPLALLLHAARPEVQLLESGGGLVQPGGSLRLSCAASGFAFSIYDMSWVRQAPGKGLEWVSSISGSGDYIYYADSVKGRFTISRDISKNTLYLQMNSLRAEDTAVYYCAKEGTGANSSLADYRGQGTLVTVSSTRGMRTEDLPKAVVFLEPQWYRVLEKDSVTLKCQGAYSPEDNSTQWFHNESLISSQASSYFIDAATVDDSGEYRCQTNLSTLSDPVQLEVHIGWLLLQAPRWVFKEEDPIHLRCHSWKNTALHKVTYLQNGKGRKYFHHNSDFYIPKATLKDSGSYFCRGLVGSKNVSSETVNITITQGLAVPTISSFFPPGYQVSFCLVMVLLFAVDTGLYFSVKTNIRSSTRDWKDHKFKWRKDPQDK

SEQ ID NO: 5362 - protein, 382 aa, Artificial Sequence
  Synthetic Polypeptide
MALPVTALLLPLALLLHAARPEVQLLESGGGLVQPGGSLRLSCAASGFTFSSYAMSWVRQAPGKGLEWVSSISGSGDYIYYADSVKGRFTISRDISKNTLYLQMNSLRAEDTAVYYCAKEGTGANSSLADYRGQGTLVTVSSTRGMRTEDLPKAVVFLEPQWYRVLEKDSVTLKCQGAYSPEDNSTQWFHNESLISSQASSYFIDAATVDDSGEYRCQTNLSTLSDPVQLEVHIGWLLLQAPRWVFKEEDPIHLRCHSWKNTALHKVTYLQNGKGRKYFHHNSDFYIPKATLKDSGSYFCRGLVGSKNVSSETVNITITQGLAVPTISSFFPPGYQVSFCLVMVLLFAVDTGLYFSVKTNIRSSTRDWKDHKFKWRKDPQDK

SEQ ID NO: 5363 - protein, 379 aa, Artificial Sequence
  Synthetic Polypeptide
MALPVTALLLPLALLLHAARPQVQLVESGGGLVQPGGSLRLSCAASGFTFTNHAMSWVRQAPGKGLELVSSISGNGRTTYYADSVKGRFTISRDISKNTLDLQMNSLRAEDTAVYYCAKDGGETLVDSRGQGTLVTVSSTRGMRTEDLPKAVVFLEPQWYRVLEKDSVTLKCQGAYSPEDNSTQWFHNESLISSQASSYFIDAATVDDSGEYRCQTNLSTLSDPVQLEVHIGWLLLQAPRWVFKEEDPIHLRCHSWKNTALHKVTYLQNGKGRKYFHHNSDFYIPKATLKDSGSYFCRGLVGSKNVSSETVNITITQGLAVPTISSFFPPGYQVSFCLVMVLLFAVDTGLYFSVKTNIRSSTRDWKDHKFKWRKDPQDK

SEQ ID NO: 5364 - protein, 380 aa, Artificial Sequence
  Synthetic Polypeptide
MALPVTALLLPLALLLHAARPEVQLLESGGGLIQPGGSLRLSCAASGFTFSSHAMTWVRQAPGKGLEWVSAISGSGDYTHYADSVKGRFTISRDNSKNTVYLQMNSLRAEDSAVYYCAKDEDGGSLLGHRGQGTLVTVSSTRGMRTEDLPKAVVFLEPQWYRVLEKDSVTLKCQGAYSPEDNSTQWFHNESLISSQASSYFIDAATVDDSGEYRCQTNLSTLSDPVQLEVHIGWLLLQAPRWVFKEEDPIHLRCHSWKNTALHKVTYLQNGKGRKYFHHNSDFYIPKATLKDSGSYFCRGLVGSKNVSSETVNITITQGLAVPTISSFFPPGYQVSFCLVMVLLFAVDTGLYFSVKTNIRSSTRDWKDHKFKWRKDPQDK

SEQ ID NO: 5365 - protein, 381 aa, Artificial Sequence
  Synthetic Polypeptide
MALPVTALLLPLALLLHAARPQVQLQESGGGLVQAGDSLRLSCAASGRAVSSLFMGWFRRAPGKERELVAAISRYSLYTYYADSVKGRFTISADNAKNAVYLQMNSLKPEDTAVYYCASKLEYTSNDYDSWGQGTQVTVSSTRGMRTEDLPKAVVFLEPQWYRVLEKDSVTLKCQGAYSPEDNSTQWFHNESLISSQASSYFIDAATVDDSGEYRCQTNLSTLSDPVQLEVHIGWLLLQAPRWVFKEEDPIHLRCHSWKNTALHKVTYLQNGKGRKYFHHNSDFYIPKATLKDSGSYFCRGLVGSKNVSSETVNITITQGLAVPTISSFFPPGYQVSFCLVMVLLFAVDTGLYFSVKTNIRSSTRDWKDHKFKWRKDPQDK

SEQ ID NO: 5366 - protein, 381 aa, Artificial Sequence
  Synthetic Polypeptide
MALPVTALLLPLALLLHAARPEVQLQESGGGLVQPGGSLRLSCAASGRTFSSLFMGWFRQAPGKERELVAAISRYSLYTYYADSVKGRFTISADNAKNAVYLQMNSLKPEDTAVYYCASKLEYTSNDYDSWGQGTQVTVSSTRGMRTEDLPKAVVFLEPQWYRVLEKDSVTLKCQGAYSPEDNSTQWFHNESLISSQASSYFIDAATVDDSGEYRCQTNLSTLSDPVQLEVHIGWLLLQAPRWVFKEEDPIHLRCHSWKNTALHKVTYLQNGKGRKYFHHNSDFYIPKATLKDSGSYFCRGLVGSKNVSSETVNITITQGLAVPTISSFFPPGYQVSFCLVMVLLFAVDTGLYFSVKTNIRSSTRDWKDHKFKWRKDPQDK

SEQ ID NO: 5367 - protein, 381 aa, Artificial Sequence
  Synthetic Polypeptide
MALPVTALLLPLALLLHAARPEVQLQESGGGLVQPGGSLRLSCAASGRTFSSLFMGWVRQAPGKGLELVSAISRYSLYTYYADSVKGRFTISRDNAKNTLYLQMNSLRPEDTAVYYCASKLEYTSNDYDSWGQGTLVTVSSTRGMRTEDLPKAVVFLEPQWYRVLEKDSVTLKCQGAYSPEDNSTQWFHNESLISSQASSYFIDAATVDDSGEYRCQTNLSTLSDPVQLEVHIGWLLLQAPRWVFKEEDPIHLRCHSWKNTALHKVTYLQNGKGRKYFHHNSDFYIPKATLKDSGSYFCRGLVGSKNVSSETVNITITQGLAVPTISSFFPPGYQVSFCLVMVLLFAVDTGLYFSVKTNIRSSTRDWKDHKFKWRKDPQDK

SEQ ID NO: 5368 - protein, 389 aa, Artificial Sequence
  Synthetic Polypeptide
MALPVTALLLPLALLLHAARPEVQLVESGGGLVQPGGSLRLSCEASGFASDDYIIGWFRQAPGKEREGVSCISSKYANTVYTDSVKGRFRLSRGTAKNTVYLQMSALKPEDTAVYYCAMDSRRVTCPEISTMHRNFDSWGQGTLVTVSSTRGMRTEDLPKAVVFLEPQWYRVLEKDSVTLKCQGAYSPEDNSTQWFHNESLISSQASSYFIDAATVDDSGEYRCQTNLSTLSDPVQLEVHIGWLLLQAPRWVFKEEDPIHLRCHSWKNTALHKVTYLQNGKGRKYFHHNSDFYIPKATLKDSGSYFCRGLVGSKNVSSETVNITITQGLAVPTISSFFPPGYQVSFCLVMVLLFAVDTGLYFSVKTNIRSSTRDWKDHKFKWRKDPQDK

SEQ ID NO: 5369 - protein, 389 aa, Artificial Sequence
  Synthetic Polypeptide
MALPVTALLLPLALLLHAARPEVQLVESGGGLVQPGGSLRLSCAASGFASDYYIIGWFRQAPGKEREGVSCISSRYANTNYADSVKGRFTISRDNAKNTVYLQMNSLKPEDTAVYYCAADTRRYTCPDIATMHRNFDSWGQGTLVTVSSTRGMRTEDLPKAVVFLEPQWYRVLEKDSVTLKCQGAYSPEDNSTQWFHNESLISSQASSYFIDAATVDDSGEYRCQTNLSTLSDPVQLEVHIGWLLLQAPRWVFKEEDPIHLRCHSWKNTALHKVTYLQNGKGRKYFHHNSDFYIPKATLKDSGSYFCRGLVGSKNVSSETVNITITQGLAVPTISSFFPPGYQVSFCLVMVLLFAVDTGLYFSVKTNIRSSTRDWKDHKFKWRKDPQDK

SEQ ID NO: 5370 - protein, 385 aa, Artificial Sequence
  Synthetic Polypeptide
MALPVTALLLPLALLLHAARPEVQLVESGGSLVQPGGSLRLSCAASGFTFDDYAMSWVRQVPGKGLEWVSSINWSGTHTDYADSVKGRFTISRNNANNTLYLQMNSLKSEDTAVYYCAKNWRDAGTTWFEKSGSAGQGTQVTVSSTRGMRTEDLPKAVVFLEPQWYRVLEKDSVTLKCQGAYSPEDNSTQWFHNESLISSQASSYFIDAATVDDSGEYRCQTNLSTLSDPVQLEVHIGWLLLQAPRWVFKEEDPIHLRCHSWKNTALHKVTYLQNGKGRKYFHHNSDFYIPKATLKDSGSYFCRGLVGSKNVSSETVNITITQGLAVPTISSFFPPGYQVSFCLVMVLLFAVDTGLYFSVKTNIRSSTRDWKDHKFKWRKDPQDK

SEQ ID NO: 5371 - protein, 379 aa, Artificial Sequence
  Synthetic Polypeptide
MALPVTALLLPLALLLHAARPEVQLVESGGGLVQAGGSLRLSCAASGITFSINTMGWYRQAPGKQRELVALISSIGDTYYADSVKGRFTISRDNAKNTVYLQMNSLKPEDTAVYYCKRFRTAAQGTDYWGQGTQVTVSSTRGMRTEDLPKAVVFLEPQWYRVLEKDSVTLKCQGAYSPEDNSTQWFHNESLISSQASSYFIDAATVDDSGEYRCQTNLSTLSDPVQLEVHIGWLLLQAPRWVFKEEDPIHLRCHSWKNTALHKVTYLQNGKGRKYFHHNSDFYIPKATLKDSGSYFCRGLVGSKNVSSETVNITITQGLAVPTISSFFPPGYQVSFCLVMVLLFAVDTGLYFSVKTNIRSSTRDWKDHKFKWRKDPQDK

SEQ ID NO: 5372 - protein, 380 aa, Artificial Sequence
  Synthetic Polypeptide
MALPVTALLLPLALLLHAARPEVQLVESGGGLVQPGGSLRLSCAASGSIFGFNDMAWYRQAPGKQRELVALISRVGVTSSADSVKGRFTISRVNAKDTVYLQMNSLKPEDTAVYYCYMDQRLDGSTLAYWGQGTQVTVSSTRGMRTEDLPKAVVFLEPQWYRVLEKDSVTLKCQGAYSPEDNSTQWFHNESLISSQASSYFIDAATVDDSGEYRCQTNLSTLSDPVQLEVHIGWLLLQAPRWVFKEEDPIHLRCHSWKNTALHKVTYLQNGKGRKYFHHNSDFYIPKATLKDSGSYFCRGLVGSKNVSSETVNITITQGLAVPTISSFFPPGYQVSFCLVMVLLFAVDTGLYFSVKTNIRSSTRDWKDHKFKWRKDPQDK

SEQ ID NO: 5373 - protein, 381 aa, Artificial Sequence
  Synthetic Polypeptide
MALPVTALLLPLALLLHAARPDVQLVESGGGLVQPGGSLRLSCAASGSIGGLNAMAWYRQAPGKERELVAGIFGVGSTRYADSVKGRFTISRDNSKNTVYLQMNSLRPEDTAVYYCRMSSVTRGSSDYWGQGTLVTVSSLETRGMRTEDLPKAVVFLEPQWYRVLEKDSVTLKCQGAYSPEDNSTQWFHNESLISSQASSYFIDAATVDDSGEYRCQTNLSTLSDPVQLEVHIGWLLLQAPRWVFKEEDPIHLRCHSWKNTALHKVTYLQNGKGRKYFHHNSDFYIPKATLKDSGSYFCRGLVGSKNVSSETVNITITQGLAVPTISSFFPPGYQVSFCLVMVLLFAVDTGLYFSVKTNIRSSTRDWKDHKFKWRKDPQDK

SEQ ID NO: 5374 - protein, 386 aa, Artificial Sequence
  Synthetic Polypeptide
MALPVTALLLPLALLLHAARPEVQLVESGGGLVQPGGSLRLSCAASGRTYYLNAMGWFRQAPGKEREFVAAIDWSEGNKDYADSVKGRFTISRDNSKNTVYLQMNSLRPEDTAVYYCAADTPPWGPLIYIESYDSWGQGTLVTVSSTRGMRTEDLPKAVVFLEPQWYRVLEKDSVTLKCQGAYSPEDNSTQWFHNESLISSQASSYFIDAATVDDSGEYRCQTNLSTLSDPVQLEVHIGWLLLQAPRWVFKEEDPIHLRCHSWKNTALHKVTYLQNGKGRKYFHHNSDFYIPKATLKDSGSYFCRGLVGSKNVSSETVNITITQGLAVPTISSFFPPGYQVSFCLVMVLLFAVDTGLYFSVKTNIRSSTRDWKDHKFKWRKDPQDK

SEQ ID NO: 5375 - protein, 384 aa, Artificial Sequence
  Synthetic Polypeptide
MALPVTALLLPLALLLHAARPEVQLVESGGGSVQAGGSLRLSCAASGDTYGSYWMGWFRQAPGKEREGVAAINRGGGYTVYADSVKGRFTISRDTAKNTVYLQMNSLRPDDTADYYCAASGVLGGLHEDWFNYWGQGTLVTVSSTRGMRTEDLPKAVVFLEPQWYRVLEKDSVTLKCQGAYSPEDNSTQWFHNESLISSQASSYFIDAATVDDSGEYRCQTNLSTLSDPVQLEVHIGWLLLQAPRWVFKEEDPIHLRCHSWKNTALHKVTYLQNGKGRKYFHHNSDFYIPKATLKDSGSYFCRGLVGSKNVSSETVNITITQGLAVPTISSFFPPGYQVSFCLVMVLLFAVDTGLYFSVKTNIRSSTRDWKDHKFKWRKDPQDK

SEQ ID NO: 5376 - protein, 383 aa, Artificial Sequence
  Synthetic Polypeptide
MALPVTALLLPLALLLHAARPVQLVESGGGSVQAGGSLRLSCAASGDTYGSYWMGWFRQAPGQEREAVAAINRGGGYTVYADSVKGRFTISRDNAKNTLYLQMNSLRPDDTADYYCAASGVLGGLHEDWFNYWGQGTLVTVSSTRGMRTEDLPKAVVFLEPQWYRVLEKDSVTLKCQGAYSPEDNSTQWFHNESLISSQASSYFIDAATVDDSGEYRCQTNLSTLSDPVQLEVHIGWLLLQAPRWVFKEEDPIHLRCHSWKNTALHKVTYLQNGKGRKYFHHNSDFYIPKATLKDSGSYFCRGLVGSKNVSSETVNITITQGLAVPTISSFFPPGYQVSFCLVMVLLFAVDTGLYFSVKTNIRSSTRDWKDHKFKWRKDPQDK

SEQ ID NO: 5377 - protein, 385 aa, Artificial Sequence
  Synthetic Polypeptide
MALPVTALLLPLALLLHAARPEVQLVESGGGSVQTGGSLRLTCAASGRTSRSYGMGWFRQAPGKEREFVSGISWRGDSTGYADSVKGRFTISRDNAKNTVDLQMNSLKPEDTAIYYCAAAAGSAWYGTLYEYDYWGQGTLVTVSSTRGMRTEDLPKAVVFLEPQWYRVLEKDSVTLKCQGAYSPEDNSTQWFHNESLISSQASSYFIDAATVDDSGEYRCQTNLSTLSDPVQLEVHIGWLLLQAPRWVFKEEDPIHLRCHSWKNTALHKVTYLQNGKGRKYFHHNSDFYIPKATLKDSGSYFCRGLVGSKNVSSETVNITITQGLAVPTISSFFPPGYQVSFCLVMVLLFAVDTGLYFSVKTNIRSSTRDWKDHKFKWRKDPQDK

SEQ ID NO: 5378 - protein, 385 aa, Artificial Sequence
  Synthetic Polypeptide
MALPVTALLLPLALLLHAARPEVQLVESGGGSVQAGGSLRLTCAASGSTSRSYGMGWFRQAPGKEREFVSGISWRGDSTGYADSVKGRFTISRDNAKNTVDLQMNSLKPEDTAIYYCAAAAGSTWYGTLYEYDYWGQGTLVTVSSTRGMRTEDLPKAVVFLEPQWYRVLEKDSVTLKCQGAYSPEDNSTQWFHNESLISSQASSYFIDAATVDDSGEYRCQTNLSTLSDPVQLEVHIGWLLLQAPRWVFKEEDPIHLRCHSWKNTALHKVTYLQNGKGRKYFHHNSDFYIPKATLKDSGSYFCRGLVGSKNVSSETVNITITQGLAVPTISSFFPPGYQVSFCLVMVLLFAVDTGLYFSVKTNIRSSTRDWKDHKFKWRKDPQDK

SEQ ID NO: 5379 - protein, 386 aa, Artificial Sequence
  Synthetic Polypeptide
MALPVTALLLPLALLLHAARPDVQLVESGGGLVQPGGSLRLSCAASGFILDYYAIGWFRQAPGKEREGVLCIDASDDITYYADSVKGRFTISRDNSKNTVYLQMNSLRPEDTAVYYCATPIGLSSSCLLEYDYDYWGQGTLVTVSSTRGMRTEDLPKAVVFLEPQWYRVLEKDSVTLKCQGAYSPEDNSTQWFHNESLISSQASSYFIDAATVDDSGEYRCQTNLSTLSDPVQLEVHIGWLLLQAPRWVFKEEDPIHLRCHSWKNTALHKVTYLQNGKGRKYFHHNSDFYIPKATLKDSGSYFCRGLVGSKNVSSETVNITITQGLAVPTISSFFPPGYQVSFCLVMVLLFAVDTGLYFSVKTNIRSSTRDWKDHKFKWRKDPQDK

SEQ ID NO: 5380 - protein, 387 aa, Artificial Sequence
  Synthetic Polypeptide
MALPVTALLLPLALLLHAARPEVQLVESGGGLVQAGDSLRLSCAASGRAFSRYAMGWFRQAPGKEREFVAAIGWGPSKTNYADSVKGRFTISRDNAKNTVYLQMNTLKPEDTAVYSCAAKFVNTDSTWSRSEMYTYWGQGTLVTVSSTRGMRTEDLPKAVVFLEPQWYRVLEKDSVTLKCQGAYSPEDNSTQWFHNESLISSQASSYFIDAATVDDSGEYRCQTNLSTLSDPVQLEVHIGWLLLQAPRWVFKEEDPIHLRCHSWKNTALHKVTYLQNGKGRKYFHHNSDFYIPKATLKDSGSYFCRGLVGSKNVSSETVNITITQGLAVPTISSFFPPGYQVSFCLVMVLLFAVDTGLYFSVKTNIRSSTRDWKDHKFKWRKDPQDK

SEQ ID NO: 5381 - protein, 383 aa, Artificial Sequence
  Synthetic Polypeptide
MALPVTALLLPLALLLHAARPEVQLVESGGGLVQAGGSLRLSCVASGISSSKRNMGWYRQAPGKQRESVATISSGGNKDYTDAVKDRFTISRDTTKNTVYLQMNSLKPEDTAVYYCKIEAGTGWATRRGYTYWGQGTLVTVSSTRGMRTEDLPKAVVFLEPQWYRVLEKDSVTLKCQGAYSPEDNSTQWFHNESLISSQASSYFIDAATVDDSGEYRCQTNLSTLSDPVQLEVHIGWLLLQAPRWVFKEEDPIHLRCHSWKNTALHKVTYLQNGKGRKYFHHNSDFYIPKATLKDSGSYFCRGLVGSKNVSSETVNITITQGLAVPTISSFFPPGYQVSFCLVMVLLFAVDTGLYFSVKTNIRSSTRDWKDHKFKWRKDPQDK

SEQ ID NO: 5382 - protein, 373 aa, Artificial Sequence
  Synthetic Polypeptide
MALPVTALLLPLALLLHAARPQVQLVQSGGGLVQPGGSLRLSCAASDFDFAAYEMSWVRQAPGQGLEWVAIISHDGIDKYYTDSVKGRFTISRDNSKNTLYLQMNTLRAEDTATYYCLRLGAVGQGTLVTVSSTRGMRTEDLPKAVVFLEPQWYRVLEKDSVTLKCQGAYSPEDNSTQWFHNESLISSQASSYFIDAATVDDSGEYRCQTNLSTLSDPVQLEVHIGWLLLQAPRWVFKEEDPIHLRCHSWKNTALHKVTYLQNGKGRKYFHHNSDFYIPKATLKDSGSYFCRGLVGSKNVSSETVNITITQGLAVPTISSFFPPGYQVSFCLVMVLLFAVDTGLYFSVKTNIRSSTRDWKDHKFKWRKDPQDK

SEQ ID NO: 5383 - protein, 381 aa, Artificial Sequence
  Synthetic Polypeptide
MALPVTALLLPLALLLHAARPQVQLVQSGGGLVQPGGSLRLSCAASDFAFDDYEMSWVRQAPGKALEWIGDINHSGTTIYNPSLKSRVTISRDNSKNTLYLQMNTLRAEDTAIYYCARPHYGDYSDAFDIWGQGTMVTVSSTRGMRTEDLPKAVVFLEPQWYRVLEKDSVTLKCQGAYSPEDNSTQWFHNESLISSQASSYFIDAATVDDSGEYRCQTNLSTLSDPVQLEVHIGWLLLQAPRWVFKEEDPIHLRCHSWKNTALHKVTYLQNGKGRKYFHHNSDFYIPKATLKDSGSYFCRGLVGSKNVSSETVNITITQGLAVPTISSFFPPGYQVSFCLVMVLLFAVDTGLYFSVKTNIRSSTRDWKDHKFKWRKDPQDK

SEQ ID NO: 5384 - protein, 376 aa, Artificial Sequence
  Synthetic Polypeptide
MALPVTALLLPLALLLHAARPEVQLVESGGGLVQPGNSLRLSCAASGFTFSSFGMSWVRQAPGKGLEWVSSISGSGSDTLYADSVKGRFTISRDNAKTTLYLQMNSLRPEDTAVYYCTIGGSLSRSSQGTLVTVSSTRGMRTEDLPKAVVFLEPQWYRVLEKDSVTLKCQGAYSPEDNSTQWFHNESLISSQASSYFIDAATVDDSGEYRCQTNLSTLSDPVQLEVHIGWLLLQAPRWVFKEEDPIHLRCHSWKNTALHKVTYLQNGKGRKYFHHNSDFYIPKATLKDSGSYFCRGLVGSKNVSSETVNITITQGLAVPTISSFFPPGYQVSFCLVMVLLFAVDTGLYFSVKTNIRSSTRDWKDHKFKWRKDPQDK

SEQ ID NO: 5385 - protein, 377 aa, Artificial Sequence
  Synthetic Polypeptide
MALPVTALLLPLALLLHAARPEVQLVESGGGLVQAGGSLRLSCAASGSIFSGNVMGWYRRQAPGKEREWVAAIASGGSIYYRDSVKGRFTISRDNAKNTVYLQMNSLKPEDTAVYYCNSHPPTLPYWGLGTQVTVSSTRGMRTEDLPKAVVFLEPQWYRVLEKDSVTLKCQGAYSPEDNSTQWFHNESLISSQASSYFIDAATVDDSGEYRCQTNLSTLSDPVQLEVHIGWLLLQAPRWVFKEEDPIHLRCHSWKNTALHKVTYLQNGKGRKYFHHNSDFYIPKATLKDSGSYFCRGLVGSKNVSSETVNITITQGLAVPTISSFFPPGYQVSFCLVMVLLFAVDTGLYFSVKTNIRSSTRDWKDHKFKWRKDPQDK

SEQ ID NO: 5386 - protein, 387 aa, Artificial Sequence
  Synthetic Polypeptide
MALPVTALLLPLALLLHAARPEVQLVESGGGSVQAGGSLRLSCTTSGRALNMYVMGWFRQAPGNEREFVAATSSSGGSTSYPDSVKGRFTISRDNAKNTVYLQMNSLKPEDTAAYRCAASPYVSTPTMNILEEYRYWGLGTQVTVSSTRGMRTEDLPKAVVFLEPQWYRVLEKDSVTLKCQGAYSPEDNSTQWFHNESLISSQASSYFIDAATVDDSGEYRCQTNLSTLSDPVQLEVHIGWLLLQAPRWVFKEEDPIHLRCHSWKNTALHKVTYLQNGKGRKYFHHNSDFYIPKATLKDSGSYFCRGLVGSKNVSSETVNITITQGLAVPTISSFFPPGYQVSFCLVMVLLFAVDTGLYFSVKTNIRSSTRDWKDHKFKWRKDPQDK

SEQ ID NO: 5387 - protein, 382 aa, Artificial Sequence
  Synthetic Polypeptide
MALPVTALLLPLALLLHAARPEVQLVESGGGLVQPGGSLRLSCAASGSVFKINVMAWYRQAPGKGRELVAGIISGGSTSYADSVKGRFTISRDNAKNTLYLQMNSLRPEDTAVYYCAFITTESDYDLGRRYWGQGTLVTVSSTRGMRTEDLPKAVVFLEPQWYRVLEKDSVTLKCQGAYSPEDNSTQWFHNESLISSQASSYFIDAATVDDSGEYRCQTNLSTLSDPVQLEVHIGWLLLQAPRWVFKEEDPIHLRCHSWKNTALHKVTYLQNGKGRKYFHHNSDFYIPKATLKDSGSYFCRGLVGSKNVSSETVNITITQGLAVPTISSFFPPGYQVSFCLVMVLLFAVDTGLYFSVKTNIRSSTRDWKDHKFKWRKDPQDK

SEQ ID NO: 5388 - protein, 527 aa, Artificial Sequence
  Synthetic Polypeptide
MALPVTALLLPLALLLHAARPEVQLVESGGGSVQTGGSLRLTCAASGRTSRSYGMGWFRQAPGKEREFVSGISWRGDSTGYADSVKGRFTISRDNAKNTVDLQMNSLKPEDTAIYYCAAAAGSAWYGTLYEYDYWGQGTLVTVSSLEGGGGSGGGGSGGGGSFEEVQLVESGGGSVQAGGSLRLSCAASGDTYGSYWMGWFRQAPGKEREGVAAINRGGGYTVYADSVKGRFTISRDTAKNTVYLQMNSLRPDDTADYYCAASGVLGGLHEDWFNYWGQGTLVTVSSTRGMRTEDLPKAVVFLEPQWYRVLEKDSVTLKCQGAYSPEDNSTQWFHNESLISSQASSYFIDAATVDDSGEYRCQTNLSTLSDPVQLEVHIGWLLLQAPRWVFKEEDPIHLRCHSWKNTALHKVTYLQNGKGRKYFHHNSDFYIPKATLKDSGSYFCRGLVGSKNVSSETVNITITQGLAVPTISSFFPPGYQVSFCLVMVLLFAVDTGLYFSVKTNIRSSTRDWKDHKFKWRKDPQDK

SEQ ID NO: 5389 - protein, 546 aa, Artificial Sequence
  Synthetic Polypeptide
MALPVTALLLPLALLLHAARPEVQLVESGGGSVQAGGSLRLTCAASGSTSRSYGMGWFRQAPGKEREFVSGISWRGDSTGYADSVKGRFTISRDNAKNTVDLQMNSLKPEDTAIYYCAAAAGSTWYGTLYEYDYWGQGTLVTVSSLEGGGGSGGGGSGGGGSGSGGSGSGGSGSGGSGSGGSFEVQLVESGGGSVQAGGSLRLSCAASGDTYGSYWMGWFRQAPGQEREAVAAINRGGGYTVYADSVKGRFTISRDNAKNTLYLQMNSLRPDDTADYYCAASGVLGGLHEDWFNYWGQGTLVTVSSTRGMRTEDLPKAVVFLEPQWYRVLEKDSVTLKCQGAYSPEDNSTQWFHNESLISSQASSYFIDAATVDDSGEYRCQTNLSTLSDPVQLEVHIGWLLLQAPRWVFKEEDPIHLRCHSWKNTALHKVTYLQNGKGRKYFHHNSDFYIPKATLKDSGSYFCRGLVGSKNVSSETVNITITQGLAVPTISSFFPPGYQVSFCLVMVLLFAVDTGLYFSVKTNIRSSTRDWKDHKFKWRKDPQDK

SEQ ID NO: 5390 - protein, 536 aa, Artificial Sequence
  Synthetic Polypeptide
MALPVTALLLPLALLLHAARPEVQLVESGGGLVQAGGSLRLSCAASGITFSINTMGWYRQAPGKQRELVALISSIGDTYYADSVKGRFTISRDNAKNTVYLQMNSLKPEDTAVYYCKRFRTAAQGTDYWGQGTQVTVSSLEGGGGSGGGGSGGGGSGSGGSGSGGSGSGGSGSGGSFEVQLVESGGGLVQPGGSLRLSCAASGSIFGFNDMAWYRQAPGKQRELVALISRVGVTSSADSVKGRFTISRVNAKDTVYLQMNSLKPEDTAVYYCYMDQRLDGSTLAYWGQGTQVTVSSTRGMRTEDLPKAVVFLEPQWYRVLEKDSVTLKCQGAYSPEDNSTQWFHNESLISSQASSYFIDAATVDDSGEYRCQTNLSTLSDPVQLEVHIGWLLLQAPRWVFKEEDPIHLRCHSWKNTALHKVTYLQNGKGRKYFHHNSDFYIPKATLKDSGSYFCRGLVGSKNVSSETVNITITQGLAVPTISSFFPPGYQVSFCLVMVLLFAVDTGLYFSVKTNIRSSTRDWKDHKFKWRKDPQDK

SEQ ID NO: 5391 - protein, 503 aa, Artificial Sequence; identical to SEQ ID NO: 5206
  Synthetic Polypeptide

SEQ ID NO: 5392 - protein, 541 aa, Artificial Sequence
  Synthetic Polypeptide
MALPVTALLLPLALLLHAARPDVQLVESGGGLVQPGGSLRLSCAASGSIGGLNAMAWYRQAPGKERELVAGIFGVGSTRYADSVKGRFTISRDNSKNTVYLQMNSLRPEDTAVYYCRMSSVTRGSSDYWGQGTLVTVSSLEGGGGSGGGGSGGGGSGSGGSGSGGSGSGGSGSGGSFEVQLVESGGSLVQPGGSLRLSCAASGFTFDDYAMSWVRQVPGKGLEWVSSINWSGTHTDYADSVKGRFTISRNNANNTLYLQMNSLKSEDTAVYYCAKNWRDAGTTWFEKSGSAGQGTQVTVSSTRGMRTEDLPKAVVFLEPQWYRVLEKDSVTLKCQGAYSPEDNSTQWFHNESLISSQASSYFIDAATVDDSGEYRCQTNLSTLSDPVQLEVHIGWLLLQAPRWVFKEEDPIHLRCHSWKNTALHKVTYLQNGKGRKYFHHNSDFYIPKATLKDSGSYFCRGLVGSKNVSSETVNITITQGLAVPTISSFFPPGYQVSFCLVMVLLFAVDTGLYFSVKTNIRSSTRDWKDHKFKWRKDPQDK

SEQ ID NO: 5393 - protein, 549 aa, Artificial Sequence
  Synthetic Polypeptide
MALPVTALLLPLALLLHAARPDVQLVESGGGLVQPGGSLRLSCAASGFILDYYAIGWFRQAPGKEREGVLCIDASDDITYYADSVKGRFTISRDNSKNTVYLQMNSLRPEDTAVYYCATPIGLSSSCLLEYDYDYWGQGTLVTVSSLEGGSGSGGGGSGGGGSGSGGSGSGGSGSGGSGSGGSFEVQLVESGGGLVQPGGSLRLSCAASGRTYYLNAMGWFRQAPGKEREFVAAIDWSEGNKDYADSVKGRFTISRDNSKNTVYLQMNSLRPEDTAVYYCAADTPPWGPLIYIESYDSWGQGTLVTVSSTRGMRTEDLPKAVVFLEPQWYRVLEKDSVTLKCQGAYSPEDNSTQWFHNESLISSQASSYFIDAATVDDSGEYRCQTNLSTLSDPVQLEVHIGWLLLQAPRWVFKEEDPIHLRCHSWKNTALHKVTYLQNGKGRKYFHHNSDFYIPKATLKDSGSYFCRGLVGSKNVSSETVNITITQGLAVPTISSFFPPGYQVSFCLVMVLLFAVDTGLYFSVKTNIRSSTRDWKDHKFKWRKDPQDK

SEQ ID NO: 5394 - protein, 532 aa, Artificial Sequence
  Synthetic Polypeptide
MALPVTALLLPLALLLHAARPQVQLVQSGGGLVQPGGSLRLSCAASDFDFAAYEMSWVRQAPGQGLEWVAIISHDGIDKYYTDSVKGRFTISRDNSKNTLYLQMNTLRAEDTATYYCLRLGAVGQGTLVTVSSLEGGGGSGGGGSGGGGSGSGGSGSGGSGSGGSGSGGSFEQVQLVQSGGGLVQPGGSLRLSCAASDFAFDDYEMSWVRQAPGKALEWIGDINHSGTTIYNPSLKSRVTISRDNSKNTLYLQMNTLRAEDTAIYYCARPHYGDYSDAFDIWGQGTMVTVSSTRGMRTEDLPKAVVFLEPQWYRVLEKDSVTLKCQGAYSPEDNSTQWFHNESLISSQASSYFIDAATVDDSGEYRCQTNLSTLSDPVQLEVHIGWLLLQAPRWVFKEEDPIHLRCHSWKNTALHKVTYLQNGKGRKYFHHNSDFYIPKATLKDSGSYFCRGLVGSKNVSSETVNITITQGLAVPTISSFFPPGYQVSFCLVMVLLFAVDTGLYFSVKTNIRSSTRDWKDHKFKWRKDPQDK

SEQ ID NO: 5395 - protein, 380 aa, Artificial Sequence
  Synthetic Polypeptide
MALPVTALLLPLALLLHAARPQVKLEESGGGLVQAGRSLRLSCAASEHTFSSHVMGWFRQAPGKERESVAVIGWRDISTSYADSVKGRFTISRDNAKKTLYLQMNSLKPEDTAVYYCAARRIDAADFDSWGQGTQVTVSSTRGMRTEDLPKAVVFLEPQWYRVLEKDSVTLKCQGAYSPEDNSTQWFHNESLISSQASSYFIDAATVDDSGEYRCQTNLSTLSDPVQLEVHIGWLLLQAPRWVFKEEDPIHLRCHSWKNTALHKVTYLQNGKGRKYFHHNSDFYIPKATLKDSGSYFCRGLVGSKNVSSETVNITITQGLAVPTISSFFPPGYQVSFCLVMVLLFAVDTGLYFSVKTNIRSSTRDWKDHKFKWRKDPQDK

SEQ ID NO: 5396 - protein, 379 aa, Artificial Sequence
  Synthetic Polypeptide
MALPVTALLLPLALLLHAARPEVQLVESGGGLVQAGGSLRLSCAASGRTFTMGWFRQAPGKEREFVAAISLSPTLAYYAESVKGRFTISRDNAKNTVVLQMNSLKPEDTALYYCAADRKSVMSIRPDYWGQGTQVTVSSTRGMRTEDLPKAVVFLEPQWYRVLEKDSVTLKCQGAYSPEDNSTQWFHNESLISSQASSYFIDAATVDDSGEYRCQTNLSTLSDPVQLEVHIGWLLLQAPRWVFKEEDPIHLRCHSWKNTALHKVTYLQNGKGRKYFHHNSDFYIPKATLKDSGSYFCRGLVGSKNVSSETVNITITQGLAVPTISSFFPPGYQVSFCLVMVLLFAVDTGLYFSVKTNIRSSTRDWKDHKFKWRKDPQDK

SEQ ID NO: 5397 - protein, 513 aa, Artificial Sequence
  Synthetic Polypeptide
MALPVTALLLPLALLLHAARPQVKLEESGGGLVQAGRSLRLSCAASEHTFSSHVMGWFRQAPGKERESVAVIGWRDISTSYADSVKGRFTISRDNAKKTLYLQMNSLKPEDTAVYYCAARRIDAADFDSWGQGTQVTVSSGGGGSGGGGSGGGGSEVQLVESGGGLVQAGGSLRLSCAASGRTFTMGWFRQAPGKEREFVAAISLSPTLAYYAESVKGRFTISRDNAKNTVVLQMNSLKPEDTALYYCAADRKSVMSIRPDYWGQGTQVTVSSTRGMRTEDLPKAVVFLEPQWYRVLEKDSVTLKCQGAYSPEDNSTQWFHNESLISSQASSYFIDAATVDDSGEYRCQTNLSTLSDPVQLEVHIGWLLLQAPRWVFKEEDPIHLRCHSWKNTALHKVTYLQNGKGRKYFHHNSDFYIPKATLKDSGSYFCRGLVGSKNVSSETVNITITQGLAVPTISSFFPPGYQVSFCLVMVLLFAVDTGLYFSVKTNIRSSTRDWKDHKFKWRKDPQDK

SEQ ID NO: 5398 - protein, 377 aa, Artificial Sequence
  Synthetic Polypeptide
MALPVTALLLPLALLLHAARPEVQLVESGGGLVQAGGSLRLSCIATGKVFSIYDMGWYRQAPGKQRELVAEITSSGTTHYDDFVSGRFTISRDNAKNTVYLQMNTLKAEDTAVYYCRANHVFGGSYWGQGTQVTVSSTRGMRTEDLPKAVVFLEPQWYRVLEKDSVTLKCQGAYSPEDNSTQWFHNESLISSQASSYFIDAATVDDSGEYRCQTNLSTLSDPVQLEVHIGWLLLQAPRWVFKEEDPIHLRCHSWKNTALHKVTYLQNGKGRKYFHHNSDFYIPKATLKDSGSYFCRGLVGSKNVSSETVNITITQGLAVPTISSFFPPGYQVSFCLVMVLLFAVDTGLYFSVKTNIRSSTRDWKDHKFKWRKDPQDK

SEQ ID NO: 5399 - protein, 383 aa, Artificial Sequence
  Synthetic Polypeptide
MALPVTALLLPLALLLHAARPQVQLVESGGGLVQPGGSLRLSCEASGFTLDYYAIGWFRQAPGKEREGVICISRSDGSTYYADSVKGRFTISRDNAKKTVYLQMISLKPEDTAAYYCAAGADCSGYLRDYEFRGQGTQVTVSSTRGMRTEDLPKAVVFLEPQWYRVLEKDSVTLKCQGAYSPEDNSTQWFHNESLISSQASSYFIDAATVDDSGEYRCQTNLSTLSDPVQLEVHIGWLLLQAPRWVFKEEDPIHLRCHSWKNTALHKVTYLQNGKGRKYFHHNSDFYIPKATLKDSGSYFCRGLVGSKNVSSETVNITITQGLAVPTISSFFPPGYQVSFCLVMVLLFAVDTGLYFSVKTNIRSSTRDWKDHKFKWRKDPQDK

SEQ ID NO: 5400 - protein, 506 aa, Artificial Sequence
  Synthetic Polypeptide
MALPVTALLLPLALLLHAARPEVQLVESGGGLVQAGGSLRLSCIATGKVFSIYDMGWYRQAPGKQRELVAEITSSGTTHYDDFVSGRFTISRDNAKNTVYLQMNTLKAEDTAVYYCRANHVFGGSYWGQGTQVTVSSEVAALEKQVQLVESGGGLVQPGGSLRLSCEASGFTLDYYAIGWFRQAPGKEREGVICISRSDGSTYYADSVKGRFTISRDNAKKTVYLQMISLKPEDTAAYYCAAGADCSGYLRDYEFRGQGTQVTVSSTRGMRTEDLPKAVVFLEPQWYRVLEKDSVTLKCQGAYSPEDNSTQWFHNESLISSQASSYFIDAATVDDSGEYRCQTNLSTLSDPVQLEVHIGWLLLQAPRWVFKEEDPIHLRCHSWKNTALHKVTYLQNGKGRKYFHHNSDFYIPKATLKDSGSYFCRGLVGSKNVSSETVNITITQGLAVPTISSFFPPGYQVSFCLVMVLLFAVDTGLYFSVKTNIRSSTRDWKDHKFKWRKDPQDK

SEQ ID NO: 5401 - protein, 389 aa, Artificial Sequence
  Synthetic Polypeptide
MALPVTALLLPLALLLHAARPQVKLEESGGRLVQPRGSLRLSCAGSGRTFSTYGMAWFRQAPGKEREFVASKASMNYSGRTYYADSVKGRFTIARDNAKNMVFLQMNNLKPEDTAVYYCAAGTGCSTYGCFDAQIIDYWGKGTLVTVSSTRGMRTEDLPKAVVFLEPQWYRVLEKDSVTLKCQGAYSPEDNSTQWFHNESLISSQASSYFIDAATVDDSGEYRCQTNLSTLSDPVQLEVHIGWLLLQAPRWVFKEEDPIHLRCHSWKNTALHKVTYLQNGKGRKYFHHNSDFYIPKATLKDSGSYFCRGLVGSKNVSSETVNITITQGLAVPTISSFFPPGYQVSFCLVMVLLFAVDTGLYFSVKTNIRSSTRDWKDHKFKWRKDPQDK

SEQ ID NO: 5402 - protein, 380 aa, Artificial Sequence
  Synthetic Polypeptide
MALPVTALLLPLALLLHAARPQVKLEESGGGLVQPGESLRLSCSASGSIFKVFRVFAMSWYRQGPGKQRELVASISSGETTTYADSVKGRFTISRDNAKNTAYLQMDSLKPEDTAVYYCNADHTFTGDFWGQGTQVTVSSTRGMRTEDLPKAVVFLEPQWYRVLEKDSVTLKCQGAYSPEDNSTQWFHNESLISSQASSYFIDAATVDDSGEYRCQTNLSTLSDPVQLEVHIGWLLLQAPRWVFKEEDPIHLRCHSWKNTALHKVTYLQNGKGRKYFHHNSDFYIPKATLKDSGSYFCRGLVGSKNVSSETVNITITQGLAVPTISSFFPPGYQVSFCLVMVLLFAVDTGLYFSVKTNIRSSTRDWKDHKFKWRKDPQDK

SEQ ID NO: 5403 - protein, 515 aa, Artificial Sequence
  Synthetic Polypeptide
MALPVTALLLPLALLLHAARPQVKLEESGGRLVQPRGSLRLSCAGSGRTFSTYGMAWFRQAPGKEREFVASKASMNYSGRTYYADSVKGRFTIARDNAKNMVFLQMNNLKPEDTAVYYCAAGTGCSTYGCFDAQIIDYWGKGTLVTVSSEVAALEKQVKLEESGGGLVQPGESLRLSCSASGSIFKVFRVFAMSWYRQGPGKQRELVASISSGETTTYADSVKGRFTISRDNAKNTAYLQMDSLKPEDTAVYYCNADHTFTGDFWGQGTQVTVSSTRGMRTEDLPKAVVFLEPQWYRVLEKDSVTLKCQGAYSPEDNSTQWFHNESLISSQASSYFIDAATVDDSGEYRCQTNLSTLSDPVQLEVHIGWLLLQAPRWVFKEEDPIHLRCHSWKNTALHKVTYLQNGKGRKYFHHNSDFYIPKATLKDSGSYFCRGLVGSKNVSSETVNITITQGLAVPTISSFFPPGYQVSFCLVMVLLFAVDTGLYFSVKTNIRSSTRDWKDHKFKWRKDPQDK

SEQ ID NO: 5404 - protein, 378 aa, Artificial Sequence
  Synthetic Polypeptide
MALPVTALLLPLALLLHAARPQVKLEESGGELVQPGGPLRLSCAASGNIFSINRMGWYRQAPGKQRAFVASITVRGITNYADSVKGRFTISVDKSKNTIYLQMNALKPEDTAVYYCNAVSSNRDPDYWGQGTQVTVSSTRGMRTEDLPKAVVFLEPQWYRVLEKDSVTLKCQGAYSPEDNSTQWFHNESLISSQASSYFIDAATVDDSGEYRCQTNLSTLSDPVQLEVHIGWLLLQAPRWVFKEEDPIHLRCHSWKNTALHKVTYLQNGKGRKYFHHNSDFYIPKATLKDSGSYFCRGLVGSKNVSSETVNITITQGLAVPTISSFFPPGYQVSFCLVMVLLFAVDTGLYFSVKTNIRSSTRDWKDHKFKWRKDPQDK

SEQ ID NO: 5405 - protein, 390 aa, Artificial Sequence
  Synthetic Polypeptide
MALPVTALLLPLALLLHAARPPVQLVESGGGLVQAGDSLRLSCAASGRTFGIGTMGWFRQPPGKEREFVAAIRWSTGGTRYADSVKGRFTISRDNAKLTVDLQMDSLKPEDTAVYYCAADRLSLDLSGRYHYNPAVYDYWGQGTQVTVSSTRGMRTEDLPKAVVFLEPQWYRVLEKDSVTLKCQGAYSPEDNSTQWFHNESLISSQASSYFIDAATVDDSGEYRCQTNLSTLSDPVQLEVHIGWLLLQAPRWVFKEEDPIHLRCHSWKNTALHKVTYLQNGKGRKYFHHNSDFYIPKATLKDSGSYFCRGLVGSKNVSSETVNITITQGLAVPTISSFFPPGYQVSFCLVMVLLFAVDTGLYFSVKTNIRSSTRDWKDHKFKWRKDPQDK

SEQ ID NO: 5406 - protein, 522 aa, Artificial Sequence
  Synthetic Polypeptide
MALPVTALLLPLALLLHAARPQVKLEESGGELVQPGGPLRLSCAASGNIFSINRMGWYRQAPGKQRAFVASITVRGITNYADSVKGRFTISVDKSKNTIYLQMNALKPEDTAVYYCNAVSSNRDPDYWGQGTQVTVSSGGGGSGGGGSGGGGSPVQLVESGGGLVQAGDSLRLSCAASGRTFGIGTMGWFRQPPGKEREFVAAIRWSTGGTRYADSVKGRFTISRDNAKLTVDLQMDSLKPEDTAVYYCAADRLSLDLSGRYHYNPAVYDYWGQGTQVTVSSTRGMRTEDLPKAVVFLEPQWYRVLEKDSVTLKCQGAYSPEDNSTQWFHNESLISSQASSYFIDAATVDDSGEYRCQTNLSTLSDPVQLEVHIGWLLLQAPRWVFKEEDPIHLRCHSWKNTALHKVTYLQNGKGRKYFHHNSDFYIPKATLKDSGSYFCRGLVGSKNVSSETVNITITQGLAVPTISSFFPPGYQVSFCLVMVLLFAVDTGLYFSVKTNIRSSTRDWKDHKFKWRKDPQDK

SEQ ID NO: 5407 - protein, 380 aa, Artificial Sequence
  Synthetic Polypeptide
MALPVTALLLPLALLLHAARPAVQLVESGGGLVQAGDSLRLTCTASGRAFSTYFMAWFRQAPGKEREFVAGIAWSGGSTAYADSVKGRFTISRDNAKNTVYLQMNSLKSEDTAVYYCASRGIEVEEFGAWGQGTQVTVSSTRGMRTEDLPKAVVFLEPQWYRVLEKDSVTLKCQGAYSPEDNSTQWFHNESLISSQASSYFIDAATVDDSGEYRCQTNLSTLSDPVQLEVHIGWLLLQAPRWVFKEEDPIHLRCHSWKNTALHKVTYLQNGKGRKYFHHNSDFYIPKATLKDSGSYFCRGLVGSKNVSSETVNITITQGLAVPTISSFFPPGYQVSFCLVMVLLFAVDTGLYFSVKTNIRSSTRDWKDHKFKWRKDPQDK

SEQ ID NO: 5408 - protein, 381 aa, Artificial Sequence
  Synthetic Polypeptide
MALPVTALLLPLALLLHAARPQVQLVESGGGLVQAGGSLRLSCAASGGTLSKNTVAWFRQAPGKERGFVASITWDGRTTYYADSVKGRFTISRDNAKNTVYLQMNSLKPEDTAVYVCADLGKWPAGPADYWGQGTQVTVSSTRGMRTEDLPKAVVFLEPQWYRVLEKDSVTLKCQGAYSPEDNSTQWFHNESLISSQASSYFIDAATVDDSGEYRCQTNLSTLSDPVQLEVHIGWLLLQAPRWVFKEEDPIHLRCHSWKNTALHKVTYLQNGKGRKYFHHNSDFYIPKATLKDSGSYFCRGLVGSKNVSSETVNITITQGLAVPTISSFFPPGYQVSFCLVMVLLFAVDTGLYFSVKTNIRSSTRDWKDHKFKWRKDPQDK

SEQ ID NO: 5409 - protein, 10 aa, Artificial Sequence
  Synthetic Polypeptide
GGGGGGGGGG

SEQ ID NO: 5410 - protein, 385 aa, Artificial Sequence
  Synthetic Polypeptide
MALPVTALLLPLALLLHAARPGSDLGIKLLFAAAKGQDDEVRILLAAGADVNAKDFEGYTPLHVAAYDGHLEIVEVLLKAGADVNAKDSQGRTPLHEAAYSGHLEIVEVLLKAGADVNAQDDAGETPADLAAAWGHEDIAEVLQKTRGMRTEDLPKAVVFLEPQWYRVLEKDSVTLKCQGAYSPEDNSTQWFHNESLISSQASSYFIDAATVDDSGEYRCQTNLSTLSDPVQLEVHIGWLLLQAPRWVFKEEDPIHLRCHSWKNTALHKVTYLQNGKGRKYFHHNSDFYIPKATLKDSGSYFCRGLVGSKNVSSETVNITITQGLAVPTISSFFPPGYQVSFCLVMVLLFAVDTGLYFSVKTNIRSSTRDWKDHKFKWRKDPQDK

SEQ ID NO: 5411 - protein, 387 aa, Artificial Sequence
  Synthetic Polypeptide
MALPVTALLLPLALLLHAARPRSDLGKKLLEAARAGQDDEVRILMANGADVNAKDEYGLTPLYLATAHGHLEIVEVLLKNGADVNAVDAIGFTPLHLAAFIGHLEIAEVLLKHGADVNAQDKFGKTAFDISIGNGNEDLAEILQKLNTRGMRTEDLPKAVVFLEPQWYRVLEKDSVTLKCQGAYSPEDNSTQWFHNESLISSQASSYFIDAATVDDSGEYRCQTNLSTLSDPVQLEVHIGWLLLQAPRWVFKEEDPIHLRCHSWKNTALHKVTYLQNGKGRKYFHHNSDFYIPKATLKDSGSYFCRGLVGSKNVSSETVNITITQGLAVPTISSFFPPGYQVSFCLVMVLLFAVDTGLYFSVKTNIRSSTRDWKDHKFKWRKDPQDK

SEQ ID NO: 5412 - protein, 319 aa, Artificial Sequence
  Synthetic Polypeptide
MALPVTALLLPLALLLHAARPVDNKFNKERYSAYYEIWQLPNLNVRQKAAFIGSLQDDPSQSANLLAEAKKLNDAQAPKTRGMRTEDLPKAVVFLEPQWYRVLEKDSVTLKCQGAYSPEDNSTQWFHNESLISSQASSYFIDAATVDDSGEYRCQTNLSTLSDPVQLEVHIGWLLLQAPRWVFKEEDPIHLRCHSWKNTALHKVTYLQNGKGRKYFHHNSDFYIPKATLKDSGSYFCRGLVGSKNVSSETVNITITQGLAVPTISSFFPPGYQVSFCLVMVLLFAVDTGLYFSVKTNIRSSTRDWKDHKFKWRKDPQDK

SEQ ID NO: 5413 - protein, 312 aa, Artificial Sequence
  Synthetic Polypeptide
MALPVTALLLPLALLLHAARPYAKEMRNAYWEIALLPNLTNQQKRAPIRKLYDDPSQSSELLSEAKKLNDSQTRGMRTEDLPKAVVFLEPQWYRVLEKDSVTLKCQGAYSPEDNSTQWFHNESLISSQASSYFIDAATVDDSGEYRCQTNLSTLSDPVQLEVHIGWLLLQAPRWVFKEEDPIHLRCHSWKNTALHKVTYLQNGKGRKYFHHNSDFYIPKATLKDSGSYFCRGLVGSKNVSSETVNITITQGLAVPTISSFFPPGYQVSFCLVMVLLFAVDTGLYFSVKTNIRSSTRDWKDHKFKWRKDPQDK

SEQ ID NO: 5414 - protein, 312 aa, Artificial Sequence
  Synthetic Polypeptide
MALPVTALLLPLALLLHAARPYAKEMWIAWEEIRNLPNLNGWQMTAFIAKLLDDPSQSSELLSEAKKLNDSQTRGMRTEDLPKAVVFLEPQWYRVLEKDSVTLKCQGAYSPEDNSTQWFHNESLISSQASSYFIDAATVDDSGEYRCQTNLSTLSDPVQLEVHIGWLLLQAPRWVFKEEDPIHLRCHSWKNTALHKVTYLQNGKGRKYFHHNSDFYIPKATLKDSGSYFCRGLVGSKNVSSETVNITITQGLAVPTISSFFPPGYQVSFCLVMVLLFAVDTGLYFSVKTNIRSSTRDWKDHKFKWRKDPQDK

SEQ ID NO: 5415 - protein, 350 aa, Artificial Sequence
  Synthetic Polypeptide
MALPVTALLLPLALLLHAARPLPAPKNLVVSRVTEDSARLSWTAPDAAFDSFAIGYWEWDDDGEAIVLTVPGSERSYDLTGLKPGTEYPVYIAGVKGGQWSFPLSAIFTTTRGMRTEDLPKAVVFLEPQWYRVLEKDSVTLKCQGAYSPEDNSTQWFHNESLISSQASSYFIDAATVDDSGEYRCQTNLSTLSDPVQLEVHIGWLLLQAPRWVFKEEDPIHLRCHSWKNTALHKVTYLQNGKGRKYFHHNSDFYIPKATLKDSGSYFCRGLVGSKNVSSETVNITITQGLAVPTISSFFPPGYQVSFCLVMVLLFAVDTGLYFSVKTNIRSSTRDWKDHKFKWRKDPQDK

SEQ ID NO: 5416 - protein, 352 aa, Artificial Sequence
  Synthetic Polypeptide
MALPVTALLLPLALLLHAARPLPAPKNLVVSRVTEDSARLSWAIDEQRDWFESFLIQYQESEKVGEAIVLTVPGSERSYDLTGLKPGTEYTVSIYGVYHVYRSNPLSAIFTTTRGMRTEDLPKAVVFLEPQWYRVLEKDSVTLKCQGAYSPEDNSTQWFHNESLISSQASSYFIDAATVDDSGEYRCQTNLSTLSDPVQLEVHIGWLLLQAPRWVFKEEDPIHLRCHSWKNTALHKVTYLQNGKGRKYFHHNSDFYIPKATLKDSGSYFCRGLVGSKNVSSETVNITITQGLAVPTISSFFPPGYQVSFCLVMVLLFAVDTGLYFSVKTNIRSSTRDWKDHKFKWRKDPQDK

SEQ ID NO: 5417 - protein, 350 aa, Artificial Sequence
  Synthetic Polypeptide
MALPVTALLLPLALLLHAARPLPAPKNLVVSRVTEDSARLSWTAPDAAFDSFPIGYWEWDDDGEAIVLTVPGSERSYDLTGLKPGTEYHVYIAGVKGGQWSFPLSAIFTTTRGMRTEDLPKAVVFLEPQWYRVLEKDSVTLKCQGAYSPEDNSTQWFHNESLISSQASSYFIDAATVDDSGEYRCQTNLSTLSDPVQLEVHIGWLLLQAPRWVFKEEDPIHLRCHSWKNTALHKVTYLQNGKGRKYFHHNSDFYIPKATLKDSGSYFCRGLVGSKNVSSETVNITITQGLAVPTISSFFPPGYQVSFCLVMVLLFAVDTGLYFSVKTNIRSSTRDWKDHKFKWRKDPQDK

SEQ ID NO: 5418 - protein, 355 aa, Artificial Sequence
  Synthetic Polypeptide
MALPVTALLLPLALLLHAARPLPAPKNLVVSEVTEDSARLSWDDPWAFYESFLIQYQESEKVGEAIVLTVPGSERSYDLTGLKPGTEYTVSIYGVHNVYKDTNMRGLPLSAIFTTTRGMRTEDLPKAVVFLEPQWYRVLEKDSVTLKCQGAYSPEDNSTQWFHNESLISSQASSYFIDAATVDDSGEYRCQTNLSTLSDPVQLEVHIGWLLLQAPRWVFKEEDPIHLRCHSWKNTALHKVTYLQNGKGRKYFHHNSDFYIPKATLKDSGSYFCRGLVGSKNVSSETVNITITQGLAVPTISSFFPPGYQVSFCLVMVLLFAVDTGLYFSVKTNIRSSTRDWKDHKFKWRKDPQDK

SEQ ID NO: 5419 - protein, 350 aa, Artificial Sequence
  Synthetic Polypeptide
MALPVTALLLPLALLLHAARPLPAPKNLVVSRVTEDSARLSWTAPDAAFDSFWIRYFEFLGSGEAIVLTVPGSERSYDLTGLKPGTEYVVNIMGVKGGKISPPLSAIFTTTRGMRTEDLPKAVVFLEPQWYRVLEKDSVTLKCQGAYSPEDNSTQWFHNESLISSQASSYFIDAATVDDSGEYRCQTNLSTLSDPVQLEVHIGWLLLQAPRWVFKEEDPIHLRCHSWKNTALHKVTYLQNGKGRKYFHHNSDFYIPKATLKDSGSYFCRGLVGSKNVSSETVNITITQGLAVPTISSFFPPGYQVSFCLVMVLLFAVDTGLYFSVKTNIRSSTRDWKDHKFKWRKDPQDK

SEQ ID NO: 5420 - protein, 454 aa, Artificial Sequence
  Synthetic Polypeptide
MALPVTALLLPLALLLHAARPLPAPKNLVVSEVTEDSARLSWDDPWAFYESFLIQYQESEKVGEAIVLTVPGSERSYDLTGLKPGTEYTVSIYGVHNVYKDTNMRGLPLSAIFTTAPAPAPAPAPLPAPKNLVVSRVTEDSARLSWTAPDAAFDSFWIRYFEFLGSGEAIVLTVPGSERSYDLTGLKPGTEYVVNIMGVKGGKISPPLSAIFTTTRGMRTEDLPKAVVFLEPQWYRVLEKDSVTLKCQGAYSPEDNSTQWFHNESLISSQASSYFIDAATVDDSGEYRCQTNLSTLSDPVQLEVHIGWLLLQAPRWVFKEEDPIHLRCHSWKNTALHKVTYLQNGKGRKYFHHNSDFYIPKATLKDSGSYFCRGLVGSKNVSSETVNITITQGLAVPTISSFFPPGYQVSFCLVMVLLFAVDTGLYFSVKTNIRSSTRDWKDHKFKWRKDPQDK

SEQ ID NO: 5421 - protein, 351 aa, Artificial Sequence
  Synthetic Polypeptide
MALPVTALLLPLALLLHAARPMLPAPKNLVVSRITEDSARLSWTAPDAAFDSFPIRYIETLIWGEAIWLDVPGSERSYDLTGLKPGTEYAVVITGVKGGRFSSPLVASFTTTRGMRTEDLPKAVVFLEPQWYRVLEKDSVTLKCQGAYSPEDNSTQWFHNESLISSQASSYFIDAATVDDSGEYRCQTNLSTLSDPVQLEVHIGWLLLQAPRWVFKEEDPIHLRCHSWKNTALHKVTYLQNGKGRKYFHHNSDFYIPKATLKDSGSYFCRGLVGSKNVSSETVNITITQGLAVPTISSFFPPGYQVSFCLVMVLLFAVDTGLYFSVKTNIRSSTRDWKDHKFKWRKDPQDK

SEQ ID NO: 5422 - protein, 10 aa, Artificial Sequence
  Synthetic Polypeptide
GGGGGGGGGG

SEQ ID NO: 5423 - protein, 827 aa, Artificial Sequence
  Synthetic Polypeptide
MALPVTALLLPLALLLHAARPEWVKFAKPCREGEDNSKRNPIAKITSDYQATQKITYRISGVGIDQPPFGIFVVDKNTGDINITAIVDREETPSFLITCRALNAQGLDVEKPLILTVKILDINDNPPVFSQQIFMGEIEENSASNSLVMILNATDADEPNHLNSKIAFKIVSQEPAGTPMFLLSRNTGEVRTLTNSLDREQASSYRLVVSGADKDGEGLSTQCECNIKVKDVNDNFPMFRDSQYSARIEENILSSELLRFQVTDLDEEYTDNWLAVYFFTSGNEGNWFEIQTDPRTNEGILKVVKALDYEQLQSVKLSIAVKNKAEFHQSVISRYRVQSTPVTIQVINVREGIAFRPASKTFTVQKGISSKKLVDYILGTYQAIDEDTNKAASNVKYVMGRNDGGYLMIDSKTAEIKFVKNMNRDSTFIVNKTITAEVLAIDEYTGKTSTGTVYVRVPDFNDNCPTAVLEKDAVCSSSPSVVVSARTLNNRYTGPYTFALEDQPVKLPAVWSITTLNATSALLRAQEQIPPGVYHISLVLTDSQNNRCEMPRSLTLEVCQCDNRGICGTSYPTTSPGTRYGRPHSGRTRGMRTEDLPKAVVFLEPQWYRVLEKDSVTLKCQGAYSPEDNSTQWFHNESLISSQASSYFIDAATVDDSGEYRCQTNLSTLSDPVQLEVHIGWLLLQAPRWVFKEEDPIHLRCHSWKNTALHKVTYLQNGKGRKYFHHNSDFYIPKATLKDSGSYFCRGLVGSKNVSSETVNITITQGLAVPTISSFFPPGYQVSFCLVMVLLFAVDTGLYFSVKTNIRSSTRDWKDHKFKWRKDPQDK

SEQ ID NO: 5424 - protein, 568 aa, Artificial Sequence
  Synthetic Polypeptide
MALPVTALLLPLALLLHAARPMALPVTALLLPLALLLHAARPLFNQEVQIPLTESYCGPCPKNWICYKNNCYQFFDESKNWYESQASCMSQNASLLKVYSKEDQDLLKLVKSYHWMGLVHIPTNGSWQWEDGSILSPNLLTIIEMQKGDCALYASSFKGYIENCSTPNTYICMQRTVGGGGSGGGGSGGGGSDLFNQEVQIPLTESYCGPCPKNWICYKNNCYQFFDESKNWYESQASCMSQNASLLKVYSKEDQDLLKLVKSYHWMGLVHIPTNGSWQWEDGSILSPNLLTIIEMQKGDCALYASSFKGYIENCSTPNTYICMQRTVTRGMRTEDLPKAVVFLEPQWYRVLEKDSVTLKCQGAYSPEDNSTQWFHNESLISSQASSYFIDAATVDDSGEYRCQTNLSTLSDPVQLEVHIGWLLLQAPRWVFKEEDPIHLRCHSWKNTALHKVTYLQNGKGRKYFHHNSDFYIPKATLKDSGSYFCRGLVGSKNVSSETVNITITQGLAVPTISSFFPPGYQVSFCLVMVLLFAVDTGLYFSVKTNIRSSTRDWKDHKFKWRKDPQDK

SEQ ID NO: 5425 - protein, 448 aa, Artificial Sequence
  Synthetic Polypeptide
MALPVTALLLPLALLLHAARPMELTDLLLAAMLLAVARLTLSSPVAPACDPRLLNKLLRDSHLLHSRLSQCPDVDPLSIPVLLPAVDFSLGEWKTQTEQSKAQDILGAVSLLLEGVMAARGQLEPSCLSSLLGQLSGQVRLLLGALQGLLGTQLPLQGRTTAHKDPNALFLSLQQLLRGKVRFLLLVEGPTLCVRRTLPTTAVPSSTSTRGMRTEDLPKAVVFLEPQWYRVLEKDSVTLKCQGAYSPEDNSTQWFHNESLISSQASSYFIDAATVDDSGEYRCQTNLSTLSDPVQLEVHIGWLLLQAPRWVFKEEDPIHLRCHSWKNTALHKVTYLQNGKGRKYFHHNSDFYIPKATLKDSGSYFCRGLVGSKNVSSETVNITITQGLAVPTISSFFPPGYQVSFCLVMVLLFAVDTGLYFSVKTNIRSSTRDWKDHKFKWRKDPQDK

SEQ ID NO: 5426 - protein, 314 aa, Artificial Sequence
  Synthetic Polypeptide
MALPVTALLLPLALLLHAARPMDPDLEIRAAFLRQRNTALRTEVAELEQEVQRLENEVSQYETRYGPLGGGKTRTRGMRTEDLPKAVVFLEPQWYRVLEKDSVTLKCQGAYSPEDNSTQWFHNESLISSQASSYFIDAATVDDSGEYRCQTNLSTLSDPVQLEVHIGWLLLQAPRWVFKEEDPIHLRCHSWKNTALHKVTYLQNGKGRKYFHHNSDFYIPKATLKDSGSYFCRGLVGSKNVSSETVNITITQGLAVPTISSFFPPGYQVSFCLVMVLLFAVDTGLYFSVKTNIRSSTRDWKDHKFKWRKDPQDK

SEQ ID NO: 5427 - protein, 289 aa, Artificial Sequence
  Synthetic Polypeptide
MALPVTALLLPLALLLHAARPEVAALEKEVAALEKEVAALEKEVAALEKTRGMRTEDLPKAVVFLEPQWYRVLEKDSVTLKCQGAYSPEDNSTQWFHNESLISSQASSYFIDAATVDDSGEYRCQTNLSTLSDPVQLEVHIGWLLLQAPRWVFKEEDPIHLRCHSWKNTALHKVTYLQNGKGRKYFHHNSDFYIPKATLKDSGSYFCRGLVGSKNVSSETVNITITQGLAVPTISSFFPPGYQVSFCLVMVLLFAVDTGLYFSVKTNIRSSTRDWKDHKFKWRKDPQDK

SEQ ID NO: 5428 - protein, 547 aa, Artificial Sequence
  Synthetic Polypeptide
MALPVTALLLPLALLLHAARPLFNQEVQIPLTESYCGPCPKNWICYKNNCYQFFDESKNWYESQASCMSQNASLLKVYSKEDQDLLKLVKSAHWMGLVHIPTNGSWQWEDGSILSPNLLTIIEMQKGDCALYASSFKGFIENCSTPNTYICMQRTVGGGGSGGGGSGGGGSDLFNQEVQIPLTESYCGPCPKNWICYKNNCYQFFDESKNWYESQASCMSQNASLLKVYSKEDQDLLKLVKSAHWMGLVHIPTNGSWQWEDGSILSPNLLTIIEMQKGDCALYASSFKGFIENCSTPNTYICMQRTVTRGMRTEDLPKAVVFLEPQWYRVLEKDSVTLKCQGAYSPEDNSTQWFHNESLISSQASSYFIDAATVDDSGEYRCQTNLSTLSDPVQLEVHIGWLLLQAPRWVFKEEDPIHLRCHSWKNTALHKVTYLQNGKGRKYFHHNSDFYIPKATLKDSGSYFCRGLVGSKNVSSETVNITITQGLAVPTISSFFPPGYQVSFCLVMVLLFAVDTGLYFSVKTNIRSSTRDWKDHKFKWRKDPQDK

SEQ ID NO: 5429 - protein, 547 aa, Artificial Sequence
  Synthetic Polypeptide
MALPVTALLLPLALLLHAARPLFNQEVQIPLTESYCGPCPKNWICYKNNCYQFFDESKNWYESQASCMSQNASLLKVYSKEDQDLLKLVKSAHWMGLVHIPTNGSWQWEDGSILSPNLLTIIEMQKGDCALYASSFKGYIENCSTPNTYICMQRTVSGGGGSGGGGSGGGGDLFNQEVQIPLTESYCGPCPKNWICYKNNCYQFFDESKNWYESQASCMSQNASLLKVYSKEDQDLLKLVKSAHWMGLVHIPTNGSWQWEDGSILSPNLLTIIEMQKGDCALYASSFKGYIENCSTPNTYICMQRTVTRGMRTEDLPKAVVFLEPQWYRVLEKDSVTLKCQGAYSPEDNSTQWFHNESLISSQASSYFIDAATVDDSGEYRCQTNLSTLSDPVQLEVHIGWLLLQAPRWVFKEEDPIHLRCHSWKNTALHKVTYLQNGKGRKYFHHNSDFYIPKATLKDSGSYFCRGLVGSKNVSSETVNITITQGLAVPTISSFFPPGYQVSFCLVMVLLFAVDTGLYFSVKTNIRSSTRDWKDHKFKWRKDPQDK

SEQ ID NO: 5430 - protein, 10 aa, Artificial Sequence
  Synthetic Polypeptide
GGGGGGGGGG

SEQ ID NO: 5431 - protein, 327 aa, Artificial Sequence
  Synthetic Polypeptide
MALPVTALLLPLALLLHAARPEVQLLESGGGLIQPGGSLRLSCAASGFTFSSHAMTWVRQAPGKGLEWVSAISGSGDYTHYADSVKGRFTISRDNSKNTVYLQMNSLRAEDSAVYYCAKDEDGGSLLGHRGQGTLVTVSSTRGGGGSEPHSLSYDITVIPKFRPGPRWCAVQGQVDEKTFLHYDCGNKTVTPVSPLGKKLNVTTAWKAQNPVLREVVDILTEQLWDIQLENYTPKEPLTLQARMSCEQKAEGHSSGSWQFSFDGQIFLLFDSEKRMWTTVHPGARKMKEKWENDKVVATLLWGWSMGDCIGWLEDFLMGMDSTLEPS

SEQ ID NO: 5432 - protein, 327 aa, Artificial Sequence
  Synthetic Polypeptide
MALPVTALLLPLALLLHAARPEVQLLESGGGLIQPGGSLRLSCAASGFTFSSHAMTWVRQAPGKGLEWVSAISGSGDYTHYADSVKGRFTISRDNSKNTVYLQMNSLRAEDSAVYYCAKDEDGGSLLGHRGQGTLVTVSSTRGGGGSEPHSLSYDITVIPKFRPGPRWCAVQGQVDEKTFLHYDCGNKTVTPVSPLGKKLNVTTAWKAQNPVLREVVDILTEQLWDIQLENYTPKEPLTLQARMSCEQKAEGHSSGSWQFSFDGQIFLLFDSEKRMWTTVHPGARKMKEKWENDKVVATKLYLWSMGDCIGWLEDFLMGMDSTLEPS

SEQ ID NO: 5433 - protein, 10 aa, Artificial Sequence
  Synthetic Polypeptide
GGGGGGGGGG

SEQ ID NO: 5434 - protein, 1048 aa, Artificial Sequence
  Synthetic Polypeptide
MALPVTALLLPLALLLHAARPDIQMTQTTSSLSASLGDRVTISCRASQDISKYLNWYQQKPDGTVKLLIYHTSRLHSGVPSRFSGSGSGTDYSLTISNLEQEDIATYFCQQGNTLPYTFGGGTKLEITLEDLKNVFPPEVAVFEPSEAEISHTQKATLVCLATGFYPDHVELSWWVNGKEVHSGVSTDPQPLKEQPALNDSRYCLSSRLRVSATFWQNPRNHFRCQVQFYGLSENDEWTQDRAKPVTQIVSAEAWGRADCGSQSFGLLDPKLCYLLDGILFIYGVILTALFLRVKFSRSADAPAYQQGQNQLYNELNLGRREEYDVLDKRRGRDPEMGGKPQRRKNPQEGLYNELQKDKMAEAYSEIGMKGERRRGKGHDGLYQGLSTATKDTYDALHMQALPPRRAKRSGSGATNFSLLKQAGDVEENPGPTSMDWIWRILFLVGAATGAHSFEVKLQESGPGLVAPSQSLSVTCTVSGVSLPDYGVSWIRQPPRKGLEWLGVIWGSETTYYNSALKSRLTIIKDNSKSQVFLKMNSLQTDDTAIYYCAKHYYYGGSYAMDYWGQGTSVTVSSTRIQNPDPAVYQLRDSKSSDKSVCLFTDFDSQTNVSQSKDSDVYITDKTVLDMRSMDFKSNSAVAWSNKSDFACANAFNNSIIPEDTFFPSPESSCGTQSFGLLDPKLCYLLDGILFIYGVILTALFLRVKFSRSADAPAYQQGQNQLYNELNLGRREEYDVLDKRRGRDPEMGGKPQRRKNPQEGLYNELQKDKMAEAYSEIGMKGERRRGKGHDGLYQGLSTATKDTYDALHMQALPPRRAKRSGSGVKQTLNFDLLKLAGDVESNPGPSRGHMTEYKPTVRLATRDDVPRAVRTLAAAFADYPATRHTVDPDRHIERVTELQELFLTRVGLDIGKVWVADDGAAVAVWTTPESVEAGAVFAEIGPRMAELSGSRLAAQQQMEGLLAPHRPKEPAWFLATVGVSPDHQGKGLGSAVVLPGVEAAERAGVPAFLETSAPRNLPFYERLGFTVTADVEVPEGPRTWCMTRKPGA

SEQ ID NO: 5435 - protein, 1048 aa, Artificial Sequence
  Synthetic Polypeptide
MALPVTALLLPLALLLHAARPDIQMTQTTSSLSASLGDRVTISCRASQDISKYLNWYQQKPDGTVKLLIYHTSRLHSGVPSRFSGSGSGTDYSLTISNLEQEDIATYFCQQGNTLPYTFGGGTKLEITLEDLKNVFPPEVAVFEPSKAEIAHTQKATLVCLATGFYPDHVELSWWVNGKEVHSGVCTDPQPLKEQPALNDSRYCLSSRLRVSATFWQNPRNHFRCQVQFYGLSENDEWTQDRAKPVTQIVSAEAWGRADCGSQSFGLLDPKLCYLLDGILFIYGVILTALFLRVKFSRSADAPAYQQGQNQLYNELNLGRREEYDVLDKRRGRDPEMGGKPQRRKNPQEGLYNELQKDKMAEAYSEIGMKGERRRGKGHDGLYQGLSTATKDTYDALHMQALPPRRAKRSGSGATNFSLLKQAGDVEENPGPTSMDWIWRILFLVGAATGAHSFEVKLQESGPGLVAPSQSLSVTCTVSGVSLPDYGVSWIRQPPRKGLEWLGVIWGSETTYYNSALKSRLTIIKDNSKSQVFLKMNSLQTDDTAIYYCAKHYYYGGSYAMDYWGQGTSVTVSSTRIQNPDPAVYQLRDSKSSDKSVCLFTDFDSQTNVSQSKDSDVYITDKCVLDMRSMDFKSNSAVAWSNKSDFACANAFNNSIIPEDTFFPSSDVPCGTQSFGLLDPKLCYLLDGILFIYGVILTALFLRVKFSRSADAPAYQQGQNQLYNELNLGRREEYDVLDKRRGRDPEMGGKPQRRKNPQEGLYNELQKDKMAEAYSEIGMKGERRRGKGHDGLYQGLSTATKDTYDALHMQALPPRRAKRSGSGVKQTLNFDLLKLAGDVESNPGPSRGHMTEYKPTVRLATRDDVPRAVRTLAAAFADYPATRHTVDPDRHIERVTELQELFLTRVGLDIGKVWVADDGAAVAVWTTPESVEAGAVFAEIGPRMAELSGSRLAAQQQMEGLLAPHRPKEPAWFLATVGVSPDHQGKGLGSAVVLPGVEAAERAGVPAFLETSAPRNLPFYERLGFTVTADVEVPEGPRTWCMTRKPGA

SEQ ID NO: 5436 - protein, 1119 aa, Artificial Sequence
  Synthetic Polypeptide
MALPVTALLLPLALLLHAARPDIQMTQTTSSLSASLGDRVTISCRASQDISKYLNWYQQKPDGTVKLLIYHTSRLHSGVPSRFSGSGSGTDYSLTISNLEQEDIATYFCQQGNTLPYTFGGGTKLEITLEGKPIPNPLLGLDSTGSGEDLKNVFPPEVAVFEPSEAEISHTQKATLVCLATGFYPDHVELSWWVNGKEVHSGVSTDPQPLKEQPALNDSRYCLSSRLRVSATFWQNPRNHFRCQVQFYGLSENDEWTQDRAKPVTQIVSAEAWGRADCGSQSFGLLDPKLCYLLDGILFIYGVILTALFLRVKFSRSADAPAYQQGQNQLYNELNLGRREEYDVLDKRRGRDPEMGGKPQRRKNPQEGLYNELQKDKMAEAYSEIGMKGERRRGKGHDGLYQGLSTATKDTYDALHMQALPPRRAKRSGSGATNFSLLKQAGDVEENPGPTSMDWIWRILFLVGAATGAHSFEVKLQESGPGLVAPSQSLSVTCTVSGVSLPDYGVSWIRQPPRKGLEWLGVIWGSETTYYNSALKSRLTIIKDNSKSQVFLKMNSLQTDDTAIYYCAKHYYYGGSYAMDYWGQGTSVTVSSTREQKLISEEDGSGIQNPDPAVYQLRDSKSSDKSVCLFTDFDSQTNVSQSKDSDVYITDKTVLDMRSMDFKSNSAVAWSNKSDFACANAFNNSIIPEDTFFPSPESSCGTQSFGLLDPKLCYLLDGILFIYGVILTALFLRSKRSRLLHSDYMNMTPRRPGPTRKHYQPYAPPRDFAAYRSRVKFSRSADAPAYQQGQNQLYNELNLGRREEYDVLDKRRGRDPEMGGKPQRRKNPQEGLYNELQKDKMAEAYSEIGMKGERRRGKGHDGLYQGLSTATKDTYDALHMQALPPRRAKRSGSGVKQTLNFDLLKLAGDVESNPGPSRGHMTEYKPTVRLATRDDVPRAVRTLAAAFADYPATRHTVDPDRHIERVTELQELFLTRVGLDIGKVWVADDGAAVAVWTTPESVEAGAVFAEIGPRMAELSGSRLAAQQQMEGLLAPHRPKEPAWFLATVGVSPDHQGKGLGSAVVLPGVEAAERAGVPAFLETSAPRNLPFYERLGFTVTADVEVPEGPRTWCMTRKPGA
